United States Patent Application Publication US 2004/0031072 A1 - sequence listing, part 7

SEQ ID NO: 28485 - DNA, 887 bp, Glycine max
  Clone ID: PAT_MRT3847_125723C.1
cccacgcgtccgcccacgcgtccgggagagaccattcaatataaggacattggctcaactttcagtttttgaggcagatgtgtaaatctgactcaagaagactgttagttggtaacatccacgtactttacaacccaaacaggggagaagttaaattaggtcaaattcgttttctcttgtcaagagcacaatacctctcagagaaatggggtaatacccctgttgtgctagctggtgattttaatagtactcctcagagtggaatatataagttcttgtcatcatctgagcttaatgtcttgctgtattacagaaagcacatatctggacagaaacgctgtctgcaaagcttttcatggctcaaattgaaaccaacaattcaatggtgaactccaggcaacttcgctatccactcaaagttggttggcactgtagattacttatggtactcagatggtattgtaccttcaagagttcttgatactgtttcaataagtgatctcctaaggacaggtggcctcccatgcaagaaagtgggaagcgaccatttggccttggtttctgaattttctttctcagttaccaacaatgaacctaaaaacaaagtggcagcagcagcagcagcagcagcagcagcatcacctatagtagatattgaagagcctaacaatcagcagtcataagaaaacagctcagcatttgtgtttggaaacagatttttgctatccttgtttacttgtactatagtttgaattatatttacttagcattcacaaatttttcgaaaaaggctgtaatttagataaaggttgaagatcaagttgttagaatttctcaatgtatcatactaagttataaattcgaagtgcaaggaaaaatcttattag

SEQ ID NO: 28486 - DNA, 838 bp, Glycine max
  unsure (1)..(838): unsure at all n locations
  Clone ID: PAT_MRT3847_125724C.1
ctcgccgtctcctgcacgaaacccataacctcacgcaaccaaacacgcccttagctccaacccattcccctcgtcatcggaaaattcaaccgccacgccgtgaaatatggaggctccggcggtggttggcgatcttgttgggatccaattgacgttgtcgtgccgctacttgtttgggaactctaagcgtatctggtagtacaaatacaattacaaaccctaagcaaaagcgactttacttagcatagttttcaagttattccatgcttcatctcataaccccgaggcagattattatcaccatataataatacgagagggaaaaaaatttccaagaggcttgctctgatttcagcgtctacagttttagcagagaacattaatttttattttcatttctcacttttcacttttttcctttttctgtagttttctgactttcttcgtcttcaaattttaaaaacgatggcgagaatcgagaaatgtgataccgcagaacttcagaggtttaattgctttttacacagttctgtcttctgagttctgactccaattattaaaatttaagttcaagaatccgtaatggaaaagacgaacaagtgagagtgtgagattctgttctgagtcatctttgtgttgtaatcgcgaaaccttttccgatgaaaattcagccaatcgactctcaggttctggccgaggggactcagcttgagctcgccaagccggttgtgaagtcgcggctgaagcggctcctcgagcgccagttctccggtgttcttagaaaattcgcgccggnaaagatcgccggagacgatgaaacgcttaacggctccaatga

SEQ ID NO: 28487 - DNA, 1600 bp, Glycine max
  Clone ID: PAT_MRT3847_125725C.1
tcttcggccccagacatgatgctcaaggacggaaaggcacgatctgggcagaagccaggtcctgccacgcgagttttctccgggcaagaacacacgctcgctccgagggatgtgctaaagcccttgttgtctgactcgagaagactgttagttggtaacatccacgtactttacaacccaaacaggggagaagttaaattaggtcagattcgttttctcttctctggtgcccatttcctctcagtcatctgcggtgtggcccctgttgggcctgctcgtcatctgagctgtacgcctcgctgtggtacagataggttcttgccggcctctgaccctgtcgtcctgctctagttctaggcgagaataaacaaacagttggtccaattgtcacactatatggggctcaaattgtacacagggattcaatggtgaactcttggctacttcctatcactcaaagtttcttggcactgtagattacttatggtactcagatggtattgtaccttctagagttcttgatactgtcgtaatctttgctcgcctaagcgctgctctccttcattgaaagaaagtgggaagcgaccatttggccttggtttctgaattttctttctcagttaccaacaatgaacctacagacatagtggcagcagcagcatcacctatagtagatattggagagcctaacaatcagcggtcataagaaaacagctcagcatttgtgtttggaaacagatttttgctatctttgtttatttgtcctatagtttaaattatatttacttagcattgcacaaatttttcgaaaaaggttgtaatttagataaaggttgaagttcaagttgttagaatttctcaatgtatcatacgaagttataaattcgaagtgtaagggaaaatcttattaaaaattgaattactgcattattggtggtgctggcctgctagtaagtgttatattccatccccctccccccacccaaaagaaaatgttacgttaacggtctttcctctattttagctaactatcttttgaaaataaacatctatgcagggttttctttattaaattcaaaaacatatcaagaagccatgtttagtatgacatgtttctttgatataattgaatatgatgtcaaacattaattgctcacatactgtttgcatgtggtgctttatgtcatctttccataattccttcctctctcttattttcattaatttatgggcaattctcttctcagttgaccaattttcatctagtaactagtaataaacactatcagatcagttgagataactactaatgcctcattcataaagggctttatgttatctaggaaatacaattgactaggtatttcacctttttttcaactgtcaaatcagattcgctttgcttgaactagctattctcttgataattgaaatatttaatatttcaaaattcggtttctcttgtcaagaacacaatacctctcagagaaatgggggaataccccctgtgtgctagctgggggattttatagtacctctcaggtgccctactccagaaaacagatagaagcttggcatatacctccggggtcttcatttt

SEQ ID NO: 28488 - DNA, 1831 bp, Glycine max
  Clone ID: PAT_MRT3847_125726C.1
gtgcgaggcgtgtccttccacattggtggcggcggacccgacacgcgagcctacgacggagccatatccgccgctaaaaacgtattcgaaatggcttctgggctcggcttgcccagaatgcgcgttctggacatcggaggcggcttcacctctgggccgccgtttgaagccgcggcattgaaaataaacgctgcgattcaggccagcttcgggctcgagtacttaggctcgagcttacttactctcatttaccaattaaaaatgccttcactagttgcggaggcattcgaagccaagggcgcagaacccttgagcctgaagcccattttcagtgcctcaggcgtcaagggcaagcgagtaactgcactatcagcagaagcaaatgccctcactgatttcattcaagcaatcatagctgacaaaccagacatcgactctccattcagcgtcctcgatttgggcgtcgtaatgggcctcatggacaaatgggcctgcaagctccccacggtccagcccttctacgccgtcaagtgcaacccaaacctctccctcatcggcgcgctcgctgcactcggctccagcttcgactgcgccagcaaagccgagatcgaatctgtcttgtccctcggagtctcaccggacagaatcatctacgcaaacccatgcaaatccgagtcccacatcagatacgccgcctccgtaggtgtcaacgtcacaacctacgactccctcgacgaggtcgagaaaatcggcaattgccaccccacgcgcgagtggctcctccgcattaaacccccgcaagacagtggacggcgtgcccggaatggccgcaaacgccgcccgcttcccctgcaggtccgtgagctcctccgagccccccgcgtggcggggctccgccgcgctggcgtgtccttccacggtggaggggctcgtggtcattggcgagccgggtcgttatttcgcggaaacggctttcacgttggcgacgagagttattgggaagcgcgtgaggggggacgtgagggagtattggattgacgatgggatttacggaactcttaataacatcgtgtttgattacgctaccgtcacgtgcatgccactcgcgtgcacctcgaaaccggagaatcctacatgctgcagggatttgaatttgaagacttaccctagcaccgtgtttggacccacatgcgattctattgatacggttctgagggattaccagctcccggaactgcaagtgaacgattggcttgtgttcccgaacatgggtgcctatacgacgtcgtccgggactaacttcaatgggtttagctcctcagccaagtccatattccttgcatgttcgagcccggaacacaccatgttctaatcaatacaaatcccaaactatcccttgctcaatgtacttacttattttattatcaacttgtctctcttttggtttcggaaactcaataatggcggaatggctgctcgtggacgccgcgtggtttctctcttgattgtattactactatctttttcttttcatttatattttctaatttggagacacctacgtaccttttgatattcgaaataaaatttcgtttattgttgatactcttggtatttgctgaatgtactttagttattattattaacttatctctcttttggtttgggatactcaataatggcggaatgggtgctcgtgtacgccgcgtggtttctctcttctgattgtactttctttttctttccatttatgctagtgttttctaatttcgagacacctaccttttgatattcgaaataaaattttgtttattgttggtactatttttat

SEQ ID NO: 28489 - DNA, 500 bp, Glycine max
  Clone ID: PAT_MRT3847_125728C.1
atatatatattatagcttattatgtttctataatcatggatgggaaggaacaaaaaaacatgaaagctggtaatcactaacccaaacgacctgacccaagcccttattgaaagattggaattatttctggccttaaccttaaagccctggctttgtgactcctactaaaaaaagaaaacacaatctcctatgctacgccaattggatctcctgctgggtaaacatgcaccatggaaactgtcacactgacccctaccctatcgatactataggtcaaggttattttcccctactaggatgtatcctacctgaagagagtacccttgtatggaccctcaacaagcacactgttgtaatcagcttggactttgaaaaccttgctgagccttgctgcaagctcgccacggtggatagaatgcactcttctcggcaggcgctagctcatcacatacaacttcttctatactttccagacccttctatttccacaatgcacgctg

SEQ ID NO: 28490 - DNA, 194 bp, Glycine max
  unsure (1)..(194): unsure at all n locations
  Clone ID: PAT_MRT3847_125729C.1
cccggaccagcaacgtctcatcttncgccggaaagcagntcgatgacggccgcancctngncgactanaacatccaganggaatcaacccttnanctcgtcctccgtntccgtggtggcattcagntctncgttaagancctcaccggcaagactattacnctagangtcnanagctccganaccatcgacnac

SEQ ID NO: 28491 - DNA, 265 bp, Glycine max
  Clone ID: PAT_MRT3847_12572C.1
aaaacacgtaattaactatttctataatgggtgaaaacaaaaattacaattttaagcattgaaaagctcctgctcaagtggcgcatatgagtcacatattacttcacacatgagagggtcgacttccgtttgtgcagaacattgcattaaagatgcatatcatgatccgaggtggcagacaaataaatcaaacacaccgcccacttatgtccccttctggcacccccacggccgctcggccccgccccccaatttcccaccgctc

SEQ ID NO: 28492 - DNA, 1739 bp, Glycine max
  Clone ID: PAT_MRT3847_125730C.1
gtctcatgaaatttactggaaggtgcgaggcgagctctgagtcgttcaagatgcatcacggactgaaaaagacgacagaaggggggctttttcttctcgccactcccctcaattcacccccattctagaggagcgtgaatttgacgacttgagtggccatgacattataagccactccagaagctcccaccctccaacccccattgtccacaagcacactaaatccaatcacaacaaccacaagaaaaagagatcagattccgaggaagatggctccgtctcttgcaacaagtgcagacctcactcccgcgacaaaatcttcatccttcccttggatcactcctccaccaacaactctcacaaaccctcttccttactcgccagccccaacggtattttcaggtcccttgtttccaagctcacccgcaagagtcccatgtcttcttcttcatcccaagaccctctcccaccctccagagaggaacaatggaaaatggcagtcgccgaactctctcacaagctgctccacgccaccagaaaaagagacgaggctcttctagaagcttctagactcatgcactccatgagcgagttggagaagaagctcaacaagctcgaactctattgccacaccttgaaatctggcctcgaacaatgcaccaacaacaacattactacttcccctacttcccttttcaaatctcaaaccctcgaacaggacaccgtgattcaacacttcttggtctcggtgtcggaagcaagatcaagtgtgaggcttttgtctcgttccttaaccatgcaactgaggcacatgggaagcaaggtgtacgagaaagtctccttccttctccaaccatacgacataaaaatatccttctccaagagtccaacaagaagcttacttttctacctagaagcactcttgaacagaaccttctacgaggacttcgaaacaatagggttccagaagaacgcgtgcaacatgatactgaacccaaaggagcgatgcgaggcgagttacgagtcattcaacatggttcacgggctgacgtgggaggaggtgctgagcaaaggaacgaggcacttcagcgaggagttcagcaggttttgcgacaggaagatgagcgagatagtggcgatgttgggctggaaccgggcctggcccgaggcactcttgcaggccttctttggggcctcaaagagcgtgtggaaggtgcacttgttggccaactcgctgcacccgagtctgccgatatttagagtggagaaaggagtaaggtttgattcggtttacatggaggatatgggtggtggtggtggtgacaaggccacttccaacttggtccctgctctggtcagaataatgcttgcgccaggcttttatgtctatggcagtgcagtcaagtgtaaggtcctttgcaggtacttgagtactagtagtaacaaggaagacaaacccttaaccccaaccccttcttgactttggatgaatcactttctttctggttttgtttttttatgtcagctaatattgttcatgatgttgtatattattattatttagtattaagcaatgttggtgctgctgcatgcttgggttgggatggttccatggtggtggtactactatatcgagattttgggtcaaagtaaacaatttggcattttctggtttcgctttgttttatcttctgtctagtctattcgaactttttatcatttttttgtttttgtttcct

SEQ ID NO: 28493 - DNA, 468 bp, Glycine max
  Clone ID: PAT_MRT3847_125731C.1
ctatttttcctctcaacaactccattttgttgaggagttctgggtgcagaaaaattatgctcaatgccatgttcatcacaaaatgattcaaaatctttgttttcaaattctcctccatgatcactcctaatagatgcaattttaagatttttcttattgtgaataactttagcaagtttcttgaatgcatgaaatgcatcacttttgtgagtaagaaataatgtccatgtatatctagagtaatcatcaacaataacaagagcataatagttccctccaaaactcatagttctagaaggaccaaaaagatccatatgtaatagttgtaagggttaagttgttgacacaatattcttagatttaaaagaaacccttacttgttttcctttttgacatgcatcacataatctatctttttcaaatttgagttttggtaaaccaataactaaatcttttgaaattagttta

SEQ ID NO: 28494 - DNA, 164 bp, Glycine max
  Clone ID: PAT_MRT3847_125732C.1
ggctcgagccgccattcttttttcctcgatctcaggtctaactatatgtgctgatctgccaccaagtacagagcaattaagaacgcctgacataagcgtgactaactagaacaacgaagaagaccgatggcacactacgatcttgttccctgagatccctgcat

SEQ ID NO: 28495 - DNA, 245 bp, Glycine max
  unsure (1)..(245): unsure at all n locations
  Clone ID: PAT_MRT3847_125733C.1
ggtggagcggggnctggggcaatttttaccggattctctttttccagcttatcatgtggcggggtaggagattgtacccccaaacagattgtatcttctctttaaaaggatcatgtcttttttctgatgatacaagtatttactgaggacaagaatatacatcgagtaatataaagtttgccttgtgtattgaacctgaaaacaaagaacttccatactattctgcccatgttgctaaccctaaa

SEQ ID NO: 28496 - DNA, 328 bp, Glycine max
  Clone ID: PAT_MRT3847_125734C.1
tttcgaattttttttttcgatttttttttttttttactctttagcctttgagaaacatcattaaagaaaactgcgaaatttccgaattagaaattaacaaaggtaagcactggattatttgcactcttcaagtccataacgaaaatccggattaagcccaatgtttcattaattcctgaaattagattaactgcatcaatttatctaaatgagcccaaatcataaaactgcctagttaattgacggttaagaccaatcaataattagaatggtgcacaaagggtttagaacatagactaaagcgatcgcacatcaaatgcccccatac

SEQ ID NO: 28497 - DNA, 239 bp, Glycine max
  Clone ID: PAT_MRT3847_125735C.1
cccacgcgtccggtttcgatgatgggtggttaatgttacagatcatatgcgagtaatgctgtggcatgctataatgacggagatgaaattaacatccacttcatttcactaagaaacttactaagtgatgataactctagaaataattgccctatactaattgctattaatgcacatttaatgcttacatatgttgatagcgtgtaatgcccatacatcagggggtagcatttagatca

SEQ ID NO: 28498 - DNA, 226 bp, Glycine max
  Clone ID: PAT_MRT3847_125736C.1
aaaaaacataaaaaaaaaaaaaatattttaaaaacaacagacgataataaataggcaggcttaaatacacgtgcatgcgagcaaaataactattataaaaagtcaactaagtttaaattcattaaccgtcaattaacaaacttaaaggctgtaatacctatggctttaacacatcttaaccgtctttttcgacatcgtacttttattttgtggccccataacataa

SEQ ID NO: 28499 - DNA, 1230 bp, Glycine max
  Clone ID: PAT_MRT3847_125737C.1
tacggctgcgagaagacgacagaaggggatacaaagttacaactcaaatttctattttcatacaaagttacaatttgttacttacactactacactttagttgttccaacacaagtgtttgtggcaacaactttgatttgaggttctactttttttttgtgtaatcaagaatatttaaggtttttatttgatattcgtcgagtcagtccattttttgttttttgagtaaagtgatatcctctgcttcttcattcttaactccaaactttagacgctccaccgtgtttttttgttacctatactacaccctttaagtgtttgtagcaaggacttttgtgtgaggtttgtcataatcaagagatatctaatccttctatttgatactcaattactcttctggtcagcctattttgaggtaaagtgatatctttaatcgcaattccgttcctaagcttaagaatcgaatcactgattttaggtaagaacgatagtttcaaatgtgatttcattcctagaccgagaatcgagtctcttcgatgcattataacatggggaagcaagttggttttgaggatgttcttagatattttgacgaagatggtgatggaaaggtttcgccttcagagctgaagcacgggctcggaatgatgggtggggagcttttgatgaaggaagctgagatggcaattgcggcattggattctgatggagatgggttgctgagtttggaggatttcattgctcttatggaagctgggggagcggagcaagaagtggtatgacttgttaggagctattgctcttaagaagccgggggagagcagcagaagttgaatgacttgaaggtggcttttgagatgtatgtcactgaagggtgtgggtttataacccccaagagcttgaagaggatgcttaagaagatgggcgagtccaagtccattgatgagtgcaaagccatgatcaaacagtttgatttgaatggggatggtgtgctaagcattgaagaattcagaattatgatgcagtgaggcatgtgtatctaaatgttgattatgtatagtgtgtatttgaaatttgattgatttgtttgcacatcatatgtataataacactataactcctatgatagtactattttagctgcttctcgatagtgatcaaaataactatcagattttgccccaactgtgctatttcaatcattattcaagttttcttaaaaaaaaaaaa

SEQ ID NO: 28500 - DNA, 579 bp, Glycine max
  Clone ID: PAT_MRT3847_125738C.1
gttggctttgaggatgttctaagatacttttaccaagatggtgatggaaaggttttgccttcagagcttaagcacgggctccgaatgatgggtggtgagcttccgatgaaggaagctgagatggcaattacggcattggattttgatggagatgggttgctgagtttggaggatttcattgctctcatggaagctgggggagaggagcagaagttgaatgacttgaaggtagcttttgagatgtatgacactgaaaggtgtgggtttataacccctaagagcttgaaaaaaatgcttaagaagatgggtgagtccaaatccattgatgagtgcaaatctatgatcaaacagtttgatttgaatggggatggtgtcctaagctttgaagaattcagaattatgatgcagtgaggcatgtatatataaatgttgattctgtatagtgtgtatttgaaatttgattgatttgtttgctaaatgttgattatgtatagtgtgtatttgaaatttgattgatttgtttgcacatcatatgtataatcacactataactcgtatgatagtactattttagttgct

SEQ ID NO: 28501 - DNA, 436 bp, Glycine max
  Clone ID: PAT_MRT3847_125739C.1
gccatctaaagtttcacttaaaggagacgaaacggaggcagagaatataacagaaaccaaaagttgcctggaaaagaatgtgcccgagtcacccaatgaacctgaacaaggggagaaaactagttcagacatggggaacgctgagcatgttctacatattaccaactctgttgagggaaagtttatatactcacttaagaagtgtgatgatcacaagaatggagaactccactatactggacaacaaactatgaccataccagagcatgaggcatcggatgcattatatgatgaggaagcttcaataccatagcaacaagaccctgatgctgaacatgatgaggaaactcctaatccagtgcaagaccctgatgctgtacagaatgatgaaactccaacaatgtgattgaaacaagctttctgatgcatttacacg

SEQ ID NO: 28502 - DNA, 354 bp, Glycine max
  Clone ID: PAT_MRT3847_12573C.1
ggccgtaaaggtttttcattaacctttatttttcaacccaaaaaattccaattaggctatttggctagtaactggccatttaaaggggacttccttaatttacccccacctgggtggggggatggccccaaaggcttttgaaattcagggttggaggctaacaccatttttccccaagcttaaaagcaaaattttagaccaaaccttttgaaaggacttgaaggaaggataaccggccggggagagagatttttaacaggcttcctttcccaaccgagtaagcataattagagttaggccttctccttgtctctccgttcatttaaataattgaattttggccctttggttatc

SEQ ID NO: 28503 - DNA, 383 bp, Glycine max
  Clone ID: PAT_MRT3847_125740C.1
attctctggtctgggctttcatagcttaaacattggcaaacatgacagcgcacccccttaacgaaaatggcgctcaaaacatggcctttgaaagctaaaacatacaaatctgccataagttcctgggaccaaaaaaagcctaacagcttttttaacagctaaaattaaaatttttttgctaagattagccccctccccattaaagaagggccctcccacaaaagggttctaaattttcccacttagcccccattaggggaaggccttgagcatccacaaaacccctgggggcgctttttgctacttctcttgccactgggaataaagcccttaagcaagaccactgtttttccagggaatcggctcttcccttggctcttttc

SEQ ID NO: 28504 - DNA, 416 bp, Glycine max
  unsure (1)..(416): unsure at all n locations
  Clone ID: PAT_MRT3847_125741C.1
actaggcggcggccgccctggggtcttacccctttaacaaccaccctgtaataacttttttcnggngacgacaaaaaaaaaaggggggacggaaggggccaaaaacgccaaaaaccccaacccccccaaaacccaaaaaaaaagcccacggaccagacaaaccaaacgannccacgnaaaggggcggggaaaaccacccccccggacaagcacaaaacacgcccagacccacccgacaaaaagaaaaggaacgcggcccgggaaagcaaacggggagaaaacaaacgacaacggggcccccgaagagaggcccaaccgcccacccataaaacataaaaaaagcttgacaacggaaaaacccagccgggtcacccgaccacggccaaccccacccggacagggggcagaacaaccaa

SEQ ID NO: 28505 - DNA, 124 bp, Glycine max
  Clone ID: PAT_MRT3847_125742C.1
gtgacgattacgcaggcacgaatggatcgcactcagcacactcttacacagtgcactggatgagaggttatcatgtaagtcagcttgcatccaaggctgcacggaagcctgtagcaacatactg

SEQ ID NO: 28506 - DNA, 445 bp, Glycine max
  Clone ID: PAT_MRT3847_125743C.1
cattttacataatagtagtagtatctatttaaatagaatttgcaagagatgaactcataaaaaactgaggaaattgttgttcttccctttcattttaactaaaacgaataatgtgatattcgaccaaaaaaaattattagatgtaaagaaactaattttgtgattctgccttttcagagctttttccataaactaattctttccactgtcaagacaaatactaaatatatgttacttttcattgtttaaaactagcataattattataatcttttgaacatatgcataattaaaaacacactttttcctaacgaaatcaaacaaaaaggtccccaatttatttttttcatgcagtccaacaaaaactcattctttactcatctgctatccattgaggtatgaaattagaaccaatttattatttattacttttcttattattcgg

SEQ ID NO: 28507 - DNA, 428 bp, Glycine max
  Clone ID: PAT_MRT3847_125744C.1
ccgggaaagcaacaacttccccggtttgcttattaatagctctccaaaccctcccaaaagtcccatcaccaacttccttaattaacttggccctctccattgtccccggggaacacaaagcagcccttccttttttcaacaaatgaaaccaaaacccctagggataaagggcttttatctcatggaaatgatgctcaaaggcgtataaaattttaacaggttcctgctggcccagcaaaatccaccattaattttttgtcttagcaaaagagggcttggaagcagaacctttcagagggaggggctgctcacccttattcattaataaacccacggttttaaaataggggcaggacaaagggggtagaattgaacaagacccagggttcttcctgccccttttaaggccccactaaaagggttgatca

SEQ ID NO: 28508 - DNA, 476 bp, Glycine max
  Clone ID: PAT_MRT3847_125745C.1
ggatgctgcgcgagacgaaatgctgcaaggagccattctaaagcttgaagggaacctcctctatctatgaacccatcatcaaatcaaatgcttttgaaattcttaaagaagaaatcagtgtactgggctagcgccagaaactcctcaaattcaagttatttataggaaccctagtggtggattgtgtaatctttgtgaacaccatgacttgatttgttttattatttgatttgatgtgaatagaaaatccaaaatcagaaatctctacaagccaaagattaacgtctggtttgttcgctaagataatatttgaagttaaaaaccttttatcagtgtagcgtttgttaatgcagcataaagttagtgttaaggaaattataagtcagtttcatttaaaaaaaaaaaaaaaaaaaaaaaaaaaaaaaaaaaaaaaaaaaaaaaaaaaaaaaaaaaaaaaaaaaaaaaaagaaaaaaaa

SEQ ID NO: 28509 - DNA, 116 bp, Glycine max
  Clone ID: PAT_MRT3847_125746C.1
cgcagaataaaatttctcatcgacgatggtgtataccttacaacgcgcccttcgcgccagcatggtccggccgtcttcaaccggcccattgcccgaaattaaccgaggcgaaatcg

SEQ ID NO: 28510 - DNA, 406 bp, Glycine max
  Clone ID: PAT_MRT3847_125747C.1
ctctttttttttgatacaccgtgggcttatgtgatgatggctctaaatctctatcatactgctgcagtcatggccatttagttcgctgcttactcaaagtctaactgcaccactgcaaagttcagaggtggtattgcttctaatgagaatagcgcgtactgctgcatccagagggcgagccagtctctcattgctggctccacactctcctcctggctatccgactcgagctgatacagaacatggttgcgtgacttgctcaggaccataacccatttcaagtgcaagctggtcaaatctaagattaacgctcacactctactatgtggcataggactccgatgagagaaagttgaggcacttgcagatggttcactatgtactcttattgcagaccatggaaaag

SEQ ID NO: 28511 - DNA, 444 bp, Glycine max
  Clone ID: PAT_MRT3847_125748C.1
aagggccgaaaacttaacttctcatttatatggttaaggcaaaacccttttgcttattcacggccaaaaaagggcattaatggataaataagggtaacaacaaccttttttttgtggcaaacacatattacacgctcaaaacccaaggtatttttaatgcggccaccacgtaaaactttttatgaaggaaccgcccaacttgaaagagtttggggcctaccattgacgaatcttgcctctccttgggatgcaacgtgctggaaaaccacgttatacccttcatgctcctcaccaaaatacttgacaaccgcagctgagcataccaccaaccctccttgcttttactttgaaaacaatcttgaacaaaccttcccattctctaagggtctttggaataagatcggttggtgggctaacattgagccctgcacaaagggccttaac

SEQ ID NO: 28512 - DNA, 272 bp, Glycine max
  Clone ID: PAT_MRT3847_125749C.1
cacgcgtgcggcaaccgtgcgagctgccggacacattttaattaaatccagcgctccagcacttcaggcgctcacggcctgacagatacatcgtccgctccgctacttatggatgctgcaaagcttctaaatgagaagttccagttcgaattcctgatatctgcctgctgacactgttctcaactgctctattcattaagagacagcttttattctcttgcgcgacgaagaagactcactgctggactacttcgtggatagtatattatccc

SEQ ID NO: 28513 - DNA, 330 bp, Glycine max
  Clone ID: PAT_MRT3847_12574C.1
gttatgccagctggcttgcgaactcttgccaagccttacgagttggagcatgccatagatcctaggatgcatgacacacagccacataccgatattggactggggaatgcccatttacaagatccaaagcttgaccagtctgatccaaacactcattaaacttggccctgcacgtgagaatgacaagcaacatcttacatggcaacctaatgcttgcaaaggaatttcacaggtaagtccagcattcttgccaaataacgtgcctactggtgcacctacaggactaccagttgcagtagacacagaattggctatggccatcactgcatc

SEQ ID NO: 28514 - DNA, 236 bp, Glycine max
  unsure (1)..(236): unsure at all n locations
  Clone ID: PAT_MRT3847_125750C.1
tcctctagagcggccgctnttttttttttttttttttttttttttnggcgagcggctatatggagaagattgaaaaatccctctatgatattagcaacagagttgatgaaagagggctaagctctacttcccacaaaaggctctagctcaatattaaaggggctcatatcgaacttcaactggtggaatattaagttccactctatcaatacgctccttgagcttgaggaggaacc

SEQ ID NO: 28515 - DNA, 334 bp, Glycine max
  Clone ID: PAT_MRT3847_125751C.1
cttgtgcacacccttttgacctcgaatcagacttctctctttctctctctgtatcgaaagcgtcctttacatatacataaatagctggtaccctcagcaggatcgagtactttatattttaattccggccatgcaagggtctatatgtctataactaacagacaggtcagcatgtacctgctaggcgtgacttagatgcgtgtgaacatgcaatggaaaaaagcttgtaataattggcatatcatcccacaacattgatgatacgcatgtgagattcactgactatacttttattgttaggtcttaagacagctctgagagtctgttaactgat

SEQ ID NO: 28516 - DNA, 369 bp, Glycine max
  Clone ID: PAT_MRT3847_125752C.1
accttaaacggggaataaaattttatagatggggaatttgagtggccattggggaatcaatggcgggggtaattaaaagggagggggggaacgggtttatccaataaactggaaccaaatttacccatgagttggttattgggaaaattgaaagcatttggcattgcgttccaacaatcatggggtgaatacatgggattattctttccactacaagggtgacagccggagaaatgcctaatgaagggtcttctccaacttcttttagcgttcccagcatttttaaaatacttttcctttatttccccgggtgttacaattaccttatccgggagaggccttcttaacctgtggaccccttttttcatt

SEQ ID NO: 28517 - DNA, 506 bp, Glycine max
  Clone ID: PAT_MRT3847_125753C.1
ttatcgaactttgtacaatgaatttatcacaactgtatcaagagaaaaatatgttacaagacaatgttgtctgaattctcccctatttaaagaaagctctagctgggggtgccatcttacctagctacaaaatggtttgacgcctaggacctatacacaactatacagatcatttcttctgttgcttcctttggtctaatctttcatgtttcaccatacaagaacaataaatgggaaaaacaaactgggtgaggagtgttgctcactgcaaatgtcatcatcagcaatgccgcccagccagagatactagagtgctactgccttcaaattacactctttagtatgcttatgcttaccttgtcaagtgatggtgcagtaatcacaacacagggctctttaaaatcaccccagaaaagaactcttgtatcttcccttgctcgttccactgtttcacccattcttatagtgacatatatatgtacataagtcgaattctaaaacctatg

SEQ ID NO: 28518 - DNA, 815 bp, Glycine max
  Clone ID: PAT_MRT3847_125754C.1
tgggatatagaggggtgtttgtctaagttgaattcttcaatcaagccatcgttctgtgtgactcttcttggtggactgtctcttaagatgctcaatggtgttctcagatttggctttcttattctaaaccagcctgttttggttgacacattttatagttatccaggattaagcaaacctcatactactgttagatatgctacaaagaaattgctggaacttaaagagcagaaaccatcaaacctatcagatgctattgttgaacaaacacagatattgaaaactaggtccaggtgcttgaaagaggttcttgagaaaagtgggtgggacgtgcttgaatcgtgtgcgggtgtgtctgttgtggccaagccctctgcctatctcaacaagactattaagctgaaaatttcacccgaaggtgaacgaagccacggaaatgccactaaggaaataaagctcgatgactctaatattaggactgtcattctcaaagccactggattatgtatcaatagtggttcgtggactggaattcctggatactgtcggttcagtattgcactcgaagaaaatgatttcaaaaaagcattggattgcattataaaatttaaagaagtcgcactgggttaaaacttcgtgttttgatcccattcggtgtatgtcattcttttggtcttctctttttcactgttttgggggtaagttttttattcctcctatatgcacggttcaacagaaataattcgagtgcgcaataatgttttgtgatgcaaactttctcagttcaaattataattaaattgttttctttacct

SEQ ID NO: 28519 - DNA, 904 bp, Glycine max
  Clone ID: PAT_MRT3847_125755C.1
accagcaagagttataattgacactgcatcctctggtttggaatttgactgtgaaggctgggtggggtggtggttgggatatagaggggtgtttgtctaaattgaattcatcaatcaagccatcgttctgtgtgtctcttcttggaggactatctcttaagatgctcaatggtgttctcagatttggctttcttattctaaaccagcctattttggttgacacgttttatagttatccaggattaagcaaacctcatactactgctagatatgctacaaagaaattgctggaacgtagagagcagaaaccatcaagcctatcagatgctattgttgaacacacacagatattgaaaactaggtccaagtgcttgaaagaggttcttcaaaaaagtgggtgggatgtgcttgaatcgtgtgcgggtgtgtctgttgtggccaagccctctgcctatctcaacaagactattaagctgaaaatttcacttgaaggtgaagcaagccacggaagtgccactaaggaaataaagctcgatgactctaatatcaggactgtcattctcaaagccactggattatgcatcaatagtgggtcatggactggaattcctggatactgtcggttcaatattgcactcgaagaaaatgatttcaaaaaagcattggattgcattctaaaatttaaagaagtcgcactgggttaaaacttcgtgttttgattccattcgttgtatgtcattcttttgatcttctgttttcactgttttgggggtaagtttcttattcctcctatatgcacggttcaacagaaataattgatctttcataatctgagtgcgcaataatgttttgtgatgtaaactttctcagttcaaattataatgaaattgttttctctatctaa

SEQ ID NO: 28520 - DNA, 741 bp, Glycine max
  unsure (1)..(741): unsure at all n locations
  Clone ID: PAT_MRT3847_125756C.1
gatggatatgctgataaatagttttttaagactttatattatctcaactctcaagaaacattgatgcacaccaaacaaataactgtttgagtgcagtactgcagtaataagtaattatgtgcttgttgagcctgctgcttatttgctaggttgattcaaataccttgatttagttgaccactcataatttatttttttaccatttcaagttgcactctctatctgttgcttctcatataattttttgttatagtggtgaacccttgactgtccaagttccaggaactcaaactcgcagtttctgctatgtctctgacatggttgatggacttatacgtctaatggaaggggaaaacactggtccaatcaacattgggaacccaggttatattacaatacattttgagtgctgacttttctgccaaatattaatatgtgttgatacttcattcttccaggtgaatttacaatgattgaacttgccgagaatgtgaaagagcttatcaatccaaaagtgcagataaatatggttgagaacactcctgacgatcctcgtcaaagaaaaccagacattacaaaagcaaaggaattgctgagatgggaaccaaaggtcaagttgtatgatggccttcctctcatggaagaagatttccgtcagagcttgggagttcccaagagcaactaagcttcttttactccttcattncttatcatataatcataatgaatattttgatagta

SEQ ID NO: 28521 - DNA, 1877 bp, Glycine max
  Clone ID: PAT_MRT3847_125757C.1
gtgagtttgaaggatcccaaaattcattttttttattattaaaattattggttctttttggtatggaattaagtaatttaaaaaataaaatttaatttagcgtttggtggggaatttcaaagtactggatcctctttcttctataaattgttttctgatcgtaggtcgtttggatcagatccgtgatttgtggttttagatttgtgtgtctttgcgataaggtccactattatttctcacactctctctttctcttctgaatgttattgaagtgtctgatatttattacttgatttgattttatgaaattttgtaactagcctaatgtatgtgtaagaaattttgaccctttgagaattggttcaggatttgagcttcagtgggtttttttttttttacaatggcaacgaattcttctaatggagcaacaaagcaacctcccatgccatctcccttgcgtttttccaagttctttcagtccaatatgagaattctggttactggaggagctggatttattggctctcacctagttgacaaattgatggaaaatgaaaaaaatgaggtcattgttgctgacaactacttcactggatctaaagacaaccttaaaagatggattggccatccaagatttgagctaattcgtcatgatgtcacagagcaattgttgattgaggttgatcaaatctatcatcttgcatgccctgcttctccaatcttctacaaatacaaccctgtaaagacaataaagacaaatgtgattggaacactgaacatgcttgggcttgctaagcgtgtgggagcaaggattttgcttacatctacttcagaagtatatggggaccctcttgtgcatccacaaccagaaagctattggggcaatgtaaaccccattggagttcggagttgttatgatgagggcaagcgtgttgcaaaaactttgatgtttgattatcataggcagcatggaatcgaaatacgcattgcgagaatctttaacacatatggaccacgcatgaatattgatgatggggcgtgttgtcagtaacttcatcgctcaagcaattcgtggggaacccttaactgtcccagttccaggaactcaaactcgccagtttttgctatgtctctgacggctcgagtggacttatacgtctaatggaaggggaaaacactggtccaatcaacattgggaacccaggcgaatttactatgattgaacttgctgagaatgtgaaagagcttattaatccaaaagtggagataaatatggttgagaacactcctgacgatcctcgtcagagaaaaccagacattacaaaagcaaaggaattgctgggatgggaaccaaaggtcaagttgcgtgatggccttcctcttatggaagaggatttccgtcagaggcttggggttcccaagagcaactaagcttgttttactccttcacttcatatcatataatcataatgaatattttgatagtaacggggatgtggatgaacctgttaagtgttaagagatgttttatattgaaaattatggagaggaaggttaaacttgcagccggcaaagccaacttgaacttgctcttcaaattgatacaataagattgcttctccacccaacttctattggaaatgctgttgttgagatgagttgaaattattttttattgaaatttaggtgttacaagttctctttcgactttctttacccattgtatgtcagggtaggtgtgtcttaatgtgttctctgtaccgaaatacaattcagattgtgtttggtgggttcatatttggatttgaggaggtttgaatctccttaagaaataaagttacgatgttctgatatgaatgtgaaataggttctacttg

SEQ ID NO: 28522 - DNA, 845 bp, Glycine max
  Clone ID: PAT_MRT3847_125758C.1
acgagttgcgacattctacgtttttcgaaaaaagtcaaggctgtcgccatgaggattcttgagcacatattcaaacattacaatgttaattgccaagaagtttctactgtacaggcttttgaaatatctgtgtgttggctagcagcttgttcgtgggaacatgagattgatatgaaagattcacttgctctagcaaaactgtacttgaacttcgatggcaaggaagaggaagccaccgatgtttactcagaactgtggaagcatgtgaaggatttttctaattgtgtacaaaatggactttgcgtcgagaaatgcaatagaagtggtgcttcagactccaacatgcctgagctgaatgatttggcagaggaggagaagcagaaggattttctgggtacttgtgtttcaaaacttgtgaaatctgtcacaaatgaactcaatcttcaaatgaaatctcccacaacagtggtttcacaagacctgagttgtactcatgaaatttgtttatctccaaatacaacctggtagttttcctgtggaaggagatgctatctccatggaatctggctcagaagatgacagagtgaacgctataacattaataactgcagaagattcatccgttgatcacgggagtaatgatgtcaaccctgttactggttctttggaaagacagagccctattagaagtacagatattacacaatctgatggcaatgtttttgaagatcctcaaattttagtgaataaagtggttgctattgacaatggtatgaatatgtctactcattctgcgcagcttgacagtgttgaggcagatgctggaacttctgctagtactgctg

SEQ ID NO: 28523 - DNA, 713 bp, Glycine max
  Clone ID: PAT_MRT3847_125759C.1
cgaggccaagagcgtttttgatcgaaacactattgtattgtgatgaaaacgaaggtccttgatttcttagttgctacagttctggtagatgagaatgccctgcgcacgatatgttccctctccgaatgaacactgcttctggtgcccgaactccgcaggagaaatgcgcaaggaggaggcttgcgtgtggaagcacacagcatatttggctttgagaccattcctgaagagtgtgtccaagcagcaaaggaatacatcgcatggcgaacaatatctataccactccttaacagataaccaacgagcttacttttatgccagagaccttgaaggccatcccagggacacatttgagaccagtatagatggcaccgtactctctaatattccatactacacaaaacatggatatggggtggagaaacacaactcgagcttgtatgacgaatggatttacaaggccaatgctccggcactgcccgagactcttatgaactacaacacgctggagtcccgtgacttaaacattatatatactgtcaggaagaacactggaccaacaggccgtaccagaagcacacttaaagaatgctggctaccacacatgggatacaattaattgctcaaggatccacaaagatccttccactccagatgctggtgcatacaaaacaggatcgatagagagactgataaggcagggatacaacatt

SEQ ID NO: 28524 - DNA, 937 bp, Glycine max
  Clone ID: PAT_MRT3847_12575C.1
gaatcatcaaaaaacggctcagaaattgttcttgctagaagacctgtaatagcccatggatttacatctgaatacaatcctgcaaagctgttgcttaatggggttggatggtcaattccacaatcccaaggaagaagtgccaaaaatttgatccctcagagacaaccatttaaagttcatcaaagtccagtagcagtgcatgaaggaatgtcataccaaatgaaccatgaaccctggttttggttccctagtccagccaccatctgggatgggcctgaatttcttgggagggtgggggttcagaaagacgaacttccatggaagatcagagcatctgttatatactctatacgtgcacatcatggagcagtgaggtctctggctgttaaccaagatgaatgtactgtttttactgcaggaattggccaaggatataaaggaactgttcagaaatgggaattgagccgaactaactgtctgtccggctatcatggccatgaggaggttgtgaatgatatttacatcttatcatctagtggaagagtggcttcttgtgatggaacaattcacatttggaatagtcaaactgggaagcagatattagtatttgctgagtcccaaacagaatctggccatcctacaagccatccatcctcttcatcaaaaattaacagtgaccaggcaaatgtgcttaatttgaatacactatccagtggaatattgtctagtgcttttgactcaagcctttatacttgtatgcatctattaaactccgctgaaactcttgtagttggaactggaaatggttctctgaggttctttgatgttgctcgaggtcaaaagcttcatatctggagaggcgaatctactgatctagtttccttcactatttctgcatttgtcactgctctgcagagcagcagtgaattcacttgca

SEQ ID NO: 28525 - DNA, 166 bp, Glycine max
  Clone ID: PAT_MRT3847_125760C.1
ggggttgtttttttgggatttgaagatgtttttgggcttggtcaaaaaaaaacaagtgagtagggatcaatctgggccttccttcaaaaaaagattggatcgcttttcggaagatctaagggtttctgatgggaacccaatgggccgcgagatttttttggggggg

SEQ ID NO: 28526 - DNA, 1147 bp, Glycine max
  Clone ID: PAT_MRT3847_125761C.1
tttcacaacaaaaacaaaaacccttgcacgatatggccctaaacttggagtgtgtcgtgtggtgtgagacagtgtaactcggaagcgcagcagcaatggcaagagcgactctccttcacttgctgcggtcacagagcctccgccacgtgtccaaaaacgctccttcagcatatcgttgttttgggtcctctacctgtcaacgacccattagccccaatccatcattcaaaacttcctcccatcttgctattttccaaagaagatgggcatcacaaatcccaactacagaggaagacgacaagattagcatcggacctcgtagtggaggacaaccaggggagggtgacaaggaaactggagtcgtttattatggcccgatctcaaacaccataaagaaagtaaaacttctgtctctctcaacttgttgcctttcggtatctcttggtccggtcataaccttcatgacatcccccgatatgaatgtcatcctgaaaggtgcagtagcatcttctgtgatattcttgagtgctactaccaccgctgccctccattggtttgttagcccgtatgttcacaagctcaggtggcagccaggttcggacagctttgaggtggagatgctgtcctggctggcaacttacattccaaagactatcaagttttctgatattcgaccaccgcaaaccaataggccttttgtgacatttaaggccaatgggaatttttacttcgtggatgcagagcactgtcacaataaggcacttctggctagactgaccccaaaagaagtgagtaatgagtctcctttcaagaacttgtgatttgaaacatactgttgtgagctcgcggtattttactgttagcattagaagagtatgctatagccctgctttaatttctgtctgtggctggaatttgttttatactttttgagatttgatctcttgatctgataccataaactgttaggtttgcttaattgcttaataaattagtagcagtggcattttgcaaacatcatatatggggagagtattttgtacaaatgtgattttgtgcaagtttttgtcaaaatgattgatgataaaaaaaaaaaaaaaaaactcgaaaaaaaaaaaaaaaaaaaaaaaaaaaaaaaaaaaaaaaa

SEQ ID NO: 28527 - DNA, 351 bp, Glycine max
  Clone ID: PAT_MRT3847_125762C.1
cccacgcgtccgcccactcgtccgcccacgcgtccgccactctcctaccttctgggaacatggagaggccaaggagaaggagggttccccactatcaactccttctcctatggcgaagagcttcacttctctcattcccccagcaaggttttcctctctctttctccataatcgggtctctcaaagttgtctttttttattactgggttttattttgtttctagaccacagttatccaccattagagaaaattctgttcgacgggtagacacattgtgggttgaaaagctctctctcaaagtattcaatccaggatttgaagtccacacattcaattaaacctggaaccaa

SEQ ID NO: 28528 - DNA, 261 bp, Glycine max
  unsure (1)..(261): unsure at all n locations
  Clone ID: PAT_MRT3847_125763C.1
ccggctanaatgcggagttcaacttggtggcaacaattattcactgaaacaagcttagaagaaaatgaagctgccgtcaagaagtttgagcaagctgcgtcgangatgtccctacaatccagctngccnaatttncccacccaagtnanagccgtcagacatngaggnttanaccnccctancccagaatnnatntcanctntgcagnncntngccnaancaanagnnngnggctccccagacagggnnatttccacnagc

SEQ ID NO: 28529 - DNA, 552 bp, Glycine max
  Clone ID: PAT_MRT3847_125764C.1
cccacgcgtccgaaaaaaaaaaaaaaaaaaaaaaaaaaaaaaaaaaaaaaaaaaaaaaaaaaaaaaaaaaaaaaaaaaaaaaaaaaaaaaaaaaaaaaggggaggccggttctataggaacacgggctttcttttgcgggggtgccgcgttcttggctttttttttttgggggcctaatttcgtttccctggccgttttttttcctggtcgtgcctgggttgcccctggctttccccaccttaatcgcggggcgggtcacccttttttctccgggtggcgtatgattggggaggggggcccgctttggggttgctcccttttgggcgtcctttttggggagtggcccgcccccctctgtggcccttttcaccgccgggggggcgggggcttccccccggttgcctgcttttcttgccggggggctcccccccccttcgttccgcttttttccctgccttttttgcggggttccccttttttcccttcccgttttttcgttggggggcctccttttttgtttcgtggttctcgtttttgcggccccccccccc

SEQ ID NO: 28530 - DNA, 432 bp, Glycine max
  Clone ID: PAT_MRT3847_125765C.1
ggacacaattcacaaccgtttatttctttggtggatacctttctttattgtgttttgggagtggctctatggctgaatgaaactcacattatcatctttaggacaggaagaaacataggtcaagcaccatctcctgagtgagaggaagagtttatgtacaccccacaagtgaaaattactcgtcactggaagaaacattaggccgttgcaacaccttgttctttttcagcctgtgaagaggggagaagtgtgctaaccagggagcgatccccgaaaaaattaacaacactttctgtgaaaggcccgaacttataaacacggagccaagaagcctgggaaggctgcatatcccccaaaggttggatatgaacatgcatcgcccatgaaccctcccgcccgatgaggaccacagtgtacaacattgccgacaat

SEQ ID NO: 28531 - DNA, 178 bp, Glycine max
  Clone ID: PAT_MRT3847_125766C.1
tttcttaaaagttttcttttcacacaccacaatatattactggagagaccttcaaatatgatgtggggaggtcctaaattcacattctatcaaaatattttcactgaaaaggaatatcataatcatactccaaaaagattgattccatcttgatacaaattatagatcctcaatacaa

SEQ ID NO: 28532 - DNA, 390 bp, Glycine max
  Clone ID: PAT_MRT3847_125767C.1
aaaatctcacaaagcttagtgtcttcaaatccagatgtcttccacaattccacagttccatggttatgctagaattttctagagggtctcatccacaattccacctcgagccacgagaaaaaccccaaaaagcaaacgtctccctagcctctcacatcaatgtcagagcagttggaaaggaaaatgaacttagtgggaaaagcaaacgtctcccttgcctcttttccatagttctcttatacactgtctctctttcttcgcttaaacgttgccctttctcactatctcactttgcttcttctccttcgccacatagatcttctccttcttcttcgacgtgaatgtctgctacctcgcgagcgtgttcgtggctgaacaacatcgattctg

SEQ ID NO: 28533 - DNA, 1601 bp, Glycine max
  Clone ID: PAT_MRT3847_125768C.1
cgctcttttggtcttccctctttcgtccccgctcgtccgctcttatttgcttcttcgagtttcacagccaagtcgtaaaagggtttcaagggatggaaaacatgcagagcttctggcaattgggtgatgaactccgtgggcactcaaaagcatcggaggatcacaagtggttaatggttgcctcgaaactggccgaacagacaagattgaagggggagcgtgtgaacaaccttgatctttcaaagggacccattgaaacaaggtcaagggataaatttgggttccaggaagagaacaaatttgattctcttaacttgagcatgttgaacctggactctaaatttactgagaatgtgagcaaaagctcacttcgaaatggtgtttatggtatgaatgcagtgtatcagaaaaacaatgcaaacttggtgagtaatgtgatcagtaacaagtacaatggcagtattcagcataacaaagagatcaacaacaacactggcaacaacatcaacaccaatgaaagcaacaacacaaatgcaactgacaaaaggtttaagaccttgcctgctgcggagacactcccccgcaatgaggtgcttggaggatacatctttgtctgtaacaatgacacaatgcaggaagacttgaaacgtcagctatttggtttgcctccaaggtatcgagattctgttagggcaataacaccagggctacctttatttctttataactatactactcatcagctgcatggtatttttgaggcagcaagttttggtggctctaacatagatccaactgcctgggaggataaaaaatgcaaaggggaatcaaggtttccagctcaggtaagaatccgtgtcaggaagctctgcaaggcattggaagaagattctttcaggccagtattgcatcattatgacgggccaaagtttcgtcttgaactgtcagttccagagactctggatctgttggacctatgtgaacaagctggttcagcagcataagcaagaatcaaacaaagaatgaatgtgcaaaataggtaggttttggtgtgccagctgtgtggttttggcagattttccgtgaagcgtaagcttggaaagtgaatcatcatcatgttttgggggaagtaaagggagcgtgttgttgagagtgagagaccctttgttggtgaataaatggttgttgtggtatctatcccctggaagatgctttgtagctgttacatgacatttaatacctttgtatgattaagtaaagtacagactactgtttgtactgctaaagtatgtatctgttgaaccaagaaaaaaattaaagttaaaaagcttcatgtattactaaactctatgttgagttggttgaagtgatcttttattttattaatatgccgtcaaactttgttccttgtcactatcactagatgcatcaccattttcagaagcaatagaagcatctgtaacacgctgcttcttaaatggcctttgaacagccttactagataatctatgcagtaatggagaaaatttagtattcctgaacccgtccttgcttttttgttttccactgccacaaaagggtcgctctgttgaggtggttgg

SEQ ID NO: 28534 - DNA, 1409 bp, Glycine max
  Clone ID: PAT_MRT3847_125769C.1
ctcttttggtctttcctctttcgttctctcgcgtccgctcgcgtcttcgagtttacagcgaagtcgtaggagggtttcaaaagatggagaacatgcagagcttctggcaattgggcgatgaactccgtggacactcaaaagcatcggaggatcacaaatggttaatggttgcttcgaaattggcggaacagacaagattgaagggggagcgtgtgaacaaccttgatctttcaaagggccccattgaaacaaggtcaagggataaatttgggttccaggaagagaacaaatttgattctcttaacttaagcatgttgaacctggactctaaatttactgagaatgtgagcaaaagctcgcttcgaaatggtgtttatggtatgaatgcagtgtatcagaaaaacaatgcaaacttggtgagtaatgtgatcagtaacaagtacaatggtaatattcttcataacaaagagatcaacaacaacaccaacaatgaaagcaacaacacaaatgcaaccgacaaaaggtttaagaccttgcctgctgcggagacactcccgcgcaatgaggtgcttggaggatacatctttgtctgtaacaatgacacaatgcaggaagacttgaaacgtcagctatttggtttgcctccaaggtatcgagattctgttagggctataacacctgggttaccattatttctttataactatactactcatcagctgcatggtatttttgaggcagcaagttttggtggctctaacatagatccaactgcctgggaggataaaaaatgcaaaggcgaatcaaggtttccagctcaggtaagaatccgtgtcaggaagctctgcaaggcattggaagaagattctttcaggccagtattgcatcattatgatgggccaaagtttcgtcttgagctgtcagttccagagactctggatctgttggacctatgtgaacaagctggttcagcagcataagcaagaatcgcacaaggaatgaatgtgcaaaataggtagtaggttttggtgtgccagctgtgtggttttggcagattttccgtgaagcgtaagcttggaaagtggatcatcatcttcttggggaagtaaagggagcgtgttgagagtgagagaccctttgttggtgaataaaaatggttgtggtatctatccccttaaaggtgctttgtagcatttgcatgaacatttaatacctttgtatgattaagtaaaagtacagacttggtatgcaatcaaagagactactgtttgtactgctaaaacatgaatctgttgaaccaagaaaaaaattgaagtcaaaagcttcatgtattactaaaaaaaaaaaaaacacaactcacaaacacacaaaaatctcccgaagcaacacagacaagaaacccaaacgca

SEQ ID NO: 28535 - DNA, 334 bp, Glycine max
  Clone ID: PAT_MRT3847_12576C.1
atagcaggcttctagagcatgttacttttcgggcggaaggctccaacactgaccgggtttaagtgctctacgtattatataccaaatagactagtgcagtttgccctaaaattaatacaggtattacaatccagggatatttcacctctaaatacagatgctaatacactcatactgagtcattgtatgagaagtgaatagatacgacattcactatacattgccatactgtaaagactagcgtataacaaagcaatttttaatgcctaaagcagcttaaatggaacgggagtttacaacaaactgcttcaatatttttcagctgccggaacaa

SEQ ID NO: 28536 - DNA, 161 bp, Glycine max
  unsure (1)..(161): unsure at all n locations
  Clone ID: PAT_MRT3847_125770C.1
ggagaattaggtttttagggtttacancgagcagcgacacctncctcccggcagtagncatggttntgcaaaantgaagtatgcngattcantngngccaaganntacnccggnnaggncatcacacttgtnccgtngtgattcnaggttttnctgtttgc

SEQ ID NO: 28537 - DNA, 1094 bp, Glycine max
  Clone ID: PAT_MRT3847_125771C.1
ttttacggctgcgagaagacgacagaaggggaacacaatactcttcaaacactttaccttcttcttaagacaacaagctaaaagcgcttctaacttaagtgatggctaacgctgctgaagtttcagcgttgaaacgcatcaagttgcatcttttgggtgaactctctccactggccactccccaaaacaaatttgaccaaacaaaccctagcccctctgaatcttccaattccgaatcttcttctatttctcttaaccactacttcactgacctcctcgaacccgaaattgaatttcctctcttcgaattcgattccaaaccccaagtaatcgacctcgaaaccccgaaaaccctaatttcagctgagaagaagcctcaatttaatcggaaaccgtcgctgctaatcgctgttccgaagaagaccgagtggatccaattcggaaaccctgaggtggcggcgccggagaaccagcctgagaagaagcactacagaggtgtccgtcagcggccgtggggcaagttcgccgccgagatccgcgacccgaacaagcgcgggtctagggtttggctcggaaccttcgacaccgccatcgaagccgccaaggcctacgaccgagccgccttcaggctccgcggctccaaggccatcctcaacttccccctcgaagttaacaccgcggcggagaccgtctccgtcgccgccgtcgacgtcgagaggaagcgccgccgcgaggaggaggaggtggtggtggaggatgtaaaggcggtggtgaagaaggagaaaataacggagcatgatgtgagttgttttagggggatgccgttaacgccgtctatgtggaccgggttctgggacagtgacgtcaaggatattttcaacattccgccgttgtcgccgttatctccttttggattttcaccgctcgtggctgtgtgaaattccaatttaggactgcgttttttcgtgttttagtacttacagcgtcctcctgttcagggatgagtacattgtacatttgacgaatttgtttattcaacaatcttttattcacttttatttgctacatagggccctgaatttttttgaagtttg

SEQ ID NO: 28538 - DNA, 473 bp, Glycine max
  Clone ID: PAT_MRT3847_125772C.1
ttttttttttttttttttttttttttttttttttttttttttttttttgggaaggggaacaaatttccccgggaaaagtaaacaggttcgtttccccttgttacaatcaaactttttcaaaaaattttaataacatttttccagtttaagcatggaaaaatcaattttgggaaaacacaccccttttttctgttgagatcaaaaaaaatacccgggccttttgccaattttgggggtttgcccatgataacaaatttccaaaaaggtcccttgtcttttttttctcagaagtgctttccacccccaaaattttgatgaatcaaacagtttttacaattttttttttcccagccaacatgaatttgggccgtcctcccgctaaaatcactgtccaatttgccctaactcaccttttgggaggctaatgcattttttccaggtagcaaagctcctttcacaaaaaacgggggtgg

SEQ ID NO: 28539 - DNA, 451 bp, Glycine max
  Clone ID: PAT_MRT3847_125773C.1
aaacccgcgagcttatgcaggcagcccgtaattcctgaagcataccgaatcgcatcgtgataccatgagtgtctctggatgtaccgcctccccagtgcacgatgttcaagggcaagaagaatgactctctgtgctttcacgcatagtgcgcgagcacctatctgtgccatgctacacaatatgctgagcactatactatgttgatatggaaaatctgacgtttccacccagagactacttttctgatgctgttataaagaactgccgtctatctatagggggaggcgctggagatctagagctatgctcacactatgctatatgctgtacgactaatggggaggacttttgtatgagaccccgttctttcagtctctaagactaactgatcctccatgccgtgcacagtggttttattcgtagcacactggaacgtgggtgcagacaccat

SEQ ID NO: 28540 - DNA, 490 bp, Glycine max
  Clone ID: PAT_MRT3847_125774C.1
tccaagaaggtttcccgtcatcactgtatgacgtcctccttctttggggggggggggggggggggggggggggggggaagaggatagtaagacagaggtaacgtggaatagtaggcgtacagtagaagaggcggataaaggttaagctttggtacgagcgaaagggatagggattacacaggatagggattatggtttaggatatgagcatggagtaacctaaaggcgacagttgattatagtatgggaggtatcaatacgggcgcgtagaatggataacgtttaataatgtgccattggttaaatcaccaggaggtgtaaacggaggtaagccaagaggtgtcaaccgtttctacgaccaagcggattatagaaagtaggaggccacatagttatgatgggaacctggcaaatagtagtacgggttggccccagtcccttatggagcgtcggcgtaggcgacgcgaaaaacataacaggtggtaagggt

SEQ ID NO: 28541 - DNA, 362 bp, Glycine max
  Clone ID: PAT_MRT3847_125775C.1
gcttcttgttttctttatcgcatagtttgttccaaattagacttactaattacatataaaggcataatgactgcaaaggaagtgatttcttctttagctatatacacattagacgactgtttctcgtctatgtcccaaacctaaatgtgaaatttctttaagacaataatttttcccaataaactaaacttaaacatgataataaaaacatattgacccattacaccgaaaaaaagaacttactaacattgtgaatcttagtagtacgtggaataaacttggtgaaaatgaaatttagaggcaaacaaaatgtgagcaagtccatagatatacttgcctcgatatggttattggaagtggca

SEQ ID NO: 28542 - DNA, 403 bp, Glycine max
  Clone ID: PAT_MRT3847_125776C.1
aactgatgaagagtgcgagctaatgcgtgaccttggggaattccactgctagccatatcagacatactcaacctgtgcttcccatcacaagggttcataacgaaggcatgtctgtatagaatcttgaagctgactcaccctgactgctggcaccatttgactgtgtgcaaacgcactctgaagcgaatatgcctacacttgacatattactgaacgaattcgcgaaagatcccagaccttcgaggaatggtagcactggcttgcgcattatggtgctgtccaggacactggtgataagacactttctctggcaagcctacgatgattaaggttgctgcttcggatacgagacagacacgggctgatcgccgacttcaatagtggaggacccatagatgattcc

SEQ ID NO: 28543 - DNA, 3168 bp, Glycine max
  Clone ID: PAT_MRT3847_125777C.1
gtgatagtgagggtcaacagaggaggaacaatctctataaatagtagtaaatacccacccaacctcagatttgactctcaacttgtttcgttccgtgtgaatttgtgcaaacacaataaacagatggatcagttcaaaggacagcctcgccttccgaaattcgtcgttccgaaacgctatgacattaggctcaagcccgacctcgtcgcgcaccgttttgcaggttccgtcgccgtcaacctcgacatcgtcgccgccacctctttcatcgttctcaatgccgccgaactcgacgttagcaacgacgccgtttcattcaccaaccaagattcctccaaggttattaaaccttctcgagttgagttgtttgaaaatgatgagattctggttttggagttcccagaggaattacctattggcttcggtgtcttgtccattcgctttgaaggaatcttgaatgatagaatgaaaggcttctaccgaagtacctatgagcacaatggtgagaagaagactatggcagttacacagtttgaaccagctgatgccaggcgatgctttccttgttgggatgaacctgcttgcaaggcttctttcaagatcacattggatgtgccttcagagctcgttgctctttccaacatgccaattgttgaagaaataacagacggagatctgaaaacagtctcgtatcaagaatcaccaattatgtctacatatttggttgcggttgttgttggtttatttgattatgtggaagatcatacctcagatggggtcaaagtccgggtgtattgtcaagttggtaaggcaaaccaggggaaatttgcacttgatgtagctgtgaaaactttggaactatacaagggttactttgccactccctactcgctgccaaattggatatgattgcaatccctgatttcgctgctggagccatggagaactatggtttagttacatatcgggagactgctttgctatatgatgaccagcattctgctgctgcaaataaacagagggttgcaactgtagtagctcatgaactagcacaccagtggtttggcaaccttgttacaatggagtggtggacacatttgtggctgaatgaggggtttgcaacatgggtgagctatttagccactgatagctgttttcctgagtggaaaatatggtctcaatttcttcatgaatctactgagggtcttaagctggatggacttgcggagtcccacccaattgaggtagagatcaatcatgcttgtgagattgatgaaatatttgatgcaataagttatagaaaaggtgcatctgtaattaggatgctgcaaagctatcttggtgccgaatgctttcagaggtcgctggcttcatatataaaaagacatgcttgctcaaatgctaagactgaggatctatgggctgcacttgaggaaggatctggtgaacctgtgaacaagttaatgacctcatggacaaagcagaagggatatcctgttgtatctgttaaagtcaatgatcagaaattggaatttaatcagtcgcaattcttgtcaagcggtgctcaaggagaaggccattggattgttccaataacattatgctttggctcttatgatgtccacaagagtttcctcttgcaatcaaaatctgaaacacatgatgtcaaagatttccttggttccacacacaaaggtttaaattgttggattaaacttaatgtggatcaggctggtttctacagggtgaagtatgatgagctgcttgctgctagacttagatatgcagtagagaaacaactcttatctgcatcagaccgatttggcattttggatgattcatttgcactttgtatggctcgccaggaatcattgacctccttgattaacttgatgggatcttacagggaggaagttgattataccgtgttgtctaacctgataactataagtcttaaagttcaacgtattgcagctgatgcagtaccagacttactagaatatttcaagcagttctttattaacctttttcagtactctgctgagaggcttggttgggagcctaaaccaggagagagtcatgtagatgcaatgttgagaggagaaattttgactgcccttgctatgtttggtcacgatttaacactggatgaagcaagcaagcgttttcaggcattcttagaaaacagaaatacaccacttcttccacctgatataagaaaggcggcatatgtagctgtaatgcaacgggcaagcaaatctaacagatcgggttatgaatcccttttgaaagtatataaggaagctgacctaagtcaggagaaaacgcgtattctgggctctctggcatcttcacgtgatccagatctaattcttgaagctctaaacttcatgttgtcatctgaggttcgtagtcaggatgctgtttttggacttgctgttacccgggaaggacgagatgtagcttgggcatggcttaaggaaaattgggaacacctcataaaaacatatggttcaggatttttgataactcggtttgtcggtgcagttgtctcaccgtttgcttcctttgagaaggccaaggaggtagaggaattctttgctacccacgctatgccatccattgctagaacgttaaggcagagccttgagcgggtcaatatcaatgcaaattgggttcagagtgttcagaacgaaaataggcttggtgatgctatgaaggaattggcatacagagtttactaggctcttgtctagagcgcttttccataaataaaaaaaagaagtgtggtggtaatttcaactttcttctgtctgtcaatgttaccgtcttttgctaagcatggaccttgccagttgcctgacatgggaataatgttttgtgtgccctttttaaatctgcagtcgtgcgattttggtttgagatgacaaaaataccctcactcttggatatttgcggacaaaatttcgtaacggatagaagataaatacttaaatgagtgttcatggatgatgaagacaaatattagagtacttgtttcgtacatattcattataataaaattacataaatgtctttgtttaactaaggacttgtgagatttaagtatgtatcttattaactttggtttacacttatgaaattgaattatttagttttgtggtccat

SEQ ID NO: 28544 - DNA, 447 bp, Glycine max
  Clone ID: PAT_MRT3847_125778C.1
gttggttgatttttgcaattctaataaatcattatatggcttttgctggcgatcagattgaagtattacgggaacactaccccacgcttttgcaaaatggaggaagtggtttaattttttccaccgaagttcaaggggcgctgaaactgttgggtattgaccttcctgggtaccagattcgtgaacttttatcgcgtcatggcgacccaaaacatttgaattgttctgaattcgaagccatttacatggacttggacactcagcgaaatgcggagacggcgcgatggaaaaagcgcattggcagtgttacaggcgcttaccaagtgcagggcattgcggagcatggtgctgaggaaattgtacacaccattagagtggaggaagaggttccatttgccaatttgataaacagcatgttgttagaagaccaacacctgaggggacttt

SEQ ID NO: 28545 - DNA, 1273 bp, Glycine max
  Clone ID: PAT_MRT3847_125779C.1
ccacgcgtccgagagagagagagagagtgagagagagaagtttctctttctcttctttctcctttttcttctttccttttccctcattttcgtttctttgttaatttcttctcaggcaaccatggactctccgaggtaccaccaagagcaccaccactaccaccaccatcaccgtgtgaaccttcttccttcgccgcgccacagtttgagttcttcaaacagcagcactagcagcaccagcagcaacaacaatggactccaccactcccaattactgccacctctgactcctaccaccgtgtctgttcctccatctcctacatcaccctaccctccgaaatccgtgaccagatccgaatccggcaacccgtacccgacaaccttcgtccaagccgacaccaactccttcaaacaagtcgttcaaatgttaaccggatccacccaaaccgcaaaacaagcctcagcttcggcctcccccaaacctaactcggaacctagcaaaccccacagccacatcccacccattagaaaacaaaccggcttcaaactcttggagcggaggaacaactcactcaagaatctcaacatcaaccctctcatcggaacctcgggtttcatccgcggcagcgataacaacataaaaaacgtcgtcgtttcgtcgttctcgccgtcgtcgcgaaaacccgaggttctctccccgagcatcctcgacttcccagcgctcgttctcagccctgttactcccctcatacccgacccattcaaccgatcccgtttccttaacgaaaacggcaccgttttaatggacgccatcgaagctgcagctgaagagaaagccatcaaggagaaagggttcttcttgcacccttctccggcctccactccccgtgacgaaaagcctcgccttttgcccctcttccccaccgacgcgtccccaggttctgcttcttctaattcctcctcttaaattttcaaacagctaaataataataataataattattattattattattaattacttccttccttttcccttgtccttatttagattttcttgtaagattcttatatatgtttttatggcattcatgaggaggaaaaaaaatgagagaaatagaggagataaacttgtaattgcttattctgagaatggaacaagaatcttgcttcaattgtatctagtaaatttttgcttttttttcttcaatttttttttttatgtgtgctttgtttaatgctaattaagagagggagcggaactgcggaagag

SEQ ID NO: 28546 - DNA, 785 bp, Glycine max
  unsure (1)..(785): unsure at all n locations
  Clone ID: PAT_MRT3847_12577C.1
tctctcctctgtcttcatcaatcctcgttgctttatttgaggccacattatacgcatctctccctctctctccttaccacccaaaatgcgtcttcctcgccagctcaatttacgtgattcagattcgcttcttcctctcccttttctacaattctcagatttgtaagtgggtcggtttttctgcttaaaaagtctctttcggtctgaaatttctttgttttttggcgtgtcagtgccctatgagatagaatctgcgcgagaaagcgacagcaatcattgcagtagagatggtggttaccagaaatattgtgttgttgctgctttctattacttttgttgctccaattgtgctcttcactgatcgtcttggcaccttcaaatacccctttgctgagcaggagtttattgaagctgtaactgcttttgtgagtgcagctgactctggccatttgaatctcctgccccaggaatcttctacggtctttaaggaaccaatcgggcttgtttatacggaggacacttcaaacacagagaatttgcttcatggcttgcactttgccaaaccgggggagcatgtatctgccagggtattgtcagctacaaacgacgaaggtcaaaccaaaggggagaaccccatcaaactggtgacagatggaattaatcaaggaaatcaaaacagctacatggtgaaagctgatacaactggtgatagtgttagnngggaagagctattgatgttgatgacaatgatgggaaactcgctaatcttctgatctagtatctga

SEQ ID NO: 28547 - DNA, 280 bp, Glycine max
  unsure (1)..(280): unsure at all n locations
  Clone ID: PAT_MRT3847_125780C.1
tgacaacaagaagagacaancccagataatgcactttggaggttagctgttgaagcattcaatcgtgttcttgttcactatgtcaccaaattaaccaatggaggtccagattcaacattagcaaacctgtcagaacacgaatatggaaagaaattgcagatgtttatgaaatattcctaattggatattgtggacgagctcttccttcaaattccatctcagcagtggtgctagaggctgatgagncccttgagatggccatattaaatatgcttggtga

SEQ ID NO: 28548 - DNA, 546 bp, Glycine max
  Clone ID: PAT_MRT3847_125781C.1
ccactacgtttgtttacgaatataaattatttattttatgtacctactaataaataggtattaacgaggaaaaaaatacatatttaatttttttatcaaaagaaattagttgttaatattattaatttttgttagcagaaagattcgaatccataatttatcctctcttccttcgtctcttcaatactagactcatcttagtatataaatatattgataccaaagaaaaagtttcacatagatataaatattattgtatatttttccagtatattcaacccattatttttaaattattaatataagatgaatataaaatattttattttccaattaagtatgaaacatagcatctcattgaaaatcgatccatttttatttctaggtttgatgaaagcataacacatgtagtttggtgtagcaaatatagatgaacggaaacgtctttttctaaattcgaaatagctttttttttgtgccatttttttagattctaatgggtattataacttgcaggtggagaatattgtagttattggacacagt

SEQ ID NO: 28549 - DNA, 407 bp, Glycine max
  Clone ID: PAT_MRT3847_125782C.1
ctagaaatgaagcagcacggtgttgttcgacttcatttcgaagatccactcaagagaggaagagaaaaaaaaaaaaagagagataattaataattaacaaatatttagtgttggtgttagtgagagtggagatgaaggcggagacggtgacgctgttgctggtgaacctggcggggataatggagagggccgacgagtcgctgcttccgggagtgtacaaggaagttggcacggcgctccacaccgagcccaccggtttgggttacctcactctcttccgatccatcgtacagtcctcctgggagcccgtcgccgcgtagctcgccgtgcgccacaaccgcgcccacgtcaacgccgtcggggccttcctctgggccgccgccaccttcctcgtcgcgttctcctcc

SEQ ID NO: 28550 - DNA, 513 bp, Glycine max
  Clone ID: PAT_MRT3847_125783C.1
aattcggctcgagcaagaggaggtttgctcttggattgtggtgaaggaaccttgggacaacttaaaagaagatatggtgttactggtgctgatgatgctgtgagaactttaaggtgcatttggatttcacatattcatgctgatcaccatacaggcttggccaggatccttgctctgcgccgtgatttgctgaggggggtgcctcatgaaccactgcttgttgtaggaccaaggcagcttaagagatatttagatgcataccaaagactggaagatttagatatgctatttctcgattgcaagcacaccacagcagcttcattggaagcttttgaggatgattttccaggaaattcagttaattctcggaatctgaacaataataatggggacttaattgcatcaaaagttgattctactttatttgctagaggatctcgcatgcaaacctattttaaaagaccaggtagtcctgttgacaaagatgtagtttctcctatcctaaagaaattt

SEQ ID NO: 28551 - DNA, 416 bp, Glycine max
  unsure (1)..(416): unsure at all n locations
  Clone ID: PAT_MRT3847_125784C.1
cggnaattcccgcggtcgacccacgccgtccggttacattggtatcctcgtttttatatatgcatatcgtcttcgactcttgaatattcaatggcatcgtgtgcttgcattgcaccaacaacatgccctttttatgtggaataggcccgttcactgattctgtattgacgtatggaccgttcctcactatcgtggtcatgcgctcaaaatcttttgtttttgtgatggtggcaaaagtcctgctgttttgacgagagatctatgtgaccctcgagtcacaggcatctccttcttggtacctagcgattgtccctgggtggcgactttgggtatcacttgtccattgttttcgattttcccattccatgccttctatctgttcctggtgctgttggctcggtcgtcggcatttgtgg

SEQ ID NO: 28552 - DNA, 311 bp, Glycine max
  Clone ID: PAT_MRT3847_125785C.1
caagtctgaagcttatttaagaggggaattatgcaaggttgtaaacttgtaatgtattgtgattataatttggactattataagttgtaagcttttggagaagcaaagttgttgaagttatggaaggtaatggtagaaggaggaggcgccacttcagcagaatccatgcattcttttgtggaaaagcttcattcaaaggggagcattcactcataggcggtcctggattctcaaggatagtgtactgcaacaaatcggaacgcggtgaggggagtcttgtgagctattgtgacaattatgtgagtactact

SEQ ID NO: 28553 - DNA, 1371 bp, Glycine max
  Clone ID: PAT_MRT3847_125786C.1
tgcggctgcgagaagacgacagaagggggtactattgtaccgttccagagtgatgatggaagtgatgatctgtgagaatttccggtattcaccactctccatcttatcttcttctccttcacctcgttgccatctctctgttccatcttcttctttgaggattaaaccttcttcttcatcttcatcatcatcatctgtgtcttgttctctcatggagaatcaggagacccacaacaaccaaggccgcagcaaattcgtggactttccgttcgtttcatctgcccagaagaatcttatggttgatctcgtctcaacgcttgagaatcgctttcacactcagcttcttccttgcacactcccctctgatgttcagtattatcaaagccaaactgccactgcccaagcttctcttcatattagagcagctcataatgactccccgatagattttgtgttgggaagctgggtgcattcagagctaccaacaggagggtccttagatataacaagtctttcagcctatcttaacagctcaactgatgcgccaaattttgtgtttgaaatgatccgcagtagtccaacaatgctacttctcattcttgatttgcctccccggaaagaccttgtgctttggccagatgacctcaaaactttctatgaggacactcaactagacaaacataggcagactctggagagagttccagaggttcaaccatacttttcttcttccctttacatccgcactgtttcctctcctacagccataatggttcgcgttctgacggaaaatggcggagtggaacgcatggaggagatcatcagggaccatttggaccccatttccaagcaagtgttggggatctggttggatcattgtgcttgtgccaagcgagaagtgggagaggcagaaagagcttatctgaaaaaaagggatggtctcattagaaacaagaccattgagattgatcttggttcaagctttcccagattgtttggtccagaagtagcaaaccgggtactggaagctatcaaggagtactttactgtttgaaatgcaaatttatttggaattgttggatattctatgtattacatacatgtacctaatttgctgtgtaatctaatgaggcctcagtattttctgaatctctctagtcaagtatcaaatctgtaaatgattatgatcgtttctactttctcccccattattgtctgtgtatcaataatcagttctctgcttgtattatatatatagctactagggatgattcatatgacaatagcacttatctaattgcatttcagtttcaagctccaaaaaaaaaaaaaaaaaaaaaaaaaaaaaaagcggccgctctagaggatcca

SEQ ID NO: 28554 - DNA, 842 bp, Glycine max
  Clone ID: PAT_MRT3847_125787C.1
acgagctccactccctctttgccacatgtcaattatgttatttctttttctcttcacttccactaattcttcttgtgcaatatgtttcctcctctcatactcgtgagcctatatcctttggcccgttttccattcctaacaccctctttctttttcctactataaacctcactaatggacctaccagagattcttcacacttcatttaggaattgcaaactttagagtacaaccaatcaattaagagattcatcacaccttcaggcgatttgtgttcatcacatctcttcgttatataaataatttaccaaaaaaactgaaacattaaaatcatggcaaaacaattagcaataaaatgtggtgcctgacaatttgaaggggcactctgtacacttctcatgtagaccaataaataataaaaatttgtttatattatgaggcaaaatgcatgaaaatattactacccttttcattttagggtctatttagtttttaattatcgattgatacagtaatttaaaatttggatgttataaatgtaaaattttctatttaggattaacacaaatcccaatttggtggtgttacattccttgccgttgactatcatctttgctgacaaggacgattaatgtgagaaggccaacaagattagtagcatgccggagttatcattgttgttggatatcctccttgatgtcccttctatcaagcttggtttgttgaaaaagacaaggacgaaaacctcttggaagacaatcctccttaccatcagaaacaaggattgatttgtcactcaagataggtacaaatacctcttggaagatgatcctttatcttca

SEQ ID NO: 28555 - DNA, 521 bp, Glycine max
  Clone ID: PAT_MRT3847_125788C.1
ttccagtaaatcttcaggctttacaaacatgcaacattggaaaatctgtgaatcatttgcgaacgcataaaaacactgaaattcagaggaaagccagaggtttagttgacacatggaagaaacgtgttgaagctgaaatgaatataaaagatgcaaagtctggttcaggtcccactgtccactggtctgccaaatcgcgttcttctgttgttggtcaaggtgggaatagacattcaggtgcattatctgatgttgccatgaagagttcagttacacagctttctgcatccaaaactgcctctgtgaagattgtccagggagagaatactactagatctgcatcgacatccgcatttcctgggcctgcaaaatcagtgccatcacctgcatctgcgactacaaacctaaaagatggacagccccgtattgccgctgccaatggaggttctgatcttcccatggtgaatgcaagggatgagaaaagtagtagttctagtcaatctcacaacaacagtcaatcg

SEQ ID NO: 28556 - DNA, 207 bp, Glycine max
  Clone ID: PAT_MRT3847_125789C.1
aattgaatcagttattaggggtggtggaagttttattttattgattttaaaaaaaaagaaaccaagctttagttcatgtcctcaactgaaacccattttgctagtgactgtaaggccatgattgggcaagttgcacgtggagggagaacttagaagcctcttctcaacgctggaaatgcttactacaagtttagagtgaagattaac

SEQ ID NO: 28557 - DNA, 813 bp, Glycine max
  Clone ID: PAT_MRT3847_12578C.1
aattgatttgaaggccaatgttaatggtgccgtagaaacttgtggagaacgtttccatcgttttgatcgctatctcaacttctcaaatcctcttatcgcaaagaattttgaccctcgtgcatgtggatgggcatacggcatgaatgtttttgatttggtccagtggaagaggcaaaacatcaccgatgtgtaccacaaatggcaaaagatgaatcatgatagacaactatggaagttaggaacactgccgcctggtcttataacattctggaaacgcactttccaactgcaccgatcttggcatgtgttgggtcttggctataaccccaatatcaaccaaaaagaaattgaacgggctgctgttatacactacaatggaaacatgaaaccgtggctggagataagtattcccaagttccgaggttattggacaaagtatgttgactacaatcttgtgtatttacgagaatgcaacatcaatccatagaaggatctggtggcatgtgtagggcatgaaatttatttaaagcttttatgattattttttatacattttcctccctgtatggaaaaagatcccaagccaaaatcaagagtatgaaatgtgtctgttcgtttcctttggctgtatggttaagaaatgttaatgaaacgaaaagaattgtggtgaaaataagcctaagggtgggtcccatgttgagatgtgaatagaaggaaatatgggattgggttcacatcaccatttttgtaccacttgaaagatttgtcgtcaaacttgggtggggctcatcaaagcactactccttcccacgt

SEQ ID NO: 28558 - DNA, 552 bp, Glycine max
  Clone ID: PAT_MRT3847_125790C.1
caaaaaacccctttgttttaaggtatcctgataaattaaggtatcccgaataaatgtccaaatgggaatgactaaaaaaatagggcaataaactaatttgggttttaaaaaaattaatattttcctgaataaggggtcgaaaaacattatttaatttatttcagggaattaatttaaaacaatattttttttgaccaactaaatctaccatatgaaaatttctttttttacttgaaaagagccgaaattattttcaccttaataatgggagatggaaaaaaataatcaaaattttcctaaatccacgtaattttttcaaaaatgctttgcccaacacaatgtttttgtcacaccaaaagctttggggggtcttccattggatattccatttatcgccgggaaatttacaaggctaaggacctatttttgcattaaaaacgttgttgcccgaaattggactttttacaagtaaataattgggcacaaagccggcaatacaaatgatcctttttatttggaaaaaagtacccgggtttgccaaatcaaataaaa

SEQ ID NO: 28559 - DNA, 257 bp, Glycine max
  Clone ID: PAT_MRT3847_125791C.1
cagaccgaattttttctttattacacccgaaacgaagaggcacgcaacacaatcagaagcaattggaatgggaagacaatagctcgaatgcacgtgagcaaaacgaatgtaagccagagcctagaatccccaaactaacaaacagagtaagaaccagttgcaatctcccaaacggccctcacgagcacacggctggcaaatgatgcacgggcaccaaggagctgatctgtcccgccaccggccacaggaggacagga

SEQ ID NO: 28560 - DNA, 318 bp, Glycine max
  Clone ID: PAT_MRT3847_125792C.1
ggaagcccaaacaggaaaaaaggatcataaatttatgtaaaaaataatgcccccacccctttgggttaaaatttctaaagctaaataattctaacaaggggaaaaataaaataaaaccccccttcggggggaagggggtgataatataaaccgggcatgctggttttttttttttttataaccaaaccgagcatgggggagatattcatttaactccatttagccggggaaatcattttaaatattgggaagaactttattagagaccttaggttgtttttccaaagggatgttccgagccaaaaatgcccgtttttc

SEQ ID NO: 28561 - DNA, 431 bp, Glycine max
  Clone ID: PAT_MRT3847_125793C.1
ctatattgaatggaggcctaaaaaaaacaaaggcggcacagaaactaatatatgagggggccgggaaaacaaaataacaggggaacaaaacaaacccaggaagaaaaaaaaaactggggggggggggggaaaaaaaacggggagggcgggaaaccaccaagccccggatgtttggggggggccgggggaaccaacaagggggggggggcaacacaaaaaaggggatggagaaaaacaggaaacccgggataccccaattccggggggcagaaaaacaaacgggggggggaagaaacccaaagaacccacaccccttcgaaaggttaaaacaactttaagccccccggggggagaccccccgagcatggcggcaccccagaaaaaagcgacccggccctgcaggaaaacaaacttttcctaaagggggggga

SEQ ID NO: 28562 - DNA, 1225 bp, Glycine max
  Clone ID: PAT_MRT3847_125794C.1
actcaaataatatgttttcataaattcctttcttggctaaattttgcacatgaaggtgtatcatggtctaaaaacattcctttggcaggcaccaaaaataattgataaagcaaacagtacattgaatatgttgctttttaatattactagcataattatagacagaagagccgagtttacaaaaccaactattgttacctcccttgcacttccaaactctcagtgacaccctattgcagaacatacacttggtcaaattctatctttcaaggtttccttccagctaaatcttccaatgtaagattcagtgtgtcaactgaacctcttttcacttcttctccacgagcagccaggaagtcctcaacgcttcctggttcaccaaaccacccaaggtgatctgcaatcaggtgaaggttattacaccccccacatcttgccaccactacacctttctcatacgattcgcgacaagccgtcttaatggatctcgtttcacagaccttgcaggtgaaaaccatagcaagatcatgccttgaggatgtcttcaaactggacttggcagaaaactttacagaagaggtttcattaacactaatagatgtagcaacttcatctgggtttggacttgattttaaggtgtctgcttcattattctctacatcttcacagacaggtttgattggatttgtatgggtcatgaccccccgttgatggaatccaatcaaacctgtctgtgaagatgtagagaataatgaagcagacaccttaaaatcaagtccaaacccagatgaagttgctacatctattagtgttaatgaaacctcttctgtaaagttttctgccaagtccagtttgaagacatcctcaaggcatgatcttgctatggttttcacctgcaaggtctgtgaaacgagatccattaagacggcttgtcgcgaatcgtatgagaaaggtgtagtggtggcaagatgtggggggtgtaataaccttcacctgattgcagatcaccttgggtggtttggtgaaccaggaagcgttgaggacttcctggctgctcgtggagaagaagtgaaaagaggttcagttgacacactgaatcttacattggaagatttagctggaaggaaaccttgaaagatagaatttgaccaagtgtatgttctgcatagggtgtcactgaaaagttggaagtgcaagggaggtaacaataggtggttttggaaac

SEQ ID NO: 28563 - DNA, 277 bp, Glycine max
  Clone ID: PAT_MRT3847_125795C.1
aattatgaatctgcagtcgttaatcaagtgcaacgcccacaacttttattgaataatttgaatgttggtgaaattgagaagctgagttccgagcaaagggagcttgaagaaattgttgctaatttggaggaaagtgttaaaaggtttcacgacgaagaaagaagcttactgaatcaatctgctaatcttcgtaaacagtgggaggacattagtattacagtacagaatgagcaaaagaaacgtcaagcaatcattagccgtattgatcaaaagaaaa

SEQ ID NO: 28564 - DNA, 410 bp, Glycine max
  Clone ID: PAT_MRT3847_125796C.1
ctacaacaattgcttcacaatgttggagggaatcgggttcctgcactacaagctggaggaggtttcgatcatatgattgtgacttgagtataaactatgcttcattggtttttatcacccttttggagtctggttatatctatgtttcatggagtttgattgttcagaggaaaaggttgtaaattaatggagcatggaatccaagttagaagacatttttttttaatatattttaataatttatatgtatcccagtaggtggttctttataccccttcccccttgtgcggttaagcttatatctagacattgaggtgggggtttttactccttagtgaactttgagtaggtacattaagatgtcaaattttcaatcaagttaaaggcattctagaaaggtggcattttat

SEQ ID NO: 28565 - DNA, 458 bp, Glycine max
  unsure (1)..(458): unsure at all n locations
  Clone ID: PAT_MRT3847_125797C.1
nccacgcaacactgtgcttttatcttgcattttttcaatacatataaaccggggatattcgatttttttaagcgacggactaaaantaataacatcttttaaaaaaaattgaaccgtggcggccatctacatctctatgggatcatcactttcgttactttcatcatcctcggaacaaaccgttaggcatacactctttgctacttacttctaacttcactattccttccaaagatggggctcttattctgagatcatgcagcttcaaaaaaagagaatcagaaactactataaagggtacctctactaccaacacttcaagcaaattgaaagattgcacgctcgaacacatgtttctcaaaagaaacctttcgtgcattaacgatatcctgatcatgggatcagacataagtgtacaattacagcacatgcctgtgcctgttctttctctgactaaa

SEQ ID NO: 28566 - DNA, 279 bp, Glycine max
  Clone ID: PAT_MRT3847_125798C.1
aaaagaagctctcatatttattggggggctaaaagggcaaccctttgcctcagtacaacattaaaaaattattgcacctgcaaactggaaaaaaacacggaattttaaagcagagatgtgaccccccccctttttaacacaggaatagggttaaaaagatgaggccccaaataaaaactttttttttttttttttagcagcctgaccttaattgcttctcccctcgatttgagggaaactttaaagtcccaaaacatattattttggtgagaaattacc

SEQ ID NO: 28567 - DNA, 146 bp, Glycine max
  Clone ID: PAT_MRT3847_125799C.1
attttccataaaccacattctcgttggttctctttgaatggagggtaagcttttaagagccaccaccatctcagtcccttgaacaccctgatgcgctttgcatgggacaactcgggaggcttgggattgcttggagcgcacctggg

SEQ ID NO: 28568 - DNA, 3193 bp, Glycine max
  unsure (1)..(3193): unsure at all n locations
  Clone ID: PAT_MRT3847_12579C.1
tctctcctctgtcttcatcaatcctcgttgctttatttgaggccacattatacgcatctctccctctctctccttaccacccaaaatgcgtcttcctcgccagctcaatttacgtgattcagattcgcttcttcctctcccttttctacaattctcagatttgtaagaatgggtcggtttttctgcttaaaaattctctttcggtctgaaatttctttgttttttggcgtgtcagtcatcaactctggttgctttatttgaggccacattatacgcatctctctttttctctctcctcccctcctcaaaatccgtcttcctcgccagctcatttgctctatgagatagaatctgcgcgagaaagcgacaccaatccttgcaatagagatggtggttaccagaaatattgtgttgttactgctttctattacttttgttgctccaattgtgctctacactgatcgttttggcaccttcaagtacccctttgctgagcaagagtttattgatgctgtaactgcttttgtgagtgcagctgactctggccatttgaatctcctgccgcaagaaacttctacggtctttaaggaaccaattgggcttgtatatacggaggacgctgcaaacacaaagaatttgcttcatggcttgcactttgccaaaccaggggagcatgtatctgccagggtattgtcagctacgaaggacgaaggtcaaaccaaagggggagaaccccatcaaactggtgacagatggaattaattaagaaaatcaaaacagctagattgataatggacaaatatcggaagttaggtacacttccggagggtgtcataaatttttggaaacgcactttccctctgaaccgatcttggcacatcttaggtcttggcaacaacaccaatgtcaaccaaagagatatcgagcagtctgctgttgtacactataatgggaacatgaaaccttggcttgagataagtattcccaagttccgaagttactggacgaagtatgttgactacgatcatatgtatttgggtgaactcaaccacgttagggaataccttttcccttcagcctgtaacgaacgatgcccatctcacacgagagcttctattacgggtatttcaggtctcacgaacactgggagatgcaagcaaagattctgatttgcccaggaatgcaaatgagagaatgaaggcaatggagcaaacattgatgaaaggaaggcaaattcaaaatgattgtgctgctgctgtgaagaagcttagggctatgctccactcaacagaggagcagcttcatgtgcacaagaagcagaccttgttcttaacacagttgacagcaaaaacattgcctaaaggtctccactgtcttccgttgcgccttacaactgagtattatagcttgaatacttctcagcaacaactccccaaccaacagaagttagaaaaccctagactataccattatgcaatattctcagataacatattggcaacagctgttgttgtgaattctactgttgcccatgctaaggacacctcaaatcatgttttccacattgttactgataggctcaattatgcggcaatgaggatgtggtttttggtgaatccaccaaaaaaggcaaccattcaagttcagaacattgaagactttacatggttgaattcaagttacagtccagttcttaagcagttgggttccccttctatggtagattattactttaagactcatcgggcagcctctgattcaaacttaaagtttcggaatcctaagtatttatccatcttgaaccacctccgattctacctgcctgagatctttccaaagctcaacaaagtgctgtttttggatgatgatatagttgtgcagaaggatctgactggtctttggtcaattgatttgaagggcaatgttaatggtgctgtagaaacttgtggagaacgtttccatcgttttgatcgctatctcaacttctcaaatcctcatatcgcaaagaattttgaccctcgtgcatgtggatgggcatacggcatgaatgtttttgatttggtccaatggaagaggcaaaacatcactgaggtgtaccacaattggcagaagctgaatcatgatagacaactatggaagttaggaactctgccgccgggtcttataacattctggaaacgcactttccaactgaaccgatcttggcatgtcctgggtcttggctacaaccccaatatcaaccaaaaagaaattgaacgggctgctgttatacactacaatggaaacatgaaaccgtggcttgagataagttttcccaagttccgaggttattggacaaagtatgttgactatgatcttgtgtatttgcgagaatgcaacatcaatccataatagatggatctcgtggcatgtgtagggcttgtaatttatattaaagcattatgacaatttttttatagattttcaaagtcaggttttaatttgggcatctctgtacttgtaaatgaaatgtgtctgtgttgtttcctttgtatgtatggatttgcaactaccctattggccctgtggtaaagtgggtttgggagtggtcaagctatgttattctttcgagataatgcgatctgctttaataagtggttggttgggttggggttgaaaaatcacgtggtggtggaacccatttgtcgtcaaacttagcagttggtatgtggggtggggctcatcaaagcactgctcctttccatctaacttcacatttctctcgtgcaagtttatggtgtcggtggatcatattattatatttttagtaaaagaattttggggatagcttctgcctctcaattctcatctctcggcaataaagtttcaattgtttcaatttggcgagccttggtttaatatgcgtcaaagtttctatgtcttagatagttatcttctttacaatacccaaccaaaagggattacatgtataccttttctctgcctactggaagtatctaactagttcaagccattataaggtgcgtaaatgttcaacttttttaatacaattttacatctctagcttgctacgttaaagtgacgatgtcctctaattgaaaattaaataaaacatatatttcttttgcnnaaaaaaaaaaaaaaaaaaaaaaaaaaaaaaaaaaaaaaaaaaaaaaaaaaaaaaaaaaaaaaa

SEQ ID NO: 28569 - DNA, 1546 bp, Glycine max
  Clone ID: PAT_MRT3847_1257C.1
atcgaccaccacacaaaactcccatttacaaccttaaaccacattaagcttcggaaaaaagttgttgttgtagtagttgtttgtggtcggtgatagttgagtttgaagtagtgcttcgcgtctacattcagttcaatggcttcttccatctgtgctctctcgccttccgtccaatcacagctcactaaaaccaccctcgttgctccaatccctctctatcaacgaagcaagtgcgaaatgagcaggaggagttttgcgtttaagggaattgtggcctctggcgtttcggtcgcggcttctactctcacagccgaagcagaaccatcttccaaaggttttgaaagattgccgtacaagccggaagggtacaattattggacatggaggggtcataaaatacattatgtagtgcaaggagaaggctctcccattgttcttattcatggttttggggcctctgcattccactggaggtacaacattccagaattggctaagaaacacaaggtatatgccttagacttgctcggttttgggtggagtgacaaagcacttatagattatgatgctatggtgtggagagatcaagttgttgactttgtgaaggaaatagtaaaagaaccaaccgttttagttggaaacagccttggaggatttactgctttggttgcagcaactgggttgcctgatcttgtcaatggtgttgctcttctaaattctgccggacaatttggcgatgggaaaagggaaagtgaaacttctgaagaaacagctctacaaaagtttctcctaaagccattgaaggaagttttccagcgtgtagttcttggatttttattctggcaggcaaagcaaccagctcgggttctgtcagtcctaaaaagtgtgtatataaattcttccaatgtggatgactatcttgtggaatctataacaaggccagctcaagatccaaatgccggagaagtctactacaggttaatgacgcgcttcatgatgaatcagagcaagtacactctagatgctgtcttaagtgaactctcatgcccgttgttgctgctttggggtgaccttgacccatgggttggtccagccaaagcgaatcgaatcaaagagttctatccaaaaactactcttgtgaacttgcaggctgggcattgtccacatgatgagacaccagagcttgtgaacaaggctttattggattggttgaccaccctcactcctgaagtgactctccaaacagtttgaacgcgtatgattttgtaaagccaattgaaaacaagttcttgattaagttttgagtttcaaatagttaatagtagttatcagtatacgttgtgtacaaagaattgggtaaaggatactcagaatagagaaaaatcacagcaagaatactttatgatcattgttctacttcttctgcacacctgtacatttttttcgacctaatgtatgcattcatttcttacataaaaatccttttcattgatcttgcaaacttgatgcttctataaacatggatttgacagaatccaacgtagtt

SEQ ID NO: 28570 - DNA, 233 bp, Glycine max
  Clone ID: PAT_MRT3847_125800C.1
gactctttgaaccaccgcaactagaattagaaccccacgttgcttctagccttagcttccaaggatcgaattgtctcatgctttcggattgatacaagaccccagactcttataggagaaagccttttctgggttaagtcggtaatttggtttttttgtttggtaacatattatgcagcggctgcaagagctgtttgacacactgcggattcggtggcagtgggtaggggttt

SEQ ID NO: 28571 - DNA, 368 bp, Glycine max
  Clone ID: PAT_MRT3847_125801C.1
gagggattgaagggttcttcatcaagcaggaggaaaaaaaattaaaatggattcgtcaagtgaagaagatggataacacaatgactcagaaagaagagtaactcatgttggattcatcaagtcataagggaaataatttcctaaggagttcttcatcaagccgaaaggtaaggaacatggccagaagatattttgactatgaagctttgattttggttctttattgtgtttctagtttagtttttataggatagatagcaatacattgtttcggtgaagatatatttttgtatacattgttgttgtttatgttgaaaacacaaaaaatatgacacgtggcattgttgtgtctttaattcattaaaaaa

SEQ ID NO: 28572 - DNA, 128 bp, Glycine max
  Clone ID: PAT_MRT3847_125802C.1
ctctgatcctcaagaggaactagccgacagggggacacaactctgataatgtataaacggagacataattggtactgatggcattgccatgggtgctcaccaaaaggccatcgttcattggtgggctc

SEQ ID NO: 28573 - DNA, 1009 bp, Glycine max
  Clone ID: PAT_MRT3847_125803C.1
ggctccaatggcaatggcatttccgtccgtaacctctgtaactgtggagaacgtgacattccctcccaccgtgaagcctccctgctcccccaacaccttcttcctcgccggcgccggcgtcaggggcctccaaattcatcacgctttcgttaaattcactgccatctgcatttacctccaatacgacgccctttccttcctctccgttaagtggaaaaccaagtctgctcaccagttaacggaatccgaccaattcttctcagatatcgttacaggtccattcgagaaatttatgcaggtgacaatgatcaaacccttgacggggcagcaatactcagagaaagtggcagaaaattgtgtggccatttggaggtctcttgggatttatacagattcagaagccgaagcaatagacaagtttctttctgttttcaaagacctaacattcccaccaggctcctctatccttttcactgtctcacccaatggatcattaacgataagtttctctggtgatgaaaccattccagaagttacgagtgctgttatagagaataaactactctcagaggctgtgttggagtcaatgataggtaagaatggcgtttcccctgcagcaaaacagagtttggcctccagattatctcacttattcaaagagcctggggtttgtgaccctcaatctcataagtgaactcattatatcatcaacccaagatcaaaatcccttaccactctgctgtgactttcagtactgtgctactaataaataaagggcaaattacagtttttctaagtgctaaacttctagtaacattattgtgttgttcttactgtccatgtctaagtactgaactgttgtatttgatttttcgttgggaattgaagcaactaattacattacttaaaaatttgcttattttagaattaatcaaacacgctccatcaagtgtgcatgaaaataatataaaataataaataagcacatgacatggctaaggtcttggtc

SEQ ID NO: 28574 - DNA, 1066 bp, Glycine max
  unsure (1)..(1066): unsure at all n locations
  Clone ID: PAT_MRT3847_125804C.1
ctcttccttaattgttcagttgtagacaaaccctaatccctaaagtttcaattttcgtcattcattcagtgctcggacaacaaattcttcaatttctcttcctcaatttttcatttgtagacaaaccccatttcttaaagtttcaatttcgtcattcattcagtgctctcgctctccagcattcgcaccgagagctccgtgccaggctccagctctgaattggcatcacaagttcactctttcaatgagttaaaagaaagtgtagaagcagcaagctggaggataggatggctaagtactatgatattgatgatattatcgtcgaggaagagactgtgtcagttatatttcagaaggctgcatctggagtgggaatagatcccagttcttcaatttttattgaaacaggttccaaagttgaactgcctttttggcttgctcatgagttacagttgagacaagcagtatcagtcaatgttcctccttgtttcaatcaaaagacaaggcaggaactccatgctgattctgcaggtgtggatctgaggtccagatgtccatttttctatgaatttggttgcaagatagcacccatagttggcgaccgaaccattgggtttctgttgttgtctgcatttaagagtaggtacaaggaaattctcaccaaggcacattctgtagcatttgcagctggttccaaattttggactatactgccaaaagaagagatatacttgtatgagacagctcaatccgcaatggcatccttcaagaagtggcgaatgggggggcccagatttcagatagcttctgtactgggaagaaagagaaaatctaaggaatagttgctttaactttattagacatctgtttttgtcaatgttttggacctgctaattacaagatgttttgaataatggataaacaatgctaaatttatggtaaacatacaatacaatgtccggtaattttcaattattgttagaaatagaagaaaactggacactgaaaataaccatccaagaagtgnntttcttgncctcttgtttggcttccccccccccccccc

SEQ ID NO: 28575 - DNA, 303 bp, Glycine max
  Clone ID: PAT_MRT3847_125805C.1
cgcagactcttcaattcttttctgacttattggtccttgggcttgttgtcgcgggcacacttggtccgccacacaacaaagtccatgaagaaaccgaaacccacctggataggaaagaaaagcatcagcaaggaggcctccatgatcgtgttgtagcgcggcgcaacgccattagccaaaacacgcaggatgaagatcatggggtcgttcgtgatactgaactggccatcgctcatgccattgatcagtgattgcgccaccttgtctggatgaatgagttcactcacaccttcaatcgtcttg

SEQ ID NO: 28576 - DNA, 470 bp, Glycine max
  Clone ID: PAT_MRT3847_125806C.1
gaattcccacctcgaccgactcgaacgtttatgcaactattaactctgcactatactttctcgaagcatgagctatctactttacaggcttattacaacaacgagaacatccatctttacatactagctactaccgttactgtatcatcagatcttatcattagtaaattttccttgctcaatctctttctgatttacatcttgcgcattaaatatatcttcattagatcctctactcaacttcatgtcgatggaaatatcttttgttcatactatactatttgccagcgccttatactttttccaaagttatatttctaataatactctatgccctgtttacctttatcatctacatcttcttctgacaacactcacaattttttactgaagaaatttatgcagacagtctttatactattgtaacttgtcttaatctacatattcctaattctattttatgattgttt

SEQ ID NO: 28577 - DNA, 437 bp, Glycine max
  Clone ID: PAT_MRT3847_125807C.1
atgaccctgaaacttttgcagccgaacatttgaaattttgtaaggaacatcatttaaaaggaagaatactagtttcaacggaaggcattaatggaacattatctggaactaaagaagatactgataaatatatagagcatatgcatgcagataatcgttttgctgatttaacttttaaaattgatgaagctgaaagtcatgcgtttaaaaagatgcacgtgcgtccaagacgtgaaattgttgcactcgacttagaagaagatattaatccacgtgaaattaccggtaaatactattctcctaaagaatttaaagccgcattagaagatgaaaatactgttatattagatgctcgaaatgattacgaatacgatttaggacatttccgtggagctattcgtcctgatataacacgattccgtgacttacctgaatgg

SEQ ID NO: 28578 - DNA, 795 bp, Glycine max
  unsure (1)..(795): unsure at all n locations
  Clone ID: PAT_MRT3847_125808C.1
ccggtccggattcccgggtcgacccacgcgtccgcctcaatcgtgagctcattcgaaccgccaccaccgccaccaccacgacgtcctccatcgcctcccagtgtggaggatcctcagagaaccgaagattaatttaataagagtgttgattaatatcctccagttgcaacaccctaactccctaagtcacactcacaccgtcacagcaccgtgattttctgcagaccaaagacccctaatttaatcgcacgtcgtcgttcctgccagcagaacacagaggccaccgtcgtgtgttgttcaatctaagcaatgggtggtgatacagcatttttggagcaccccatatcagaagatacacttcagttactctttgaagcctccaactcttctaacatggaaaagtccttagagattctcattcagaatgccaaatctgattctgggcgtttggaactagcttctaaaaggattctccctgcagtacttaatatagttcactcactcactcatgcttcacatcaccatcaccatcagcataatcatattctttgtttgtctttcaagctcctcagaaacttgtgtgctggagaagctgcaaaccaggactcatttcttgagcttgatggggtggcggttgtttgtagtgttctgaggtcagaggctgcttgttcaggccctgatcatggattggttcggtggggtctgcaggttctggcanatggttctttggcgggaaaacagcatcaatgtgctatttgggaagagctctatctggatggggttgtatcacttgct

SEQ ID NO: 28579 - DNA, 119 bp, Glycine max
  Clone ID: PAT_MRT3847_125809C.1
acgggctcgagccgattcagcacgagccaagatgcagatgattcactttcttaacctcaaagcacttgtctcgatcacttcccatgactacagtcaatggtgactgtgtagtcagacct

SEQ ID NO: 28580 - DNA, 1178 bp, Glycine max
  unsure (1)..(1178): unsure at all n locations
  Clone ID: PAT_MRT3847_12580C.1
gtttagcatttcggaacacaagattactactctcttgtctcgtgttgtttttatgtttctgtctctgagactgaactgaataacattaacacagcgatgacacagcgatgtcgttgaaaacgttaacaacctctcctctttcgggaatcactcttttggtccttctcctcgctctccttctcagattttacatcaaattcgacactgctgagaggttgttcagtgctgaagagctatcattgttcaatggaactgatgaagggttgccaatccttctaggaattcttggatccgtgtttgatgtaaccaagggaaaatctcattatggttctggagggggatacaatcattttgctggcagggatgcttctcgcgcatttgtctctggaaatttctcaggagatggtctcactgactcattgcgtggtttatctagcactgaggtgaagagtattgttgaatggagggatttctaccataaatcatataagtatgttggcaagctagttggccgatactatgatagccaagggaatcctacaaaatatttaaaaggagttgaagcgaaggctgccagaggtgcacagcttctagaaaagcagaagattgaagaggcgaaactaccttcgtgcaattcgagatggagtcaagatgaaggtggtgaggtatggtgtgatgttggttaccctagattggttcagaggccactagagattgctttgacagggaagatgagtaagcgttgtgcatgctttgaagattctcagttggaccaacctggcttagaggtatatgaagggtgtgattaccatgctaccaggtgcaaagtttaatcaggaattaaacaccaactgaagaatagtttttgagctatctgtatgtatattaaaagcttaatttagcgaagctggtaattatttttgtacaaaaatgcttttattttgagggttgctttatgctatttttattccggaataatcnctnttntttaacnattaaatttaaaattgngctatatgccccgcnctntgtaacaggaaaaaaaaaaaaaagtcaagtatatattaatatttaatggatttttaaataaaaatagggtatttctttactgagaaataagtagatattattaaactcttgtttttggagtcaataaaataagataattattttgattc

SEQ ID NO: 28581 - DNA, 361 bp, Glycine max
  Clone ID: PAT_MRT3847_125810C.1
atttcatgagtttatcaccccaccgcacttaaaaggcggaggcctgctcgtgagaggcccgatcgaacacttctatcaactgctcagaccaccattgaaatcgattctttatgcgagggaaaagatctctattccatggtcacatgcgccagaattgaggagctcaacaagtctcatgtcaggagatgaacgcttccggtggagaaaaggacgagggagtgctaataaggccacattatgcgttgttgaagttgtccgtgtagttggaagtaccagaatgcgcaagtgttaacatactgctgcaagaccttctataatggaaaggagctttgcgggaacactaatctatatgtggctgttg

SEQ ID NO: 28582 - DNA, 319 bp, Glycine max
  Clone ID: PAT_MRT3847_125811C.1
gaagaatacgctaacaccaaattgactccagctgctgggcgcataggttatcaaaggcttggagaaaatataactaaaggtgtaccagacatgcatggagctgttgattcatatagataagtgaccactgacatgtctggagatcttggctaacgcatggatggaggccatcaatggccacaaaaccctccacattcaacgttgttatggaggaatctgttaccatcatgagagacctggcaaggcaaactatgcgcggaatcgttccagcattacgaggaccgcccaatgaattaggacgactaatatctagggatcc

SEQ ID NO: 28583 - DNA, 336 bp, Glycine max
  Clone ID: PAT_MRT3847_125812C.1
ctccagctcgagatttttggtgcgttataagatgatgaaatccaaacaaccaggtcatactaccaggtttctgaaccagctggtctattgtttttaaactgagcttctatcggactcttcccttgacatcttctctgcaggcggcattcttccattttctccaattcccctcccgcttctcctttcttacatatgccgcccatcacttctatttagcccatctttctttttggagcataacatgtgctatgagtaaaagcatgtggggaccgggggatgagaatgagaatcatggtcccgctttaggtggaatatgggcctggattaccgaatatt

SEQ ID NO: 28584 - DNA, 187 bp, Glycine max
  Clone ID: PAT_MRT3847_125813C.1
caaacctcaagtgtgttttggttgacaaatttgtttcaaggtcttccatccgagatgtacaataggtgttcttagtggaagaaacagctagtactaaccaggaactaggaacaggatgttctggctgtaagtgaaagacagactggatctgttcctgccaaagctggtccactaagattgggtgtgg

SEQ ID NO: 28585 - DNA, 2368 bp, Glycine max
  Clone ID: PAT_MRT3847_125814C.1
gtgactcttagaaccttctattagaagtttgggctctgtatgaggagttaactagaaaagttgtcactttggtggcagagaatgaaaacctaaagagggagaaagaattggctttgaaagagtatgagtctttggagactacaaataagaacttgaagacacagatagccaagtcaataaacactgaagtggagaaaactcctgttgagcctgtgtcatctgtggctgagataacaccttcatccggtaatggtccatggttcctttataacctttttccagttccacaaatattttggccttccatccttcaatcttctaatccaattcatctacaaaatacatcatttaattccatcgccattccacctaatgctaatgtttcatgttcttctgagtctgaatcacatcacaagcaaaataaccttataaatgataatcgaactcgagtaatcactttttaaaattttattttgatctatccttttgatttttgaggttgtaagtttctttctttagcttaatcactagaagaagataagaaagcttttgaaatgactgagtcaaaagaggcaacattgcttgaagcagagaagatttcctgtcgtaaatctgaagtggatttcaagttcctgtgttttttgctggtttctcaagtcaagaattgggaagtaacacattcctgtttttgggatttattgttctttattattattattattattattattaagtcatgttttaggaaattggacgatctgatggtgcaacttctccagcagttgaggctttaaccttctctcatacttactgtttgctgctagctttaattcaatttagttgtccaccattttttcctgcattatttaaattctactcatcttaattttttgcttaatattttttaagcatttaatttaaacctgattcttgccgagtttcagttggtgatatctaattatgataccattgacagggtaacgtgcttattggataaaagcattatgagtgcacatgctttgatgcatttatttttcatcttttctaaactctagaatgtcatgtctcctggtaattgagattatctaattttgaattttgtcatttcactttggtggcagagaatgaaaacctaaagagggagaaagaattggctttgaaagagtatgagtctttggagactacaaataagaacttgaagacacagatagccaagtcaataaacactgaagtggagaaaactcctgttgagcctgtgtcatctgtggctgagataacaccttcatccgcttaatcactagaagaagataagaaagcttttgaaatgactgagtcaaaagaggcaacattgcttgaagcagagaagatttcctgtcgtaaatctgaagtggatgtcaagttcctgtgttttttgctggtttctcaagtcaagaattgggaagtaacacattcctgtttttgggatttattgttctttattattattattattattattattaagtcatgttttaggaaattggacgatctgatggtgcaacttctccagcagttgaggctttaaccttctctcatacttactgtttgctgctagctttaattcaatttagttgtccaccattttttcctacattatttaaattctactcatcttaattttttaagcatttaatttaaacatgattcttgccgagtttcagttggtgatatctgattttgcttgacagggtagtgtgcttattagataaaagcattgtgagtgcacatgctctgatgcatttatttttcatcttttctagactctagaatgtcatgtctcgtgataattgagattatctaattttgaattttgtcattaagttaggccattttttttatataatcttggactgcgttggtcgttcaacttcttcgtaaggaaagaaaagaagaataccctaattgtattttttctcttatgtatattattattattaagtcatgttttagggaaagaaaagaagaataccccaaattaaattagcaaattttaatgtctaatgaaatttgactccatttgagagaatgaaaatctatactgtttgcaattaaaccttatatagttgaatcctgttattggtagaaaaggtgttgtccaaccatggtacgattttcttgaagaaatgaattttgatgatggagatgaaatctctatttactataggtattatgaaaaaatttgtgatatcataattaggaggcagaaggattgggaggacactgagcaactagactacctttagttccaacaaactctattaatgtttacttatcctattttgttgttaatcaactttgttctcaatcaacggcttgctattaatctcca

SEQ ID NO: 28586 - DNA, 256 bp, Glycine max
  Clone ID: PAT_MRT3847_125815C.1
aacacctatttgattaattttagaaactggtatgtatgggaacctcaaggatttttcctaactgtgcttcctttgaaggcagggcgggttcctccgccactccaattttcggttgtggttactgtgtcataccgatacaaaagttcaggcctggtaaaactctaaaaaaaccttttttttgggtaaccaaaataaaaattaatagcccgctttttaaaaactcaagattgggaaaaccccggtgtttcccaattta

SEQ ID NO: 28587 - DNA, 653 bp, Glycine max
  Clone ID: PAT_MRT3847_125816C.1
ttttgtaccaaagttaaaaacttattaggatggtgagtggtaataaaaaaagtgtaaccactaaactaaagaacagaacaggggaagtaaaaaaatatgatgaaacaaagttgctgccacataccagtagagttgtctttttgaacttacacctgaattctgaaagtgaaggtacatggacaccattaaaagaaccctctcactgaaaacacgcgtactatttatttggtggaactatatcagcttagagattttttggggcacagaaatgctgagtacggtctaaaggtagtgattcccgtatggatggggagaagcctcgggaacacactgaacttcttctcaatctagcatccggaaatacccctacttgagttacctgtttcggaataattgagatctccaaccttcccatgacatcacgtatgctcatccctcttatttgcgagtgtttctaattgctattgcgttccacatatttactgttaaaattttgttcaagcatccacgcggtgcaatttctgatgatctatgcccccacatcgcacagagaactgttgcctgctagtgtgatgtatgaagaaaaaattataaactcctcgacaaaaggatatcgatgtagggcagatcctcctaaaaattcaagatttctt

SEQ ID NO: 28588 - DNA, 870 bp, Glycine max
  unsure (1)..(870): unsure at all n locations
  Clone ID: PAT_MRT3847_125817C.1
atggacgaagggctaactgacgctgcggccacagggactagtgccgctcccaagttcgatagccatcatttcaggagcgctgagcaccagcagcatttcgaagccatcaagggattgtccttccaccgagagagacgcgtccaactcagggacggtgagtacatagatttccaggaggagatagctcgccggcgttggacgtcgctggtcactcccatggccatgtttgatccagatatagttcttgagttttacgccaatgcttggcctacagaggagggcgtacgggacctccggtcatgggtaaagggccagtggattcctttcgatgcagatgccctcagtcagttcctgggatacccgctagtattgaaggagggccaggagtgcgaatacggtcagagaaggaatcgggctgatggatttgatgaggaggccattgctcagttgctatgcatcccaggtcaggattttgctcggaccgctgccgggaggcgggtgcggatcatgcgcaccaacatgactaccttgacccagacatggatgacgttgctgctcagcaacatctgcccagcggccataattccgacctccttctgccgaagtgtcagctggtgtatgccgcctaccaggcaccctctaaaaccagataagtctaacagggccctgggttttccggcgctgatcacaggtctctgccagtcgttcggggttcctgtcacacctagtaaggtgattcgactgccgatcacccgagctttcatagagaagtattgcacgcatagacaggcacagggtggcgacccgcangccccagacgcaccgncggcacctcatcaggctgatccaactgggtcatttgacacatag

SEQ ID NO: 28589 - DNA, 251 bp, Glycine max
  Clone ID: PAT_MRT3847_125818C.1
ggctcgtggaacattcccggatctctaaccggcgttcctgggctgggtctatactcttatttttgcactgccgagaacaaactgaaacagttagctagtgatcttccactggcctctcagggcacagacaaagatagcttaccacttttggccggcaaaaacgtgggtcatcaaaacgaggaaactcatgagactaagaaattaaacaaggatcctgttatctgaaaggacaggctccatgaattcttaag

SEQ ID NO: 28590 - DNA, 308 bp, Glycine max
  Clone ID: PAT_MRT3847_125819C.1
ggtgtaccgtgttcaaggccgattattctactgcaagtgattaggtggccagagacagcatatataaactgccgttaattgatgcattaatactcctaaactgtggcctactgatcatacatcggattgccaaggatcattccaattacacattttccaggaagattgagccccgactgttcacatgctaatacgcattatctgtctactaattacgcctatactctagcccacagaagttcgatccgagatccaatcggaattacaatttgacacttgtcagacataacgagactgaaatgttcata

SEQ ID NO: 28591 - DNA, 1330 bp, Glycine max
  Clone ID: PAT_MRT3847_12581C.1
tcctggtcgtctcccatgtccgaatctggtttgggtcgtcctcgtttgattggacctctctttctctggagtatcctcccctttatttcctcgtcctccaaactccaaagccgtttccaagtgtaatggattcgagttccattaacagcaacagtaaggagataaccatggagattccaagcttggttcgactttacaaggatggcaccattgaacgcctccaaaactcaccaattgtgccacccacgcttcaagatccaacttcttccaaagacgtcgtcatctctggtgaccccctcatctctgctcgtcttttccttccaaaccggattcgatcccagcaagagggtcataaagtccccatcttggtctactttcatggtggaggtttcttctttgaatctgccttcaaccaactccaccataactatttcaacaagtttgtctccgtagcagatgttttagtcgtttccgtcgagtataggttggctccagagacccttcttcctgcagcttatgatgactgctgggatgctcttaaatgggtcgccaccaacaccgaaccatggcttgtcaaacacggtgatttcaacagagtcttcattggaggtgacagcgctggtgctaatatagttcataacattgccatgcgtgctggggctgaagctttacctggtggtgtcaaactcttgggtgcttttctttctcattcctacttctacggttcaaagccaattggatcggaacctgttgcagggcaccaacagagcgtgccctatttggtatgggattttgtttatccatctgcgcctggagggattgacaaccctatgatcaatccaatggttactggggcgcctagcttggctggacttgggtgttctaagattctggtttgcgttgctgaaaaggatctgataaaggatagaggggttgcgtactatgaggctgtgaagaagagtggctggcaaggtgaagcggaactgttcgaagtggagggcgaggatcatgctttccacatccacaatccacaaacccagaatgccatgaaaatgatcaaacgcctctcggattttctcctccactaaaacacataccctgaggattctgagttttaatgtctcatggatgtaatctaatgtaatgcttcaactctgcttattattattaagcaaataaaatttggaaatcagaagccagtgtagctggcctagttcgtgtgatctaaagtctaataatattctctattatgctacgggtaagggtgtgttacaccttcgaactttcattcccacttttcaatcttctttcatgtgtatggaatggagtc

SEQ ID NO: 28592 - DNA, 481 bp, Glycine max
  Clone ID: PAT_MRT3847_125820C.1
cggctcgagacggctgcgagaagacgacagaaggggtctaactaactgaaatgacagtgaatgttcaaaaacctccaatcttctttctaatttattatcacttatcagggctgattttctaacatgattttacaaaaacctccaatcttctttctaagctcacagaaattttggttgtgcctgtccgtatcacattactaaagttcctctttcttcacaaacttaaagtgaaatgtatttatgagtgataccatacttccaataaatttttaaaacacaaatttacaactcaatctttctctttatctcaccctattaaatcaaccattttatcttacacttctctcctctttatttttctctcttctaaaatgtaaatattgttataaaaaagttgtgtggaagtagaattatcctgtatttatatactgattgcgaaaaatctaatactgaccaaagatcagacatcatggaaatgaga

SEQ ID NO: 28593 - DNA, 487 bp, Glycine max
  Clone ID: PAT_MRT3847_125821C.1
ggagagagaagggaagccattattattgccaataagggaagtgcagtatagactagccttctcaatggatttgtctgaaatcaaatcatatatatatatatatatatatatagagagagagagagagagagagagagaatgtgcggttcaaaattttctccgctcatgttttgtttgtttaaataaaaataaaaataaaataaaaatatgcacaacgtgtttttaatggttatttagcattaaagttcgatccacaacatgtaggtttgaaatggtaaatacctatattaacaaaaatctacatgtactatatgtgtgactttacttcgatggcaggaagcacaccgaacgttctcttgtttgtttcccaaaaaatcatagtcgccctcaacatagaaaaatgagttttcttggcatttactacaacttcttcaccactctaacaacgttctctttctaattctttctttattgttattaaaattta

SEQ ID NO: 28594 - DNA, 2924 bp, Glycine max
  Clone ID: PAT_MRT3847_125822C.1
attattctgattttaagttgagtattatattcgtacggctgcgagaagacgacagaaggggaagagagaaatatcttgttgagttgatttctgatcccaaattgagtttgagtttcagccatggtatctgtttctctgctcttattcctatctttctttgccttctttgcaccctctgaatctcacgacaaagtctcgttggaattgtactacgaaagcttatgcccctacagcgccaacttcatcgtgaatcacctcccaaaaatcttcaccccagatcttgccccaatcgttcacctcaaactcgttccttggggcaatgccaaactccgtgccaacgccacctttgactgccagcatgggccatatgagtgcttgctgaacacagttgaagcctgtgcaattcacatctggcctcaactcagcaaacattttcctttcatctactgtgttgaggatctggtgtttcagagtaagcgtgaggaatgggaatcttgttttgagaaactggatcttgattcggaacctattaatcagtgttataatagtgaacatggaaaacagttggagctacaatatgcagctgaaacaagtgctctggagcctcctcacaagtatgttccttgggtagttgtggatggagaaccactctatgaggattatgagaacttcttaagctatctttgtaaggcttataaaggcactgttacaccccaaagttgcacccaagcatcatacctaagagaagtgaatgcaaagcctaagcattcggtttgctacaaggacagtgggattatgctaacatgggaaaaagtgaggtcaaccattgcatcatggatgcactagatgaatcttggcagtgcattttagatgtgccaatgctgcatttagtagcagtttgttcgtgttatcttgtgtgtagttgtgttgatccctccaaaagtgcaaatagaacttgtgatgcacataaaaccatatcgtactctcataaaaaaaataaaaccatgatgtgtatgtgtatgaggtacttaagtacaatatatatagagagagaaaaaaaaaagtaagtgcaattctataaattctttgatctgacgggcaaaggcttctcaaatttccggtgcctcaagtgattgcagtggataaatcggcatggcaaactgatgaagaatttggtagggagttgctggctggtataaaccctgttgtaattcgtggtctccaagagttcccaccagcaagcaagctagatcccaaaatctacggtaatcaaactagcacaataaccaaagaacacatcgaaagtaacctggaagggttcacagtagatgaggcaattaaagaaaggaggttgttcattttagatctccacgatgcattgataccatacgtgaagaggataaactctacttctacaaagatgtatgcaagcaggacaattctgttcttgcaagatagtgggactttgaagccactagccattgagttgagtttgcctcatcctgagggagatcaatatggtgcaataagtaaagtttacacgcccgtggaacaaggcattgaaaactccttctggcaactggccaaagcttatgtagtggtagctgactcaggctatcatcaacttatcagccactggttgcatactcatgcagtcattgagccaattattttagctacaaataggcaccttagtgtgcttcaccctattcataagctattgcatcctcactttcgtgacaccatgaatataaatgcactcggacgacagattctcattaatgcaggtggtgctctagagttaacagtttgtccatctaagtattctatggagttttcatctgtgctttacaaggactgggttttccctgagcaggcactgcctgaagaccttgtcaagagaggagtggctgttaaggactcaacttccccgtatggccttcgattattgattgaggattacccttttgcagttgatgggctagagatttggtttgctatcaaaacatgggttaaggactactgctccttttactacaaggaggatgacactatcaagaaagatactgaacttcaatcttggtggaaggaaataagggaggtgggtcatggtgacaagaaagatgagccttggtggccaaagatgcagacatgtgaagagctgattcagacttgcactattatcatatggattgcctcagctctccatgctgcaatcaactttggacaatatccatatggaggcttcccaccgagtcgtccggctataagccggcgattcatgccagaaaaaggaactccagaatacgatgaacttgtggcgaatcctgataaggcttatctgaaaacagttacttcacagtttctggctgttcttggcatttcacttgtagagatcttgtccaaacattctagtgatgaggtctaccttgggcagagagacactccagattggacatctgatgctgagccattgcaagcctttgagaagtttggcaaaaaacttgctgatattgaggaaaggatcttgagaatgaatagtgatgagaaattcagaaaccggtatggtccagttaagatgccatacaccttgctttatccttctagtaaaggtggactaactggcatgggggttcctaacagtatctcaatttaatttaaagggggctgtaaccagagtcttgtctttagttgtatcaaataataatggccttaaaggaccttggttattttgaattatgattttataatggccaacaaagacttctctttttcattttagtgtgcaaatctgttgtagattaattttccttttgctttgcctaaatgaactttttgagttattttggactaaaggcactgttacaccccaaagttgcacccaagcatcatacctaagagaagtgaatgcaaagcctaagcat

SEQ ID NO: 28595 - DNA, 282 bp, Glycine max
  Clone ID: PAT_MRT3847_125823C.1
ccacttgggtttcttcgttataaaaaagcatccatttatctcacacccttttgctttttctacatttccctttcctaaattcctcttctactactcacacctctcttttctctcccactctttctccctcctcaattacttctccttatttgtctgattttcactagctatctgtgaaggtttcgttttgcaggtcgctccaatggggaaatcctcctcttcgctcaagaagaaacgttctaagagattatcgaatgccaaggcaagcagtaaaagtaagat

SEQ ID NO: 28596 - DNA, 466 bp, Glycine max
  Clone ID: PAT_MRT3847_125824C.1
aattggatcttgttttaaatattgttttgaatgtttgtcattttaatagtctgttattctaagaaagacaggaagaccctgttggactaataggttggttaaaggaaactgtattcacactcccataggtaggttcatcctaatgggaacaacgaccaaatttaaggtggcactaactgagcctttagctataactttttttaccaatgcttgaaggcagaggctgagatctcaaatgatcagtgcccaagtcgatgcacctagacaagtcaagccccctttgggagaaacaaccgtggaactaaagttgcataaagtacaaagggaacaacgagaaaaatggtcatcattagagcgagtgttacaagaacggaacaggcatatcgtacgtgcaagggactttgaaactgcctatggctatggcataaacctatgcgcccaaaacggggattaacatatgaactac

SEQ ID NO: 28597 - DNA, 480 bp, Glycine max
  unsure (1)..(480): unsure at all n locations
  Clone ID: PAT_MRT3847_125825C.1
gcggcacgttctatcctaaagaagacactaacaatgggaatctgcagaaatatgggtacccaaccaagggtacaaagaaggctaggaggaaacagagctacactttttgtatatgctatggaagggctagagaacatggcttttgttgccaatgctgtgagcctagtaacttacttctttgggtacatgaacttcagcttaacaaaatctgccacaaccctgaccaactttatgggaactgcatttttactggcactggttggtggattaatcagtgacacatatctttctaggttcaagacttgtgttctgtttgcctgcatggaattgctgggatatggtatcctcacagttcaagcacgcttccaccaattaagacccatcccctgcaaagatctagcaacaacccaaatgagtcaatgtgaggctgctacaggtggncatgctgcaatactttatactggcctctaccttgttgct

SEQ ID NO: 28598 - DNA, 815 bp, Glycine max
  Clone ID: PAT_MRT3847_125826C.1
agcccatcaacggtaagcctctaaatacatgatttattcagcggtcagcaaagtaatagagataatgaatatgcataaactaccagaagctaaaatacaatttactcgtactattcacacttcaattgattcatgtttcaaaatgatgatttatgattgagtcaatgaacctgacttagatcactatgcagcagatatgagtaacacatagtaacatctttgctggttacccacattgtgcatttaatggcaaaagacatcaggcatgacttcatgttaattttagaccctaccaactggagagaggggaggataagcaacataacttgcaggaatgtcctctaatttgccaaaagcctttagttcatctgtttgcaccaacagagtttctctcgaattttttccttcgatgtagtttcttgatccagaaagttcatatgagatcaagccatcaactaacgctatgcagatggagaatgcttgcaaaagtgagaatgaggaatcaaaagctaccgaatataccccaggcttaaagggggaaaaactgaaagcaggctggttctctaggtcttggtcattcacctggaggaaaagctcaaatggatgtgggaaacaagcttttgatattcttgattttctacatgcttgactttcatttgcaagaatcttaagtttactagccatatcccaaccaccacagtcgcatgatccacctgttctccagcgctcaatcagtgatgaaggtcctccgttacttggaaaactgtgaaccccagttgggagcacaactgttacatgtagatcttgactgtcat

SEQ ID NO: 28599 - DNA, 347 bp, Glycine max
  Clone ID: PAT_MRT3847_125827C.1
cagaacgatatgcggaacaattgggagcgctgtttgttcattttttacatagaacaccccgggagagtagccaactgaatcacaactccaacaaaacatgcttcacggaatgaaaaggccatcccaaatgcagcgtgaggagctcgggattttcaataaatgggaggcactcgttgcaaaatacagcaacgggtgcaaaggccaagactgtgagatctgacccagaataaacagtgacaaaagaggccagatacacatacacatgaccagctaaccagggaacattgatgaatgctaccaacagccataagaggaagctgaagcagattgataagtggggaaccaaa

SEQ ID NO: 28600 - DNA, 363 bp, Glycine max
  unsure (1)..(363): unsure at all n locations
  Clone ID: PAT_MRT3847_125828C.1
atagagaaacaaagcaaccgagaaaagacagggaggcaaccaacgcgaccggggcgacaagcacgccaacacacacagagcgtaccggcgtcagcctcgaacgacaaacggcggaacaaaccccgctagcgtcgcaacaccggcggaccatggccaccgccacggcgggaggaagcgcaacgcgcaccacatcgggcaaacggaccctgacacacacccaaaaacggaacgcaccgaaccaaaccccgcgcccgcaaacaccgaacagcaagatcgggacccaaccncccacaaggagagggccatccccacgggctgccccaagaacaccgatacccagggtgggggggccccccacccaac

SEQ ID NO: 28601 - DNA, 145 bp, Glycine max
  Clone ID: PAT_MRT3847_125829C.1
gagagctaagaaccctaagaaggacagatttgtgaccaataatgccaggaaagagacccaggaacaaccagggaagaaccagacacaaacacgggaaacacatgacagaagcaaccaagcgccaatggaccacagagcacactgg

SEQ ID NO: 28602 - DNA, 243 bp, Glycine max
  unsure (1)..(243): unsure at all n locations
  Clone ID: PAT_MRT3847_12582C.1
cagccacttagaggttgaagcagcgngcggcttcttagtgagnttcaatggcgttcattggancagtcaaattcttgctgnagcacttacttctaatatgnctcttaaatantctanctttttcncnanggaaagaggactggaatgaangggaaccggttataaggagagcnagtttcaatggggtataatnggnaaagtggtgggnatgattatantatagtggggggtggacagcaggtg

SEQ ID NO: 28603 - DNA, 446 bp, Glycine max
  Clone ID: PAT_MRT3847_125830C.1
ttgatgcgtgggcggacgcgtgggcggacgcgtgggccgagttgcgagttgcagagagagcaatgagtcaggaatcgtttatatatagcttcgtggctcgggggacgatggtgttagccgagtacaccgagttcactgggaacttccctgcaattgcagctcagtgcctccagaaactaccctcttccaataacaagttcacctacaattgcgaccaccacaccttcaattttctcgtcgaagacggttacggtattgccgatctcttttgctgcatcttccccagtttaagtgctggatctactctgtcacatctaattggcacacatatttctcttttcttttcttttttatgggcttttgaattggttttccttagtgggttttctttactattcggggttccttccaaagttttgttatttttctttttcatttcaatgttg

SEQ ID NO: 28604 - DNA, 424 bp, Glycine max
  Clone ID: PAT_MRT3847_125831C.1
gcctgacgaccggtccttaattcgggtcgccacgctttcttacaccaaaagaaatggcggtggcagcatggcaatcacgtgacacatggggctgttttatagcttgcaccggatgatgtccctgcagaatctgaaatgcataagagtgtggtgcattctgttgccatacacaaacagctaccaaatcgtaagcagcattctgggtttattgagcaaaaggtgtatgacacacgacaaaggaaactgtggaagcttactgataaggatcatgaggacaataaacagcatgaaagtgatgagctcgttcagaaaactgtaaaacgtttggacgaactacttgacatagagcccgaagaacctgttgctgatcaggatgatctgatgaaaaataaaaagaatcttaaggaaaaagagcgtttcacct

SEQ ID NO: 28605 - DNA, 498 bp, Glycine max
  Clone ID: PAT_MRT3847_125832C.1
acaagttaaccgaaaaactacactctgtttattcaaattccccaaccccctctatttatcctcgttcactacgttttatatgcattaaacattggtttggctgccttgtgctaagctggaaaatattgaacctacagatttacgattttgcaggaccgggtctgaaaagattatccttattgatatccttacaacctttctatttcgacacttgcacagaggaatgggggtcggcctctcagaaaagacacactctcccctcctagagcacctcttccatataccaatcgcgtccgcctgaaagtatctacctatcaagatgtctattttactgacaccacaccaatccaatagtattgaatcacacaatcgatattgctataatacaactctttatcatacataaatgaagtctgtgaagaacagagccataaccttgattttgcgctttatctgacgcaactgatctacccgataattccggaccgtgtcctgcag

SEQ ID NO: 28606 - DNA, 575 bp, Glycine max
  Clone ID: PAT_MRT3847_125833C.1
tacggctgcgagaagacgacagaaggggaacggaaaagatattgtaaaaagagcatctgcaaaagataaggagacactcactgccattcctactcttacaaaccttcttcagaacttcaactcttcgatctcctccactttgcgcatcgtactctctctctttctctctctctctcttaccttctcaactcaacatcaaaacaatatcaattctaataataactcattgcacacgtcaaatgaatagaagaagataattttgcaatatcacgtgattttgaagatgaatatcgatcgatatcgtgtccggtactactatttcagctttacaggaaatgcccatagcaatcaacactgatgagccaaaatctcaacatcgtaaattaccgattgctttcttcaagcttgtgcttggaaacaatctcaaatacagggacaatgcagcttgcatacgagactgttgtgaagctcgtgctggctgcactcgaacgcaacgtgctccctgacgtcatcaccaggagactcacgcgcttgctgttggctactcgccttcgctctgcttacaaaccctccta

SEQ ID NO: 28607 - DNA, 252 bp, Glycine max
  Clone ID: PAT_MRT3847_125834C.1
gaaggaaaaaggtgagtagaaagatgagcgtgtgtagtcagttgatgtttttgagggtgtttgttaaggggcatgaaagaggtggagagagaagggaaagagagaaagaactaatgaagggttcgagaggagtaatagtgagtggtcgtggttttgtaaggatgagaagaaatatagtagtaaacattctttctaatgtgttattgggaaattttatattgcagataggtataatgatgaaggaggggaaga

SEQ ID NO: 28608 - DNA, 261 bp, Glycine max
  unsure (1)..(261): unsure at all n locations
  Clone ID: PAT_MRT3847_125835C.1
attaactcttatttaaaactactcaataaactttaaaaccaacataatctatccatcatcttggatgttaattctggtacctcgggtcanaaatttaatatgctccacaaacagtcaattcacacatacatttttaaaatatctctatttcatcatgctctacaaatcaatatcctcaactacaaaaatttcatctcttaaacattacctttgcttcaatctaacacttaaaattacactcttatatgctacaaaccctct

SEQ ID NO: 28609 - DNA, 530 bp, Glycine max
  Clone ID: PAT_MRT3847_125836C.1
ctaactaggccctatggaactctgatggtgtcttacgattacaactcaatgcttcatcacccctccagaacgctgttcccctacgccagcagctgtaccacggctttcgccatcaagaaccaccggcacaggaggaggatcaacttctgttccgactccaatgccgcatctcttttttttcgagcacgccgtcgtcgctggggccggcgagaagacacgaagaagagacttgaaggtccccagacgcacaaacacggaatcactacctgcaaggattgtgcctgaaagaaaaaccattgccccaaagaggtctcataaacctatacatctacgtcgcagcaaagtcaagactcttcaggttggtcgatgttgcactcctccgtctcctaaatccctcggtggctacgctggaaaagggtgctagggaaaccgagactgtctgcttgagctaattgacttacaaatagaattgcctcgaattggggcgtgctctgggcattgtactctgcatgtatccagaaaaaagcagg

SEQ ID NO: 28610 - DNA, 362 bp, Glycine max
  Clone ID: PAT_MRT3847_125837C.1
ctatcggtaacttaactgtcaagctcagaactgaatgaagttaattttttatgtaatgagtaccatacctcatgcccggggaatctgatcccgggcgggggcgcatatcaaacgacaaataattcaactcacaaaatgaatgctcctatatatgaagaaacaatatgaagaccaaacggcatctttaacttggcttgtaccactgagaaataacaacaaaagctaactttaaaagagctgcatgaactattccgatgaaatcctaagattggagagtaaaccagtgctaccaaaacaatgacattttaaggcaagaacaacaacacaactcacgtcgttttggccttacacacaacactaat

SEQ ID NO: 28611 - DNA, 435 bp, Glycine max
  Clone ID: PAT_MRT3847_125838C.1
aacctctcataattaagatagattcttctgaagacagtcatgaaaggttggttaatatctactgcacgagccccaacacaacataaagcctaccacgcactcatccctatccgacggcttcatctacaccgtgaaagtcctatacacctactaacaagactgggccatctaccgacgccccaaggatatcaataccggctacaatgtacccgacttagtcgacaccttatacaatctaccctctaacatcaactaggggggctgaggccagtccttccactacagcccctccatccaccaaaaagtcccaccgggaggcctctcacactccacgaggagatggccgacaatctcattgaggccaagccccaacacaaaattctgaacaaagtcagctttgggagcagacccatgcggcccatcacaggccactcc

SEQ ID NO: 28612 - DNA, 241 bp, Glycine max
  Clone ID: PAT_MRT3847_125839C.1
agttgatactggtttatgcctaatttactcagcggagcgacacgcgcaggggggggcgtaatacttattctgcggggctggagaatcccaacagcatgtacacttaggactcgagaaaattcttcggctattgtgcttgaattcatcaccactttctttttgatgaacggatttccttgcgctgcaatgttagcagtgggatatcaaaagagattggaataccacgggagaagttaatacc

SEQ ID NO: 28613 - DNA, 492 bp, Glycine max
  unsure (1)..(492): unsure at all n locations
  Clone ID: PAT_MRT3847_12583C.1
ctctcctctttcgggaatcactgttttggtccttctcctcgctctccttctcagattttacatcaaattcgacaccgctgaggtcactgttcctaacccacaaaaatttaaattctgggtttttagatttttctcaattgggtcataaaagatcccatttttatttatttttaatcaatggaaatatcagttacttagtcaaggactttgactctgctttttgttttgcagaggttgttcagtgctgaagagctatcattgttcaatggaactgatgaagggttgccaatccttctaggaattcttggatccgtgtttgatgtaaccaagggaaaatctcattatggttcaggagggggatacaatcattntgctggcagggatgcttctcgcgcatttgtctctggaaatttctcaggagatggtctcactgactcattgcgtggtttatctagcactgaggtgaagagtatatgtgaatggagggatttc

SEQ ID NO: 28614 - DNA, 550 bp, Glycine max
  Clone ID: PAT_MRT3847_125840C.1
gtaaacatcaacctgtttagctttaaaagattttcagcactaaaacaaacaccaagaccaaaacagcatcaaaacccataacctagtcaaaaaacagagaacatccttcaccttcacgtgcaacaagatgaagaggaagaagcaacttaaaaccctctgaaaacaagggggagagagcgaacaagcacccaacaatgttccgaacaagaaaaagtagcatcagaacaagcaccctgaacaggcaacagtggcagaaggtggtgaagcttgaaacagaaaagtacagagaacttagagaagcagcacgaaccagtcaccagtgagctgtttcgatgagtgcgagtgtgtttggaagacaatagggctcggacacgatgggaaagaaggttattgcgcttttttggggacacgatttttccattttacgagtaagatcgtgatcctaccaaaatgggttctatcacagtactatcatataattgggatcgcagaggcagtgaaaaattgtaagattgtgttgtgtaaccttatgatcaagatagcaattatg

SEQ ID NO: 28615 - DNA, 483 bp, Glycine max
  Clone ID: PAT_MRT3847_125841C.1
ctgacccttgggtgagcgtacaatgggcagccgcacctgagtccaaagcacgttcattttgcttatacttgccctcatgcgcttttggcaacggagcggccagccgtggaagtgccgaaaggggccggtcataagcagaaaacgctgcaaaaacagtcattagacagacgctgccgaaatcgtactgatactgtgaagtcccgtcaacagtcggcgagtgacaagccgggctcttttcgtgtgcagcgggttgacaacaaggaacagcttggcgtgcagatggctgtctcctattgcggatcgggctcgacaggcagaacgacgaggacttctggaagacgacaaactgtcgtcgccctcgcagcgacttggactgccctgccgtcgtaaaccgaacaaagcggaggaggacgcgcaaccgccgccaaaagtcgtggcggatagagacgcgtgcatgaacatgacatgtctatgtacatattt

SEQ ID NO: 28616 - DNA, 456 bp, Glycine max
  Clone ID: PAT_MRT3847_125842C.1
tacagctgtgagaagacgacagaaagggataactaatgggttgagacaacgccgatagactcgcgtatagataataaaaatacacaacgagctctcagttataaccctatggcgctgctaccgattttctctcttaggattgagggaatctgcgaaatggcgtcaggatagctgatgataaactcattaggcactgaaaagctgccaaatgggataatggtgtgataataacgcgcaaagataatggcgagactgggactattaagcatgccattcactatcacattcgggtcattgctgagggtataaatctggagaaatagcacatgcaagctaggtctaggtcactgaagggggcatctttacaggcgaagctccaatgccatgcctccaatgtgcaagttctggacccaaggacagggaacccttgcgagattggacacagatatctcgaat

SEQ ID NO: 28617 - DNA, 418 bp, Glycine max
  Clone ID: PAT_MRT3847_125843C.1
gagacaaaaattttcccaaaaaaaaaagccaaaaggaaaagtctagccccccttattgtagaatcctatcgatacatgcgaacaaaaagggtttacagaccaaacaccaaaaccaatagtggtgataactctactttccaaagaggaggaccttcgcgctaacataacttccataaacaagctatcggatattcttgttcttaaaatgacattaggagtgattgacagcccattacctataaacaattccaatggggggttcaccccagactaatacatgtgagaccttttcagatccaacttccgagatgcccctgagaatggacactctcctaaccttattttcgcctgaggaattgcctgctctcgatcgactcgctcctgaagcctaggctaaccctggccggaaaaagagcgt

SEQ ID NO: 28618 - DNA, 274 bp, Glycine max
  Clone ID: PAT_MRT3847_125844C.1
tcccaaacctcctaataccgttctttttgtttgacttaacaaaggtcaccttgtcgggcttaaaaaattggctggacgccccttaaatcctaaagggaaaaccatccaaaaggttcacttttttaagaaccttattaaaaaagtaacccgtttttcaccctattaaaaacctattacttaatttcttaaagtttggaaagattaaaaggcacttaaagtttccaaaaaaaaacttcgaacacaccaaccccccaagaagaaaccttaagaaatt

SEQ ID NO: 28619 - DNA, 629 bp, Glycine max
  Clone ID: PAT_MRT3847_125845C.1
ggaatatgcggaattaacacattagcttcatatcctgtcaagaccaagcctaatcctcctatccctcctcccccaggtcctgtaagatgtaatttgtttactcactgttcagaaggagaaacatgttgctgtgccaagagctttcttggaatatgcttttcttggaaatgctgtgggttaacttctgccgtgtgctgcaaagacaagcgccactgttgcccccaagattatccgatttgtgatacaagaagaggtcaatgtttaaagagaactgcaaatgggacgacaacaatcacttctgagaaccaagatttttcccacaagtcaagaggttggaaatctcagtgaacatttatgtgcaacgatattcatttgtatgatcgagtcatttagttgctatcctatttgtattactgagttattctattactagtagccgattagggttcaaaagaaatcaagttttgacaaatggattatattcgctatggtatggggggatatggataggataagttatggtatgtgcatattgataggataaaccagtaggggaatgcacgaacaacccgaatgtaatacccctatattataaaggaaacatgtatgcttttgttcccaaacaaaaa

SEQ ID NO: 28620 - DNA, 803 bp, Glycine max
  Clone ID: PAT_MRT3847_125846C.1
accaatggagaaaggattaacacattgtctaaaaatataaaccagtagagaaagaattacaaaagatctgaaaacctaagtccaaatttgcattagtggctgatactgcaactgagttcaagtgatgtagtgtatccaatagacacaaacatttagcaaaatatatgcctaggtacaactgaaaaaattgcaccactcaacaaagagtaaaattgactatcaaagaagatctcaggctctcatccaacactcaattcagggtgcttctggctggggctgctctggttgcctgatatataagcaatttttccaatgtatgataccttatccaccaatatgtatcataggcctatttgcagtctttgctatgtcgaacataccagcatgtgaagctttcttcctcttcaccgagtttccctcagctagctgtcgctgtcgcttcctaccagcgctgctatgcgcagtcgtcgacgggtttgttgttatgcttcccgcttgcccgtcgatcgggtagttccccgctgtccctgtagggtgctcccgtcctctctggaagcctgttctctctgtcctcaccgcagcctccatgtccgagtcgggtgcttccctctcgtcatccctttcttccccttcgacgcgcatgatctctggtatccgactaggacaaaaggtttgcaacagcaagaaacatgattttacaagaccgcataaaaatagcttcactaaagttatacaatatcacagtagtctatgacccactgttgactattttgccagaagacaaccgcatatgttgataggac

SEQ ID NO: 28621 - DNA, 250 bp, Glycine max
  Clone ID: PAT_MRT3847_125847C.1
ctgagaccaagattattctttaatgctatgccactcacattcataatcatcatgaggattactaccacacaaacgctacttcaatttcatgggagagaggtgtgacttgtacaagccaaaactgaccttttgatagttcttggctgctgctattgataacaataattgaatcaccatggaacagtattgagattgtgaacacacccaattactcgtcattgaaccacacgcacttaaagttctgtccaca

SEQ ID NO: 28622 - DNA, 451 bp, Glycine max
  unsure (1)..(451): unsure at all n locations
  Clone ID: PAT_MRT3847_125848C.1
gnccagggccgncgccggngccnncaccttttaccnnnagnaagccggnnccanncgnnagaacggcnacancgncancaaaggccgccccngcnggggngnggaagnnncgacccccaaaacgggaaagcacgggcacgcnaagggncacnnngnnggaacgganacnnncacggccaagaaacnngaggananngggcccccnncncacaacggcgangncccncaggngaancgnacggaccaccagcncanngangnngccgagganggcacccggaggccgccnaccgaaaangggnacaccaaggaggaccccaagccncccacggangagagnccgcccccncagacaaaggacggannngccgggggcaaggaccnnggngcgcccggcacggcggcnacgggcgaggaacagaanngggcccccaaggaaancgggcccaag

SEQ ID NO: 28623 - DNA, 480 bp, Glycine max
  Clone ID: PAT_MRT3847_125849C.1
aattgccgggtcgacccacgcgttcggcaactctcgtactacgtactaattcatcctttctgcagtaatgtacaacttataaccgaccttaagagttagagaccacctatagtttagtttctggagatataaaggttgtatggttggatggttaaaaaaaaatgatgggtttaatttttctgctaatataaatataaaaattctagatctcttcttgacagtaggaggcactgacttaacaaactgtttttttttttttttaataacaggttatcacaacggagcactttttccctgtgtttttcaatccttatcttcacctcaagatctagccataagccatgcatgtcaaagtagatatgttcaatcacagtatcacaccattaaagtagcccaggcaagcaagacggatggaggggggaagcaaaatgtatattttttattagtcattgaatcacaacttataaatttattaacttt

SEQ ID NO: 28624 - DNA, 374 bp, Glycine max
  Clone ID: PAT_MRT3847_12584C.1
tcgttgattattatcaactactagttgaccgaggaaattacaacaaggaggcataataaaaaatactaccaatacatcatgagagggcattattaattattatctaattctgatgagttgaaaggtgattatctgcccacatgctcataccagctgggaagtaccacacgccggttctacccatgctgacaacaaagaaacaataaatagctactgatgtcggcggcaccgtattatttggatgtcttataaagaagaagagaagattctttgatgctatgagctgactactaacgacatgatatcatacaaccaaaccacccattattacgccgaacaccatcatgaccattctcacctgcactcctcctggc

SEQ ID NO: 28625 - DNA, 425 bp, Glycine max
  Clone ID: PAT_MRT3847_125850C.1
cctcatggccttaactgtgttccaagtaatctattttatcatttttaaatgaaaagaataaaagatataaactaacatactgattttaacctgaaggatatttgatgcacatgataacctcaatagctgacccaaccattaatttgcattagatgccccaaccattaatttgcattagctgacccaaccattaatttgcattacatgcccacagcgtgacttttaatgcatacttgtatattcagtgatcctaaaataataatctagaagtcagtaaaatctagtgtcctccttttttgtcatatactagagttaggtgtgccatgttgcacaaatgatttccttgctggattcaaattttaaagttgtgtgcgggttttgtaaaatgcaaatggactgttgtgaagctcacatgatagatggat

SEQ ID NO: 28626 - DNA, 621 bp, Glycine max
  Clone ID: PAT_MRT3847_125851C.1
aacgaaggttgcttttccttttggcccatgcattctcactgcctttaccttcattcacttcccaccctcactcctctgtctcaacaattccaacataccagtttgtgtccccccatgagtctgaaaattactacactgctattataataacaataataaagtaaggacaaataccagcactatcgtattttaacgctttttatattaattataatttattaaaaattataaaattttgtgagtcttgcattcttgtttaataaatccctttcctaattaattttatattttttaataaatgttacctaaataatattaataaagagttatttaagtatttataatgttggtgtaaataactcactttatctcattaaataagatcatacatgtcacttcaattttaaatagcccaatcgatttttactttaatgtgagtttttatattttattttataaataatagaagttcttaccaacaagttccttaacttacaagttttatatatatatatatatatatatatatatatatatatatattatttctttctcttcaatatcacatattatctttccaacatgtacacacgaatattaaataacttatattatatggaa

SEQ ID NO: 28627 - DNA, 311 bp, Glycine max
  Clone ID: PAT_MRT3847_125852C.1
ggtgcgtataatttccaactttgggatttcaacctttttattcatattaaactttcaacagttgaattggattgaatagcattttgaatgacacaggtatcccatgcattggacaatttatttactttcttaaaaaaaaaaataccccaaatcaaagctgaaaacagaatgcctttaaaagccccaaaaaaaaaaaaaaaaataccgggaatccctagagaagttagatttgaaaaggtttataataaaaaaagagaaatgtgactcccaaaaaaaagtaccccaattaattgggggggggaaaatgtacc

SEQ ID NO: 28628 - DNA, 410 bp, Glycine max
  Clone ID: PAT_MRT3847_125853C.1
tcggatagaacaacacagtacggatctcagaacacaacagaaagggtagttcagatggtgaagccggcattctttggtatccacacctcaatcccagatcacgctctctgcgaatcattcataatgcctgcactctccattgatcattacaggatgttccaagcagaatccaagattccctcgggagactctcaccataatcgccttattacacttcaattatttggtcatttttaagttaggggagaggcccagtctattaaactttgataccttgttaaaccattaattatttcaagggacgccccttgtcgcgtcacttttagaaattatgtatcttgtggtacgatcatcctgatctaaaacaattaatgtgcccgaataatccgtggtgtactaataaacattga

SEQ ID NO: 28629 - DNA, 250 bp, Glycine max
  Clone ID: PAT_MRT3847_125854C.1
atcaaacggaggaagcaccgagcaacaacttcagtgtcttctagggtgtgattcacgcactatcaaagaaagaaagacgaaagatggttgtggtggacgagttaaaccctagaaatgttagtggaaggtgaagggtaaaaaattcccaatgtagatatgatcgtaaaattgtaagaaaaagttacactctcaccacatcagcaatacattccaattttatttgttttcacttgtctaaaaaaaaattgaa

SEQ ID NO: 28630 - DNA, 758 bp, Glycine max
  unsure (1)..(758): unsure at all n locations
  Clone ID: PAT_MRT3847_125855C.1
tggcttttccaccatcgtgtggggataatgtataaatattatagtcatacagctgcagctttcagggaaagaaaatctgaaattttattggtataaaagtctggctgtatggagttgttagggctctgaagcatggccagtgtggtgacccctgagagcacaagaagagttttgcaaccaccattttgtccaaacaagatatcagtgtctaatctgtccccaaccatacatatctgtgacttcgaaatgccaaatttgtttgccaagtaatccatcataaacgttgagggttttccaacaactaatggctcacgttgagtagatccactgagagcgccaaccattgagcccccacctgcccattcttgagcatctgtgagatgagtaacagcatctcggtttgtagcaatgaaaagacatccagggttttcacgtatacagagtgtcccatactggattttatagtagttgaagtagcgatcaaacccaacaacaactgctccaaccggcccaccaaggtactggtatccagcaagctcaagctccttcaagatgccatcttctccgatgacataaacctttttatcttttnnnaaatcaatggacttcagatatgcagcagctggaaaggatgatgcgannntctcctcctcgctgacattcaggccaagtgtttcnnncttcttnnnatattgcttcctagncnttnnngagttannnnngacnannnctaatcttttnnnctttgacccgagcat

SEQ ID NO: 28631 - DNA, 245 bp, Glycine max
  Clone ID: PAT_MRT3847_125856C.1
gtaaatcatggttttgttggtggagcaaacgatgataggtcgcgagtacaacgtaaaggacctgtccaacgctgacgtgcgatgggtcgagatcgagttggacgacgttgagatgtacggcgtcatggcatgtgcggaccgatttcggaccgtgacagaccttgaagggggctcgcatcaccggttcaatggacatgactatccacggcgctgttctcgttgagacgctcactgcgcttggcgca

SEQ ID NO: 28632 - DNA, 1427 bp, Glycine max
  Clone ID: PAT_MRT3847_125857C.1
aaaaaaaccaaaataaaaaaaaaaactttgcaatttcgtaggagatgctcaggagcagcacgctaacacagagtgttacagtcacctgtgttcatcacagtcacagacaatggttccaatcaattcccgtaaattatagattctgtgacgctgctcggaactctctatcatccaactccgccatcttcaagtggaaaagaacggctaattataatcgtaaccgttctggaatgggaaccttcaccacgcgcgcgttggcgcagccgctccagaacgccgacgaactcatcgattccgtcgagacatttattttcgattgtgacggagttatatggaaaggtgacaaattaatagaaggggtgcctgaaacgcttgacatgcttcggtcaaagggcaaaagattagtttttgtcaccaataactcaacaaagtctaggaagcaatatggaaagaagtttgaaacacttggcctgaatgtcagcgaggaggagatttttgcatcatcctttgcagctgctgcatatctgaagtccattgatttcccaaaagataaaaaggtttatgtcattggagaagatggtatcttgaaggagcttgagcttgctggatatcagtaccttggtgggccggaagatggtgggaaaaagatagaactgaagccaggatttttgatggagcatgatgaagatgttggagcagttgttgttggatttgatcgccacttcaactactataaaatccagtatgggacactctgtatacgtgaaaaccctggatgtcttttcattgctacaaaccgagatgctgttactcatctcacagatgctcaagaatgggcaggttgcatttcaaccaaattagcagttcctagcaggctcacaaacctgaaaacagttcaacactatcaatacacagtgggggctcaatggttggcgctctcagtggatctactcaacgtgagccattagttgttggaaaaccctcaacgtttatgatggattacttggcaaacaaatttggcatttcgaagtcacagatatgtatggttggggacagattagacactgatatcttgtttggacaaaatggtggttgcaaaactcttcttgtgctctcaggggtcaccacactggccatgcttcagagccctaacaactccatacagccagacttttataccaataaaatttcagattttctttccctgaaagctgcagctgtatgactataatatttatacattatccccacacgatggtgggaaaagccatgtatttaagaagtaagttgaattttatccattccttgtttatatatattaatcaatattagtccctgagaggactaaaaataggcaacaaaatgacaaattcaatttttggataattgaacttctattttactttaatagattttttgaagagtac

SEQ ID NO: 28633 - DNA, 214 bp, Glycine max
  Clone ID: PAT_MRT3847_125858C.1
ccacgcgtccgctgttctataggctcgtacctctgtgtccttgatttctaaggagacaggaacctacggctggtggatgaatcaagaccctgtgatcagagcgtgattaatggcctgaagggcttctcttaggaggaggttcccatctttgggctgtagatgatcgttctcaggcattatgtctgggatggtcgcacggttgtctgacagagag

SEQ ID NO: 28634 - DNA, 170 bp, Glycine max
  Clone ID: PAT_MRT3847_125859C.1
ccgcgaacgcgtttttgttttgatctctaaggccttcggggaacctatacctccaaaaattgttattaactagacggatcgatgtgtcctaaaacctaacgctttagacgaacgtacaaaggcctacacattgcttgttttggaggtgagcactttcaacgtacacagat

SEQ ID NO: 28635 - DNA, 1133 bp, Glycine max
  Clone ID: PAT_MRT3847_12585C.1
ctccgagtacttcatttttaatcatgaggattgtatttcacctgaaaatgttgatgataatcctaataatgccagggatgtctcagacacagaaacttcagctaaggctccggaattatccagtcatgacaaacaagatgtgcagaattccaatgttaatgaactggatgctttggttacaactaactgctccacaattactgaatcaaaaatagaaggggaaaacaattgtgagaataatattggcatggcgaatgatgatctgtcaaagagcacccttgatgactttcgggaaccttccaatgattgtcatgctgtttctgtttcagaggtcaatgtctccgagtcccatcgcattgagggatcaacagttacagttgagtgtcaaggtgcaggcaacactagaagcctgacacttgaagaggcaaccgatacaatccttttttgcagctccattgtccatgatcttgcatataaggctgcaacaatagcaacggaaaaggaatgctccaacccatttgaaggttctgaaccaactgtgaccttgttgggcaaagccaattctgatagaaaggatagtcgcaaccgacctaccagcaagcgcacgttgaaatcccagaagaccaagaccaagcagaggagggtggaaactgatgtcaaaatcccttctggcaagactgagaatgatgaaaatattgatgagtctttcacgcacaatgttgggcttcctaacaaggtagatagtatgaagccccctaagcttgaatcaaagtgcaattgcatcatcatgtgagagagcaatgttcaagttgtacctacaattcctggcagcatttctgcacttccctttggccctacatgggagccaagtcaagtgcttgcgcatttatggttctaggttgaagtctgtttgggataataaccactgccaattggtttgtgttggttctaatatattttgtaacaaatgccacgttgtgtttgacatgattgtaaagttatttttttttgttggtaggccataagttaagaggcattttggaggactgtgatgtgccccctccacttgctgcattcttgtttgttattttccatctcaattaagtgatccatcaaagcaagtgtgaagtaga

SEQ ID NO: 28636 - DNA, 806 bp, Glycine max
  Clone ID: PAT_MRT3847_125860C.1
ggctcgcgcacttataaaaccctcttttctgcttcttcgtccattggcattggctttcaatggcgaagtgcatgaccagttcttcttcttcttcctatgcactgcttctctttttcttctgctttctacaactggaggctattttggaccctgctgatttcctcgctctgcaaaacattcgtaaagctctgcaagacatgcctgcttccgatttcttctcttcctgggatttcaccgcagacccatgcaacttcgccggcgtttactgcgactccgacaaggtcatcgcgctcaacctcggcgaccccagggctggctctcccggcctcaccggccgcctccacccctccgtcggcaagctctccgcgctcgccgagttcaccgtcgtccctggccgtatttacggtcccctccccgaaacactctccgatttgaagaacctcaggtttctcggcgtcaaccgcaacttcatctccggcgaaattccgaccaagctgggagaactccgcaacctccgaaccgtcgatctcagctacaaccagctcactggacgcattcctccaacggtaggaaccctaccggagctaacaaacctaatcctctgccacaaccgcctctccggttcggtcccccggttcgagtcgcacacactaacccggctcgatctgaagcacaacggtctctccggcccgctggaccgcctcctggcccgtctcgaccagctcaactatttggacctaagcctgaaccaattcacgggcccaatcccgggccgaatattttctttcccactgacaaatcttcag

SEQ ID NO: 28637 - DNA, 304 bp, Glycine max
  Clone ID: PAT_MRT3847_125861C.1
aaaaaaaaaaacccctggggccaacatttcattcacatccagatgggttttccatttaagggcccctgttttttattatgctgctcggcacctaaggggtaaaaaaccaactttgtgcaatctaacggggggggacatgttttccaaagggattcctttgcagagccctttaaataaaaaaaagccccctggggaaatccaactcaagccgcagatcgggagcgagcccttaaatggggatatgccggagagccccaagcccacttttttttttaggaaaataaacccccctttgaccttaggg

SEQ ID NO: 28638 - DNA, 587 bp, Glycine max
  Clone ID: PAT_MRT3847_125862C.1
gcagccctgtgtgatcaaactgtttgagtctgattgatttggtgtgtttgtattgtgttgtgttgtgagtatatataaataggttactttctcagttgttgctgtttagggacactatcgagtttatagttcagatggggggtcaagaaaatgcaatgggggggtttcaacatggaaatgagagcattctgacttgtccaccaacttctggtctcagtggtccaaatgttaatgtttcagaaatggctattagttctgtgtctatggccaagccttcaaatgttgtagctaacccttttctcgcttcttccacttgggatccacttgtttccttgagccaggctcaaacttttggaggctcttcaatggtttctcataatgagtttgtcaatgccaactcatcttaccctcttgttttggataaccagggggggataagcaacacttcccaccttgttcaatacatgtctgactcaaatcttgggggtatagtccccaaggttcattcctatgcaagtgggggattctcagaaatggttggttctggctctttttgccaacatgggtctggtgatatggctgacaca

SEQ ID NO: 28639 - DNA, 642 bp, Glycine max
  Clone ID: PAT_MRT3847_125863C.1
cgcgaagttcgccgctcagaacgccgttctcgaagcgcaaatcaaaaactataaggaggactttgatcgtgcgcttgagactaaactgtcgctgatcgagcgggcggtcggtcgcgagctcgaccatatcagtgtcgacaaagcgtctaaacacgagttggagagtgtcaatgcgcgtctgttaatggtcactgagaagacggtcgagcgcgaggaatacgccaaagccatcaatgagatcagcgcagcgatggccgacaccattgaggagcgccgccgtcacattcgcgaaattgccaatcagttgcaagtcatcgtgcaggcagtcgcttcaaaggcttcgaagtccgatctgatcgatattgcgagcgtattgaacacgttcccgcgcgtgcagctcgaactcgagcaattgaaagagttcgtgcagacgaccatcgccgataagactgaccgactcgttgagaatgcggtcgatagaaaaatgctcagacagaaaatgcacgaactcatgcgaaggctcaagacagaggtcgcagcgctcgtcgttccgccggtgcatcactgcgagacgtgtgccgtgcggttgggcacgcattcgggtccggtctgcctgtcgtgcacctccaaactgaagctgat

SEQ ID NO: 28640 - DNA, 267 bp, Glycine max
  unsure (1)..(267): unsure at all n locations
  Clone ID: PAT_MRT3847_125864C.1
gctgtgngttagaattcctaccnantgagtcnggtanggangatntactcagaaggncctgntgntaaaattagtgagaanaaagatgcaatggatgagnnnnttagacttgagagagtttctgatgatgaattcaataactataancttgtgttctgtncacagcaaggctgaggatgacaaatgtggggatattgggattagtattgatcatgangatnganccaggcgtttggtggtgtctaagaacaaaccgttagtggttca

SEQ ID NO: 28641 - DNA, 400 bp, Glycine max
  unsure (1)..(400): unsure at all n locations
  Clone ID: PAT_MRT3847_125865C.1
agaccatcgtcaccggccacctgaccggcatgcagtgcgaccgcaccaaggagcgcaccaagctcaagaccgcctacaagatgatcgagaagcgcatggccagccgctcgtggatgagcggcgaacacttcagcctggcagactgcgcagcggcgccggcgctgttctacgccgccacgctgttgccgttccccgaggagtacaccaacctgcagtcgtacttcgagcggctggtggtgcgcccgtcagtgcgccgcgtgctggaagaagcaaaaccgtacttcccgctgtacccgttcgtggccgggattcccgagcgcttcctgtaggggttggtgcantgccgcacggtgcgcacggtgaggaatcttgaaaaacagttaaaaaaaaaaaaaaaaaa

SEQ ID NO: 28642 - DNA, 277 bp, Glycine max
  Clone ID: PAT_MRT3847_125866C.1
attccattgctgaacagcacacataggagaacatataattccattcccaaaaattataactatatttggaataccaatagagctaaaaatcagatcgagcagttttgaaatttgcaagaaacttcaagttttcttagatagaagatagatacacactcacagaaagaaataacattgttagatttctatttattgtactcaatttgaagtgagttgtcagtatcttttctagaatttattatatttatactttatctcattaggataaactaagaga

SEQ ID NO: 28643 - DNA, 180 bp, Glycine max
  Clone ID: PAT_MRT3847_125867C.1
tgcagattctgaaggagactctggctgctttagtctatgcccttgcaacattggccacaaggaggatgatgctgaatcttgtacctgtgacccagctggtatgtgtggaatattgaagaatgttaaagtcatgaaagtgagaaaaggtgtggtgaatactgtgctgatgaagatgagcat

SEQ ID NO: 28644 - DNA, 1696 bp, Glycine max
  Clone ID: PAT_MRT3847_125868C.1
tagaattgtacccagtgttggagtccatacaaaaatatctctggccccggctctgcaagctagaccaaagaacattgtatgagctgcattaccagctgattacatttggaaaggtcttctgtactaaaagcaagccaaattgcaatgcttgcccaatgagaggggaatgcagacactttgcaagtgcttttgcaagtgcaaggctcgccctgccaggatcagagcagaagagtatagttatcacaactggaaacaatgcaactgagcagaacccatcactagtcatcaatcagctgcccttgcttctccctgaaaatataaaccaagcagaacttcaacaaacagaagtgatcaggcaactagaagcaaaatctgaaatcaacatcagccaacctattattgaagagccagcaactccagagccagaatgctcccaagtatccgaaaatgatatagaggataccttcaatgaggaatcatgtgaaattcccaccatcaaactagacatagaagagttcactttgaacttacaaaactatatgcaagaaaacatggaacttcaagaaggtgaaatgtcaaaggccttggttgctctacatccaggtgctgcatgcattcctacacccaagctgaagaatgtgagccggttgcgaacagagcattatgtttatgaactccctgattcacatccccttctgaatgggtggaacaagcgagaacctgatgatccaggcaaataccttctagctatatggactccaggggagacagcagattctatacagccaccagaaagcaaatgcagctctcaggaatgtggccggctctgtaatgagaatgaatgtttttcatgcaacagtttccgtgaagcaagttcacagatagttcgagggacactcctgataccatgtcgaacagctatgagagggagctttccgctaaatggcacctattttcaagtcaacgaggtctttgcagacaatgactcaagtcttaacccaattagtgttccccgaagttggatctggaaccttgataggcgaacagtgtattttggaacctccataccatctatattcaaaggtttatcaacacgagaaattcaacaatgcttttggagaggatatgtctgcgtgcgtggatttgaccgggaaaagcgagcaccccgacctctgttggctagactacacttcccggttagcaggttgcctaagaatagggataagacccaacaagagtccgcatcggcaaactcacaaggattgaattttaaacaaaatccagaacagccagaattgctttccaacattcggcagaccggaggatcctgaaggcaaataattgtcatttaatattcatcctgtactctgtgtataataacgacaaagtcattgtcatgctcagatactgagcagttttcccagactaggactaggaccaagacagtaaaatggtaacaaagtagctttttagctccatgaagattgaagaggaatgtgagctaggtgagatatgaggctatttgcgcaggagctcagtatagatacacatacactcatcagtattcttctagatttttatgtctttcaaaagactagttccgcttgtagaaattatcagattttcaactcgcgattcagtttcttagttgcagaaagatttcattactatttaccaaataatttataattcctcc

SEQ ID NO: 28645 - DNA, 423 bp, Glycine max
  Clone ID: PAT_MRT3847_125869C.1
ctcgagccgattcggctcgagatttggatcagggtgtctatggctcagtggtattacgggttcgatcgcttacaattggtctcgacccaacatgaaaactagtgttaagatcattcacgctaggtttgtcttgttataatttcttatcttttccgatactgtttttgacctaatttatttatctggatttgtcgagcaaattctgcaatccgtgttgctttgatgttttgttcatgatttactactgtggtttgtttcattgaggccttttggtgttacttgcactttgttttcacttttcaaccagtgtgtgttaactggagccgcacctatatgcaacataatgttattttggaattggataactttttataatagatggtagcgtcattccattccacttgattcatgccttttcaacaa

SEQ ID NO: 28646 - DNA, 250 bp, Glycine max
  unsure (1)..(250): unsure at all n locations
  Clone ID: PAT_MRT3847_12586C.1
caatataaaaannaatttacaccaccactgccaaaactatgtggctaaaggaaattataaaattacattattttttggatatggcatccttggcagactgtagagtagttgcagcagcagcaagtacaccaccactggtgttggtagaatggggctggtgaattacctttacctgcacgttcttctcttcttgcccttgccctgctgaagatcgataatccacactttccacctttttttccatgccatc

SEQ ID NO: 28647 - DNA, 186 bp, Glycine max
  Clone ID: PAT_MRT3847_125870C.1
gaaaaactcgaactctagataaaaacatggtccttggaaggtcgatcaatggcattaaggaggagcttactttcaacccgatccgtacatatgtgcgtcatcctcagacacccatttgagcccatacgaaggagacaagggcatgtatcattttgaccaggccgatgtatcgcacagcaaccactc

SEQ ID NO: 28648 - DNA, 384 bp, Glycine max
  unsure (1)..(384): unsure at all n locations
  Clone ID: PAT_MRT3847_125871C.1
gtgtgactacaaccattgcccctggggctattcttctgttgtaaatttggtgagtgttatggaatgcatttgtatagaaattgaaatgaacactctttagaatntatgttttccttccactcccaatcccctatttagaaccttggcaagcaatcaagtaattttattcattgttcactttaatgtggattggattttcaggacttgtctcatcctttccttgccaaggcaatccaagccctcaggccattgaagattagaattggaaggttctttgaaggacccaggttctgatggatgtggaaagttgaaggtctcctggccctccccttcaaaaggttaaaggtggattgtctggattttcaaagggatgtttacacatga

SEQ ID NO: 28649 - DNA, 391 bp, Glycine max
  Clone ID: PAT_MRT3847_125872C.1
gcttctataagactacactattgttaccgcacaaacaattaataaagatgaatggttacatcaaaatggtggtggtaaaaaagtctttcttgcttcttttccttgtcggggttacaacttcacgcattgaactcagcttcttcaaaaatgatcactcatcaacatattatgatgatcagtattctaaaccatgctgtgatctcttcatatgcacacactcaatgccttctcaatgcacctctgaaaatattatgctgaattcatgccactcacattgtaagaactctatgttcacacgctcacaatcaggacaatgtctatgtcttgacaccaaccacttttgctacaaaccttgcaagttcacatatgactataaaaactcatatctctc

SEQ ID NO: 28650 - DNA, 2074 bp, Glycine max
  Clone ID: PAT_MRT3847_125873C.1
aaatgattaatggactttggctaaacagtttaaatttttaaattagtttgttttatcaccagtaaagtaaacacaactagtaaaagcaccaaattgattgagggctcacagcgcacaagcttattagaattacagatataccctttattgataataaaaatgttatgtttacatggtagacaattatcatcctttatcaggttgcctacccttacactttggaaccttttaaatcatcaatcacagcttgttttttgttgatgcaacaatcgaacccatactttgatggtttgagatctcaaaccacaaagccatgagtgcaagtgacacatctcgttcaataaaaactagataactaataaagtatagtttgtagtaataaataaataagcatactcttttaaatgaatctatacgtctggacgctcattctgatcaaaaatacgattatggcaagtagggttgcaagggtaggcacaatctatctcacggaagggccttcgatcataaaaccaatcacccactgcctttgcaattgatgtcttggccaccactggggagtcatttctcagccatgtctcttgtattccagtttggcagtgtgcatagcaaccatctataaaatgccctttagatgcggcgttgccaaccacactaaatgcccttaagaaatctgtcctgaatccttgcattacactgagttgattaggtgagcagtttttgatatcaagcttgcattcacgccattggcaccaggtgctgctgatccccgtggccaatggcgtgttatcaagcttgcattcactaggctgcatttacaaagaagattggggtactgatttgggacacgacattttgagggaaaaagcacagccctggtctgagtcttgaagtgcaggatgtaggcaaattctttgctgagccatgtgtttgaacaacttgactgtagaactcttcaatgtggatgtctctggagacacattgcattgataaaaaaaccagcatctgcaaggcatttcactttagcccacgccggaggtagtagtgatttgaatcgtttagaatagaagccaatcctccagctgaacatccggagatatttgcatttcattcaaatcaacgacagcaaaaacctcgaagtggctctagctcaggtaatagagctcgaaatcgatcacaaatgcagtactgatgttaatcctccagctgaacatcccgagataatagcatttcgagcatttttcattccttttgctagtaaatcctccatgacagcattgaaaatcctacctcctctgaagtgcaacttagtcactggattcactgcttccacatcaccagtaaatgatgaaccatcacaatacctaaccttgattctgttccagttgtagaaatctggattaaacatttccctgttattcaaaattcctgaaaaggcaattagcttggccatttgcttagatgaacctaaacgattggtcttgcgagcaaggcaagtagtgacattgttgcaccatcctcctccctcaaatgcaaccaaccaattgttaatccctgatccaaatcccctatcaaaatgataagctggtggactcccatccaaacaaacagctccttttgctaccgcgttctgaacaatagtgattggcacataagaagcttctgatatcagcaacagcagcgcacacaccagaaggatcaaccactggcttattctcgcattctccattctgagatggagaatgggttatgaaaaccaagtggtgggactttgaacccgccgaattccgagcttacgagaaggtttgttaatgaaaaccagtggagggtgatgatgacttataaagtggcaagaaacagaatgtaactaacaatggttaacaagtcagtttctgtgacagtgtttggactttggaggaaataaattcttaattttttcagttgaagtaaagaattatggtgtcagtttatgtgaaactgagagagaataagtacaaaggttttttcagtttagtcagagaaaccaagagccgacactcattggctcccccttctgtcgtcttctcgcagccgt

SEQ ID NO: 28651 - DNA, 1208 bp, Glycine max
  Clone ID: PAT_MRT3847_125874C.1
accaaattctgttcagtttcacccactaaaccaccactactcctaagatctccttcaaaacacaaccaaaatcttaactttcttggaacctttttaattgtttcttctttaaaaatcaatttcctttaaggctttaactttaatattagagttctttctctttcattcatccttggtaatggcttgtgcattgcaagcaaccttagcagccaacacctatgccttttcttccaggagattctccttgaagcaccaaaagaacagtaagagaaggttttctttgttcactgttagagctgattctgatgactctgactgcaatgaggaagagtgtgccccggataaggaagtagggaaggtcagtgtggaatggttagctggggagaagacaaaagtagtgggcacattcccacctcgtcgtaagccgggttggactggctatgttgagaaggacactgctgggcagacaaacatatattcagttgagccagcagtttatgtggcagaaagtgctataagttcaggaactgctggctcttcttctgatggagctgagaacacagcagcaattgttgcaggccttgctctgatatcgattgcagcagcatcgtcgatactgctacaagttggtaagaatgctcctcctcagatccagacggctcaatactctggaccatcacttagttactacatcaacaaattcacgccgccggaaattactcaagtgtctgtgccaagtgaggctgaactatcctcatctgttcaacctgaaagcccacctccggaagtttcccaggttcaggttgaagctcaagcttctgagacctctagtgtgaacattgaatcgtaggtgtatcaagtggttaccacttttgctaccaaaacataccaaagaagtttattttgtgtatacacaactaaaggttaatggatgcaaatgttgaacatcattcttggtatgccactgctaccaactgaaagtgtgtttatcttttgcaggggaaagtgatgatatttagtttcagttttatataatcctcaaaatagtgaaaccacattggaaatttttataatgttctgttggttcctgaggtttttttaggcatatttaagatccttattcatctgttcacttaggcataacaagaattggaagatgttgagagctaaaattgcaatatatatatatgaattgaaactattatttt

SEQ ID NO: 28652 - DNA, 895 bp, Glycine max
  Clone ID: PAT_MRT3847_125875C.1
ctcgagccgcaaaacacaaccaaaatcttaaatttcttggaacccttttaattgttttttttctttaaaaaaatcattttcctttaaacttcaaatttagagttctctctctgattcatccccagcaatggcttgtgcattgcaagcaaccttagcagccaacgcctatgtcttttcttccaggagattctccttgaagctccaaaagaacagtaagagaaggttttctttgttcactgttagagttgattctgatgaatctgattgcaatgagggctcgagccgccgcacactcttcctcattgcagtcagagtggaatggttagctggggagaagacaaaagtagtgggcacattcccacctcgtcgtaagccgggttggactggctatgttgagaaggacactgctgggcagacaaacatatattcagttgagccagcagtttatgtggcagaaagtgctataagttcaggaactgctggctcttcttctgatggagctgagaacacagcagcaattgttgcaggccttgctctgatatcgattgcagcagcatcgtcgatactgctacaagttggtaagaatgctcctcctcagatccagacggctcaatactctggaccatcacttagttactacatcaacaaattcacgccgccggaaattactcaagtgtctgtgccaagtgaggctgaactatcctcatctgttcaacctgaaagcccaccttcggaagtttcccaggttcaggttgaagctcaagcttctgagacctctagtgtgaacattgaatcgtaggtgtatcaagtggttaccacttttgctaccaaaacatacccaagaagtttattttgtgtatacacaactaaagggtatggatgcaatgttgacatc

SEQ ID NO: 28653 - DNA, 132 bp, Glycine max
  Clone ID: PAT_MRT3847_125876C.1
ggctcgaggctatgacggttgagatatcatagaatgagctggcaacgccacatgtatgtaatgatgtggctatgccttgacacttgatcgagtaacatggactcgccgcacaatacttaatagtcaggaccc

SEQ ID NO: 28654 - DNA, 396 bp, Glycine max
  Clone ID: PAT_MRT3847_125877C.1
ctagctattaagttcgagtcgaggaggatacccagatcgcttactcacttatataaaaactttatggactcaagacagagcaagatgacatctttgtacattcctgacgaggtgtacactgaagatgtacattctgaaatttcacattcaagggtgctgccttctgtgactgagcttgcttcttctttagaaaaattgccacacattatctaaactgaacgtcctatctatcgctcatgaggtgcatctgagaaaccaccttgctcaacaaacatatctaatattcaatccgcatattctttcgtttgaaaggatgtgttacatattaagctaaaaagtcagtgtgcttttaataatgtgctggaatcactggaccgtgaaactgttgagctgaca

SEQ ID NO: 28655 - DNA, 341 bp, Glycine max
  Clone ID: PAT_MRT3847_125878C.1
gaaaaacaggggcgggggattaattaaagccggggaggaaaaaaaaaaaaggtccgggggggggtttaggttccttccccccataccaaaaagggacgttaacaaacaaagccaaggctcctatttgaatggggcatataaaaatcccttttcccatatagatgggggcaacccctaccttaattgttggggggggggaggggcccccccaatggaaaccaggggattgggaagctaaaaggcccgggtttcccctttgggggttcaaaaccaaacgccccattggtcttcaatggttccaaaaattttgtttcccggccccaaaaaaaaccctttcattg

SEQ ID NO: 28656 - DNA, 504 bp, Glycine max
  Clone ID: PAT_MRT3847_125879C.1
ggcaaaggcaaaactggtaattaaccctgaaatccatgggttacagaataggttagggggaacttggcccccatcaacagggatagatacaaaaaggcacaaggctcacaaattgggttaatttacaaaaaatctttttacaaaactacaaagttttttataaaaaaaaaaaggggcttcacccacgcgtaaaggaaaaaccaggaggggggggggcacttttaacctttacgggccttgacaatgcaggccaaatgcctggggacggaaaaaaaaaggggtatttttgattagggggaggagcactgggtggaaaccctaacttatcactactttggggctttgaactgttattttttggaaaagaagggggaggggccacttttttagtctttggctgggagcccccatatacaaaactggttgctaccacctggactgggcttggagcaacaagcctagtaacaccacccccaatgatttgaccctcaggactagaagggg

SEQ ID NO: 28657 - DNA, 369 bp, Glycine max
  Clone ID: PAT_MRT3847_12587C.1
tcaacaccttttattcaattgataccctctttccaaccacgatgagcttcaatcctgcaccttgcatcctatccttttcaataattgaatactccctaaaaatatatgttcatttttctaattaaatcttcctacaataattattgtcaacttcttacacaaacaaatgaaatagcaattattgatggaaaattctcactctttacaatgtattttatatatcaaaacccatttctatctcacttcacacattttacattcttttttttcttagaactttctctccccaacagtttcataacaatttccaattcccattattcttcaaaactatttcacatctatcttttttataccaatttcataaaa

SEQ ID NO: 28658 - DNA, 228 bp, Glycine max
  Clone ID: PAT_MRT3847_125880C.1
ctcattcgttgtggcaggagcacgccccagactacacaggccagtggcgggaatgttacccacggcgggagactccacaataataaggcctagaatccagaacaaacagcagaaaaagggctaggctgaagaacaggaagtgcctccactcccgacaatgatccaaggaatccacgtagacaagatacagaacatgggggcggacagcaggaaggtcgggatgacgat

SEQ ID NO: 28659 - DNA, 187 bp, Glycine max
  unsure (1)..(187): unsure at all n locations
  Clone ID: PAT_MRT3847_125881C.1
ntcncangcacgcgtacgtaagctcggaattcggctcgagatgtnacnttaaaatcanagngannacaangctcagtgnttaccantncatcgtttgggaactcnacannaggntagactnnacacctctntcngcaannnaaanccactctcttcnttccaacgantcgctnncanacaanatacg

SEQ ID NO: 28660 - DNA, 495 bp, Glycine max
  Clone ID: PAT_MRT3847_125882C.1
tacggtgcgagaagacgacagaagggtgggtgattagttttgacttatgactaagtttgactcggttgtctatccatgatatagggttttgtttcacctttttaaaataatcagaagttaaaaaaatctaattaaaatcaaaatttgttaattttaattagtttatcataaaatcaactttaaaaaaaattgtagatgtaaacaaacataaagtaggctgtacgtactttctacaaaataaaataagttttgaattgataaggtaaaatatactatcatctaattataaactattatttataataaatttatttattttacaacaataattatcttaacgttaatttctaattagttcaccgtataagtttttgttttctcaataatattcattaaactcttttagaatatcttaaaaataattattaaataattttaggcttaaaaatatttttaatttctaataagcattcaatttttggggttgttttttta

SEQ ID NO: 28661 - DNA, 1358 bp, Glycine max
  Clone ID: PAT_MRT3847_125883C.1
atcatccaagtgagataacttccttagcaaactagtagctacgcctgtttattttcacctgttgctagtccctttgataaaacagaaaccttgtttgttaatcatcaaatatgcagacatcagttcttcataatctagttgttggaactccagttatctcagcaacatatgatcagcttcaaaagtcagctagatacttacctggtcctgccactcaatgccaatattcaacaacaacatctaagcaaatgagactggggacaaatatatctgaaactgtgaagagaaagttaagtttaggggctcacattcttcgagtcggtggagtggaaaaagtctttaagcagttttttagtgtggaagacggagagaagctgttgaaagtttcccagtgttatttgtccactacatccggtcctctagcaggtttcctcttcatctccactgacaaggttgccttctgcagtgagagatcaatgaaaatctttagtcagaaaggccatatgttgaggatccgttataaggttgtcattccactgaacaagatcaagtgtgtgaaccaaagtgaaaatgttcagaagccaacacagaagtacatagagattgtcacggaggacaactttgacttctggtttatgggtgtactaaaatatcagaaaactttcaaatatcttgagcaggcagtttctcaagcttaagtgggtagaaaatccaccatttttgactccagattcatgttgtcaggccaaacacatagggtaaaaggatgatcagaaacaaactaaaatttggcggctctcatgaagatgttgagcttcgtctctgataaaagggatttcacttcattgtatatatccatcctactggacacaacatttgacctgtgataatagcgaatggatgtggttcatatcagttgaattgcagacttggctttcatcatatctcgttgtgaatgaaagagttcactgtttggagatcatttgttgcagaatccaaactatatgtgcattatttggaccagaatgctttttgaggaagggatgggcttatgttagaactctatgaagggagattaatgtagaaggaaaactgttagcttcgttctcaaacgtacaagtttgaggctcaattacacattgattcattatataaatgttttaagaacctgagttagtaattcagcttgtatttataacatctaactttcagtgaaatttgagtataattatttaaatgcgaatctgtttgatttaagtagtttaattaattagcaggaagtttgatataatacattgataaatggacacttctaatataatgagagtcgattttgttaatcactattcccccccaaa

SEQ ID NO: 28662 - DNA, 529 bp, Glycine max
  Clone ID: PAT_MRT3847_125884C.1
ttctctaaaattcgaggactagagagagcctcctgctgctaaattaagatagaaaactgattttattggtctgcctcccttcattacattaggtcctaatttataatagcttgtaatgattctgcactaacaggcaagtaacagaattgccaatacaaggaacattgtctaacagaaaaatacattgccaaaacagacaagtggcagaatgcatgtttcctacccctctaagcaacatttccactaactgatttgttaaacaaaatcttgtaaatagcatatgcaagggtaaggctgcgtacaacatccctcccccatacctttacatagtgaagagcctccggacaatggggtacgaagttttttatttgggtggcacgatcttcctcttgggtctctctgttgtctctctgctggttttgcattccctatcatggaagcttgaggaatatacggcagatgtgacattttcctctgcttctcattcagacactcaagtatctaaacctagcattgtcataatacacct

SEQ ID NO: 28663 - DNA, 545 bp, Glycine max
  Clone ID: PAT_MRT3847_125885C.1
aattcggctcgagttcctcttcatctccactgacaaggttgccttctgcagtgagagatcaatgaaaatctttagtcagaaaggccatatgttgaggatccgttataaggtcagtcacaaagtaatacatgcataggcctaacttaacaagtccttattgtagaagataagaaagtaaaataaatcaaacttctctcataagttaaaatcaacttatgcatttcagctttttttagaaaaattctcttatctaacttcttcaaagattgaatgcataatctaattttaacttacagaagatttattcattttacctcctactttctttttcttttaagtgttcatggagaaccttatcctagctagcctatcttcatatttttcagtttcttttgatccaagatttattgaagttctgaagtatatttgctcatgtgcaggttgtcattccactgaacaagatcaagtgtgtggaccaaagtgaaaatgttcagaagccaacacagaagtacatagagattgtcacggaggacaactttgacttc

SEQ ID NO: 28664 - DNA, 300 bp, Glycine max
  Clone ID: PAT_MRT3847_125886C.1
tttttgttttagcattctgactgagatggtgcgtgtccatatcgttgcaaaagtactgcgccacgggcatgcgcacgatccggacttgcaacacatgataaacatcagtgatatatgtctgtatgctaatgccaccttggaagatgttcatcaatcagcttggcactcactttcgctggtacagagtgaaaaccttgccaactagtctttatgcaaccatgaccgattgcacagacaatactggtacagcccaacattatacaaagtgggctccatgtaattgtctagagcaataccttc

SEQ ID NO: 28665 - DNA, 481 bp, Glycine max
  Clone ID: PAT_MRT3847_125887C.1
tcaagccatgattcacaagagtttccgaactccaatggtgaggtttttgagggaacgtttagagaaagctgggtgtgctgtaggagacaattttttcaaagctgttacttgcgacgaggaaatggctggtgcatatgttcgccgtgaaggggtaaaagtgtgcagcaattatgtacgaattcaagacgacgtcaacatggtggtaattcgtgagttaattcatgtgtttgacgactgtcgtagtgctaacttgaattggtctgattgtgctcaccaagcttgtactgagatacgaactaatcatctaagtggttcttgtcattacaagcgggaattactaaaaggttttctgaaaatacgagggcatggacaggaatgtgtcaaaagaaaagttttgcaagccttgtctcaaaatcccaattgctctggtttgggtgccaaggatgctatggaagctgtatgggatggtttgtacaatgat

SEQ ID NO: 28666 - DNA, 382 bp, Glycine max
  unsure (1)..(382): unsure at all n locations
  Clone ID: PAT_MRT3847_125888C.1
gaaagaatcgangcatagcactatccaacttaggacagaaacaatctagatataaaagttataggatacaaacttcgatgtccactatcactgatctttattctgaattgaaggaactagttccagattatcaagaacgtggtaagaagctgaagaaagatcatggaagagtttaattggaaaaaattactgatgatatagaacttgcgtgaatgagaggaatgacagatttagtatggctaggctcaactgttgaccctgatgagggaaatcgttttaagggcacgtaaattactgaatgccaataaaagctttcaggtgtttttcccggtggggagcctttacctgaagaattaactttcgtttttttttgatatgaaag

SEQ ID NO: 28667 - DNA, 206 bp, Glycine max
  unsure (1)..(206): unsure at all n locations
  Clone ID: PAT_MRT3847_125889C.1
cttcaacttaaagttaaaagaagtaacatttgtcataatgccacagcnagagattctacctcattgggtcaaggatgtgctaacacattactatccntgcatcnatcatactgcctcnatcttgaggngnntccngnttggnnggcnatgcnaacnaatcnaagnggactggatantggnttttggccnaancnnngggcncctcc

SEQ ID NO: 28668 - DNA, 242 bp, Glycine max
  Clone ID: PAT_MRT3847_12588C.1
ctcgggatcctgtatagccggcgccccccatgcgttcgaacattttgttgggcaaatttgagctatcaggcgcttctcctgcgcccatggcgtgtaactcagattacaacgcgctttgacattggcgccaatgggatcttatatgtctatggagaaaataataccactgcgccccaacaaaaatatcactttttccaatgccattggtagattgtcaaaagaagatattgttaaaacgggtc

SEQ ID NO: 28669 - DNA, 320 bp, Glycine max
  Clone ID: PAT_MRT3847_125890C.1
ctgaccttggcttggagtaaacagaatggaggagaatggcctatgcaaatgaggagaaaagaggttgattgatccgatccggctgcggctccgagtcctgttaccatcccgatggcttgtacagagggtctagagcccatagctagggcctttctggcctgttattacgacaaacacccttatactcctctttatgatgatgattccacgctctcttgtcatattagctcaatggctaatgatattctaactcagcattctcctatccaaggggaaagagcatcttatatatgaagctgccatcatcctccgcacaaaat

SEQ ID NO: 28670 - DNA, 491 bp, Glycine max
  Clone ID: PAT_MRT3847_125891C.1
cccacgcgtgcgtttcaccatgggtgcatatttttcgcatccgaggttttggcttgtctgtattgtaagctcatggccattatttggccccctttttatacgctttgtactgggaactgcttattcaaccaatgtgcctctgctgacatggaatacgtttgtagtgctttcacctatttgcattctagctgttcccgcacgactttcccaacttgcattcatccttaacatccaaactcacgcatactgtaggccaccagtcttttcaagatcagtgatgtttgctactgcattcatcagctcactctctggagctatagcactggttacggatattcctgacattgaatgatataaaggatttggcattcaatctttttcactgcaaataggtcacaagccggaattctggacttgagttatccaccttgaaatagcttatggagactccctactggtgatagctgcatctccttgccattggagcaaaa

SEQ ID NO: 28671 - DNA, 461 bp, Glycine max
  Clone ID: PAT_MRT3847_125892C.1
caacttctgctacccactctcttcttgcaagtccaaccacgcttttctctacagtcatgggcaaggtcaagatcggaatcaacggatttggaaaaattggccgtttggttgccaaaatccctctgcaaaaagaccaaggggagctcgttgccgataaccaccctttccttacccccgattacctgacctacctgttttaatcccaccggggtcaccgacactggaagcattaccatggcaccggttaggaccaaaagacccttttttttcgggacaacccaaaaactgtttttgggcaccagaaccctgaagagaacccctggggggccacttgagccttttttattgttgcatccacccgagttttcaccggttatgaccaaggccccgcccctttttaggggggggccaaaaaaggtattatttccccccccacccagggaggcccccttttttttggt

SEQ ID NO: 28672 - DNA, 106 bp, Glycine max
  Clone ID: PAT_MRT3847_125893C.1
caaatcgttcgactacaatttgcttattatcggcgccggcgttggcggcctcagcgccgctcttcatgccctctatactggtttgaatacaccttttgtgaatgca

SEQ ID NO: 28673 - DNA, 613 bp, Glycine max
  unsure (1)..(613): unsure at all n locations
  Clone ID: PAT_MRT3847_125894C.1
gaactagtctcagttttttttttttttttttttaaaaaaaaaaaaaaaaaaaaaaaaaaaaaaaaaaaaaaaaaaaaaaaaaaaaaaaaaaaggaaaaaaaaccaaaaggggaacaaaaaaaagcggttggccgggcgcctcactttataccccattgaaaaagggatagatggggaaaaacccactggaaataaaaaaaaatttttttttaaaaaaataaaccggttggcaaaaagaccaaaatcgaaaaaaaccccaaacacaaacccccccaaaaattataaagcaatgaaacaggccaagtgccatacaagaaaaagccactaatggggaggggagtggtgaccgcaaccntaaaataaaaaaaaaaaaaaggggcacctacaaaccgcccattcctttctcttcccttcctttggcttccccccccccggttttacccaggaagagctttaaaagggggaaattaatggatggcttaacgttgaagcgaacccgcttcactaattaaaaaattcaaaaaatgagtaaggccgaacggcggaaacaacgcgattagagcgctttccccccaaaaaaggttaatcacccatgaagaatcaaaccaacatc

SEQ ID NO: 28674 - DNA, 246 bp, Glycine max
  Clone ID: PAT_MRT3847_125895C.1
ggcccggcattactagttcgacctacccgtcctcctgctcgtgggattgagacaaaccgtgatggcggggtggctgaccttaacaccggaggccagacccgtggacacgcgatgctaagaatcacccaaggtgtgactactacgatgtgctcgatgaccaaagggagaagaaactcacctccctgtgctggacagacacttcgcgaatcattgtgtttggcactctctagctatttgctgaacact

SEQ ID NO: 28675 - DNA, 136 bp, Glycine max
  Clone ID: PAT_MRT3847_125896C.1
gaatgacattttaaatggctggcgtggtattcataaagccattctcacacggggtgagagttaacaccaccttacgagtttggggcaagtgccaaggtattgacttcactcttttggtttctggagatcgaacaaa

SEQ ID NO: 28676 - DNA, 441 bp, Glycine max
  unsure (1)..(441): unsure at all n locations
  Clone ID: PAT_MRT3847_125897C.1
gctaatcctagttccttcactcctcgctggcaacaacagcagnactaccattagaagcgttatacagaagggattggacgagaatagagcagggcaatgtaaagaggaggcagagaggagccatggaggagtgtataggtgaacaacttgtagtaactaggggatcgctagcaattgctacttgtgctggtggaggagcctatacgaaccgaatctctcttctctaacgaggttattcttacaaaaaggaacgcgtccataccgtcaaatctattgattttaccggtcgaggaattcttgcggtggatgaagcaagagacacatgtgggaagcgtttagcatccagcggataggacaacactgaggggaatcgacaggcctataagcaacgtctgatcaccacacgtgggcttggcgaatgcatgtgtggtgcatgggttt

SEQ ID NO: 28677 - DNA, 274 bp, Glycine max
  Clone ID: PAT_MRT3847_125898C.1
tgttcacgtggcatgacctgctggcggattgacatgaaattacactacaattccattgatggaaaatggcatgcaaaaagacataaggaaaaacgtggaggatttcgtaaggaggcttcacgccgtataacacaattaacaccactgaagagatagatgaagcggacaagaaacaaccaatcacttattagagctcggtataaatcggaccaagatggacatacaaatgtacactgtgccagcgtaaataacgctcaagctgacacacttgatg

SEQ ID NO: 28678 - DNA, 479 bp, Glycine max
  Clone ID: PAT_MRT3847_125899C.1
gggtgataaagcgggtcaacccgcctcctctgcctaaagcaaggtgggatgagttaacccatcatgaaagtaggtagcaaaagactcttcctgtttagatttttttttgtcaacaaatgttagatgttatttgttagttttttattagcgggagaaccgaatctgagattttttttttcttttattctctttttatcacccaactaaccttataattccatactcaccccgtttagatgatgagaaatgaattagatttcatgaatttgactaatgtctagtagcattgtacaataactattatcagcaatggccttaaaggacaagttaggctccatgaatttgtctgatgttttctttcaggccacttaatgctataaatcgtgatggcactttatccgacatatgagtgaattgtttgtgcagcttacttgagaaacacttaattccttagataaataatagtattccaaaatcac

SEQ ID NO: 28679 - DNA, 159 bp, Glycine max
  Clone ID: PAT_MRT3847_12589C.1
agtaagcctcaggaattcgggggcgagctcgagccgaatcgtgctcgagaatacacaattttgtacattactgaatacactacagtagcacaagccccttgcctggggggtgtctatccaagttctccaccagccaaaggcagtggcttcagcaacagg

SEQ ID NO: 28680 - DNA, 831 bp, Glycine max
  unsure (1)..(831): unsure at all n locations
  Clone ID: PAT_MRT3847_1258C.1
gtttgtttagtttcattttctgtgattctcgtctgacaagccccccccccccccccccccatttcctgcttcttcttggccctccaatttcccctcagaccttgttctctcatcactcactcactcacaacaacaacaacaacaacactctctttcctctctcatttttaattattctcttcaattccttaagtcattaagtcgtagctagaggtagtagctcgcaacagcaaatatttctgacacaatcatcatcacaaaagggtagcagtggacgttgtggttaataaattgttcctctcattaattaatggacaatgtctagcagaagatctcgttcaagacaatccggtgcttccgctgagatcactgatgctcaaatcaccgatctcgtttccaagttacaacaacttatccctgagcttcgtgctaggcgctccgacaaggtttcagctgctaaggtattgcaggagacatgcaactacataaagaacttgcacagagaggttgatgatctaagtgaccgattatcggagcttttggctaacacagactccaacagtgctcaagcagccattattaggagcttacttatgtaatagtctggtctagtgcattaatttgtgtcgtgtgcatgtccatgtctctctcacttttttttttttatcactctgggtagggtttggtttgtactttgtatatcaaggcaaaggactaccatcgtatccatatgtgaattagttcttaattagttttaattattatgtggcactttgtagtaattaattatcaccancttctacagctgtaaataaaatggactacatctta

SEQ ID NO: 28681 - DNA, 717 bp, Glycine max
  Clone ID: PAT_MRT3847_125900C.1
tgttagaatggcttaacagcttgatggttttaccagtgatgaccggattaaggtgatagcagcaacaaaccgtgcagatattcttgaccctgcccttatgcgttctggtcgattagatcgtaaaattgagtttccacacccaagtgaagaagcaagagctcgaattctacagatccattcgaggaagatgaatgttcacccagatgtcaactttgaagaacttgctcggtccacagatgatttcaatggagctcaactgaaggctgtttgtgttgaggctggcatgttggctctacgccgtgatgcaactgaggtgaaccatgaggactttaatgaaggtattattcaagtccaagcaaagaagaaagcaagcctcaattattatgcataggctggattttggaacaagctatttttcagtttacgaagatctattgagacatatcaagccaatggaaaacctaagtcgatgtttgacatttgttatctatttcttttcttttttttggcaatctaatggtatgataacccacagcatactggaatcatcgtatcttttaaaaacatgcaatctgatcattaatttcgtggtagtaatagaaatttgatctgcttgctatgtttaaaatcttgttgatcaggttatatacgattctctgataaacaaacaagacttgtgatggctgtaatcagaatttgatttattgaatgagtttt

SEQ ID NO: 28682 - DNA, 2067 bp, Glycine max
  Clone ID: PAT_MRT3847_125901C.1
ccacgcgtccgcaaaaattggaaaccccacgcggcacgcctgccctcgtctctttttgaaaacactttagtttcgcaaagttgattctttctctctttatctttctttccccaatttgtgagtgttactgttgaatcgattggattggcattaggttgatctgaaatacgcaattgacatggcgagcgcgatggtagaggacgcgaacttcgaagatgaccaactagccaatatgaccaccgacgacatcgtcagagcttctcgtcttctcgacaacgagattcgcatcctcaaggaagagttgcagaggaccaatttggaattggaatcgtacaaggacaagatcaaggagaatcaggagaagattaagctcaataagcagttgccctacctcgttggcaacattgttgagatattggaaatgaacccggaagacgaagctgaagaagatggtgccaatattgatcttgactcacaaaggaagggaaagtgtgttgtgctaaagacttctactcgacagacaatctttctacctgttgttgggcttgttgaccctgacaagttaaaacccggtgatctggttggtgttaacaaggatagttacttaatcttggataccctgccttccgagtatgattctagagttaaggccatggaagttgatgaaaagccaacagaggattacaatgacattggcggattagagaagcagattcaagaattagttgaagctaattgttttgcccatgacccacaaggagcgattccaaaagattaggagttcgtcctcccaagggagtgctgttatatggacctccagggactgggaaaacattgatgtgcccgtgcctgtgcagcacagacaaatgccacttttctgaaattggcaggccctcaactggtccagatgttcataggagatggagcaaaacttagttcgtgatgcctttcaactagcaaaagagaagtcaccatgcattatttttatagatgaaattgatgcaattggtacaaagcgttttgatagtgaagtaagtggagacagagaggtacaacgaactatgttagaattgcttaatcagcttgatggttttagcagtgatgaccggatcaaggtgatagcagcaactaaccgtgcagatattcttgatcctgccctgatgcgttctggtcgtttggatcgtaaaattgagtttccacacccaagtgaagaagcaagagctcgaattctacagattcattcaaggaagatgaatgttcacccagatgtcaactttgaagaacttgcccggtccacagatgatttcaatggcgcacaactgaaggctgtctgtgttgaggctggcatgttggctctacgccgtgatgcaactgaggtgaaccacgaggattttaatgaaggtattattcaagtccaagcaaagaagaaagcaagtctgaactattatgcataggctggattgtggaacaagctatttttcagtttacaaagatccattgagatatttcaagccaatggagaacctaagcggatgcttgacatttattatctttttcttattttttggcaatctttaatcgtgtgataaccttcagcttgccagagtcatgatatatttttttttatatataaaaaacacaatctgatcgtcaactttgtagtagcaatagaaatttgatcggcttgctatatttaaaatcttgttgatcaggctgcgaatctctatgataaacaaacaagacgtgttaaggctgtgatcagaattttattttaacctgtggactatttactttttatacatgtatcgattcaagttgttctcaagagcgcagctatgtagattgcgactatactatattataaatttatgacttaattatgtaactgttaacttctctgcattgaccttcgtaggttgccacaatgcgggctgattatgctagggaacacacccatcggatattcttaaaagcctaaaagacgtagatgatttatcaatcggatattctttaaaaaaaaaagagtaaatttatgctatgtaagtgtatctctgggaacattatcaa

SEQ ID NO: 28683 - DNA, 781 bp, Glycine max
  unsure (1)..(781): unsure at all n locations
  Clone ID: PAT_MRT3847_125902C.1
attaattttttaaaaaacattatgtgcaagattgattatactaatttcttttattatagattataggtgttttaactgtaatatataaagtcttgtcccattagaataaggtcaattacaaggattacacgatgtcattggagttggttaaaagccaattttatatttatcttaaggttccttttgataatttcttctatatccttcttggtctccttttacctctttttacatagctaaaagttgtagctggttccctgagtggcctcttggtgtggcaaaacttcattgtttttctcccatcttttccttgataggtaccaaaccaatatcttctcgcatataatcattccatatctagtcctttcttttgtgggaatagcagatatgagtatgataagatagcaaatatgagttattttgtttaattgtatcaggcttgtgctgtatgaatttattgtctacgctgagtggcaagttgtttcactagatggctattcactagcatggattgttaatattcttgagctgtacttaattttaatttaatttgtagttctcttgctccttgaatattgntgaattattgtctttttcagtctcgccttgagtatgagtcaaaccaccttgtacgagtttaccctttttgtacaagtcccggcatggnngcttgttttgtgaaagatagctgtgaaattgtaaacttcaatgaattgatgctgntatttcaatctgatagggttttagtttgttttgctggttgatgacgaaagcctttgca

SEQ ID NO: 28684 - DNA, 466 bp, Glycine max
  Clone ID: PAT_MRT3847_125903C.1
gtgcttatggggcaggtgttcctatagtgttgaatgggagtgaatcagtgactcagtattataacgtctccttgggtgccattcagctgtatattgaggccggcaaagccctccacgcggctaaggaaacccagtcaagaaagtgactctgaatcagctagagagacaagcagtgatagtagcagtggctattgtcatgaaagaggagctaagagtgttcatggtagtaggaatcatcttaatgttatggatgcaagcaatcatactttggaaagggtctcccaaggaaaacctttcatgggttcatcaagtgatgagactgagagctgcagccctcctggtcagcttatatttgaatactttgagcatgagacaccttataatcgtgagccattggcaaataagatttctgatcttgcacggcaatttccagagttgaaaacatactggagctgtgatctttccc

SEQ ID NO: 28685 - DNA, 322 bp, Glycine max
  Clone ID: PAT_MRT3847_125904C.1
ggctcgagacgatctagcgcaagattggctgtccgttgtttggggaggtgcattgaatggtctctgggactcttggtcttgcgagagagacccattcgataaacttaacacactcgggtgccggtcgtgctagctcatccagcccaaggttagtgagagaacttacatgggccgtccctgcaagtgtaggaatcggtgatgaccctacgcatatcgctaaatcccggttcccgaaaaccttattgtataaagaagaccttggtgcaggccaaacaatgcatgttccattcatcctgcctacctttcaacaaccatggggcgt

SEQ ID NO: 28686 - DNA, 103 bp, Glycine max
  Clone ID: PAT_MRT3847_125905C.1
cgaagaaccaaatttcagaagagaaaagagtcacttgaaggttcaatgggcgaggccgagatcaaattagaagacagcaaagaggagcacaactgaagcagag

SEQ ID NO: 28687 - DNA, 330 bp, Glycine max
  unsure (1)..(330): unsure at all n locations
  Clone ID: PAT_MRT3847_125906C.1
gtcgcangcacgcgtacgtaagctcggaattcgggctcnnnctcgagncgattcggctcnagctggtttatggaangagtgctcttgancgtagtcggttnggnccngaanntacgtnnctatgacncccgtgtctcaagaaatcccgcgcagganaganantgaatttnananttnctacnccaaaaatattctccttaaacgaaggtattcgtngggtggatggcggctcaagatnnncncnccngaagaaccttaatattcccttgaagaagttctaacgaggtgcgataacgctctttnatgggatttagngttaaactnggtngn

SEQ ID NO: 28688 - DNA, 799 bp, Glycine max
  Clone ID: PAT_MRT3847_125907C.1
attataagaacttctatcccaaggaaaagaaggaagttccgaagaggaatgacaagaaacatgagtacaaaggtaaaagaagaaacttttgtgcacaccctatttttttctaaattaggaagctttcatggcaaattgttggaatatggtggtggctactggtgtaatgagtaaactggaggtttgagcatgcctagagttaccattttccatacatattgttattttatttttattttgcaggatgttgtaagtttgaccaattttttccaaaacacccgtggaatatcagtagaagagaagcgccatatatttttgcctacataataagcatgatttttgcaaggaaatatttaaatggctttttacttagcagagatgccaatttcctcgtatgtttcaattatttattctaagcagggttgtggtgccccttattcaaggttatgaagatgttggggatttcattgtatcagaaagattagagactggtgtacatgttaacttgatcttctatctaatcattggatccattggccttttttgaactcgttcttatcattttgacacacaataagtggttggttctcattctcataaacttgttttatttatttatttttttagtagtaagatgttagctcacagttattgttgtcttgaaccttttttttccggttaagattattgtttgcaccctcgaacttcatttggtttccttaaagaaacttgcatcacacctaatttcttctagattatttaccgtcatatatgaacatgatctatttgtaatttatgg

SEQ ID NO: 28689 - DNA, 410 bp, Glycine max
  Clone ID: PAT_MRT3847_125908C.1
aaaactacaacaccttcagcgatggaagctacatctaaatgcagaggttacaaaaagggtgttttatttcccacaagcacttctatgcatggttgctatgcctccaaaaatatctctatttctcagccaaatggagaagcaaaagctatctgcatgggttgcaaagaagagtgtcactgtttaatgccctcaagaacaaccttacaccgttgttctgtgtgcctaaaggttagcaattcaactttgggaccacatggtttaaagaaagaatgtgcaatatgccgtccagtgaagaaaattggagccaaattgttgaaacttggagatcttagaagttcaaagaaaaatggaaatttgctgagtgggtcattattacctccttcaatgccctcttcttccttagccttgcc

SEQ ID NO: 28690 - DNA, 712 bp, Glycine max
  unsure (1)..(712): unsure at all n locations
  Clone ID: PAT_MRT3847_125909C.1
actgaactgctatacgagtctagttcctgcatatgatgccgtataatgggttcaggaaggatttttctctccaacacagtcttaatacctacataattgggagaaaagcttaacaattataagagaagacttgagagcatatatgttttaatttaagtaaacaggaaatttcatttacttgccttaagacactgcctacgattttcttttgcagcatttcccagaggggcagcagcagacaagaggcgtggcaggactgctttcatagcagatggatatactccaccaatgtctcctggaaaatcagattattttcaacatcaacagatactgaatgcatagattttgctatgtttacaacatcaacagatacacatgcacatattctttttgtttttgcttgcaagattcaagaatcaccaaatgataaacaattacctttcaaccctcgagaacattgagcaatagagtcaacaagaaaaaacagatccaccctccgatgcaggcttgactcaatttccagatcatggacaagaatttccatcacctagaatacacccccacatcccaggcccccaacaaatgaatataccgttaagaaaagacatgataagcttttaaggggaatgtacaataattntcaataggaaataaccataaagcaaattaaatagttataaattccatcaggtgcataagatttaaagtaaac

SEQ ID NO: 28691 - DNA, 567 bp, Glycine max
  Clone ID: PAT_MRT3847_12590C.1
ccgatggctcatatcttagaattagcagctgaggtaaatgcaacaggaggattgccaaagaagttgtttcatttagcctatgcgcggaggttgcatgcagttaatggtagttggtttggagcttggggcttggaaaaggctctttgggattttcttgtgttcagaaaggtcccagcaattctgggtggtcgcattcgttttatcttgtccggtggtgctcccctttctggtgataccgagatgttcatcaatatttgtcttggatctgcaatcactcaaggatatggtcttacaaagacttgtgctggagggacattctctgaagttgatgatacatgtgtcagccgtgctggaccacctcttacatgctcatttattaaactaatagactgacctgaaggtggatatttaatcaatgactcaccaatggcccgtggagaaattgctataggaggtccaaatgtcgctcttgggtatttcataaacggagaaagtacataagaatcattcatgggtgatgaaagaggaatgaggtggctatacactggtgacattgggagaggtcat

SEQ ID NO: 28692 - DNA, 412 bp, Glycine max
  unsure (1)..(412): unsure at all n locations
  Clone ID: PAT_MRT3847_125910C.1
caaactcacactttctttctncacnncnnnaggaaaatatcaagtttttatactgcacacaccccncnaaaccaaaaaagacaagaaatcaacgaagaaacaacaacttgtttagctaacctcccaagtaaagaatgtaaatctgctccttctcttcttttcttatctttcctctcattatacccctctacaatttctccctcctaatccacctacccttgttcttcaagaccaaccctttcttgttctcccaaacccatccgcgactgaacccctaccacactaacacagaaaaagcaaaaaccaccccttcccgaataaaaaagaaacaaaacaaactttattaatccacaaggaccaccgcgattgtagccacaacaagaaagacaccactcgaccaacttcttcaacc

SEQ ID NO: 28693 - DNA, 780 bp, Glycine max
  Clone ID: PAT_MRT3847_125911C.1
tcgatcattcaagagacaatgttgtccatctggaaatgaggcattgcctgcaggaattgtacccagaaaatctaacttggaaatgtggcccctgtggagctcgggtataaacaatagaatttcaaagcagccattgaacctgtttgcagtaatggttaagaagaaagaaattgttaacaaagtcagcacatggggaattccgttgtgtagattcaacatgttagctagtgcaataggagctaagaagaaacaagttgtcaataaatttgtcgcaaaggatggagcagcaaaggcaatgtcaaacgatattcctcgcataaagtatgatgtttttgtaagctttaggggctcggacatccgcctcggttttcttagccatttgagtaaggcttttcattaaaagcaaatacatgccttttgtgacgataaacttcagagaggagatgaaatatcacaatcacttcttgaagcaattgaaggatcatctatttcattgattatattctctgaagactatgcttcttcacgttggtgtttggaagaacttgtgaaaatagttgagtgcagagaagagtatggacagattgtaataccggtattttacaatgtagatcctactaatgttcggcatcaaaagggaagttttgaaacagcacttgctgaacatgacaaaaagtatgatttgcctatagtgcgaatgtggagacctgctctgaaaaattctggtaatttagcaagaattaattcaacaaattttcggaatgatgctgagctgcttga

SEQ ID NO: 28694 - DNA, 256 bp, Glycine max
  Clone ID: PAT_MRT3847_125912C.1
gcctaaccctaaggtcttattagacatgaccatcggtggacaacctgacgatcgtattgtgatggagctgtacgccaacatgactacaaacacctacttaaactttcgtgcactatgtacttaaaagaaggtcacctaacggctagattagcaccttctctacaaaggcttaatcttacaccatgtaaaccctaacttgttatgctcatgacgaaactttgcctacggaaacagttccggatgcaagttagtctac

SEQ ID NO: 28695 - DNA, 384 bp, Glycine max
  Clone ID: PAT_MRT3847_125913C.1
caaagccccataatttttttttaggaagcctttttttcataaaaaggggggaaattttggcggtcctttgacagtacctttttcttaccgggacaaaaaacttgcaaaatttttttgggaaagtttttgacccattggacaaagttttggggggatgaaaaaaaccaaaaaaaacccccgaaatcggggtttttccttcaaaacctcggggaaaaaaatccccccgaggttctatgggtataaactccaattcgctggacagagtaacaacaagtggcccctacccaataacaggggggcccctttttttatgctgaacggcagcaggggattttagccccgtttatgatttgggggggtttcatccttcaaaagttttttttt

SEQ ID NO: 28696 - DNA, 465 bp, Glycine max
  Clone ID: PAT_MRT3847_125914C.1
ataaatgaaaaaaaaaaatcagaaatttgtggattgctatttgctcaaatgatgggtctattagttctttgcaatttgtattgatcatatttatttttaccttttaatagatatagtgtgctgtcatcccaagagaaggatcaaacattgatgatgcagaggtgctaagatattgcaagaagaatcttgcatctttcaaagtccctaaaaaggtcttcattactgattctttgcccaagactgccaccggaaagattttgcgtcgtcttgcggcacaacactttgtctctcaaatttgagcaacccaagtcctacttttgaagcctccatacctggccatacatagttggagtccacacacataaatttcaacaataatttggcaaacttggcttttaagaggagggtaattctgcaaatggcctttcatacaggataccccttctgtcgtcttctcgcagccgt

SEQ ID NO: 28697 - DNA, 302 bp, Glycine max
  Clone ID: PAT_MRT3847_125915C.1
aggcgtgcgaacacgatagattttacgactgtaagtggacagtgaagggcctattggcaagggcggtctctaattaagcggtttgtatatatgtgctgcacagccccatgctccttactactgagaaagaccatgacgttgacatgggcgcgattagaatcgttcaaccagccatactacaccacatgcggcgttctggtaggatacgcactgtgcttcatgctgttggcaataataaacaagatctcaacggccatatttaactaccaagatctattaacagcgctgttgatccttaccta

SEQ ID NO: 28698 - DNA, 1976 bp, Glycine max
  Clone ID: PAT_MRT3847_125916C.1
cagaaatttgtggattgctatttgctcaaatgatgggtctattagttctttgcaatttgtattgatcatatttatttttaccttttaatgggctcggctcacaattcacaaccttcaaacatatttataagaataacaccaatggatactccaatgaccctcacgggcttgctccgcgacgtcgccgccaaattcccttcccgccgcgccatctccgtcgccggaaaattcgacctcacccactcccgcctccatcaactggttgaatccgccgccgcccgcttagtcgccgccggaatcaaacccggcgacgtcatcgctctcaccttccccaataccgtcgagtttgttgtcttgtttctagccgtcattcgagtgcgcgccacagccgcgccgttaaacgcggcttacacagccgaagagtttgagttttacttgtccgactccgagtccaagcttcttctaacatcagcagaaggaaacaactcagctcaagccgcagcttcaaaactcaacatccttcacagcacagcttcaataacccaagccgaagacaaagaagccgagctgagcctctcattaagccactccgagtcagagtcaattaactcggttgagtcactcggaaacgatccagatgacgtggcgcttttccttcacacctccggcaccacgagccgacccaagggagtgcctttgacgcaacacaacctgttctcttccgtgaacaacattaaatcggtgtaccgactcactgagtccgactcgacggtgatcgttcttcctttattccacgtgcacggtttgatcgcggggctcctgagttcgctcggcaccggggcggcggtggcgctgccggcggcggggagattctccgcctcgtcattctggaaggacatgattaaatacagcgccacgtggtacacagcggttcctacaatacaccagatcatactggaccgccactcgaacagccccgaaccggtttacccgcgcctccggttcattcgaagctgcagcgcgtcgctcgcaccggctattctgggtaaacttgaggaggccttcggtgcgccagtgctggaggcctacgcgatgacggaagcgtcgcatttgatggcttcgaaccctttgccgcaagatggggcccacaaggccgggtcggttgggaaacccgtgggtcaagaaatggttatattggacgaaacgggtcgggttcaagatgctgaagttagtggagaggtttgcattaggggtcctaatgttacgaagggatataaaaataacgtggatgccaatacggcggcgtttttgtttggttggtttcacaccggtgatgttgggtacttggattctgatgggtatttgcatctcgtgggtcggatcaaggagctcatcaaccgaggaggagaaaagatatcaccaatagaagtggatgctgtccttctttcacacccagacattgctcaggcagttgcttttggagtgcctgatccaaagtatggggaggagatatactgtgctgtaatcccaagagaaggatcagacattgatgatgcagagttgctaagatattgcaagaagaatcttgcatctttcaaagtccccaaaaaggtcttcattaccgattctttgcccaagactgccaccggaaagattttgcgtcgtcttgtggcagaacactttgtctctcaaatttgagcaactcaagtcctacatttgaagactctatacctggccatacatagttggagtccacacaccataaatttcaacagtagtttggcaacttggcatttaggaggaggatatttctgcaaatggtctttcatacaggatacagtatattgtagttttcaatgattcatgtgaaatgttcacagtgtaatgttttcaaggttttaaagatcttaaataatttctcaacctaatttttgaaaaaaaaaaaaaaaaaaaaaaaaaaaaaaaaaaaaaggggg

SEQ ID NO: 28699 - DNA, 410 bp, Glycine max
  Clone ID: PAT_MRT3847_125917C.1
agttccgaaacatcaatgaaatccattcatacagcatcatgacatagatctgattgtgatacatatatcctgacacaacgcataacagccagttcctgctgtatctcacaggttcaccacccacccattcaacctatttacaaagcttaggacattctaaaaccggcctagactttattacttcatctagcacagcagtgtacatcacacttttcagtgagcgataacacggacacctgaacaggttttgactgcacttgcaaagctggtcatgctcaagttcatcatattcaggtgactctaattttcacgtggcgtttaatatggcaatggataactcattataagaagttattacggttagataggctagtaacttgccttcatttgaaatccgccttgataagaaa

SEQ ID NO: 28700 - DNA, 512 bp, Glycine max
  Clone ID: PAT_MRT3847_125918C.1
aattgtagatgtgcgcgaatgcatgctgaatgagaatttctacctttctatacattccttgccatgtcctctcgtgacaaccgtctcggttgtgtcccagttttcgcgccgtcctcagatactgcccgcttggcgatacagcaacacggccttttcatccccacccaccgcaaactgcttgctgggcccaagcgagcctatctgcacatctgcaggctgccagtcgaatgcccaggcgggcgcggcgagggtggtcgtgtacacggcggaccgctgggcgatgtcccatagtttgacattcttgtccgcacccgtagacccgagcaatcgtccgtctgcagagaggtccaatacccaactctggtggccctgcataattgccacggcgccttcgcctggtcgggagcccgagccggatcggatgtcgtgcaggacgatacgggtatcgtctgacccagagtatagccactgagagtcctcggaccaagcgatagaccgcgccggcatggcat

SEQ ID NO: 28701 - DNA, 1004 bp, Glycine max
  Clone ID: PAT_MRT3847_125919C.1
cacttttttcttgcactaaaagcacacacgcggttagatctgcttcttcactccagaaagaaaaatggaagctctgctctcccaattcaccttcctctcagaccaggccctacaagacaagaacttcgatccttcgacaatcgaagatctaatgaagctgttcgagatcgagtcctacaaggcatgggcagcagctgagcttgagcaagagaaagaggtggaagaagcagaggctggcatggaagaagctgaggagtaccttgactcagtgatggagagtgccatggatgagtttagacgctttgaagaggagctagagaggatgtcaaagaatgaaatggaaggcttggttcaaactgctgagagagccagaaaaatgggaaatttgatggaaaaaggtgcctctattgcttccaagaagtatattgaggctgctcttaattcagccactgcttccatgaaatcagcttggaaaggactctcttctggaaaggttcatccttcttaatatatgatatgtattcagttcaggttaaacctgctgccaataaaatatacttctcctttactctttattgttattttcacttcttagttacatttctgcttggaaggtaggaaattaattagatcacaattgtactaccaaaattgagatgctggagaatattcagccaaaagtggaaagaaaaaacagattcactgttattgatacatggaaatcctcgatgttttgggtggatccatacaaggcttatgattcaaccagcctaattaatgttgaacattattcagtaatgtatttatgaattcacatgtttgttgacagtaggtattgcttctttgatcctgattcctggactaatagagctgaggagacaaaaatttccaatttcctcacttcttttgggcgtttcctgcagattaaattgtgtttcccccccatgaatcttcaagatttcaattgtgttctaaagcatgaaaaagaatcgatatttgttttc

SEQ ID NO: 28702 - DNA, 285 bp, Glycine max
  Clone ID: PAT_MRT3847_12591C.1
gccacacgtccagaatagacattcaataacttttataagcccatacctatatacagcaatgagatcctttccggggaacctgagtaacaaaatcgaaattcttacaagatactattaatcatgaagaattatcagaataccgccattgcatacttgggcattaataacccacacagatacattgagtcttaaacaaaacatctacaatatctttttacacattcagacttttcttaacaaatatgcaaaaggacatttgctatctaatcttttataaagaacatc

SEQ ID NO: 28703 - DNA, 481 bp, Glycine max
  unsure (1)..(481): unsure at all n locations
  Clone ID: PAT_MRT3847_125920C.1
cccttgcgtccgttttttttgtcctccaatctattttttaattcaatttagtattttagttttttttcatttaatcttttaattttttaaaatccattctaaatcgtaaatcacacttttaattttaaacctttgtgaaatgcacattttcaaaaaataaataataaataataatcgattaaagcttttcaaattaaataaaaaaaagttaaatgaataaattaaattaaatttagaaatctaaataataaatttgcgaaaaaaaacacttaatttaacctttaattaattattattgtttcactttatgtttgtgctaggttagttagtgagcaacacactagtaaatgtgcagggaatgtggtaggagttttattggacaatcttccccccttgcttgagcctgcacctgaaggtgtatattcccaccttgccttctcgactggagataaattngcaattcttcgcacctctcattact

SEQ ID NO: 28704 - DNA, 385 bp, Glycine max
  Clone ID: PAT_MRT3847_125921C.1
gcagctaatataatagcttgaatagccctttatggcaatcacgggtacatgcctaaccagccaacacactaagagggcgtatcatccagaacccattgattggtgtacaatgagggtacaaggcaaaaactatattgctttgtcacataacgaatgaccaataatcactgcactattaccagtgatagtacaccacattactaagagctgatatcttgggaaggactgttattgcaaggctcagtgcaggacatcctccatgctgacaacgagccatgctgctttcgcacgtcgcttgagcccctaacctccaaagcttacgaactagtggagcgccacttcaacaattgcaatggctgttcctataccagtttgggtgctaatg

SEQ ID NO: 28705 - DNA, 618 bp, Glycine max
  Clone ID: PAT_MRT3847_125922C.1
gaaattccaaatttttctacaattcaatttccattatcagtcaataataataataataataaatacacaataatttacaaataaaaaaacatgaactccgattgaagccgggacgactgggtggaccactttggtacctctttgccatctcctcagaattccacagagcattgaaacaatttaatgttgtttggtttagggttcagtggaggagtagtggtcgagattcaaggtagaagtcgaggttgtttctgagaggcacgtggcagtcatcggagtgtgaaacgaagcggaggagctgttcgaagatcgcttcgtcgcagggaatggcgagaggaccgtggttggagaagccgtactcttcctccgcctcaaccagtagcctcttgaacacgggatggttcaggtacgtcgtgcgcaccacaaatcttttcgagttgttgcccacgcacaccgccacgtgtcccgctggaacatcagacggtattctgtgggccgacgtacgggccttgctacgccaccgccgcagcatttggcggagcctgactatgtggcggattctgctgcattttccaagtgccgctgacattttctcctcaaacagaagcggacgcgtgg

SEQ ID NO: 28706 - DNA, 450 bp, Glycine max
  Clone ID: PAT_MRT3847_125923C.1
gtcggaaacaagtttttaaggaaaaatgggtgaggaattttttaatttacttgctaaaaaaaaactttggggggcgttttttttttttttttttttcacccgctttcttgaaacggagtcctttttaaatacggcccctttggtgaaaaaaaatggccggcgttttcttttttgggcctgggatttccttggcgttacctaacttaatttccttgttcaattccccatttcctttttttcagaattgccattttgccacgcccgggggcctttacaattgtgggtcataaaaattggggagtggggggctcctttgttttggcccttttgggtggtgggggggggggttcccccgccttttcactttttataattttctgcccctttaaggacgaagaaagatttggccttttttttcccttttatttttacccccccccgttttttttg

SEQ ID NO: 28707 - DNA, 630 bp, Glycine max
  unsure (1)..(630): unsure at all n locations
  Clone ID: PAT_MRT3847_125924C.1
ggctcgaggctaaaaataaagccaagatagagtatataagtgagggacaactctcactccatgagctagcttaagcgcaacgactatacatttgatgtgcagaaaaaatttatgcatcgttttctgctcaagcaatgtagttctgagctctgctcaaagtatcctagctttcacacgtgtttgctcttgaaaatactcatggatctgttcccaaacttgataggaatgaacacattcaattattcgagataggattgaaacgaaagagtcgattgaagccacaacagaaggatttgatcttgttgttcccaatcagaatatgctggattttcatttccagcttcacaatctgcctctgtgagaaagcgcattggaatctgaggattcatcacaaaacgctggagtttatgggacttgatcacaggttcaacttgttgcctccatagcaagaagttagaatcatctaacttctgagaaatcagatgaaaagtaggagtagcagaagtggaattttgatttgccgccattgatggatctcaagctttgataccatcatagattntgagagagaaaagagaaagataaacaggggttantgttctcttttatagagaaagcagctggggtaca

SEQ ID NO: 28708 - DNA, 455 bp, Glycine max
  Clone ID: PAT_MRT3847_125925C.1
cccacgcgtccgaattcgagcgggccgcttttttttttttttttttttttttttttttactgaaatttgaagcttttattcttttatcgtttattttaatcagccaaaaaaaacataatattatataatgaggtacgacctcccttttacaactgtatccatcaaatttcctttccagaaaaaaaaaccccaccaaaatatagagtacagatgttctttttaagaggattacagatgttataaattatttaatattttaccctatgatttggttaattaacattaaaggcggttaaacaagagcttaattgtttaatttttacttttaaaattttaaattataataattattatacacactattgattatcaacttatcgatgatttgagtaaaattagatttatatctcttaagcaagattcaattggaatgagtaattagctaattttttgac

SEQ ID NO: 28709 - DNA, 427 bp, Glycine max
  unsure (1)..(427): unsure at all n locations
  Clone ID: PAT_MRT3847_125926C.1
gctcttgggcaagtagtgtgcctcttcttcgcagagtccgcgactcataaattctaaggggttccccgaaatgggaccgcctgtatcggaaaagatcacagaaagggggcgccaggcggaaagaaaagggtgcggcgtgccccacaagaagaaagccccggtttcaaaggtgcccgtcaaagcccggtcttctcaattctcccgtctggaaagaatatggcccgtnntatttgaagaaaagggaaggtaccgcctcagannngtgtcggtacccggtggcttcccgtatacccttggcttgcagttcttcgagataccctnnagctgccgaaggtggctttgagnnttggctgggaaatgcccagcacgttgaccaacccaagaagaaccagggattatntctcaaagaacacgttgcccttttggc

SEQ ID NO: 28710 - DNA, 319 bp, Glycine max
  Clone ID: PAT_MRT3847_125927C.1
gtatggcggctccaaatggaatggtaacacacacaatgtagcacttgaacatttgcatgatatccatcctgaggtaattaacaagaaggagtaacttccctctttctaacaatgtaccccataaatataagggggacagaattgtgctcctattcacaaatgagaacctgggcaaataaaagtacatgccaaattttggtaataatcttattgagggcacatgtgcataagggtataacatattgcgggggacctgccctctttgcccgtttacaggagtaaatataggttgatacccttaagccacttacggatagag

SEQ ID NO: 28711 - DNA, 376 bp, Glycine max
  Clone ID: PAT_MRT3847_125928C.1
tagagaaaatctgtgtgttctctcaaacgaaacagaacgcgatcatttgtccggcgtagcagaataacaaacttcaccactgctgtatgggcaacttcgggaaacctcaccacgtgggtgtgccacctggagcacgtgatgcttgatgctggccagattatggttggaatgattgcggctcacatggcttgaatgttaagggaccaagtgaccccacacgaattcctactagggatttagtgcatgtatagtgcatgccaagcacaccaaatggtgtacctcaatatattcccagacctttggagcctattaacctgcttgcagctaaaaatgagaggtagagcgtgccaatagctattcgaccaaaagtttatgg

SEQ ID NO: 28712 - DNA, 581 bp, Glycine max
  Clone ID: PAT_MRT3847_125929C.1
cccacccacaatattgtcctcttaataactttgtttcacgcacaaggttctcatgatacatatagtatatccaaaagaattccaacttacacaacttgcctaaattccaaagaatagttccatataatgtatagacaactgacgtgacgaagaagacaaaaaagaacattttattcccacacgaaatgtaaaggagttcctggaggcacaatgcgcttttcccttgggaatccaccaggaaaggcatataaggggagctcatgatccaaatggcaacgttttgaactatcgaggggctgtttgtctaaattaccggatcccgagctttttgggcaagtaggatttatctcatatttagcagggggattttctgaccctcctctatcatccttatgaaacttggcagaggcatcttggttattttctttggtatgggttcctccaatatcacctttagggacgttgggaaccaaatgtgggcgggcttgcacaccaacacgcctaagggggagctggagacggggggggactagggggggggttgggggaaaggggggggggggggtaggggtggggggggg

SEQ ID NO: 28713 - DNA, 243 bp, Glycine max
  Clone ID: PAT_MRT3847_12592C.1
acatcacattgctagcactcgaagcgtcactacaggtatccacgtcctacatgcaagtcactctattcaacacagagatcactttgcatcacaactccagccactccatctacatcgcattcgcttcgggccctgatagacctctgcgagtgacatgatctctacacgcagatcctacagacctgggccaaaagtgagtcgatggtacaattcatgcatgattccccctcgtcatcttcgccg

SEQ ID NO: 28714 - DNA, 1215 bp, Glycine max
  Clone ID: PAT_MRT3847_125930C.1
gggtgttagacattggaacagaccgtcttgtacgaaagatccctttcaatttagggaactttatccacttaaggtacttgagaatggacacctggggtgttaaatttattccagcttctatacttacccttgaaaatctacaaatcatagacttaggtcattttcgggtttttcatttcccaatttcgttctctgatccaatttctttccctgctggaatatggaaactcaatcatttaagacatttgtatgcatttggacctatcatgctacgaggccactgttcaggttcaaatgaggttatgttgaatcttcaaaccatctctgccattgtactcgatcgacaaacaatatctctgataaagaaaggaaggtttcccaatcttaaaaaattagggttgcaagtgtcttcaaggtgcaaagaccaagtacctgagttgttgcagagcctacaccaattatgtcatttgaagaacttacgcatttacctcgaaggtaagggtgcttcaggtaccccaaaccatgagagcatggaatggaacattggttgtaagccacaagaactattacaaagcctaggtcaattgagttgtctaactattttaagaattatgaatgtcttcgaccttctaacctgtggggttgtcacatttcctccaaatgttacaaaattaacgttggcaggtattaagtgcatcactgacgaggggatgaaagcgttgggaaatctcaccaaacttggaattttgaaacttctaggatcttcagatgattctttcgacctaaattgcgttgaaggtgggttcccacaattgcaagtgcttgagatgagttttttgggagttggaaattggaaattaggcaatggtacaatgttacgccttcaaagtttggaaatcaactactgtgaagggttaaatgatctcccaaatgaactgtggtcgttgactgacttaagagaagtgcgagtacggcgaccctcggaaccaatggctcacatgctaaggaatttgaaaataaagaatgcggttgaactcgtaatcggggacattagaacttgagtttgttgactcaatgtatggattacaaaggtttttgtgtgtgtttgattgcaaacaagtccatagttatgttgggtttgattagttttcttcaagattttagaataatgaagtttaacgagttgacaaactcgtccaagcatgtatatcaaaa

SEQ ID NO: 28715 - DNA, 336 bp, Glycine max
  Clone ID: PAT_MRT3847_125931C.1
agtcggcggccgcccttttttttttttttttagtgctaaacaaacttttgacctaacatcgcgtccttggatgaagatagcggttctctttttatacaacccaataacaatacccaatgacttgcatgtttaacagaataacctgtcgctcttactgtcacaccgaccttgagcctggctttaccatacagggttggttgcaaccgtattatcttatacttggtcccataagcaaggtgagttctgtgatctggtgtctgaacactatggctatcacagactgatgcccatgactgctgtaacctatatctatctctatcttgaacaactatggag

SEQ ID NO: 28716 - DNA, 490 bp, Glycine max
  Clone ID: PAT_MRT3847_125932C.1
tttttgttggtgaagcaaatggatttattaaccgtcagagtttactagaactgcagtcctcaatactcaatcactctatacaatcacactcacagatatcactcagaatcaatgcttaatggccagaaaatcttgctttctgttctgttattaaaataccaaaacaataaaactagtttctttcaggactcaaaagcagcagataagaactcatccattgccctaacagaagaccccttaaacccatcttcatccttcaccgcatccctaatcatatctctaacatcccctgctttcttccccatcgcaacccctttctcggtctcgtccatcaccaattcaatttttgccactatatcttcgtatttcacctcagagcttttcccttttgcaacctccacacaaaccccaacctttttcttcaacaacttacaattataaaactggttcgccgccattggccaccccagaatcggcaccccctgactta

SEQ ID NO: 28717 - DNA, 253 bp, Glycine max
  Clone ID: PAT_MRT3847_125933C.1
ggatcgggacaactcatacattcgccctattggtccttaaacactcatcagtcatcatcatcgttacgctagttcttttcccgttgttttctgcctttcagtggccgctgcttcgctttcagttccatgcaccatcctcagcgtaacgcacgtgagattcgtggcctcaatgacctcatgtcggacatccgtacattttcaggaagaaggctcactccgacagggaatgctagcatcactcccatcgagtgtg

SEQ ID NO: 28718 - DNA, 842 bp, Glycine max
  unsure (1)..(842): unsure at all n locations
  Clone ID: PAT_MRT3847_125934C.1
ttttggagttgtttagactttaatccttagaaaacatgtatcaatattttcccactctacaaaatttgacaaaaaacaaaacaaaggaaaggagagaagttccacgcataagcatcaatcaaatgatcaaagcttaactggtatgggttctggagctacctgtttattcccgcctcctaccttccatcaagcaagtccagcttccagtccaccgaatgtatcatagaggggttggtttagagtctcgggaagattaaacgcaaacatccctcccactatcccacatgctgcaaacaccgcaaacggcaaccaccctcccaaaacgaccacaaacggcgccaatatggctcccatttgcgacgcctgagttgtacacccgagcgccgcgttcctcaccaccgtcggaaacagctccgccgtgtaaataaacagcaaattataagtccccgccatcccaaatatccccaaaacaccacacaccattctcaccatcttccacaccccaacattgcccaccaaactccccatcaagcaaaagaacccgctgaaccacattgtcgccaccgtcaacggcttccgtccgaaccggtccagaagcaccgccgttatcgtaaaggccggcatctccgccaccgagttcagcatcacgttcaagtagaggttggtttcgaggttcatgacgtttaaactaagcccatagtagaccacagaacctaaaaaattaagagccaccgcaatgaacaacctcatacgagtgatgggggaacgaaccacgtctatgatggatccaacgagtgcatccttgttttcgtttttnnnngtcatcattnnnnnnatgtcat

SEQ ID NO: 28719 - DNA, 535 bp, Glycine max
  Clone ID: PAT_MRT3847_125935C.1
ttagactttaatccttagaaaacatgtatcaatattttcccactctacaaaatttgacaaaaaacaaaacaaaggaaaggagagaagttccacgcataagcatcaatcaaatgatcaaagctaaacatgtaaaagatcagaaacaatcaataaaaagaagctaccaaactaccatcaagcaagtccagcttccagtccaccaaatgtatcatagagaggttggtttagagtctcgggaagattaaacgcaaacatccctcccactatcccacatgctgcaaacaccgcaaacggcaaataccctcccaaaacgaccacaaacggcgccaatatcgctcccatttgcgccgcttgagtagtacacccgagcgcggcgttcctcaccactgtcggaaacagcttcgccgtgtaaataaacagcaaattataagtccccggcatcccaaatatccccaaaacaccacacaccattctcaccagcttccacacccaacgttgctcaccagactccccatcaagcaaaagaacccactga

SEQ ID NO: 28720 - DNA, 814 bp, Glycine max
  Clone ID: PAT_MRT3847_125936C.1
ttgcatgcctgcagtatgacgagcgcaaatctattgcagtagactatagcagtatttgaaacggtaaaacttttattggtcaattttagctttaaatatatacttgatcagactaaattcattttctataatattcatagatgtatcatttcatttattttatgttctttaaacgtggatcaaaatccattttcttaaacttttaaaagcaatctatatctatgaatattatagagaatgaatctagtgtcattagctgtatgatttaaggctaagatcgctcaataaaggttttaatgcttcaaatactgttctaatatactgtagaagatctgtattccaatataacagtagcacgtacgaattccaagaacggcttattagaaaaatgctattaacatattattattataaaaaaatttaatagaaatcataattttttgagttttacttcatattgatttgttgaatttcacttatatttgatggtttttgataaattttcattagtatatgagaatgttaaaagaacgtgttggaaagagtattaaaaatgttatgataatactcctccaaatattacatatctatatgctctttatcttattacctaggtctcgttgtgtgaaacctggtaaagggttgattttgtggtggggatgggagaaaggaagaaaacaaagctagcaattatgtgttcttattcaatggagtgagttacaacaccggcacgccatcttatttgatattacaagcatcttattccctttggaattggattcaaggccataaaattgcaattccgtgtctaaaa

SEQ ID NO: 28721 - DNA, 248 bp, Glycine max
  unsure (1)..(248): unsure at all n locations
  Clone ID: PAT_MRT3847_125937C.1
cccacgcgtncgtttgtctttctgagaaacacatactaatggcacacctcctatgtggcgatcgttgctgcgaccatcgaccattatgacgtggatacagcctgtctaggactcggaggtgacaggggcccaggcctgctccaaggtccccgacctgaggaatacgaaaagtgggtactagtgaccaatctgcgccgactggtgaatgagggaagaatccgaaggcttgaacagatctaccttcactc

SEQ ID NO: 28722 - DNA, 276 bp, Glycine max
  unsure (1)..(276): unsure at all n locations
  Clone ID: PAT_MRT3847_125938C.1
taaactccttntcctccccaatgtttcaactagtctatataaaatataaatatcacgtttcacattttttatctaaacttattgaaatttatcaaccactcctttactcgtacattctaaacatatactgtttcaatcttcttaaagttttctttttattatatatgaaaaaacgaaataaaacttgcttctttaatttctattttcactgattacactcacctcctctctatttaggacaatttcttcatttaagataaaacaattcctacaact

SEQ ID NO: 28723 - DNA, 1074 bp, Glycine max
  Clone ID: PAT_MRT3847_125939C.1
ctctccgattctgtatccgcttcatggcagttacattgcgcagcaccaccaacaactttcttccgttaagctcttcaaattgttggctttcgaatggttccccttatgcagggagaaaagtgtcggactttcattgcgtactattgagtaaatggtggagttctagaaagggatgccttatacgacatgatgttctatcgagcagtaatcatggtctgttgggctttagaaaatgctattcggttttttctaaacctagaagggggttgcacttgttaccatttgcctcctctgatgatggcgtgactgtaaatgggagcctccaagctagctccggtactgacctagaaaaaatgagggtgaaactgaataggtcactggaagatgaagagttttgtgatggacttgtccaagctttatatgatgcaaccagggtttttgaactggcaattaaagaacataaatcgttctcacgaatgtcctggttatcaacagcctggctattcagccgtctctccctcctccgctcacaccaacttgttcgcccgctccgatgctgtttccgcgtcatggcagttacgttgcgcagacgcaaccaacaactctgttccctgatgctcatctaaatgttggcttacgattggttccccttgtgcttggtgaaaagtgtcggactgtcttggcggacttttggttctttgttgcttttcgcgaaaggaatgccttaaattcttttgacgttctgttttgctgcaatagaagttgggcttgaagaagttaatgccaatcgtattgcactcaatataagatgctgtccctgcagtccctgtggggcatcaggtggagtgcccggttcacgagattgggaagggtggccgtctctcctcacttctgaaagatatggggtgttcaaaagggtagcccaccggagcatgcagagcttcgggttgacagcaccaaagccaaatatggtacaacccgggtcttttgcagggtctttagaggccctgtcaccctccgcccgcatgtcccgcttgccgccagcctgccttgggtagaccaaatgcatggtga

SEQ ID NO: 28724 - DNA, 372 bp, Glycine max
  Clone ID: PAT_MRT3847_12593C.1
cttacgcctccgatcaataaaaattacttattatcatgaaagataatcaaaatgcaagttctctaaccacataaagccgtcctggaaagcaaattcagatcgagcatgctttgactgactgtcgaatctcgacaaacgtattttggaattaaagctacaaatggactcgacattgctaccgaaaagaaattgccatctatatctgatgatgaagcatcaatccaaaaaattcagctattaacaccaaatatacgtgtcgtatatagaggcatgtttcctaattttcgactttaggatcagaaaaacatgaaacaagcctatcagtatcaccagtttatataaataaccaaatcctgacactcaactttacat

SEQ ID NO: 28725 - DNA, 440 bp, Glycine max
  Clone ID: PAT_MRT3847_125940C.1
gtgtttaagagcatgccaccgggcccaggaacaacaaaatcagccatgttgagttagacctgtccataaatcctctgtgctgcagcggcttgatcaaggatcctctggtcttcatgattaaaaatacataggttacctaaaacactcactgtcttcttaagggggggaagattcaagctttttacaaaacaacaaacccattggtactaaaagttagaatgataccccacaaccatgggtcaagtatgttataccattacatgctatagacatagtgagttgacactcaagctgaggttctctcatccaatcgacgggtgtgtaaaaggatggttatcttaacgtgccacacatttatgaatcggtaagacgaacttggatatctccaaaggttccggaggggatgagtgacttatcgagagatccccttgaacactgat

SEQ ID NO: 28726 - DNA, 354 bp, Glycine max
  Clone ID: PAT_MRT3847_125941C.1
ggaaatacccgggcggaccacacccttccggacttgaagttaaacaggaacatttggtgcatgggtatccgaagggggccaaggcgggtcggggttaaaattgcccgcacccggaccaataagaaaaaccccaagggggaactttattttttggtaacagtggttgaaatccaaccggggggtttaaaaggttgggaaactaaggttgttgaggatgaggattaacccctgtttcccatgaaataaatttgaaaatgttgttggagctaatggttatttactgccaatgactaatgtaataaaagcttcaaaactggtttcttttaaggtaatccaaatttccacatggttttt

SEQ ID NO: 28727 - DNA, 356 bp, Glycine max
  Clone ID: PAT_MRT3847_125942C.1
ataatatcataaaaaatttaatgtacaatttttggaaaaaaaaaaaaaataaagggaaaaactgaactggaggggggggggggaaaacgccaagggaataaaccaaaaacataattaaaacaagccggggcggggcgggcccaaaagcaaaccacgaaaagcctacgaagcgggggggggggctttaagagggggaaacaaaaaccacaggccatcatgttcaggggaaaccaaaggggataagcaaccttaacctaacatgggggccttccaaacgtgcgaaactgggggggggggaagggaaccaaagggcaggaaaacaaccccgaaaagggcttgagaggggcaaatccggg

SEQ ID NO: 28728 - DNA, 374 bp, Glycine max
  unsure (1)..(374): unsure at all n locations
  Clone ID: PAT_MRT3847_125943C.1
gtttatctgtttcttaatggttagatctaatgatatactcaccgacgagtccatatcgtgccagggtggacaccgatacggtaaccgatgctgccaccgaatttggatacctgacttgattgaacttcttgtgctcagaaatatgcctattcagaaagttgaaacgggtcatcaagacacggtccatgatgatgcaatggatgactatggttagagggtgggcacgggttcatcagatcacacaatttagataataggggtgagtaatacggtctgtcagaatctaccaacattgactggtcaccaacgacctgtatggggagtggcgtagactcaccctaagattggttctctacttgcatagngttcctatg

SEQ ID NO: 28729 - DNA, 479 bp, Glycine max
  Clone ID: PAT_MRT3847_125944C.1
tacgctgcgagaagacgacagaaggggaatgaaactctgaagcataatcgtcttttgagagaacgaggggatgatgactcattccccaattctccaaggaatagtagtagtgatgcaaatcttcagaaaaatcgtgaccaaggagcttcacaaaaggcaatgtcattaccatcttcaccacacgattatggaggccaggcttctaagagaagtggatcatcaagatacggagtgaatgatgaaatggagtcaacatggaataaagtactggaatctccaatgttcaataataaacctctgttaccatatgaaaaatggaatattggcttctccgaattgactgttggaactcgcgtagggattggtttctttggagaagttttccgtggcatatggaatggcacagatgttgcaatcaaggtttttctagagcaagatttaactgctgaaaatatggaagatttttgcaacgagatatc

SEQ ID NO: 28730 - DNA, 377 bp, Glycine max
  Clone ID: PAT_MRT3847_125945C.1
aattcggctcgagtgagaattgagagtagtgcggtttgccggtgagatctgttgtttaagttagtgctgtaatgtcatgctattgctatctcatagatttagatcgaaaatctcccttcttcattgctgaacgcggttaaggctatgttatgaatgcgttctaattaagacacaataatgacaaggaaacaagcaagttccacgagacgtggcggtctttcaggagtcttgcattccaaatccaaatcttctcctctactctccatatcccttgtcctatttgtagccatccttctcatcctttatgcttgtatcgggtcaggtatattgggaggaagaaaggatgtgattagcatggctgaagatgatttttcatg

SEQ ID NO: 28731 - DNA, 3509 bp, Glycine max
  Clone ID: PAT_MRT3847_125946C.1
cttgagtcgcagcagcgtagtagctcgaatcggctcggtgaaaaggcagagtagaagagcctataggctataggctagaggagagcataatagttttgacgcgtaagaagttgtggatgttggtgagccaacccttttgctagctggctgtcggggaagagttcccaaatccctctcgcactgcacgtgactcacaccctctccctctccctgcaaacaaaaagcgcatcatcccttctcttttctttcttcttccatcatcaatccaaaaccccaacctcaaatctctcatttcctccttcacatcacacttttcttctctctctctctcttcctttcttttttatgcgcagccatgattccgccttatttttagctgattcagattcaaatgctattggacgcaaacccagattcggactcgaatgcttggatctgctgccggttacatgatctccagcttgaagcagttggagttactgaaatatatggtcctaatttcaatgattttgtattttaagaaaaacctttagcctggatatgtctcttatgggtttataattgtggcgaaatggtttttcattctaaatatataagaacatgtaggagacacgagaagatgcagggccggcagagcaagagccatctaatgtgtcgttgttgccttgagcttttgttgcaaaatttggatctgtctctttgggttctcaggatgagacctttcgtaatatgtaatcgcctcaacaattacacaaaaagggttcgtcgtctccaaaagcatcacagccacgatggcgcagtgcagatctatgagaacgtttaccacatggtttctatgctgtcattggaggtacaaagctcaagccactttttcatagtatttagacctaggatgagcttcattctgtggttcaaaatggtttcaacagaaataattcgtttcagagcttgaggaaaaatatgagcaagtcgagtttagtattgtttagtatgagattcgttcattcttttaactctacgcaattgtccataattaagaagattgctggattagtttctgatttttataagcgtcccaatgtggaaagtccagcaaaagctgcactagatgaaagctctcacatgtttgagaatcgaggagtccagatgctggggcaaataaagcatggttcttgccgtcctcgagctatcttatttaaagtattagctgatactgttggtcttgaaagtaggctcatggtgggcttgccaaatgatggagctattgaatgtcaagactcatacaagcatatgtctgtgatcgttgtattaaattccgtggaaatgctggttgatcttatgcgatttccaggccaattgttaccacgatcaaccaaggcagtttttatgactcacatttctgcaggagagagtgattcagcagaaaatgattcttgtgattcaccattagaaccaaacaccgaatgaatgttgttcacagagatctgaaaagtgcaaattgtctagtgaataagcattggaccgtcaaaatatgtgattttgggctttcaagaataatgacagaatctccaatgatagattcttcctcagctggaactccagaatggatggctcctgagcttattcgaaatgaaccattcacagaaaaatgtgatatctttagccttggggtgataatgtgggaacactgcaccttgaacagaccatgggaaggagtaccacctgagagggtggtttattccgttgcgcatgagggttccagattggagataccagaaggccctctaggcaggctgatttcagagtgttgggcagaatgtcatcaacggccaagctgtgaggagattctttctcgtttggagatcatatcgtacggcctgtaagggcaatgaatgatactctcatagaaaagcgtggtttgagagaacgaggggatgataactcattccccaattctccaaacaatagtagtagtgatgcaaatcttcagaaaaatgtgtcaaatttccatcttgatggccatgatgaaagatctgccctctattcttttcagcgtgaccaaggagcttcacaaaaggcaatgtcattaccatcttcaccacacgattatggaggccaggcttctgagagaagtggatcatcaagatacggagtgaatgatgaaatggagtcaacatggaataaagtactggaatctccaatgttcaataataaacctctgttaccatatgaaaaatggaatattgacttctccgaattgactgttggaactcgcgtagggattggtttctttggagaagttttccgtggcatatggaatggcacagatgttgcaatcaaggtttttctagagcaagatttaactgctgaaaatatggaagatttttgcaacgagatatctattctgagccggctccgacatcctaatgttatcttgtttcttggtgcttgcacaaagcctccacgcttgtcaatggtcacagaatatatggagttgggatcattgtattacttgatacatttgaacggtcaaaagaaaaagcttaattggcggagaagactaaggatgttgcgtgacatatgcaagggtttgatgtgcatacacagaatgaaggttgttcaccgtgatctgaaaagtgcaaattgtctagtgaataagcattggactgtcaaaatatgtgattttgggctttcaagaataatgacagagtctcccatgagagattcttcatcagctggaacgccagaatggatggctcctgagcttattcgaaatgaaccgttcacagaaaaatgtgatatcttcagccttggggtgataatgtgggaactctgtaccttgaacagaccatgggaaggagtaccacctgagagggtggtttattctgttgcgaatgagggttccagattggagataccagaaggccctctaggcaggctgatttcagagtgttgggcagaatgtcatgaacggccaagttgtgaggagattctttctcgtttggtggacatcgagtactccttgtgctgaagcaatatcttttgtacatagaaaactttgggtagagttgttacattgtattatcggctgatgttgtggactatttgtgaattttgttcttttttcgcagaaaatgcgaaatatgaatcaatttcgtatccctgtgctgcagctcgtctctttcggggggcaaggagaaacatgagaccaatccgtctctcaacatatttttctgtgcaatgagaagaacagtgtccaagtgtagaatcgctttcctgatccaaattggttataaatcttgcatttttacgtataacaaagtaggcaaggaagagctaaactaaagaagtggaatgatgttagagcttctttaatggggtttttgaactcaagaatctttgtttatcatatctatcgctattcttgcttaaaagttctccatgctggaggttggaatccaagagaagaacttttgagaattttttttttcaaaaaaatattatttttt

SEQ ID NO: 28732 - DNA, 259 bp, Glycine max
  Clone ID: PAT_MRT3847_125947C.1
tctatgacatctcattcactcttacttaagtctcgtaactcctctcgatctccacttcccctaaattaatcccttacgtttcctagctaccttaccacctttccctatactaacatcacattatatctactctcatatcattatcatacctaactccctatgtactaattaacataccactcacaattcccactacaaccttactatcctcactcatactattccaacacctctccgcttactaattactctatctaac

SEQ ID NO: 28733 - DNA, 164 bp, Glycine max
  Clone ID: PAT_MRT3847_125948C.1
gggctttcatttgatttgatccaaggccaatcctctataataacaacgagaagtgatacaaacaataaatgatgagttcgatagtctcataagatttagctttcattaactgacacatatattgtattaaattaaaaagcctcaatgttgtgaagatatactta

SEQ ID NO: 28734 - DNA, 1017 bp, Glycine max
  Clone ID: PAT_MRT3847_125949C.1
aaagaagaaggctaatgatcacccttcaaaagaagggtccaaaccttatagcagatttgaagttgttgctgctcatatatggagatgtgcaactatggctcgtgctgaatctggtgagaattcaaaccaaccaattctagttcggtttagtgttaattttcgcaatagattgaaaccacctctccctcagaattattttgggaatgctttggcaaaagtagcgacacctgaatgttatgagggagatatcatatcaaacccattaggattcgctgctcaaaagataagggaagcatctcatgcaattactgaagactttttaaggtcacaattaaatgttggtttaggcaaatggcaattggacaacattagggcttttttcatgagtcaacgacaccttataaatacgccctctgctggggatcataacatttttctcacaagcttgatgaccatgccagtgtatgaatcagattttggctggggaaagcctgtgcattatggtttagcaagtctgtttcaggtaaatagggcaggaattcttccaagcccagatggagatggtgttattgttaacatatttttccaggaagcacttatgcagcttttcaaaaagttgttctacgaggatttgtatgtatcctcattatagcacatatggagctatgaaatattctgttagctactatcatggttttaaactgtggttgcaatcaggatcgtgatgagtcaaaatctttacattatggataattacggaaaaatatgactgatgccatatcaattccggtcataatatgactgtgaagtgtcaaaataccttggcgttacgatcacaatttcagtcgtggatcagaatttaaaaccatgactactgtgtaattgaggacttctactatgtttgcagttctattttaaagtctgtttccttgtttttaaaagttgataatgtgttgtgtgtttttttaatttacatgtgatctgtattccatgtgatgaataatgttcttatattgc

SEQ ID NO: 28735 - DNA, 785 bp, Glycine max
  Clone ID: PAT_MRT3847_12594C.1
gagatagaagatttcgttatgtacatcattaacaaaatcttctatctctatactaaaagattttgttaatgatgtacataacgaaaagaaaagttagaccaagtgtgagtgctgttttttgaagagtataggaggaaggctggaaaagatgaagaactggaggagagattcagatatccttcctgtaactgtaagtgatggaaagagaactatgaagaaaatttttgatccacaggaaccactccttcagaaatggaacaaaatctttgtaataatgtgcatattgtcagtcgcattggacccactcttcttttacattccagtgattaatgaagataaaaaatgccttcatttggatggagcatcgaagatcactgtctgtgtctgtgttcttcggactttctttgatctattttacattcttcgcataatctttcagtttaagacaggtttcaagacccctttttctcgtgtttttggaagggatgagctcattcatgatcctgtgcctataatgaaaagatacttaacttcacacttcatcattgatattctatcaattattccacttccgcagttcccttggacaaaacctcaaaacaagtattaatgtcatagagatagcctttgcaatctttattgccattgttggattggttttgtactcattgcttattggaaacatgcagaaatatcttcatcaatatacgcaatctaaaaactttatagaggaaaagaagagaaactttatagaggaaaagaagagagtgaagcggagacatgaa

SEQ ID NO: 28736 - DNA, 390 bp, Glycine max
  Clone ID: PAT_MRT3847_125950C.1
ggctcgagggttccacgttcagactctttgttttgtcctaacagcagaccacggaactctcagagcgcctgtcacgcctgctgactacggcaggggagagctggctacctcagaggaccatcgactgcaactctggtcagagctggaggccagttccgtgctctgctgtgatgtgtagacataatgaaggcactacaagctcgcgagcccctgtactgttgaccataaggcatctcgggcaggcgacactgggatgcgctattatgacaagacgtttgctgggtgctggaaggtgaatacagagctggatactatacgtgcagataaagaatggttctggcggacactgacagtgcctatggtagtaccctggcggaggatgagcctggc

SEQ ID NO: 28737 - DNA, 168 bp, Glycine max
  Clone ID: PAT_MRT3847_125951C.1
gagccgggattctctagagggggcggccttccttttttttttttttttttatagacgaagtatcagatatatatccggcaaaggattgattgcatatatccttgctcgagaaacatcttggcaggcctccagataattatacgctgggagggagcaggtcactatttt

SEQ ID NO: 28738 - DNA, 395 bp, Glycine max
  Clone ID: PAT_MRT3847_125952C.1
ggggcaacacattttttaaaaatttgaaatttatttttgaaaggggggaacttttggggggttttttttttttgggcccaaaattcgggcaaaaaaacggggttttttttttataataaaattgcaaaatcgaaaaacttgaaaaaacgaaatggaaccctaagccttaagcttttggtaaaaatagggaaaaccccctttggcgaaatttgggggattaaaggggttgggcataaaagtcccggggcccaacttgggggggggggtttttttggggggcctttggaccttggcggggttggcgactttgttaaactgggggggggcaagcttgacttttttgggcttgggcttgaacttttggggggggggggagggtttttttttggcctttt

SEQ ID NO: 28739 - DNA, 523 bp, Glycine max
  Clone ID: PAT_MRT3847_125953C.1
ccacgcgtccgtagctttatgaacagaatacattttcttctgtagatctcttcactttgtaccctaaatatgaaggtgattgggcaggggtcagttgaagacacagtacctccgggggtgttttgcaaagggatcaggaaattcggggacctgaggaagcaacaaacaaagtattggaactaggaggggtgcataggcgcaatatagagcaatcaatgagggcgcttgtgaactgatctggattaataggttacttggtgaagatttatctattccaattcaaggacctttaaaactctttagtgacagtaattcaggcaagggcctagttcataatccaattgaacatgataggatgaaccatggaaggattgagcgaaacttcatcaaatcagaaattgaaaatggggcatttgcagaggactacattccaacaaggataggggaaaggggatgggctcacaaaggggcttgttgatatctaagagggtaatgtgtggcatggtgggaatgattaatatct

SEQ ID NO: 28740 - DNA, 205 bp, Glycine max
  Clone ID: PAT_MRT3847_125954C.1
actccaagcacctaaggaaagttgatccattggagccagaggttcttgatgacatgccaaggaaaccattccaagcatgcatggtggaccaatttgaggtcacagcaccatgtgttaactcccccatttgttacttgttcctcaagctaattggaaacgatgattggagaccaggttttgcacaaattcaggttcttgaaggctc

SEQ ID NO: 28741 - DNA, 444 bp, Glycine max
  unsure (1)..(444): unsure at all n locations
  Clone ID: PAT_MRT3847_125955C.1
aacgcgtgattctatatctaaactctaaactagtcttagagaaagaaccagaagacatatgcctgactcttctagaattgccataggaaattcttcggaggtgagaccaatctgatgcactgaaggctgaactacctcagatcatctgaatgctcactctttgttattgccgtggaaggatcaggactggctcatactaagctgcacaatcagtggttcagcatcaccagcagggttagagggaacgtcactgactcatgcctttggactttttgttgcggtcttctgtatgcctgttccacctggaggatgctggaagcgctgctagacagtcccttctccgttgcagggcaggacgctcgttgtggcgttcggngtgggtgggggggcgggggcgggggcgggggcggggggggggcgggggcggggggggggggggggggc

SEQ ID NO: 28742 - DNA, 1464 bp, Glycine max
  Clone ID: PAT_MRT3847_125956C.1
atcaataaacgtgattcacttgcaggaagaagacgtgattcaattgttgaaaggggttcaaagatgtttgatcctaaaagaccaaagggtctggcaatttctctggaacaaacattacaggaagagcacaaaaagctggaagtttttgcattcccatcagcgacccacattgtccgtacggaagaaaaaattgaagacagaaggggggagaaagaagaggtgatatctattaatgaaggtttgatgtcagaactcgaaggcttgactgaaaaactgaatacatcaacctctgaactatataatttgatggaggaaatttcagctcttaaacaaagattggaagaatctgatatcaaccaagaaaaattgaaaagctctgttgaagtactgatggaagaaaaggaggagttggctatgcaactcactgattcccttttggaaatagaggaggaaagggcaatatggtctgccaaagagaaagatgcacttctagccatagaagaacaagcaaagtcaaacaatgtgcaaattacatcattatcaacaaaattattagaagtgaggaatgaattggaatcttgtagagaagaatgcaagaccctacgtgaaagattgactattacatatgaaaatgcacatatcaaggaaaattccagggaaaaggtttcagaattggaccacctggaaaatcaccctgaaacaaccaatgctgagagcaaacaatcccaagaaatgtcaaaagccaattctgagatgcaatctttggagcatgagctgcatgacagtcccaaggaggagaaagaaaatgaacttcggaaggaaatacatgttcttgataaaggagataatctatcaagcccgaacgtgtttcagaacctcaaggacaaacaatctgttgtgacaaaagaaagggacaaattgatgattgagatggaagatcaacataaaagaatggaatttctgcaaaagaattgccaggatgagttatcgaaggccaaagtccatattgaggagctgaattggaagctttccgatatggaggccaaaatgcccgtgggtggcctaaaaaacaacaaggagatggctaagctcagaatgagactccgtggaacacaagcaaagctggattctttccgttgtagatacaaggaagcaattgatgaatcagtgttaacgaataagaagtataaagatcagttggcttcaaaaggattagaagtgcttaacctaatgaaacagctagctgctgccaaaggccaataggaaatttgcatggttgtatattaaaggatgtaatcccacatcctgagtcatgtcatttttttgtttatcatttatagatgggtccatcattccaagtggtcttattaatgtgtaaatcttatgccaatagtgaagcttgatagatgcatgctgcaattaaaaaaaaaaaaaaaaaaaaaaaaaagcggccgctctagagga

SEQ ID NO: 28743 - DNA, 257 bp, Glycine max
  Clone ID: PAT_MRT3847_125957C.1
gattgcaatcaccccgagtctgccttaattgcaatctctttggggtctgccttaattacagctgcaagggtggcatttatttcccaatcatgtcctttgttaacagaagttctatagaaaagttttacttatcacttccgggatgcagatctagtattgtgtgctaataaaaagataactcatactggtataaacctttcttattcatgttagttttgcagccttcaatacttccaattcagatcctcggaattggg

SEQ ID NO: 28744 - DNA, 399 bp, Glycine max
  Clone ID: PAT_MRT3847_125958C.1
gtggcccagtattgatcatcagaagagtcatgtttgctctccagttccctctctgtaggtaggagttcttttctctcaaacattccataaaacccatgatttttgtggacaccacgttatactgctttcaatttacgagttaccttggctttgagtttctttcagtcattttcacaaacacctttcgctcagcgttaaagaaccgaagaattttgggttattttattttggcgctctgtccaatttcgatagactgaagtgtgcattgctgatttatcaaatcatgatcagaatcagatttaacttaactcttttctctgttgagctatcacgcatcagccatagctcactcactgttactcatagtcataaagttgagcacccccttatgagtgctac

SEQ ID NO: 28745 - DNA, 260 bp, Glycine max
  Clone ID: PAT_MRT3847_125959C.1
cataaattctcacgtaccaagcttctgaggatgtggtctacaatggctacagatcagcttgcgagtctacatgcgcagaggattcattgatggggtttgctgcatgggagccatctcatggtcgatacaaaatgcttagatatccatgggaaaattatgttgaaagtaaatgaagcactacggcattgtgcgtatatcgtcgtggatgtgcatggatgtaaactttctcaaatacaggctccatctgagaaaacgcgaga

SEQ ID NO: 28746 - DNA, 196 bp, Glycine max
  Clone ID: PAT_MRT3847_12595C.1
agctgaactcaactcagccgttgtgataatcctcagcactggcctctccgtcttcttgggaaggcttgtgttcttcgactgccaaatggacaacatagcaaatcgagtgcctgatcggagcgacctcacacactttgaaggtggggatacacatgccaaggagtatgtcatcctcgtcagattcagtgagcctgtg

SEQ ID NO: 28747 - DNA, 167 bp, Glycine max
  Clone ID: PAT_MRT3847_125960C.1
gacacaagaaagcaggaaattaatcacattaaccaagtttggcaaggacattgttcagagaaaatacagttgcagcatttttcttttttgtttccgggctgcttttaatttttgctgcatgacccaaattgctgatttcctggaagagcttgccagtgagttccttg

SEQ ID NO: 28748 - DNA, 450 bp, Glycine max
  unsure (1)..(450): unsure at all n locations
  Clone ID: PAT_MRT3847_125961C.1
tttcacgtgaaaaaaatctcatacgctccctttatattgatgatcagccccatttatgcaccaatataatggtatcggatgcaaaaaaatgaatcactaacaaagggatctgagcaagtctccgaataattatacatcatatatgatatgatacaatgactaactttaaaataagacgtaagacattgtttctcttttcagaagatgttaccctttaagacgacttttctaatccagtaaaagattcttcctgaaaaacctgtttctcagtcacttctactgctggattgatcaccgatccatgtaacatggaactggatttgaaaggtaaaggatcattatggggcaacattgatggatctaaaggcctgtgaaacaataagtgtgctatanttcaatcaatgggattcatatcantttcaatattcataaatcccatacacctagtta

SEQ ID NO: 28749 - DNA, 240 bp, Glycine max
  Clone ID: PAT_MRT3847_125962C.1
atctgatgcactatgctctgaaaagatggaaagcaactagctaggaagggtaaattaaggaaaagcagtcattgggtcagtaataagtgttgtcatgacttaaaggaagcctctagaggcatcatttactcatcacgttataatttgaacagaaagtgataatatactaattaaatatgggttatttgatgcagaacctcctcacaaatcagaggtgaaggagataacgaaggaacccca

SEQ ID NO: 28750 - DNA, 481 bp, Glycine max
  Clone ID: PAT_MRT3847_125963C.1
aggaaggtttcccgtcatcactgtatgacgtcctccttctttggggggggggggggggtaaagaaataagggacacagtatggcggaaagcagaacgtgggggatagtgccacatcgtgggctgaccaggtaagcccttgatgagagcaatcgacggatacagtaggtaggtaccgaaatagaacaccagggtggtaacgatgagactaagtgactacgaagagacgcgaataagcacggataccggaggctggagtattagggggttaatggtgacagccacagtagtcagtggcagcaagggaatgtcgcgctagtaagacgttggtaagcaaggggcgttaggggagtaaatgcgtaggactcgtgcttgagaggagagtggtgacgtacggctggtggcgacagaggccggtcggcaagtatgtatgaagtgttggaccaacggggtaataaggcaaagcaatgttgttatgggggt

SEQ ID NO: 28751 - DNA, 279 bp, Glycine max
  unsure (1)..(279): unsure at all n locations
  Clone ID: PAT_MRT3847_125964C.1
ctccaacacttcttccctttctcttccaacctcgtcttccctccaaagccaaaccccccntcacatcctccacacacaagcagattncatctccttcaccgtagcagagtcctcagcagatttcaccacccttgtctctgattccccgaaacatgtcacacttttgcacccttttgttcccgtgttgcctcctcctcgtaccttgcatgatggaacttttcttatccctctcatgggcattcaggtcatgttatatcccatttggttcaccatatgtat

SEQ ID NO: 28752 - DNA, 135 bp, Glycine max
  Clone ID: PAT_MRT3847_125965C.1
cccacgcgtacgaccaaggttgctgatgtcctagaactgccttgccgattcatctgctctcgagcgtacatgcatggaatgctatgacagcatattccgacatgaaggtaatccaaactgcataccctacatttg

SEQ ID NO: 28753 - DNA, 732 bp, Glycine max
  unsure (1)..(732): unsure at all n locations
  Clone ID: PAT_MRT3847_125966C.1
ttttggattataaatttcactcactttattcacagctaacatcactcaaattgtaaaacagtcaaaaaaacatagggtacaaatgctaataactaaggtatgaatgcattatgcatagcctcaaatgcatctctattcataatttcacacctttcttgattgtcttgatggatgacctcaagaaactgtttgatgctgcaagatcggcatcatcacttgccgttggcttcttccaaatgtagtccacaccttttttgatcccaagaagcaaagatggagatgatggaattcgtctcaagctcctagcactctctgatctaggaagtcttttttcctttttatgttgttcctttctttccatcccttcaacattaggagtgcaatttccttcacctatgcaagcttctccagagtaatttttgtatcctgtcggaataatatttctagcttcgttttctattctatcctctttctctgtccatccgttcctgtcttgaagaagttgcagctgcttctctttataatcagaatctgaaacttttgagatcttcaactccttttgtgggaacttctgattcagttgttggattattttttcttcagttccacaagaagcattttcacttgtttcttgtggatcagttccttcttgttgntgaccattctctaaagcatttgaagccactggtcgacattcccttttccacgttgctttctggtttcttcatcttc

SEQ ID NO: 28754 - DNA, 1383 bp, Glycine max
  Clone ID: PAT_MRT3847_125967C.1
caacaataagaacagaacaagagttaagaaacagtgcatacagtgcttgcgtgggcaagcttcgtgttgctcccttctgtcccctcttctttccctctttcactctctctctccaacaccaacaataagaacagaacaagagttaagaaacagagcatagagtgatttggtgggtggagagaggaacagaacagagcaacatgaagccaccaacgaaacccatttcgagccctggtcgaaccgagaagtttccaccaccgttgatgagattcttgagaaacaatgcctcaagcagaagcagaggaaggtcaagaaccaccaccgccatgtttctgagaaagaagaacaccaacaatattgaaacacaagaaccctcttcccccaaagtcacttgcatggggcaagtccgcgttaaacgctccgcctccaaaagggtgccctccgccggcgccggaactccgaccaagtttcggtgctgctcatgggtcccacatgctctgttttttcaccgtttaataaaacccgaagtttgtttcccctttcagtgcaaacaagtttggcccaattggaggttcttacaaagaaagaaaagggattccaaagtcacggaaacttcttcgccgaaaacagagttgaatttcaggggaaggtttaaccctaattacgacgactcagagcataaagatagagttattgttaaccctcccgcttttgtttccaacacttcaagtactccaccgaggaacgctttgttattgacacgctgcagatccgcgccggggaggaggttcttgaacgaagagacagaggtggttgaaaaaaatagagtaaacagagaacactctgagaataacagagaccggaagttggaggcgaagttacggttcttcaaagagcttgaagagtcactgagggagagaataataatggagtcagaaaaagcaagggaagaatctgactctgttcatcctctggttctgacgaggtgcaaatctgaacccgcgagaaccgcacaaaaactcgatcctgaaatgaacgggctttcgaagaagacaacgttggggttcgctcatgcttggttttcacatggtttgtgattattctattcttacctctgtaactctgttacctgttctgttttagtgtttttttttttttggtttagtttattatcttattttattcttattattactgagttcgatatatagttatataatataaagaattttataggcaaattgtggtgacgtattttcttctttttgacatctggagctgtcgagagaatctctatgctctatgtattaaaaagataccttggaattaaatagaagaaacatggaaacttgtcccgagttaatgtattattcactgtctcaa

SEQ ID NO: 28755 - DNA, 346 bp, Glycine max
  Clone ID: PAT_MRT3847_125968C.1
acacatcctccaggagctcatggactcgccaaatgacccaccaccttcttgcatcactccaccagtacctgacgacatgttccattgacaagcaacaataatgggtcctgctgataacccttatgctggaggtgtattcctaatcactacaacctatcctacggattatccttacaagcctcctacagttgcctcttatactaaagtatattatcctaacattcatatcagtcggaacatccatcttgatctcatcaaagagactgttagcgatgcactcaccatcactaatgtacagcttctcatgtggtaatcgcttactgatacaagacctgatataccactc

SEQ ID NO: 28756 - DNA, 227 bp, Glycine max
  Clone ID: PAT_MRT3847_125969C.1
tttgtttactatacacccacaacccctcactatgaatctatttacaaacattatgagactaaaatatgctcccatggaggcacccattttgacatcgctgtataattcctaattgatctccctaattgtgatgcatcaccgtactacaggctttttaaacctgcacatctgtgttttaggcccgttccttgagccaaaacaaaactgagcttttttatatctcattg

SEQ ID NO: 28757 - DNA, 463 bp, Glycine max
  Clone ID: PAT_MRT3847_12596C.1
gggggaaacccttttattaaaaaaaaaaaaggttctttcaagggaaataacaatcgcccgggtttccccccccggccctcaccaaattttggggggggaaaagggaacccaaaaaattttgggccagggggggggaaaaaaacccagggaaaccccccctaaaaaatttcgggccccccttttacaaaatcccccggatggaataaaaaagctttcaaaaccgacaaattttctttggaagaaacctttaatcggggggggaaaaaatggatttcccggccctggccggggaaaaccgattggcaaaaagggggaccaacttcaacggggggcgggaaagcccttccaaatagggaaaaaaggcttccccaggcgtgatttaaatatccactaaacaaaaaacaagggtttgggaaacataagcacttgggtttccaaaagcttcaaaaaaagcgggcaggaa

SEQ ID NO: 28758 - DNA, 341 bp, Glycine max
  Clone ID: PAT_MRT3847_125970C.1
ccggactcaaacttattctcttatgaccactattttacaacaattatcataagaaccaagactgtctgtcatctttaatttatttaatgcaatccacatgtatatttcgagattttctttttcatattataatataatattattgtgaaaagattattccttctgttacaagtgtgaataatagtatataatacgtgcgtgacctaaccaaccagacgtaagtcatatatatcctaagattcttgatcttcatatatatgttgatgttgatatctaggtttgaaatcttccagagggaaattgcctaagcaaaaacatatatatattttttagaaaaatga

SEQ ID NO: 28759 - DNA, 1051 bp, Glycine max
  Clone ID: PAT_MRT3847_125971C.1
taataataacaccctcttgtaagtcttggccattctattctattaaaagcaaccaccaaaaaaaataaaccttagctactacgaccacagcctttagtcatggccacaagttgctcctacatggtttccaccaaattatccatgctaggctggagtggaggaagaagaagagaagcgagaaaccggagagcattcttggccggagcgcattcttggtctcagctcaacaacaaagcgatgttaaggaagcagagagcgtgaaggtagaagaggagaaagagcaggaacaaatgcaaactcaaacaccgaagccaaaaggaacaacaccaaggccagtggaacctcagttgaatgtgaagagcaaaaacatgctgagggaatatggagggcagtggctgagctgcgccacacgccatgtgaggatctatgctgcgtatatcgacccggtgacttgtgagtttgatcaaacccagatggataagctcacccttattcttgatcccactgatgagtttgtgtggaatactgagacttgcaacatggtttattcttacttccaggagcttgttgatcactacgagggcgctccattgacagaatacacacttcgcctgattggttcagacatagagcactatataagaaagatgttatacgatggggcaatcaagtataacatgaatgcaagggttctgaatttcagcatgggaaagccacggatcatgttcaacaacaatgatatccaacctgaagatgcaattgagaaatgatttgtgaaatacaccaagaaaaagtgagtaatcattggtggtttgcatgtgattgttttgtaaattgtaaaaaacttctagtccaacataagacattttttggagttgagtaaactaatgcaaacctaaatatagttatagatacagagtattcttacagtccgtaatatagcttctgttcctcgcttatgttactaaacaactagtataatcacctctgctataacatggatgttaatatgctatcttaagtaatttaatttttatgcattttacttttg

SEQ ID NO: 28760 - DNA, 2437 bp, Glycine max
  Clone ID: PAT_MRT3847_125972C.1
cggactcgtgggcggacgcgtgggataaaaagtctattttgttttggaaaattttctctattgctataaactctatgtaaaggaattaccttaacctgcttatatgtcttgtagggatgctttgcaattgcatgcatttctatttgtgtgtgagatagtgtgtgtgtgtgtgtttaatgagattactatgcaaaatccggaacgtcgacccacgcgtccacgcgaccggaaaaaaagagaaaaaaaaaaggaataattatacataaattttggatttcgcacgtagctagctacagaagacaaaggagccttgagtctcgagatcttgtcagatcggaacgcaaccgcaactgccaccgagattgctttgtgtgttatgggaagggaagttactggcatacaggttatggaaaagaagccaaatggtgccatagcggcttcaaatggcagtttaagtgatagaatgcgtgtttctcccaaaattgcagcaatggttcaagcaatggatcatgagataaaggaatctgctgaagctaattcgtttgagaaacatcacgagaggaaagatagtttgagtgccaaaaacacaaaattaaatgctggcttgccagaagaggagaatgagaaatctgatcaggttccaagcccctctgctccacagccatctgatcaggttactgaaaagcatgtcacccatgcacaggctgttgatactgaagctgatgcaagtggtgtgaacttatctcctaaatctaacaatatacagtcgcctaattcctctaagaattcagagccaagctcacctttttcaccaaggaagtccttgcatcatgatgataagaagcaccatgatgatgaagataattggtctgttgcttcctcgcggcttttgcagcaaggcgttgcatctgcacgcactgccaaatctaaggtaactgtaggttcagcccctacttttagatgctcggatcgtgcagagaaacggagggagttttatctgaagttagaggagaaacatcgagctcttgaagaagaaaaaaaccattatgaggcaaggaaaaaggaagaggaagatgcagcaattaaacagttgagaaagaacctggtcgttaaggcaaaaccagtaccaagcttctattatgaggggccaccccccaagactgaactcaagaagctgccactgactcgccccaagtcaccaaaactgtcccggagaaggagctgtggtgatgctgccggcatatccccagaaatttctactcgaggacgtcacagtgttggcaataacccaaaacatggtagccttgtccctcccaaaaacaaggacctggtcactggacgtaacagcaatggctctagcaaaaccaaagaacgaccaaaactggataaggaaacaaaaacagctcctcctaaaatcactgagcagacaaatgcggacatatcagtccaatcatgagcttatcaagattttactgacctccagctgagaagaaaataaccttcattttcctttgccttaccagatgggatactttgcagaaaagatggcctaattttcttttcatccggactgacatttttatgtggtttgtttttttttttttttttaacttgaagtgtatatgttttgtaagttatatcggcacacattgttttatatataaatagttattgatgtaagatgtatgtacgaaatttgatatcctcaaattgctccagacttagtaagggaaatttatatgaaatatattcctttttgtaggatctttaacttattttatcaatgctgtgcttttctttcttcctcactttttctcataccgctgcaatgtgcctctcttattttcctatttcggagatctgttttgttcttatttcaatgcttatgtcatgttttaatgttcctgtttttgttaattaaacgaagccaagccaaaccatggactcttttttggttatttctatttccatttaaatagattttgtgtatatttttcgtccttgggccacgttggaattgcctttccccgacctcgtcgttaaaatttgcatgcgtgtttccgaatgattctgctgttattcccggaataataccttcaaatgcctctcttaccgcttttctccggttacaagtcaaaacacattcaaaaccgttgttgttgttgtggtttttttttttgtttcaaaaaataaataaacaaaaaggtttctgagtagttattagaatttctgctagagaaacatttttttttcttttcaaacagggtgtcgtgcgcgagattaattcattggcgtcagcttagcttgggccacaagatgctttcaaggactgctatatctcttgaaacttaattggaataaatgatgctttttactagcgaattgccatgtacctgattaggcagaaatgaacaggtataggtttttttataggttt

SEQ ID NO: 28761 - DNA, 2126 bp, Glycine max
  Clone ID: PAT_MRT3847_125973C.1
ccggaattcccggctcgacccacgcgtccgaagaaaagaaaaaaaaaactaaaaggaataatcatatataaattttggatttcgcacgtagctagctacagaagacaaaggggccttgagtctcgagatcttgtcagatcggaacgcaaccgccaccgagatcgttttgtttgtgggtgtcgtgcgcgagattaattcattggcgtcagcttagcttgggccacaagatgctttcaagcgttatgggaagggaagttactggcatacaggttatggaaaagaagccaaatggtgccataggggcttcaaatggcagtttaagtgatagaatgcgtgtttctcccaaaattgcggcaatggttcaagcaatggatcatgagataaaggaatctgctgaagctaattcgtttgagaaacatcatgagaggaaagatgttttgagtgccaaaaacatgaaattaaatgctggcttgccagaagaggagaatgagaaatctgatcaggttccaagcccctctgctccacagccatctgatcaggttactgaaaagcatgttcacccacgcacaggctgttgatactgaagctgacgcaagtggactgaacttatctcctaaagctaacaatatacactcgcctaattcctctaagaattcacagccaaactcacctgagaggaaagggatgtcgagtcatgatgatgacgcggtcaaatatgataacgagaaggagaaagcgaagttaaatgctggggtgtggcggaacaagactagaatgagaaatctgatcaggttagcccctggtccgcagccatttggtcagggttctgggagcatgtcacccccgcacaggctgttgatacgaagctgccgcaagtgaacttttcctaaagctaacaatatacactcgcctaattcctctaagaattcacagccaaactcacctttttctccaaggcagtcgtttcattatgaagcagataattggtctgctcttcctctagcgttgcattgacaactttggtcatatcagaggaatctgtagtgtggtttctgacttttagatgttattgccacttggataaacctatccagatttatctgaaattagaggagaaacatcgagctcttgaagaagaaaaaaaccagtatgaggcaaggaaaaaggaagaggaagatgcagcaattaaacagttgagaaagaacctggtcgttaaggcaaaaccagtaccaagcttctattatgaggggccaccccccaagactgaactcaagaagctgccactgactcgccccaagtcaccaaaactgtcccggagaaggagctgtggtgatgctgccggcatatccccagaaatttctactcgaggacgtcacagtgttggcaataacccaaaacatggtagccttgtccctcccaaaaacaaggacctggtcactggacgtaacagcaatggctctagcaaaaccaaagaacgaccaaaactggataaggaaacaaaaacagctcctcctaaaatcactgagcagacaaatgcggacatatcggtccaatcatgagcttcccaggattttactgacctccagctgagaggaaaatagccttcattgtcttaacagatggatactttgcagaaaagatggcctaattttcttttcatccggactgacatttttatgtgatttgcttgtttttttttttttttaaacttggaagtgtatatgttttgtaagttatatcggcagcattgttttatatataaaaaatagttaatgtaagatgtatgtcccgttgtacgaaattaaatatcttaagattgcagctaccccatgtacgaaatttgatatccccagattgctccagacatggttagggaaatttatatgaaatatattcctttatttgtaggatctataacttagaattaggtggtaataggagctggatttcaggatttggcattacttagtagaacaacccattttcaattttgattcttgatcaagggaaaccggttaaaacaaaggatatttttccaatttgattaatccagaactcagcttaggtttaaaaaaaaaaaaaaaaaaaaaaaaaaaaaaaaaaaaaaaaaaaaaaaaaaaaaaaaa

SEQ ID NO: 28762 - DNA, 165 bp, Glycine max
  Clone ID: PAT_MRT3847_125974C.1
aatataactgttgggtggatactatgaagcgagaaatcatgagaagataacatagccaagaaactaaaagaaacaaagcgtgcatggacggtcaatgaaatcaacaaggaaaagcatagactgaaccaaatgggacacgcatgatcaaccattaaatggcgaaca

SEQ ID NO: 28763 - DNA, 203 bp, Glycine max
  Clone ID: PAT_MRT3847_125975C.1
aggtgccatcatggccattcagactcattatcttggcaccgtggaaaggaatggatctacgatcatgtgtggtctaactactcctgatagtgactatggatggatcgataacagccaccatgagattgcgactcaggtcattcatccgctatatccttaaattctacatcatcacatatttgaagcgactgaggcttctaaac

SEQ ID NO: 28764 - DNA, 550 bp, Glycine max
  Clone ID: PAT_MRT3847_125976C.1
cccacgcgtccgtgatgatctactggctgattatgaaaaacatctgcattctatggaaaagaaatctctccttgtatagctttcccagtctctttacactgtcactatttgcaatctgtgagcttatattacaatgacggagccgcgcgggtcggacgcatgaaggaatacatgatttgcaagctcgatgcacagaatactccctatccttttgagacgagagtcactcaccatcttgatggcgcctaagtgataattgtgcctaacatggatcctggagcgctgaggggagaaaagccctaacacaacgagctggtgaatttttactaactagtggagcaagatctggatgcactcgctaatgagtgttcatcattgctagagggatacatttctcacttgcctgcacagcaccgtgtgtgatctaaagtgctgtatactccgcttgacgttgacgagctatataggcttgtagggcctaacatgtttgacagtagtgaataaagctgaaggtcccgctgaaccattgcatcttaaaaaagacaaagca

SEQ ID NO: 28765 - DNA, 237 bp, Glycine max
  Clone ID: PAT_MRT3847_125977C.1
ggcagcaaattattgattatgtgaacttgaataaagtattttacattatttcttttgtatatgaaggccaccaaaaaacctaaagggaatgtgaaaaaaatctcatccagaacgataaaatccgcatgcgtgggcgttttaggtttttgggaagacgaggtataaaactggtgttttttatgaaaaaaaaatttgtttgaaaaaaaaaggggctgtcaaaaatttattttccctcgg

SEQ ID NO: 28766 - DNA, 162 bp, Glycine max
  Clone ID: PAT_MRT3847_125978C.1
cattggggggtggggctcttatagaagaatagcttctatcacggaactttgagctgtatagacacaatgacaggctgaattttgagcaatgttagcatacaacttacaagagaaatagattatgggacttgctataaataggaggaaaaatttcttgactgg

SEQ ID NO: 28767 - DNA, 823 bp, Glycine max
  Clone ID: PAT_MRT3847_125979C.1
cgcccgattctcttccaccgtttctcaattcttctcttcttccaattccatccaaacaattaaatataaaaataaaaataaaataagcagacatgtccacacttccctcctcaacctttccaaactccaacctctccctctctacctccttatcctcacaaaaactcccacttttccacacccttttccccaaacccctcccttttcctcatctgcgaattcaaaccccaccaccattccttcccccgcttctctgcaagtcccccgagggcacggaggcggatgaggccgcgccgccgccggaggaagacgagtggctgcagaagctcccggagaagtcgaagccttcctattcccacagcctcccctgcattgaagcctccctccggagcctgggctctggccagagcaaggaggacagagccctctcggtggggacagggccctctgggtcggcgccaagccagattggcatgccgagctcttcctagaccttactgatctatacataaggtatttgaagagtggacctgggaatcttgaaaaaaatatggagaggaggtttagttatgctttaagcagagaagacattgagaatgcagtacttggaggaccatagccattttcctatctatatgtcaaatatacaacaatggcttaattccttgttggaaatagttagtcgattcatatgttgaatctttaactttcatgtcagcatgtcttgtaaagaaaggattactgaaaatcgttacccttgctctttacaacattcatacttttgagactttcttcttgcatcgactatttggcgcctacactc

SEQ ID NO: 28768 - DNA, 296 bp, Glycine max
  Clone ID: PAT_MRT3847_12597C.1
gactatctttgagttcacataactcacagccatggctacctcgatcttctctattgttctctccgtctccctagccttctttttggtgctacttaggaaggcacactcgagtgataccgtttcttgcaccttcaacaagttcaacccagtccaaccaaacagtatgctccaaaaagatgctagtacttcatcctctggggtgttacaactcaccaaagttggcagcaaaggcgtgtccacctcgggatctctcggtcgtgccctttacgctgcctcaatcgagatttgggacagcg

SEQ ID NO: 28769 - DNA, 981 bp, Glycine max
  Clone ID: PAT_MRT3847_125980C.1
agcatagctgggatacaggtcttgagcaaattgatcatcaaataataagattcccaaggagtcacagtacatgttataatctgaaaattctagtcaaagaagaaatacacaattaagtaaacatgaactttttgttttttaagcagggtaaacctagaaattatagaaactagtttacttgagttgatctagcatatagaccccacaccggagtaagattagaatttcgaacgattgcctcacatcaggcattaaagtctcctatagaatcaaacaatgtacaactcacctctacacgacaaaaaactcgacaacaaggagacaagtctttcgcaatagaggttcccagatttaggcgaagaattcacaaccaaacatgccaatcagatacgcctccattagtttctaccaactgtaacgcacgtttattaccacctgcagacacaagtaccaaattggcggctttagccaccccctccatgaataccgacacaaaacctcccaatcagtgaccccccaagattccatccagccatgaccaatccccagacaacaagaggaagccccagcaccatgaaaccgccaattcccacccggaattacagacaattacaatactattgtagcccaaaagtgacatcatggtgaatgtcagtcaccagaagcccacagagaagtttatccaaatagacagttacaaccacagggtagttaattaactaattacaccaaccagaactttatccatcatgacttctgtagcttttgaatctgcagacttaaaactctagactccaataccaccaattagcaacatataccaataaccctaaacaacacaaaattaccaactaagaccctgaccaaacatgaacttcacattcacaagacagcaaggagacagtgacacataccagaagaagaacaaagagcacaatactatactattaccatcatcatcatcatatgaaacctcgagcc

SEQ ID NO: 28770 - DNA, 421 bp, Glycine max
  Clone ID: PAT_MRT3847_125981C.1
cttagcttgttggatgagtagagctgaacaattgtcttttttaaagccctcctaattgaatatgttttttggttactatttgcatttgaatcttggacatcatttggactgttcatgttcgtggtaaaataagtggtttgaaggcctgcccaactaaaaatgtgtgaaattttgtttttgcaaacacttaaatcatccagatcacgtaatcttgcagaagaaaaaagtgaaagggccattgctacaaaaaatatattcttttttggaaaagttgcttgcacaaattttgtttggcatctcctctgttctcctctcataaattgctttgtgtatctccattctcagatgttccaagaggacataaataacatttaggaaactcaatgatagtgaccaaggtgtatgttaagtataataatag

SEQ ID NO: 28771 - DNA, 446 bp, Glycine max
  Clone ID: PAT_MRT3847_125982C.1
ctgtcgtcctttttttttttttttttttttttttttttttttctttttttttttggtttttgtggttctttccttgttgtcttgccctttcttcttattgtcaaagaaacccctgcacgcctgaaaaaaaggaacagaccggggaaaagggacaccccaaaaaggggccgcccgggggggcccccgcaaaaaacaaaaagcgattgtcaaaacgctcaaactgcgggggaaaacaaacaggccggggggaaaaggcttgaaaaaccccttcgcaaaaaaaaacttcctcgggcccaaaagggcgggggggggctccaaccgaaaaactttccagggcccgggggcaaacaaaacgtgcttccaaagccgggggcaaagcgggcgagcttgccggggacaaaccccgccaaaacgggggaccccttcctcgggcaccaggggaaacc

SEQ ID NO: 28772 - DNA, 306 bp, Glycine max
  Clone ID: PAT_MRT3847_125983C.1
tacggctgcgagaagacgacagaaggggagacagtctttgttagctagagcgacattagtgcttacaattggcctgctacgtgtctgctttaaccgctgtccggtcggaatcagagatgggcatttgctgctactttaaggccacaaacaacggccacgccatggaaaaccctacgcccctctaatctaggaaccatagcgtcctgatatgcagatcaccggaacaaacgatggattgggcacacgaaacaggtctgggattgtaccaaactacgaggcctggctatagacattgagaggggccat

SEQ ID NO: 28773 - DNA, 488 bp, Glycine max
  unsure (1)..(488): unsure at all n locations
  Clone ID: PAT_MRT3847_125984C.1
actgagcatcgtctagctatctcgatcgaactgtccaaggtcctgtcactaagggtgaacatgcgaaggatgcgatctactggatggtaagcagctgtacacctaccataataaaacagctgccgacaaggctaccgtggcatcgctacacaaggagtaagcacntttatgcatgctgctatgggtagagcccagcaataataccacccgtgtaggcttcgggggcattggccacgccaatagggcagcgcgttagtggacaaagggtgaagccgcgggggcaccgcaacgtaataaagccgcatatgggtggcccacacacccaggggcataacgttggaggccaggggtcncgcaagcaaggtaaaacaattcacacgagtcattgggtaaaccatccatgcatatgatacacgtggtcgcaacatgctgcacaaactgaacagtcactgcgtggtaatagtgcaaatgcacagtaattgcttggg

SEQ ID NO: 28774 - DNA, 269 bp, Glycine max
  Clone ID: PAT_MRT3847_125985C.1
cgcagtttcttcctttctctgctctgtgccttctctgacacatttggtgccttgtacagcgtgtgttggcaagtaggtggtatggcgaaggacgttgaggttgctgcgcgtggctccttctctgggaatgactaccacgaccctctaccagcaccactcattgatgctgcggagctcacatagtggtccttttacagggctcgcattgctgaattcattgccactttgctcttcctctacattcatgtgctcacagtcatagggtacaa

SEQ ID NO: 28775 - DNA, 175 bp, Glycine max
  Clone ID: PAT_MRT3847_125986C.1
ctcgttctcgtagggagctccataccccgtatctgctaaaatacgctggatccatatgggcgtcctggaccacttgggggacgacaccgtcaccgggccaaggtcggaaaacatgttgggaagctaatgaaacaccggaccttgagtatgcgacctagctcccgcacagaaactg

SEQ ID NO: 28776 - DNA, 406 bp, Glycine max
  Clone ID: PAT_MRT3847_125987C.1
gcccccaaaaaaattttttttataatttttttggcaaatttggcccttccattggggggtcccgtttaaccccaactaagtttttttagacccttccattcaattttcctccaattggattgataccgggtttccccttttttaaaagagcgggggccgccaattttattttattgctttccctttaaagccaactcccgagtaacttttttttatttcccactgtttcaaacagattgaatgcttatttgttatcaaaaactagtccagttccttgttgttaagtttactgaaattcattttttgagatttactggtttttgaaaaatgctaatccaaaatgacccaattaaacccccttaatctttttattgttttactaaaacccttaaaaagtttcattttt

SEQ ID NO: 28777 - DNA, 326 bp, Glycine max
  Clone ID: PAT_MRT3847_125988C.1
cgcacgcgtccgatcacccaacatgatcctgttgaggacgcaaaagagaagaagccgtttgacttcatgctcaataggaggcaaaagggttcttcttcttcctccccagctccgtcaaatcctgatttgctggccatccccggtgtgggtcccagaaatttcagaaagctcgttcagaaaggcatcgctggtgttgcgcaactcaagcaactctacaaggataagttctttggaaaatctagtgacaagatggttgagtatctacagaattccgttggaataatccacaagaaccatgctgaaagtataactactttcattaaaaa

SEQ ID NO: 28778 - DNA, 1313 bp, Glycine max
  Clone ID: PAT_MRT3847_125989C.1
gtttgacacacacgccgtgcgttttgaaagttccataccattaagcaccgaaaagcggtgggtggaagtggcgacgtggttggtggtctcttcacacattttgttggttggtttcaactaccgcgtgcactgacgtgtaacttttctactggctcccaagagaatatgaatagctccctctctggcaatggtggttccacaacaggcgcggcagaaaacgaagattcctgcggaatccgcgtcaccggcatgcaattctcctacgacgtgcagcaaccgccgctcttcctcgacttcaacctcaacgtctctcccggatcccgctgcctcctcgtcggtgccaatggatccggaaagacgactttgctgaagattctggcggggaagcacatggttggaggaagagacgttgtgcgcgtcttgagtggttccgcttttcacgacactcagctcgtttgtagcggagatctcgcttatttgggcggatcttggagcaaaaacgttggctccgctggagaaattccgctccaaggagacttctctgctgaacatatgatctttggagttgagggtgctgatccagaaaggagagataagttaattgagctgcttgatattgatctacagtggcgaatgcataaggtatctgatgggcagcggcgtcgagtgcaaatctgtcttggtcttcttcatccgtacaaggttctcttgctggatgaggttactgtggatctggatgttgttactcggatggatttattggacttctttaaggaagaatgtgaacagagagaagctataatcgtatatgcaactcatatttttgatggactggagacatgggcaactcatttggcatacatacaagatggtgaactgagaagagcagaaaaaatatcaaatgttaaagagttgaaatcttcaactaatctgctgtctgttgttgaggcctggcttcgcgctgaaacaaagcttgaaaagaagaaccctgtccaaaagacttctgttgccagttctcctttcttttcatctagacacatggcatactatagatagtgtttttgacacagatttcttatgaaaataatttgggtggcaaatacaagtaattcattctttcatgcttgtcaagtttgtggttgcttatattttcaacattttgttttggagtagttatacgtttaaacaagcatgattaaatgaatcatagccttataatcaccatgaagtcatatggggctggctttggtcgataacatgtattcctttttcataccataaatgaaacataattgctgaatttttagattaaa

SEQ ID NO: 28779 - DNA, 1779 bp, Glycine max
  Clone ID: PAT_MRT3847_12598C.1
ccacgcgtccgccatgtttgtttgcacctctctctctctttctgcccacatcaaacccaacagtctcagcattgcagcagcaactgcaccactgctctgctgcttcagctctcagaagacgagtaaaataaaacaagaggggatacaaagctcccatttttatatgactccaacttaaatctcactgaaagcttgatttgatgctaccccaaaatacacaccctctttcccccatgccataacataaagtaaaaaaagaaaagaaccctccaaaaagaaacaaaagtaaaaaaaaatttaaaaaaaaatacagcagagagagtgataactcatatcatatagagtagtgagagaatgagagagagaaagagggtctctttctttttggagtattgggtcacagcctcttttaggaatgccaaagttactcaacaacacctcacgctctctgaaaatgctgcaggcatgaaaccgctcattccaaccttcacctccttcttccaaacctctccttcacttgttagatttgttcacattgcaaagggaactttgttgctatggggttgatcgatctgaacaccacggaggatgatgaagctgctccattatctgcttcttcttctcactcggggataagcacttctgcttcaaccttggttgtttctcctcctccttctgtgtgcttggaactgtggcacgcgtgtgcgggccctttgatctctctgcctaagagaggaagtgttgttgtttacttgccacagggacactttgagcatgttcaggattttccggtcaatgcttttgatatcccaccccatgtgttctgtcgtgttcttgatgtcaagctccatgcagaggaagggagtgatgaagtgtactgccaagtgttgttggttcctgaaagtgagcaagtggagcatagcttgcgggaaggggaaattgttgctgatggggaagaggaggatactggagctacggtgaagtcaacaactccccatatgttctgcaagactctcacagcttcagacaccagcactcatggtggattctcagttccccgtcgggcagctgaagattgctttcctcccctggattacagtcaacagagaccttcacaagaacttgtggcaaaggatcttcatggcctggaatggaggtttcgtcatatatataggggccaaccacggaggcatttgctcacaactgggtggagtgcatttgtgaacaaaaagaagcttgtttctggagatgctgtattgtttcttaggggcaatgatggagaactgagattagggattcgcagggcagctcagttgaaatgggctggttcctttgcagttccctcaggtcagcaattgaatcctgcaactctcatggatgttgttaatgcattatctacaagatgtgcatttagtgtttgctataatccaaggtatttttctctttattcacttgtaccttccccaggagttattgaaggaaatctgttaatgtcagttcctgtgcacagttattatggagttttttctgtttgtataagatggggatggggattctgaattctgaaacatgtttagtcataatgtctaaatgaaaatttcccatttcacctcagtcttctattttaaggtgctagactggagatttggtttaatagaagaaaacaaactgcattgaagttcctagttccttaccattaataattgaatattttaatgatttttaaaatttccattttctctgtatgcatagtatgttttaacaagatttgagttatag

SEQ ID NO: 28780 - DNA, 450 bp, Glycine max
  Clone ID: PAT_MRT3847_125990C.1
atacacacgacccctcgggggggggcgtatagtttacaatgcagaaagggggacacatctttaactgagggaaccaagatgaggtcattgaaaatggttgatgttaatacggtagaaagcaggatgcaggcgcttacatgaaggcccaaggagctcaaatgatccataaacagagtcatagaatcctcctggaagtgaccttgtgttgttcaaaaagccatttctaacaaaggggcctgttaaaaggtttccatgggaaacatccacgggttttttttaaagagtgagcacacctcaggggaaggtgcatgcaaatgttgaagccccacctttgggtttgcaggcaagccaattttgaaccactccttttttaaatcagaagggggggttccatcatatgggaggggcagaggcccctaaataccaccatatgcactgtgtgcaatgacc

SEQ ID NO: 28781 - DNA, 212 bp, Glycine max
  Clone ID: PAT_MRT3847_125991C.1
agtacgcctgggagaagactacataaggggacttccgcaatcgttcttttctaaattttttttgcactgatctttttgactatatgagtagactttcaagcagtcaatggggttattaattttcattttccaaacaatgcacagacttattttcacagggctgttccttcactgaagtccgaacaccttcgttcatcacagaacttaattac

SEQ ID NO: 28782 - DNA, 497 bp, Glycine max
  Clone ID: PAT_MRT3847_125992C.1
ttttcgtcctctcgtacgaccacgctttcgggacggagtggaggcactcgcttcgagtgtgtgggtgttccgattacaccgcccacccttgtgagttgctgaaacaagagagccatgtactcgtctgaaggatccggtgcagcgcgatcgtggggaaacccgcctgtgagacgtggcgccgccacagattggtggtccttcgaaccctgccaacatgcccccaatggtgaacgctgctggcgcgggctcgagccgtatcagcgatatgctctaccaagtgaaagctgagtacgaagcggcgatccagcagctgaacatctcgaagatggagcaattggagatggagcgtaagattcaatctcaagtcgtggaaatggaccagatccaacagaccttgaagacgctggaggctaaccatcgccgcattcgtcaacattacgaagaagacatgatgcgcatgcgccgtcaactggaaggacaagcggctccaggtgtca

SEQ ID NO: 28783 - DNA, 238 bp, Glycine max
  Clone ID: PAT_MRT3847_125993C.1
taagggggatttatttgcagttataatgctgtgtgttataattcctaccgagtggtctgttggggtggatctacgcaaaggacctgctgttaaaattggtgacaacgaaaatgcaatggatggttggtttagacttgagagagttgctgatgaggaattcaaaaacgatgaactggtgtagtatccacagcatgctagcgatgacagatgtggggatgttgggatgtgtgatgatcag

SEQ ID NO: 28784 - DNA, 514 bp, Glycine max
  Clone ID: PAT_MRT3847_125994C.1
aaagaaagtgaaactctgactgtgactcctcgtcagagcagagcaccacattcaaaaaaattcccttttttcattgtcctccctccctctgcaaaacaaaaaaccaaaaacatcttaaaaattcactctctgtctcccactcctcaacaaccccccctttactcgagattccgtttttttcttcctcacagccttttcaacttgttgaaaatttcaattttggaatcgtttcatcccttcacgtgatctgggtttgttccatataaagttcagctcttcccagacccaacacctttttttatttccccttttaattcatccattcattgtttctattgaattatcagaaatccgttttcatgaatttcaattgctagtgatatatatatatatgcgtgtgtgttaaaagctgtgtgataaaaatttgtggctgttatgggtggtgatggtagagttgaagttgtgagtggcaaggggtgttcgaggctgttttcatcttcaattccttcattca

SEQ ID NO: 28785 - DNA, 193 bp, Glycine max
  Clone ID: PAT_MRT3847_125995C.1
gcgatcactaccaattgcgatagatatttcactcactgggcacactactaatacagctctctggagatagcttcaactgtctcttacatgcgcctactttcccttctatagataggtgcctctgctggggacccttacaaagacttctgacatctcatgatggagatgagcgcgctccaacgatactactacc

SEQ ID NO: 28786 - DNA, 490 bp, Glycine max
  unsure (1)..(490): unsure at all n locations
  Clone ID: PAT_MRT3847_125996C.1
acgagctcagaaccaattttatatagcacttatagaaaagaagtgtttactgtgattgtgtgtaagataacacacaaactatttaatttataatgaaggaatataagtaataagggaaagaaagaaatccctaaaaatctgctatctaactatgcacagtttccatatttacattaaagctaatcatatctttaacaacactcgcccacatacaagaccctttgggtttgaagggttggtaacgctccgcagtatgcgcaccctatcttgtgacttgatttacttttgttagaggaatggggacaacaaggatcaaactcttgaccattatttatagaagcactaatgccatgtcaataacccattcttctaagttctaaactctttagttgttaagtaaagactcataatgattntatatttaacaccttgtgtgaattgcagaaacctataatggacagacttggagaagcttatgacagcccagaga

SEQ ID NO: 28787 - DNA, 484 bp, Glycine max
  Clone ID: PAT_MRT3847_125997C.1
tcgctgcaaaccctaaaaaccaaagctccgttttccacgcagcgcgccacaaaccgtttgttgaatcgaaattcgaagagctaaacgaatggggaaaagaaaagagcgtcgtcgcctcgccgctatcagcaacgccggtcgcagagtcaaactcgatcttttcgcggaaccctctggagagttgggtggctccactctacaaggtgatgctggaggagatactgattctcaacatcgtgatgggttacccaattcaccctcttcttcaggtcaacaaccacagaatcccctgctgttacttgggcaatatagtgatgatgaaggggatgatggatcaagcaaagggcttaatgatgcaaatgtgcaaagccccatgcttaatgaagaggtattctactacctacatttgtattctgtcaaaactttgattttgtcatgccagatatgtatctgagcttcccctctgtcgtcttctcgcagccgt

SEQ ID NO: 28788 - DNA, 1949 bp, Glycine max
  unsure (1)..(1949): unsure at all n locations
  Clone ID: PAT_MRT3847_125998C.1
gacaggaaggatatttgataggcggaagcaatgaaagggatgacggcggcgagaagaacgacatatatgcagcgtcggtgtttttgtttcatgttttgactagcttgaaggctgactttcccaaggcgaagaagaagtaaggagagaaagagatggcagacgatctgtttgaaggattgccccctccttcctcaagcactctcattcttcctcaacaacaacaacaacaacaacataatcatgagccaattcttgttgctaccaacaacaacaaccctgaatcctctgcagttccggctccaaagccaatcctcaaaagtgccctcaagcgccccaaccctactcaacccgacacccaagctgcagcacctaagaaaagcttgaagttcaaaaccacaacggatgcttctgaagcacaagttattgaggccatgcagaagataacttcacacatcaagaaccctgcaaagttcagcaaggctgcaaagcttgctatacagctgattcaggcaggaagtgtaaagtcagaaattagtgattatttttttgccatattagaagctgcaatgtcatcatccattaattctacagatccttcagttcgggcagattatcattctctgttctccgtagctcaaaacaccaaagaacacctcaataagaagcaaaagaatcaactggcaacttggacaattaatgctgtggtggcaaatgatttatatacagatgatagctttgggggagctccgatgtaagcgagacagcatttgagatggtagaagaacggtttgacggattgccccgacgaagtaagaacagaaagagttcgtagtcgacatgatcgaaggaataccccctaattactaaaaaattcttcttgctcctcaacaccacaaacttgaatcacatccaattgtggctgcaaccaccatcaacgacactgaatcctctgcagttccggctcctaagccaatcaccaaaagtgccctcaagcgccccaaccctactcaacctgacacccaagctgcagcacctaagaaaagcttgaagttcaaaaccacgacggatgcttctgaagcacaagttattgaggccatgcagaagatatcttcacacatcaagaaccctgcaaagtacagctaagctgcaaagcttgctattattttattgccatattaagtgtaaagtcggaaattagtgattatttttctgccacattagaaccggcaatgtcttcatccatttcttgtacagatccttcagtccgagcacatttccattcgctgtactccgtacctcagaacaccaaagaacacctcaataagaagcaaaagaatcaactggcaacttggacaattaatgctgtggtggcaaatgatttatatacagatgatagctttgtgttttctaatgcagccgggcaaggcaaggaacaggaagttatcttcctgatacatcacaaggggaggacgcagaggaatctaagtatctcaaagattgcacaggtatagtggatgaaggggggatgaacctcccactgataatgataatgatgctgctgaagttcatgaaggcgtggctgatttgaatttacgggatactgcctctgctaatgacccaggtgaccaacagactctatcaactgcagacgttaattccctgtgagataagggccttcttcaagctttgcacacaacggtgaaggacaaagtttctaaagcagctgggcaaatcaaggaagctatatctaatcttcctgttgcaacagaagaggaggacgcagaggaagctaagtctctgaaagatagcacagttatagtggatgaaggtggtaagacacctgccacagataatgataatgatggggaggaagctcaagctgacccatntggacttgatgctctgattcctaattccacanagaaaggtggaaaaataaaggcaaagaa

SEQ ID NO: 28789 - DNA, 145 bp, Glycine max
  Clone ID: PAT_MRT3847_125999C.1
ttcttaaggttcgtgaggggaacaaacactactatttactgacccaaattaaactatctaggttggacactttacaaagcactaccaataccactgggagctgacgatagtatgaaagcgtacaacatcaagatttcacatcact

SEQ ID NO: 28790 - DNA, 514 bp, Glycine max
  Clone ID: PAT_MRT3847_12599C.1
ggagagtattgggtcacagcctcttttagcaatgccaaagttactcaacaacacctcacgctctcggaaaatgctgcaggcatgaaaccattcattccaaccttcaactccttcttccaaacctctccttcacttgttagatttgttcacattgcaaagagatttttgttgctatggggttgatcgatctgaacaccacggaagatgatgaagctgctccattatctgcttcttctccagcttcatattcttcttcttcttctcactcggggataagcacttctgcttcaaccttggttgttcctcctactcctccttctgtgtgcttggaactgtggcacgcgtgtgcgggccctttgatctctctgccgaagaaaggaagtgttgttgtgtacttgccacagggacactttgagcatgttcaggattttccggtcactgcttatgatatcccaccccacgtgttctgtcgtgtccttgatgtcaagctccatgcagaggaagggagcgatga

SEQ ID NO: 28791 - DNA, 587 bp, Glycine max
  Clone ID: PAT_MRT3847_1259C.1
cctcgtgccgaatttcggcacgaggctttggtggatgactggcttgaagatgaaaatcttacttggatctttcgatgatgaagtaaaagagattgttgagctctcaacagaggatgcttacggcatggctatgaaaagtatgcttagatgggttaggttgaatatggatccaaagaaaacaagagtgtttttcacaagcatgtcaccttcacatggaaagagcatagactggggaggtgaaccgggagggaattgttacaatgagaccactctaattgatgatcccacatattggggctctgattgtaggaagagtataatggaagtaattggaggagtgtttagcaaatctaaagtgcccattacatttttgaacatcacacaactatccaattatcgtagagatgcacacacttcaatctacaagaagcaatggagtccattgactccagagcaattagctaaccctgttaggtatgctgattgtgtgcattggtgcttacctggccttcaagatacttggaatgagcctttgtatgccaagttattttatccttgaaagttgaaactatttcaaatattaatac

SEQ ID NO: 28792 - DNA, 180 bp, Glycine max
  Clone ID: PAT_MRT3847_125C.1
gaacaagtatcggtgaactaatatggagatgcaaacggctaagtcaatgatctatttgtcggctggagccagtgacaaaagtgccggtgcctgtatggctgctccattaactagcctcaagttcatggttgacatggcgacctgaaagaccaacggtgaccttacctgcattggtagcaa

SEQ ID NO: 28793 - DNA, 401 bp, Glycine max
  Clone ID: PAT_MRT3847_126000C.1
gaatagtgagcaactaataatgacatatgttacattaatcatcctattgaggaaacttcataatggaattcaaggtcacatgattgttacatggatagccgtgagttgcaagggaaagcgtctgtacacacatgatagatatcgacgtctaatcgtctgagacaatctaaggatgcacacagtgatcatttgaacgtgtcagaagcagtgacagtagagaaatgtgtaacatacaggatactaccctcacaatcatagaggatcctatggtgagcgatagcccacttcaagctccaacttttgattgtcaccatctaatttagtgactcaggctaatgagagactcacatacggataaaattgatgtagagtctaagcagtatctggatgccatgatatct

SEQ ID NO: 28794 - DNA, 559 bp, Glycine max
  Clone ID: PAT_MRT3847_126001C.1
agaaacaggaccattgcgtttttccatattttatgcaaacaccatccaccttaaaattgtctgactacaggtcctcttgcctaacacctcctattaacatcactagtctaccgcacctatatgaccagacgatcaagacatccgctctacaagatcatggcacggcatattcccaagcctttacaataagaacaatgatgttgatagagcataggctatatctctaccactgctccatagtgaaaaacacaaggacttgactaatgtccggtgcatatctattggcagtagtgcccaaaaaacatgatatctgtactcgtcaaaaacgcttcaaattgcttaatagcttgggcaccagcctacactggtaaagtgtgatcaattgcatgaaatccagggccactgaattgaataggacctggactattgtacttttgctttagggcccactggtccctctatgtggcaaacttttggaagggcgccccttcagactccaccattgccttattggccaacggctggaatctaccatgaatgctctccgcggacatcaatg

SEQ ID NO: 28795 - DNA, 366 bp, Glycine max
  Clone ID: PAT_MRT3847_126002C.1
cctccttctcttcattgacctccccatcatcttctttcccatcatccttttctttatctactttatcaccttcctttgaggtttcttctatatcaatatcccttacagaaacttcaaccttgcttttctctttctcaccctcttcttttacatcctccttctttgcttttttgcgatccttctctttctccttcttatccttactcttatttctcttattttcttcatcaacctcgcctacgacattttgtccctttacctttaaagtgactggttctacatcttttgccttctttccctttttcttctccttctctttgttttccttcttctgttcaccatcaccatttttaacctttcccttta

SEQ ID NO: 28796 - DNA, 249 bp, Glycine max
  Clone ID: PAT_MRT3847_126003C.1
aacaacagcacaatgcgggttactgtctgttcaagctaccatctctctctcactttcttactgcctccttgccagaagttaaaatgacccaagaatctttcctagtcacatctgaatcagcgaacgaggtgcaccctgacaagctccgtgaccagatctccgatgctgtgcccgatgcatgcttggagcaggaccctgacagcaagtttgcctgtgaaactgatcacagaccacatggtgatggtttgc

SEQ ID NO: 28797 - DNA, 1195 bp, Glycine max
  Clone ID: PAT_MRT3847_126004C.1
ttcggctcgagtccaaaatccaatagagaatggacagcacaccaattcaactctgatcgatgtgaaaattatgaaccagaggtctcatatcctctatgaacagttaaaaggctttgttcaaagaatggacatgaatgtggtgaagaaggatctaccacccaaaactgtcttcgtgataactgtcaagctatctcccttacagagaaaattgtacaagagattccttgatgtgcatgggttcactactcaggtgcatcctgaaatgttaaggaagagatgtttttttgctgggtaccaggcattagctcggatatggaaccaccctgggatcttgcagttgacaaaagaagtcaaggactatgtaaaacacgaagatgctgttgagaattttcttgtggatgatagttacagtgatgagaattctgattataatgtacttgctggaggtaagtcttcatgaataggatacgtaggtacctgttcttttatgcttctaatatttgttttgtttattgattaatatagttattacttgattgaactgtctaatttcagtgagttttttttttctgtttgtactttcttaatcaattattattgttagttttattgtaagtgatgaaagctgtatttgtttctgtataaatattgagataatacacttagcagggacttatattgaggaactattggttctaaaaatgtatgaacatagttcagttgtctttagtgccatcgattttatgatggaacaaatactttctctttgttttggaggcacaataagaactggtcaaatttcttttctgatggatttcctaattttactatttttttgaatgtttgtgaaagtacaaatgagaaaagggaactataaagcatagtatgtgaagagcaagggatatggtatttataggctttatattttataaatttatataatttgtaaagtcttcaggaattagtttcctgtttttcaaacattatgttattgttggctttgcaatttcatagttccagtgacattatgtcaacaataaaatttggtgtccaagcttagtctcagctttaccttacagcacttacaataggctgaatagcatgatgaatgccaatgctgtttttatatcctcatgcttggtgctagaaagttatgttttttaccttagaaattagagtttcaggtagtttctaa

SEQ ID NO: 28798 - DNA, 299 bp, Glycine max
  unsure (1)..(299): unsure at all n locations
  Clone ID: PAT_MRT3847_126005C.1
acgtcgcacgcacncgtacgtaagctcggaattcggctcgagnaatcatgaaagaattatattataaattttatcttagaagataaaaaanaaaaaaaaaaaaaaangggngnccnccnannannaancccgncgncccgggantnantnccggccnggnncctgcnggngnnccantttccccnaangngagncgtntnanncctnggngaaaccagggncanagctgttcccngtgtaaanttntnanccgcccanantnccananaanaaacnnnnnncaaaanagnggggtntgn

SEQ ID NO: 28799 - DNA, 854 bp, Glycine max
  unsure (1)..(854): unsure at all n locations
  Clone ID: PAT_MRT3847_126006C.1
aaagattaataatttaattaaatctcaggggaatgcaacctacagccgagagaaccacagatgatggatattctctttcaaaatacgagaaacattttctttcataattttgcaatctacaaagtatatcacaaatcactggcctacattactaaacaaaccttcaaaatttaactacatactcttgtggagtcacttgcaatgactgatactattaatcactatagtctgatgatgtagaaccaactccatccagatccatgttttgttctgcattttcttctttcctgtcccttgcatctgagttgcccccaattatgtaaccttcaacatcaagatcaattttcccgttgtcgtcatcatcatcgtcaacattgtcatcaatatccatatcttccttaccaaccacattatagtggcttccatgtaataagttctcagacttcccactaaatacaccctgatatccatcattattgtccaccagataatcatactcatcacctatttcttgataaacatcatcttcatagcctgatctctctgaactactagcatttagtgcagcggcttccatttcaccttcattaatctcctcttggacaaagataccagctgcttcctccatgacatcttttggggtatccctctcaccagtgatcacatccaccttggcttctgatttctgccagcttctaatgctacgaggaccacgggcatttcctccttgcctgcatgggctccctttccattcnagtnnttttcccattttcntgcttctnnnnnngtacttctcttttnnnnnncggatcttgnnctaaccaccctcctttttgannatgttcttnnccatg

SEQ ID NO: 28800 - DNA, 379 bp, Glycine max
  Clone ID: PAT_MRT3847_126007C.1
agcttatacaatgctatcttataactgatatttgaagcgggagcattaggcaccacaacgtgaggatctgaacgataaatgacgaacgtaaatacgtctgggaaacacacaagtaacgccatgacatacttatgtgaaatccaacaccttataccttatcacatacaacatgcccacccaacggcgaccctgttgcatcatacaggcacactcaagttaaggcatcattcaacaatgctggaatgagcaatacactatacactgtcaagcaggacccggtggaagaccccaagaaccataaaagccaggcaattgaagccacactcggataagacgcacaagtggcaacaccacacatgaccgtccacaatggatcttg

SEQ ID NO: 28801 - DNA, 927 bp, Glycine max
  Clone ID: PAT_MRT3847_126008C.1
gccggaattcccggctcgacccacgcgtccgcaggaagtaactaacgaaccaccaccgtgaccgcgatggagccggaagtgagcatcgagggatcggcgatgatccaggtggcggtggttccaatcggagcggtgccggcgaacgtgctgcgggactactactctatgctgctcccgctgcacacgatcccgctctccgcgatcagctccttctacaccgagcaccagaagtcccccttcgccgtccagccctgggactccggctccctccgcttcaagttcgtcctcggtggcgcgccgccgagtccatgggaggacttccagtcgcaccgcaaaaccctcgccatcgtcggcgtcgtccactgcccctcctcccccgatctcgaagccgtcgtcgacgtcttcgccagtgcctgcaagtccttcccttcctccctcgtcgatcgctgtttcgccttctgcccaaacgatacgcagcttgaggatggaagtaagaaaggtgggaatttgaaggttgtttcctcctgcggatcgtccgactttggagttccacttgaatactatgatgcaagagatcgctgcgtcgctgcttatggagtttgagaaatgggtacttcaagcagaatcttctggaaccattctcaagacgcctttagattctcaagctagtctcagctcagaggaggttatcaaggccaaaaagagaaggcttgggcgtgcccagaagaccattggtgattactgtttgctggctgggtcccccgttgatgccaatgctcattattctactgcattggaacttttcgaggtgtaactggtgagttacttctggtatgctggagcattggagggggtagtggtttgtgcccttgctgattgaccgtatgggccagaaggattcagtcctggaagacgaagttagatatc

SEQ ID NO: 28802 - DNA, 515 bp, Glycine max
  Clone ID: PAT_MRT3847_126009C.1
ccacgcgtccgatgaatttgaattaactcagagatttgctagtcttgatttcaagttgaaatttgtggagcataacatccgttttctacaagaaattcttcaaaataggaaatctgatttcctagagtggctcattattgcattgattggtgctgaaattcttctgtctctctatgacattgttcatcggtctgccatgaaattttagcagcattttttctggtggcatgtaaggaagttgccaattttcatgaccagggttattcaataaaatgatatctttattgccaatacctgtagtccaaaaaggtaaagtaagggcgtatttataaaatatttatttatttatttattttttaattctggactattaacttactccttgttatattaatattacgcgagttttatgaagaagtgtgttaaaaatggtatactctgctattgttaaaactctagaccaagaagaaattcgagggaagttggttccgtgtatttcagagaggattttcttc

SEQ ID NO: 28803 - DNA, 1564 bp, Glycine max
  Clone ID: PAT_MRT3847_12600C.1
tttctgagatttttggtaatgttttcattctcctaatcttcgtctggctaaggaagaagaagaaaaaaaaaaaacagaagcgctcactaggtagcaatgccaatttcgcagttatgtccaaatatccattccgttcctcaaatcgtagcgtgcacccgcaacgacaaaacgggatcgaaatccgtttcggggagacccaaggtgagccctcaactgaaccgttggtccagagcccgagccgtacggttcggtcagaaattggaccggtccagtatgcgaactcagctaccggaacccaaccctcctgcacgtccacttcctctcccggtggacccagacggcgccgtcaatttggacggcgcagatgtcacggccgtcaaatccatctatatagtctccgacggaaccggctggaccgccgaacactgcgttaacgccgctttgggtcagttcgattactgcttggtcgaccgtggctgccccgtcagtacccatttgttttctgggattgatgatacggagaagttgttggagatcacaaagcaagcagcgaaggaaggtgctttccttgtgtatactttagctgacccatcattggcttcaactgcaaagcaggcatgtaagttatggggtgtgccttacactgatgtattgggacccattacagaggccattgcttctcatttgggtgtttctccctctggccttcctcgtggggcttctggactccccctctccgatgattactttcgtaggattgaagctgttgagtttaccatcaagcaagatgatggagcgtgtccccagaatctggccaaggctgacattgttctcaccggcgtttcacgcaccggcaagacccccttgtcaatttatctgtctcagaaggggtacaaggtggccaatgtgcccattgtcttgggcgtgggagtgccaaggactctgttcgaggtggatccaaagaaagtttttggtttgactataaatcctcttatcttacagaatattagaagaacaagggctaaaactatgggattaagttctgatggtagcagtaattactcggagatgaattatgttagggaggagcttgaatttgcgggaaggctctttgcacagagccctctttggccagtcatcgatgtgactggaaaagccatagaagagactgcagcagttgtattgaggctgtaccatgacaggaagcacaaatgcatcatgccaaggatctcaaaacgctattagagatgacaactttttctcttgaactatatagattgtaaagtaccaaaactgtatagtattatgattatgattatgatgctgagttccgagtactcataaatttcatataccatttacttgtggcggtatactttagctaaacaggtatgtctttcttaggtgttatatatcattacatgtatatggtcagatgctactatcaacttcaaaacttgtatcataagtcaattctaagaaagagttgaacagtatcttggcccaactgccgaaaaggtgttttgctctgttgaacctactaatcaattgcaaaactgctttc

SEQ ID NO: 28804 - DNA, 172 bp, Glycine max
  unsure (1)..(172): unsure at all n locations
  Clone ID: PAT_MRT3847_126010C.1
ggcgtgcgacggctgcgagaagacgacagaagggggtaatagaaggtgtcaaaacacttcaactttaggctccatctcaaaaaaatgggtggtttagctagcaatcttcctctaattgttatggtgggtctgcaaattcatnattctttttttgcgggggtcacaagagccg

SEQ ID NO: 28805 - DNA, 342 bp, Glycine max
  Clone ID: PAT_MRT3847_126011C.1
aaaaaaattatttaaaaaaaaaaaaaaaaaaaaaaagggggcaaataaaaaaaaaataaaaaaaaaaaaaaaaaaaaacaaaaaaaaaaaaaaagaaaaaaaaaaaaaaaaaaaaaaaaaaaaaaaaaaaggggccccccccccttaatgaacccggcaccccggaaataaattccggcccggctctcaggggtgtccaacatttccttaaagggggactttttaaacttggggaaaaaaagaacattacctgtatttgttgaaaaaattttttcttttaaaaattccaaaaaaattacaggccggaataaaaaagttaaaaccctggggtcccaaaggggg

SEQ ID NO: 28806 - DNA, 159 bp, Glycine max
  Clone ID: PAT_MRT3847_126012C.1
tacggctgcgagaagaccacagaagggttcccaagaaagggttggctttataacatcggattaagtaatcttgggtaccaccttgaaaaaatttgggatgaatctggtgaagatcccgattgcaacaagtccgtgactgggaataacattggtgaacac

SEQ ID NO: 28807 - DNA, 199 bp, Glycine max
  Clone ID: PAT_MRT3847_126013C.1
ctcgagccgagacagctcgagaaaacaacagcccatcataccctacttcatctcttgcgatctgatcactaagaggcgctagcattcactctttgatcatctagctatccccttttactcaaccaaaggtctagatctatcatctatttacttatgcgctgaaaatctatagagatagaactgtctacccccaattatt

SEQ ID NO: 28808 - DNA, 1029 bp, Glycine max
  unsure (1)..(1029): unsure at all n locations
  Clone ID: PAT_MRT3847_126014C.1
cgtaacgttaccttacctgctccgagcctcttccatgacacgctctggccagagctgcagctagcttcgacactgaggttcgttctccgaccctgctcccgaaccactgccatggggtgcttcttcgcttgcttcagagcccgcgatacctccgccgccgctaccactgctacggtgccttcttctcgttccagcaaacgcaaaccaaacgatgttgcggtctctcgaaatcggttatccactttgtttctatccgaagagagagaagactctgttatgcgtgatgatgggaaaagtattgaagtgggatctctgaaaggtgacagtgaggccaagtttctcaaagctggtggtaccttagcaaggacccctcttgagaaatcccaccttgttggtcaacctttcaatccctcaactcctgtaaaatgttgcgaggaagggggggagagaactgattccttggagcaaacaccaagcagctgtatctccaatgcgctaagtactcaatgtgacactcttgattctacggaaggaattaggacagggagtcttcacagtttggataagaatgacaagaatacagcttctgtttcaccttggccatcaaccacatacacgaggaggaacaagtctataggttttgaatgtgacagtgatttatcgtcctgtgactcatccgattatggtgggcgacatatgaaaaaaacagattcactaaataatgagagtacatataaaccatcgcctaatcctaccccgatgaagctatctgatgagatgcaaactcctggaactgcttacccttcagcaaaagacttgccaaatggtaagcctcgagttaagtcccagtttgtgtatccaatttacaaccctggtcatcatttctctcagaagaaatttgaagagagtgaatcagttgagccgtctcaagttacaacttcaacttctgaaaaagagttaaagaaaatgtcttgtgaaaatgaatgtaaggtagaggaaagcttgtcttncctgtttgagcctgcagct

SEQ ID NO: 28809 - DNA, 864 bp, Glycine max
  unsure (1)..(864): unsure at all n locations
  Clone ID: PAT_MRT3847_126015C.1
gccggaggaagttttctctgatgctggcgaagaaggagattgaggaggattttatgaggatggtgggccaccggcctccccgcaggcccaagaagaggcccagaaatgtgcagaagcaattggatacccttttccctggccagtggttgtcggaggtttgtgccgattcctacaaggttcccgatgatgctggtttttgcaagaggtagcgttgagattggggagaggcattctgttgttggctgcttaggatacatccgagatagatggatggatggatggttttggtggcttttgaaatttcagaaatatagtttcattcttttgtttatagaataaatctctgaacagtgatgattgttccagatcacatatgctttaggttactactttgcttttgatgctactattatgtatgtagctgcaaggatgaagttatactgtgggaactttaaactctttaatcttaaattctagattatgaagcttattctgagatggtagtttaatgaaatctcttgtggttagttttgtttactctgcttgaatttcgctgtgcgtttgtgagattgtgtttctccatattactatactgcttttctcctttgtcctgtttgtgtttgggaaatggtgctggtttggcacaaatcatgggatggaatcatagttntgtagtcatgtatgtaccttcctctgtagcaagagctgtaactatgaatgcagttctttctggtgctattcttgtctgcagttctgggtttatccattgcagtcgaggtggtaactgttctgaactaggggttcggcccaaccgcagcctgcanagccagaatgcangcccatnccacatccaaatgaaacgaa

SEQ ID NO: 28810 - DNA, 305 bp, Glycine max
  Clone ID: PAT_MRT3847_126016C.1
aacaacaaaaagggtgatgatttattaaatgattaggttattagtggaggactgaaaccacaagatcaatcatgaacaatctttccccggtaacttttaatggggggcccttaccaatgtctctaccctttgtgtaattaaaaaagaatactaacgaagaaaacggcttttataaaattcgccatataacattcccttcccaatttcctgtttacccttagataagttgcaggggaacaatggttaggcgcaaaattcaaaccaacatccaccccgccaaaaatcttttttaatattccaaccaa

SEQ ID NO: 28811 - DNA, 402 bp, Glycine max
  Clone ID: PAT_MRT3847_126017C.1
gccacgcgtcgccacgcgtcgggattaagctgttagaaccgatgtgcactacggggtctggagttctcgaaacgctttgatctacgctcgcttaaacccactgagaaaactcggatcgtcccctcgatcgtgtaaccgcgtcgcggccaacagggccaaacattaccctaaagttcgggaccacacctttcaattttccgactcttttctaatataaaattggtggcgacttcccgcatttttctttatggtagactcactttttagtcccgcattttccttccctcatatggtttgttgcgacagtactttgccttccttctaatggtatgttccttaattgaattatcctatttacttatgttaaacttatgctttaattaacttactaattaagccttt

SEQ ID NO: 28812 - DNA, 333 bp, Glycine max
  Clone ID: PAT_MRT3847_126018C.1
acacatgtgttggaaaattattatcagaggcgagcggggggccaacacaaaacatggccatctaaaaaacctggatcagggcccacgtatacgcctgggagcacgacaatctacactatccacatgagacactctggaagcatcattccccctcctagaccagggggaagacggggataccatggaaccaatctctgcagcagtgtccagctgactctctgaatttataacagcgccaatgcttgaaaacgagcccctgtcatcaactggaggaggaggaagatcttggggcctacctaagggatgggtacggaactgtgcctgaacgaacct

SEQ ID NO: 28813 - DNA, 734 bp, Glycine max
  Clone ID: PAT_MRT3847_126019C.1
gaaaccttgtcttaaggagattccttgctccactctcattttagtgtgctagtggtgtcagttatataagtaaggggtggtgaaggggatagttcccacttgtgaatcatcattatcattattaccaaacttctctacaaaaccaaaacctccaagcccttaacttttgagtcaaaatttatcatttcaaagcactctccaatagggataagtttgtgtcatcccagttggttggttggttgtaacccctgctctggcactggtaaaggtttcaatctcattgttgccagcttttgtgtacatgctagtttataacaacctttaccaccttcttttaaaccaaaaccctccagaacaagcttttttccctcattgtctcaaagaaagaaaaaaaatggccccttctggaaggacaacaacagcatcaacaaggacaacttcaaagacaacaagaagaacaagacagcagagaagaacaacaaacttcaagaagaagcagcaacagcagcacaacacaaagagcaacaacaacaaaaaacaacaagaagaggttcctgttccaactgttttgccctccagctactgcagctcctcctccataagctcacaagactcttctaattcaaaggaagtggacaacatgcatggttctgctgaggtgattgatgtttgcaacagtccatgttccacaccaaaaggtaaaaaattcaggattcctgagatttcacatgccc

SEQ ID NO: 28814 - DNA, 521 bp, Glycine max
  Clone ID: PAT_MRT3847_12601C.1
cccatgtatacgtatcacattcgcgttgcgagacgaggcccaaaacctgacccgccttggtaccttccatcatggtccagttaactattatgacggacgatcggaacgctccgacgacacatgagcgaccctccgttacgatgccgtggcatccttaagctccacaacctatggggccgccaatccgtctaacctgcgttgccacactggtccgatatgcctccatgctcgaaccctctggatcggggatcttagatctggacaggacgaccagctactctttacaccgtgctttgctgatactggagaggctcaagctgatggagagacccggagcaggcatgctaaactagatgcccgatgagggtggatggcacgtaaccccatggctgaaggtgatagataactacttacatagcctggggagtttacgctcgcagggggggcagagcaaaaagtcggatcgtgcgactctcagtggcgaccagaggcacgggcttgactatcttacggatgacacg

SEQ ID NO: 28815 - DNA, 236 bp, Glycine max
  unsure (1)..(236): unsure at all n locations
  Clone ID: PAT_MRT3847_126020C.1
tcggctcgagagcggatctaggcatgtggttggctgncgcagtacagtagataaggaaacactgcctgctcgtacgatagtcgtccttgctatgacgatgttcaggataatgcgggctgctctacgtgccgttgctccggtagttcacaatatgctcatgaggctgctggtaatatcagttactctcctgttcgtcgtttatctgctcagctaacggcaatgagggaatcaattgc

SEQ ID NO: 28816 - DNA, 248 bp, Glycine max
  unsure (1)..(248): unsure at all n locations
  Clone ID: PAT_MRT3847_126021C.1
tctaagatgacttctccctacattaaatgtacagtctctttcttcatagcatttggaaatttggctgatgacaccancctgccggganangcctcaaaattgatggtgtcatcagccaaatttgaggcctttccccanaagctggtcagtntggagaggntcaggnaaaagttgtattgaggtttcacaagaggaatttcttacagcttggtcaatcaggcgcgtcctgcaacanctctgttggctga

SEQ ID NO: 28817 - DNA, 882 bp, Glycine max
  Clone ID: PAT_MRT3847_126022C.1
caggaagaggagttgactggaggattcaatgaaattatgacaaaggagaagaaatctaacaaaaatacaaaatcaatttccagaggaaagaggctaaacaaagagaaaaacttccattatacagaagaatcagatgaagagaagcaggattgtagtgggaggctttctgaagatagggaaagtgtcccacaaggtagttctgaagagagagaagtggatgaatcaagtggagctttgagggaaaatattaacggacaagaatttgattctgaagggcatcatgataacagcaaagctgaccgtagtcctagagaaatggagaaatcacatatagagccatcaaaaagtcctgatgatgatgacgacgacacaattgctgagatttctgatgatgtgcctcggagcaaatggagacatagaaaggggaagagaagcaccagtaaagagcaatgagcagtttatttatctgtctagatcgcagcggagttgagcggagtgtataagtaggggtaagtacaggaagatgcctgccaaatgactgctaaattgttattgacacattattaaatatgtaatgcatatgctgtagctgccttgtagagtacatgtagagagcataaaataacagcaatcatccccaagtttgtagacacttttgggttctttaggtctatatttctgttaaatgacctttcattagttcaggggataggttcaggggataggtttagcatatgatttatgtagatgtcgttcatcctttctactcaattgatataattgacaagggctacagttatacgtgggcattattgcagggctttctttaggactttagcatatttgtacttcaccggttacaattgaaaaaggcgactttac

SEQ ID NO: 28818 - DNA, 463 bp, Glycine max
  Clone ID: PAT_MRT3847_126023C.1
tctatttttggggaggcccccgctactcgctcgaccctccacaacgtacacctcttagaagtttaccctcaccgtcgctcatccacacctcaccctgtcactattcctccccgatcttcatcattgtcgcctccacctgccgaaaaaagagctgtctccgttcccggtgaatatccgcttgatgctggagaggaagccctccgtgggagctgggtcatgatttccccaaacgaaggcgcctcaagctttaagacgccttctgctcgctcccatgcacgtaaaagccacgcacctcgccgtgtggttcatcgccgcagtccatctagacggacgctcatcccacatcctcccttttccgcgcctgcaaaaccgcgcgaaagtccagtctctgtagagactcagcgctaccttgctaaacaacggcggttagagcgcgaagaggacccaagcttgcaacgcttga

SEQ ID NO: 28819 - DNA, 787 bp, Glycine max
  Clone ID: PAT_MRT3847_126024C.1
gtcagatttaaaagaaaagaaaaacgttcgttaaatactcatttgaacttacaccgcgtgacctagccaagccaacacaaagggcacagaagagggtttcttttcgtttcgtttcaatggggagcgaagaggagaacggcgaattctacctgcgatactacgtcgggcacaagggcaagttcggtcacgagttcttggagttcgagttccgccccgacgggaagctccgctacgccaacaactccaactacaaaaacgacaccatcatccgcaaggaggtttacctcacccccgccgttctccgcgagtgccgtcgcatcatctccgagagcgagattatgaaggaagatgataacaactggccggaacctgatcgggtggggcggcaggagctggagattgttatggggaacgagcacatttcgtttacgacttcaaagattgggtctcttgttgatgttcagagcagtgctgacccagagggtcttcgcatcttttactatcttgttcaggatttgaagtgctttgtcttctctttgatttcccttcacttcaagatcaagcctatctagggtgtttgcaatattatgcattcatcctctgggaaatatgtacttgtttagcaactctcactttttgctaatggagttcagcttctgatagattgactttgtaatcgtgaaatgatttagttctgtattggtggttacatgaattggaattttagatttgagggtatagcccttgaactataagtgttgattggattggtttttatgcatggctt

SEQ ID NO: 28820 - DNA, 955 bp, Glycine max
  Clone ID: PAT_MRT3847_126025C.1
ggacctagccaagccaacctacgtttccgttttcatttcttcttctttttctttattaatctagtgacgaaccatcttaattttctccgaattcctctgtgcacaaagggcgtaggagaagagggtttcgttccgtttcaatggggagcgaagagcagaacggcgaattctacctgcgttactacgtcggtcacaagggcaagtttggtcacgagttcctggagttcgagttccgcccagacggcaagctccgctacgccaacaactccaactacaaaaacgacaccatcatccgcaaggaggtttacctaacccccgccgttctccgcgagtgccgtcgcatcatcgccgagagcgagattatgaaggaagatgataacaactggcccgaaccggatcgggtggggcggcaggagctcgagattgttatggggaacgagcacatttcgttcaccacgtcgaagattgggtctcttgttgatgttcagagcagtgctgaccccgagggtcttcgcatcttttactatcttgttcaggatttgaagtgctttgtcttctctcttatttcacttcacttcaagatcaagcctatctaatgtgtttgcaataatatgagttcatcctctggggaatatgtactttaacaactatcacttttctgctaatggagttcgacctctgattgagtgactttaatcttgaaatgatttggttctgtatgggtgattacatgaattggaattttaaatttgagggtataacccttgttctaaagtgttgattggtttggtttttatggatggattagttattctttcgttctcttgatttcactattcttttgatcatccattgttatatccctaaaaaaaattactcttattgtaactatttaaaaatgtttctctcataattatagaaaaaagaaaaaagcagagtaaatccccctaatttt

SEQ ID NO: 28821 - DNA, 1329 bp, Glycine max
  unsure (1)..(1329): unsure at all n locations
  Clone ID: PAT_MRT3847_126026C.1
ggctcgaggaagatgggatggagtcgtggtcgctcaatcaaggattcacattctgaggcactgtatgatgctagaagacaggcccgtagagctttcttagcattttcttctgatgatccaaaattgaagattactgggtctgagcccattgagggtgatgttgaaatttttcctgaggagcctgtgaatggcgatgctcagttttctaagagcacaccggtttacgtactcaacccaaagcaagacctgcatggattaggttttgatccttataagcatgctcctgagtttagagagaaaaaaagatcacgcttagccagcaaggggggaggacctggctatagcaaaaacttctccaccagagacagtctttttggtttgaaatcaggaaaggctgcccctggttttggtattggagctcttgaggagcttgatgtggaggatgaggatgtctatgccactggttatgaatttgaagatgcttatgttcaagaagttgaagaaccttcaacgttgagattagaaaaccagagaacgaaagagcagaaggaccagggtgatctgcgtggttttagagttgcatccaattctgactttaaaatggaaagattcgaggctcctctgattcccaaggattttgtgccccaccatgaattttctggacctctcaacattaaccgcaagagctgtgaagttactccaccagatgttcctcctcctggggatgggaatttaaaactattaattgagggggttgcaaatctggtagctaaatgtggtaaattatatgaggatttatcaagagaaaagaatcaatcaaatccattgtttaattttctttctggaggaactggccatgaatattatgcaaggaaattgtgggaggcacaacagaaacacaagactagtcggcaattggatggaaaaatgcctcccagtgtgcagaggctaacagctgagagtcgaggccagatcctaggggaaaaacctctagaaaaaagttcccaagatctatcctcatctgtttcttctacagatattcatctccaatttaatcttactgatacatttactgagtctgcatcacttagtgagttagtgaatgtggaaaagcctttcaaagatgatcctacaaagcaagaaagatttgagcagtttcttaaggagaaatataaagggggattacgctctgctagttctagtttagctagtgatatgtcagaagctgctcgtgctcaagagagactaagttttgaggctgcagctgaggcaatagaaaagggacgacaaggcangggaagcaagcctntaattccatcttccatggat

SEQ ID NO: 28822 - DNA, 261 bp, Glycine max
  Clone ID: PAT_MRT3847_126027C.1
gcgacgatgacgttaatagaaattgctggtgctcacgccatcatctcctaagacatataattggaccggctacagttccgggtcttgacggtcctggtataggggatgagcccatagccttcttccgaggcgctgtgtatctcagatacttcggcatcaagagtccagttgatactgcttctcgtataattgtccatccaggtaggctcttgatctcttgacgcctgaacgttgccagtgcactgcttcagggaccaacgc

SEQ ID NO: 28823 - DNA, 521 bp, Glycine max
  Clone ID: PAT_MRT3847_126028C.1
aaaagtatcttttatttaatatgggggggtgaaagggcttaaaaaacagacacgcgggaaggacccgaaaattttccacgggggggggagccccttcaataaaggttgaaaaatcaaaaatataaagggcgcttaattcaaaaagcagggggggccaggaacaaataaaaaaaaggggggaattcgctcccaaatccaaaagagaaaggggtgactaaaacaacatccaaaccccccccggggcaagaaaaaacaagccagtttggcagcaaaaaaaataaaaaaaatgcttacaaaactgatggaaaaagaagaccttgtgaaaattggaaagctgcaccactcccctgttaaggaaaaaaacctaaggattctaaacaaaatcctttttgggagagggctcaaccccaaaaaaaggccggaaagatgcaaggccccaatctccaaggccaaaacccaaacattttttagagaggggggcgttcccccttggaaaaaaaaagggcatgtttccgtaaaaa

SEQ ID NO: 28824 - DNA, 349 bp, Glycine max
  Clone ID: PAT_MRT3847_126029C.1
ccccaaaaccaaaaaaaaataaaggaaaggaacattgttttataacaccaaacaaactttttgtttattaagggaattctaatattgaagggggcggaaatgttaggggggccccttgtttttaaagggaattctaattttcaaggggaaaacaaacatcttcccttgttaacaaaaaaaaaagggcccaaccctcaacccacatttatttggggcccacccactgcttttggttattgaaaaacacttttatgttttttttgaaagcaggcaacccaccctttttaaaaggcaccaaaaccttgaaccccttttttttttttgaagggggggtggaaaaaggcaaaaa

SEQ ID NO: 28825 - DNA, 824 bp, Glycine max
  Clone ID: PAT_MRT3847_12602C.1
gtacgtaagctcggagactctgctcttgctttagccatcactaacactcagtctctgaattggggctgagggtttcgagtaacgtttatttttcacgagtttaagatatcatgggtaaagagaaggttcacattaacattgtggtcattggccatgttgactctgggaagtcaaccaccactggccacttgatttacaagcttggaggtattgacaagcgtgttattgagaggtttgagaaagaagctgctgagatgaacaagaggtcattcaaatacgcctgggtgcttgacaagcttaaggctgagcgtgagagaggaattaccattgatattgcattatggaagtttgagaccaccaaatactactgcactgttattgatgctccaggacatcgtgatttcatcaagaacatgattactggaacttcccaggctgattgtgctgtccttatcattgattccacaactggtggttttgaagctggtatttccaaagatggacagactcgcgagcatgctctacttgccttcacccttggtgtcaagcaaatgatctgttgctgtaacaagatggatgccactaccccaaagtactctaaggccaggtatgaagaaattgtgaaggaagtttcttcctacttgaagaaggtaggttacaacccagacaagattccatttgttcccatctcaggttttgagggtgacaacatgattgagaggtccaccaatcttgattggtacaagggaccaacccttctcgaggctcttgaccagatcaatgagcccaagagaccctcagacaagcctttgaggcttcccttg

SEQ ID NO: 28826 - DNA, 606 bp, Glycine max
  unsure (1)..(606): unsure at all n locations
  Clone ID: PAT_MRT3847_126030C.1
ccgaggcaggacgagccccccgccttggggggcgtgccaattgacatagcggacggaaaacccccgccggggtctccgcggggaaggggtcaaaaaaatggggggcgggggcccccccccacgcgggggggcgggctgccatactggagcccccggcggcggcggacctgagcccccccctaggaacccgcgggacccccccccccccagggccctactttaaaacaaccaccccccccaaagggaagccacgtggtaggtcccgcggcccccccaccccccagcttgttcgaccccccaaaagctcgtgggtttaacgccatttggccccccacaccaaaaagggttccccgctaaccccccccccacgttgcgcccccccccccccccccccgnggtaatgaagatgacattccaaaaacaacggcggcgggggcgatttttttttttttgttcccccgccgagaatattaacccccccccggtgacttctgcacccccccccacacacccaaaagaagaaatcgggggggggcccaaacccccccccccccgacttttttaaagtaaaaaaaaggtgacggggntgtcggtgccgcccccccc

SEQ ID NO: 28827 - DNA, 594 bp, Glycine max
  Clone ID: PAT_MRT3847_126031C.1
attatgcggcatgcttttcagccatgccctcctgtagtcctgcatatatggactgtcaatttcctgaagaaaagggtttaccataccagcaccaaattgatgccaattcgttaaattgaaaaaaagacagttagagataggagaaaatataaaactagaacatgagatatcatagcagggtataataaaagaggaataaaataaaaattgtttgtatgggcaaagtaaattaaaaaagctctttcccttgattggatatccttggaagagacactcttagaacatcttacaccaccattaattcttttatgctaccaatcaacccattgctcactaaaatatccagctgtgtgcaagatattttatcatgatattttacatcaatgctacattcggtattgcttttatcatttgcagctcaggcttaatttgactttgtagttcggcatgttggaacaattagtacagtatctgattcaaaagttgtgttcgggttattggctcttcccactctaactcaattgcagggattgcaacctctaaaaccttatgaacaatctgacggtctggttgtgaggaatatattaacaatgc

SEQ ID NO: 28828 - DNA, 120 bp, Glycine max
  Clone ID: PAT_MRT3847_126032C.1
gtgtttctgaaacagaccatggagaaccctcaagaactcactctgctgtagatagattagtctatttattagcaaggttctgaaataacggtccgcaattgcatgtttcggccacaatgt

SEQ ID NO: 28829 - DNA, 1161 bp, Glycine max
  Clone ID: PAT_MRT3847_126033C.1
gatagaagtgaggggtgatcgatcttttccacactcaaaccttctgaaagtctcataaaaaaaactatgcaagcttctctcatccgaaccggctccgtgccggtccagaacacggttctccccggtttcaccgcgagtctcactcacgcgccaagcctccttctccggcgacaagagccacgcgcattctcccaggttttccatccattcttcccactccaacccccgcagatcctcgtcggagcgcgacgacgagaatttcggcgttcgccgggatctgaaccgaaccggatcgcgctcgtttccgccgaatcgtgccctcacgaagaaggaattcctctccgacgccccctccgcgcaagctcggaatccggccggaggatctaccattcggagaaggagacggtggcttccacggtggtgcgcctctcaccggcggaaacggcggcgagaggatgaaaatcggcgcgtactacgaggaaatgttgaggtctaatccgacggacgcgcttctgctgagaaactacggcaaatttctccacgaggtggagaaagacacggtgagagcagaggaattttacggaagagcgattctcgcgaaccctggcgatggcgaattgctttctctctacggaacgcttatttgggaaacgcagagagacgaagatagagccaaatcttactttgaccaagccattcacgccgctcctaatgattgtacggtgctgggatcgtatgcgcacttcatgtgggaagcggaggaggaggaggaggaagaagaagttaacggaggagcgacggagataacggcgacggagatgatcgttgctttttaatttattaatttagttaacttattagggggttcgagaatgtcacatgcgtgttatagttctaactggcgttacacgattataatattttataataataataataattataataaatggtatcctttgtttgatgtatctaactgtaagctacaaaaaggccataccactagaagatgagagactgaactgaaagcgaaacctctgtgtgtccttttcgttccttcttgttccttctacagcctgtaccatgtaatgtaacttgtttgtacatgtaactctttgcggtattttgatgatattattatagttaaaaatcgttctttaa

SEQ ID NO: 28830 - DNA, 244 bp, Glycine max
  Clone ID: PAT_MRT3847_126034C.1
ggttctactgtatatgattgttattactcgatcatcatcctcagtagcttcatcatctcctgctagcgagtatgtatattctctcagctcgaaaatttcgtacagtgtgctgtcactgtcgctgagacagagtcagcaagtgttgaacattttgccagcagcacatcagctaccaagatctgatctataccttttcaaacaccactgacaccatagtcatgtgagtggtactaatgaaggctca

SEQ ID NO: 28831 - DNA, 1221 bp, Glycine max
  unsure (1)..(1221): unsure at all n locations
  Clone ID: PAT_MRT3847_126035C.1
gattcatcgaactttctttcccactcaaaccttctcaaagtctcatcaattcaaaactatgagagcttctctcatccgaaccggctccgtgccggtccagaacacgctcctccccgcttcaccgcgagtctcactcacgcgccaagcctccttcgccgccgccgacaagagtctcgctcattctcccaggctttccatgcattcttcccactccaacccccgcagattctcgtcggagcgcgacggcgagaatttcggcgttcgccgggatctgaaccgaaccggatcgcgctcgttcccgccgatcgtgcctcacgaagaggaattcctctccgacgccgctccgcgcaagctcggaatccggccggaggatctacgattcggaggtggagacggcggcgataacggtggaacgagtctcaccggcggaaacggccgcgaatggatgaaaatcggcgcgtactacgaggaaatgttgaggtcaaatccgacggacgcgcttctgctgagaaactacggcaaatttcttcacgaggtgcgtcaaaccgttcctcaaacaaaccaaaaccgttgaatcattcgataagaaagaaaaaaaaaagagtgaacgatttgaaattttgacaggtggagaaagacacggcgagagcagaggaatattacggaagagcgattctcgcgaaccctggcgatggcgaattgctttctctctacggaacgcttatttgggaaacgcagagggacgaagacagagccaaatcttactttgaccaagccattcacgccgctcctaatgattgtacggttctgggatcgtatgcgcacttcatgtgggaagcggaggaggaagaagaagttgttaacggaggagtgacggagataacggcgacggagatgatcgctgctttttaattaatgtagttaacttattagggggttcaagaatatgccacatgcgtgttatatttctaattggcgttacacgaatgaaaagtaactcatatacattttttagacaattttatttttcattagtttatttttttaacaaatatttcactactttttattagttacttccttttccttattttgtttaacttctaaactctttttctttctttnatttatttttatttaaaatagatagagagacagagtgactctcttcccttagttataataatttatacttatatataaagagatgtaactntgtgt

SEQ ID NO: 28832 - DNA, 1028 bp, Glycine max
  Clone ID: PAT_MRT3847_126036C.1
cggaggccaccgtcgtctctcaaagtaagcccttccctttcccatcgttcaccgcgtcacgcttttttctctaggccaccgtcgtctctgaaagtaagcccttccctttcatcgttcacagcggcgcctctagttttctcactccgcaaccaaacgacacccatcttcgtgttgtctcccaaaaacgacaccgccgaagcagaaccctaatactttgcttcaacaatgcagcacgacgaggtcatatggcaagttatcaggcacaaccattgcagttacatggccaaaattgcgacggggaatttttgtagaaacccttacaacgtgactggggtttgtaaccgaagctcgtgccctttggctaatagtcgctatgccaccattcgcgacgacaatggagtgttttacctttacatgaaaactattgaaagagctcatatgccgaaagatttgtgggaaagagtaaagcttcctaggaattacgagaaggcacttgaaatcatagataaacatctgatgtattggcccaaacttcttatacacaagataaagcaacgtttgaccaaaatgacacagatgcggatacgtatgaggaaacttgctttgaagacaagggagaaaataatgacaactccaaggaaagagaaaaagagagaggctcgaagagaagagaaggccgaaaaagcagctttgttagaaaagtctattgaaaaagagctattagaacgccttcaaaaaggagtttatcaacaaagtgatatatacaattatcctcttgaagagtacaataaagttcttgatatggagaaacttcaaattgctgatgaagaagaggatgaagaggaaccagaggtagaatatgtagaaggttatgatgaacttgaagaggaagaagacatggaggattttggtggttttgcaactctcaagtctcagggtgattttgacgatgatgaaaatgctgaaagcactgatgatgaagaggaagaagcaattgatcagagtagagcaaaaaggaaaatggcatt

SEQ ID NO: 28833 - DNA, 427 bp, Glycine max
  Clone ID: PAT_MRT3847_126037C.1
ggctcgaggcgcatcgaacagcgttattgtcagatggcatcgcccctcctgaataggggcgtaactgcgcccatgtggcccttaaaggctatacctgatgaagcttacaaaaaggatttcttgctttatgtaattcgtcatggactgctctcaatgagtccatcctaagccttgttgtatgactgcatcacaggaacctgaagaactaccgtgagccttacaaggaatagcgtaatagccttgggactgcactaattgtgaaactcaaggcatatggcagggcagacgcacaaaaattggtattggacatcgacctaggactgggtaatcatgttacatcacctatgtttaagcgtctcatttagagattgacccggacatactgggggcttgctctccatggtagagcccccccagtgcgtgtaaa

SEQ ID NO: 28834 - DNA, 361 bp, Glycine max
  Clone ID: PAT_MRT3847_126038C.1
cccacgcgtcctcccactcttccgcggacgcgtgggtggtgttgtgagtcgccggcgtattccactcgaagcacacaccagccataatcgattacacaccgtgataagataagattgaaaagatgtttagggacgtgtcaagctgcaacacgtacaactacggcgaggctgggtattgggacgcgcgctacatccaagagggtggttccttcgattggtaccagcgttactctgctctcaagccttttgttcgcaaattcatcccatcttcttccaggattctcatggttggttgcggcaatgctgttatgtcttaggatatggtcaaagatggttaccaagacatcggcaatattgatat

SEQ ID NO: 28835 - DNA, 834 bp, Glycine max
  Clone ID: PAT_MRT3847_126039C.1
cccacgcgtccgtacggctgcgagaagacgacagaagggggacgagagcagcaccgaactcgtggaataaatcacggcaccgtcccaccccgcgaaaccctaattgttcacacctaaaccctttccttcactgttttctttttccccttttctttttgtttgtttttcttcacttccaaggctccaccttctccaaatcaaaacagaggcttttttgttttgttttcttattctgctgtttatttattctccttgtcgaggaaaagacccaccccatcacccatgtaacaacaacaacaatccatcatcatctcctgggaacctgcgattcgaggtttccgaggttaatcgggtactccgagaaaaagaagaacaagggtctttttatttatttatttttcattttaaaaattgaatttttgggaggttgggtatggaagcagcacgagtgggtgtggcggttgaaggtgggcatggaaacaaatcaaacaatgtgaaaatgttgcagcagccgaagaatcagcaagcgcaaatgggaaccgtgtctcagcttctagcgggtggattagccggtgctttcgccaagacctgcactgctccacttgcacgcctcacaatcctttttcagctgcatggtatgcattttgatgtggcggcattgagcaagcctagcatttggggtgaggcttcacgtattgtcaatgaagaaggatttagagcattttggaaaggcaatttggtgaccatagcccatcgtcttccttattcttcagtgagcttctatgcttatgaacgctacaagaatctattgcatatgcttctgagggagaagca

SEQ ID NO: 28836 - DNA, 215 bp, Glycine max
  Clone ID: PAT_MRT3847_12603C.1
ccgaaacgcagtgccgtcgtcgccatcaacaagtggaaggaagagggtcacgagcacgctcgcaaataccagctcaatcgcattgttcgagagcttcgcaaggacaagcgttatcaacacgcactcgaggtatgtgaatggataccttacagaaggatatgaagctggtgcaaggtgactatgctgtccacttggacttgataactaaagttcgt

SEQ ID NO: 28837 - DNA, 255 bp, Glycine max
  Clone ID: PAT_MRT3847_126040C.1
ctagatttcccgcgtcatcttctctctctttttttctgtgtgtagtgtgcgaaaactttgatgagttggtcgacatgcagagagagaaagatggtgagaaaatggagacgaagggaagggttggtggcaaagattgaagggaacatatgggacacgttagtgcatgaaactgttgtggttatggattgttggggaaatgctaaaaaacaaaaattattactatatgatgaggatcccaaataacatcacctggtt

SEQ ID NO: 28838 - DNA, 476 bp, Glycine max
  Clone ID: PAT_MRT3847_126041C.1
ctcgagccgctcgagccgctcgagcggctcgagggtggaacttcgtgtttcattttgcgaacttcatttttctctctcgtatttcgctctggtgtgtctcattcctgtgcttttgaatcatattcttcgatctgttcttcaacatattttctgctttcaaccgttcgcgtcgtgactcagcttcgaattgttcagtataaggtattttcaattctcattgctttgctgtttgtttcttattcgttctgggcttctgggcctgaattatcgggtcacaaataagacgcacattatatgtttgactaatgttctgagatgcattttgaatcgactaattgttctgtgctttcatttctgtcaccactttatttttacccttccttcatctctaatttgttgtttttccctgctaaaatattggcttttcgttccaacaatttctgctatctatctgtgctatttatttacaccatatc

SEQ ID NO: 28839 - DNA, 205 bp, Glycine max
  Clone ID: PAT_MRT3847_126042C.1
ggatccagacgcgcagcacttaatggtgttgaggggttgttttatcgggtaagcgccttaatctacacacgctgagggtgcagcccgggaaatggcacatgaaacggtgagaatcagcaatcagagagaggggacaagggtcatccccacgagctgagccaccagacctccaaggcagtgcttggggcgtgcctcggacaggacc

SEQ ID NO: 28840 - DNA, 442 bp, Glycine max
  Clone ID: PAT_MRT3847_126043C.1
ccacgcgtccggttggagtgagtttcacggagacgccaaaagaagttcaaagggggccgaaagtaggttgaagacttctaggagttatgtacattgagattgattgtcacataattcgagagaagatgattcaatgactagtgaaatgacttcttgtttcctctgcaaaccagcttgcatatatctacaccaaggctctcatgcctggtgcttttcattttttttcttatattccaagctaggaatgtccaacatccattcctaacttgaagagggctcttagcatagatatagacttgatcatggttattttaacttgatcataatgtaaccagagtcagcttagttagttgtaagttagttattcctgtaaccaactatataatccatcgtaatgaccaactcttgtaagctaattcattcgacgctaatcaaagcttct

SEQ ID NO: 28841 - DNA, 399 bp, Glycine max
  Clone ID: PAT_MRT3847_126044C.1
acgatttgggtacaaaaagttgaagtgggttgtgggagagaaggctgatattcttggatcaggtaagtctcaggttgttttatcagctgtgcttgagaagcctgtaagggtctagagcttcaaacaacatgatggcaagatgtgagtataatgctattgcttctgctggatctgcttcacttcacacacaatttgtgtgaatgaatgaactgcttctaacatcatcagatcacatcagtagtgaagaggaataagtgtatgaatatttctgtttttcaagtaatgttttgtatattattcggctactaatagcgctactatttcgcaggagacaacttgttagagaacctaaaatgaattacatttttttagttataaagttaacatgcctcccttttc

SEQ ID NO: 28842 - DNA, 324 bp, Glycine max
  Clone ID: PAT_MRT3847_126045C.1
gcaattcccggatcgaccgacgcgctccacgcgtgcctgcgagatgacagaacaacaacggactgtggcatgactgaaccgatccacgcttttggactaggagctttcacttgataataagaataataagatgcacttgatgcttgggaccccttgcaagatcatcaacacttcatatatccctatagttttgatatgtcttttacttttacagatacgggaattgttgctgtctccaaggctatggatgtgaactagcaggctcatcctggacctggaaacacagagacagccccttatgagcctttgaaactgcttcacttt

SEQ ID NO: 28843 - DNA, 339 bp, Glycine max
  unsure (1)..(339): unsure at all n locations
  Clone ID: PAT_MRT3847_126046C.1
tgctaagaggattaggntntgagatcctatgtttactataattttttgaggtggttttgctgccttattaatgggaaaatcgtactatagattctgttgcataggcgtcgtctgtggcggttgtcgtacaaacgtggccgcggttggggaagaaactaaaacacggcttaattaaatgaattattccgttttttttttgtgattctctttagcttgagaagtctgatttttcttgagattttaaaggtctgtttgtttatcatggattggtagctattaattaaggaatttcactcttcgtctttctcattagtcacttttcttggtttcagaaaggtt

SEQ ID NO: 28844 - DNA, 315 bp, Glycine max
  Clone ID: PAT_MRT3847_126047C.1
aaaaggccaccggaagggagcacaagtcagtttgctgatgtagactttgctctgcagtatactcaaacttcacgtctctgttcgctcccgctgcatccttcatggtagcatggtgatgcaacacgtccaacaatcatcccgctcagagtcgattcacgcacaatagttggcgtaatcaggaggagtcctctccatattggacgcctcctgcggaattaaacatcatgttttcgcgttatcaacattcttcgatcactcagtgtacaatgctaggtttacatcaatggagaataatctggtatagacactcctaca

SEQ ID NO: 28845 - DNA, 408 bp, Glycine max
  Clone ID: PAT_MRT3847_126048C.1
ggggaattacattaaacacagataaatgaggccgctatatttgcacgctaaaagagccaaaactaactttgaggaagcattaaacaataaaaactgatataaggacgaaaaaaaaccccatgccaacactataacaaagaattgtcctttttgaagatgaaaacgaaaaaaaccttatttcaagaaataaaagtatttggcctaattaaaattactgataaaactactatgaaactatgcaatttcttaaaaactatccaactttgttctcaataataaacacagtgaatttctttgatatcaagaaaacatgactgtgatacattcaaaaaaaaaaaatcgttttcctactacacaatttttttgtataattaaaaagtagacatgcctcaaccatattataagggg

SEQ ID NO: 28846 - DNA, 1027 bp, Glycine max
  Clone ID: PAT_MRT3847_126049C.1
caacaccacacgaagcctttgttgcattcttctggctccatgttaccctccaaggacaaggagctttctgtttctgccagaaaactcgctgctacactgtgggaaatcaatgatttgcccccttcgagggtgaagaaggagttcgaggttgatccaatgagaggctgcggggagaaggttagaagcagagagaagaagggtgtgggtttgtccagatcgggcttgttaaggccacagatgtcagatccatctcatggccctgcctcagagaggatgaaggggcttgaagggggtagctgcaagagaagagtatcgaggttttctcatcagcttctgtctggtgtctactatttggatgctcttgatgctcatagcagtgccaattttattgaggaggtagaaaatcagctcagaagcaagaagaatcgcggcaaaggcacaggtgatgttaggaaccgtctgaaggaggctagaagtggcctatctacatcaaagaagcttctaaaggtgttaagtcaaatgtgccttagagagcagcaagcatcaagcatgccccttgtcttggctctggggagtgagcttgatcgagtgtgccaccaaattgatcagctgatccacgaacagcgctcgaaccagaacgatgttgagtatgtcatgaagcattttgcagaagagaaggctgcttggaaaagaagagaacgagaaaggattcatgatgccataaaacacgtggcggaagagcttgcagtggagaacaagttgaggaggcccactgaaggacagaacacgttgagtttctgccagataactcgttgctacactgtgcgaaatcaaggatttgccgagattgaaagggaagaacgtctcggggttgatctaatgagaggcttcatgaacaaggttagaggcagacataagaagagtgtgcggttgtacagatcgggcctgttaagggcatagatgtcagatccgtcgcatagtcctgtctcaagttgaggaggcaaactgaaaggctgaacaagaagat

SEQ ID NO: 28847 - DNA, 361 bp, Glycine max
  Clone ID: PAT_MRT3847_12604C.1
gggaaagtcttacccaactgtgagtgctggttaccagatagccggtaagaaggcgaaaaataggctcagaggcttcatcgctgacaagagatgcgctcctgtaatgctccgtttggcatgagcctctgctggaacctaagacaatggcacgaatacaggtggacccttcggaaccataaagcaccctgccgaactggctcacagcactgacaacggacttgacatcgctgatatgctggtggagccactcaaggcggagttccctatgatgagctacgccgattgctaccagatggctggcgttagagccggggaggtcacggatggacctgatgttgcaattcacgctggaagagaggac

SEQ ID NO: 28848 - DNA, 250 bp, Glycine max
  Clone ID: PAT_MRT3847_126050C.1
aaacaacgcccttccgtgggattagcatgtgcgttgttggggccatatctttcgtgaacggatgacagtcacctcagataaagcttttcttctggtgatttatgccactctccctcctgctggcccttagctctataatatcattctccaaattggagacgatgggagggatctgttcacgatgtattaccgatacaccatctttggctttcacgcatgtccaaattgcctctgtactcttgataccaga

SEQ ID NO: 28849 - DNA, 163 bp, Glycine max
  Clone ID: PAT_MRT3847_126051C.1
taaattattcccataagggctttcctcctataaacgggctacacagattataccgtgctagcgggaaaaatgggatatggaccctttctagcatgacaataaaagctcgggcggctgtggaaggggatcaactacggggctaagagtccctctgtgtcaatga

SEQ ID NO: 28850 - DNA, 458 bp, Glycine max
  Clone ID: PAT_MRT3847_126052C.1
aaggactgtctttattacatttggctgcagtcttcaatcaaactgatatagttttcattctcatggattcgggggcaagcctggaatacagaaatgcccaaggagaaacacctttagattgtgcaccagctaccttgcaatacaaaatgcgaaaaaagatggaggaaggtggagcagtggaccaaagcatttgaacaatctattacttttatcagtgttctttttatgcagtcctcccaaagagagcttcaaatattaccactgtctaaagctcctctgttaccagaacaaaaaatttcgccttctgtataattgtgacagaggagttcaattcatcttggcagactaagtatgcagacctatataagacatatctttgtcagctgcgcaacttgggcagtattactattcagcttgtaaatttctttggtctgtgacataagagcattttttaatag

SEQ ID NO: 28851 - DNA, 300 bp, Glycine max
  Clone ID: PAT_MRT3847_126053C.1
aaaaaaaatcttttttttgctttgcttactaaatgcgcgggggagaggaggataatatgcaagttgcgctgtaggaccccaccctagatgaagtcaccaatgccagaaacgtgccgaaccccacagatgctggtcgttaggaccaaaacaacttcctcagctatgggggaatcggacgatggtcctggatatgacacaaagcactgacttttctcacatctgggggcgccactggtgattgccatgacgtaagcagcggacgtggtgggggcctcggggggcctaccgatgagatctgaa

SEQ ID NO: 28852 - DNA, 340 bp, Glycine max
  Clone ID: PAT_MRT3847_126054C.1
tgttgcaaatgaactccgggttcctttagtgtcatttgccgctacagaccccaccctctcatcgctgcagttccctttctttgtcaggacaacacagagtgatttgtaccaaatgaaggcagttgctgagattattgattattatggttggaaggaggtgattgccatatatgtggatgatgattatgggcgaaatggtgtggccgcattggatgacgaactagctgcaaggcgttgtagaatctctttcaaagaaggaatcaattcaggaactgaagttgaccggggtgaaatgactagttgacttgtgaaagtggcactgatgcaaactcgggtcatt

SEQ ID NO: 28853 - DNA, 248 bp, Glycine max
  Clone ID: PAT_MRT3847_126055C.1
caaccactcgcgatctgttccttctttcaacaactataacatcatccttctccatcctaacacaccacactatgaccacctcacccaccaaatcaaaccatcatttcaccttccaaaacgccaatttaaatcatattaatcttcttgactacaaaggaaacgtccttatcattttcaatgttacctcacaatctcccttaactaaaataaattacacttatctcaatcacttgttttttaaatacaaa

SEQ ID NO: 28854 - DNA, 477 bp, Glycine max
  Clone ID: PAT_MRT3847_126056C.1
ctcattccgtggcactagactggactgccaccccaatgcttgatgttcatgtgacaattagctggtgcatttcctctcaagtatgtgtccccataacctatagtgttttaactccacaaaatccttatgggtcaagataggtggatacggacaactgtctttcccccatggctctggcctaagtgtcaagagaatgccgctttatataaggggaggagctggtgcaaataatgctattctcatgaatataccaaatgctgatctttcaatcgtggagatattctgttggagatcacggcttagaagcatctaagaccactgctgcctacattaaatgtacagtgctctttctcataacatttggaaattatgctgatgacaccatcaattttgaggcttttccccacaagctggtgcagtttggagagagtcaggaaacagttgctttgaaattttcacccgaggaatctcttacag

SEQ ID NO: 28855 - DNA, 445 bp, Glycine max
  Clone ID: PAT_MRT3847_126057C.1
cgtgatttgcttaagcctgtcatgtacatcgatcacatgctcttctactgaactggaaaaagtagttcctgtttcacttgttcctgtgtgacttagaaaagcagcacgttgacgaagatctcatacaccagcactataacgtctactaggcatctgaagagatggatggctaaggctgactgtactctgcctcgtccacaccacgtgggtgtgcaatcaccttgttcagattactaaacaatgctgactacacccaacttacttggtcttacaacatatctgagttcagcgcactcacatcttgcctgctggcagcacattgaatggccttgcatctacatctatcccaagtctgagcaccaaactaacaaatgaattgcaaggatttcttcaataacactatgctgacacacgtcttgctgaaacacatgaaggaggagcttta

SEQ ID NO: 28856 - DNA, 113 bp, Glycine max
  Clone ID: PAT_MRT3847_126058C.1
gacgccccttgttatcagccattaagctcggagggtgtggcggctacgcacaaagagagcgctacacttgagcaggccctagcgcccgcaccattggctcactccccttcctt

SEQ ID NO: 28857 - DNA, 1493 bp, Glycine max
  Clone ID: PAT_MRT3847_126059C.1
catggccaagctagttttttccctttgttttctgcttttcagtggctgctgcttcgctttcagttccagagagcagcctcagcaaaacgagtgcaagatctataacttcagagagggtgatttgatcgcagtgcctactggtgttgcatggtggatgtacaacaatgaagacactcctgttgttgccgtttctattattgacaccaacagcttggagaaccagctcgaccagatgcctaggagattctatcttgctgggaaccaagagcaagagtttctaaaatatcagcaagagcaaggaggtcatcaaagccagaaaggaaagcatcagcaagaagaagaaaacgaaggaggcagcatattgagtggcttcaccctggaattcttggaacatgcattcagcgtggacaagcagatagcgaaaaacctacaaggagagaacgaaggggaagacaagggagccattgtgacagtgaaaggaggtctgagcgtgataaaaccacccacggacgagcagcaacaaagaccccaggaagaggaagaagaagaagaggatgagaagccacagtgcaagggtaaagacaaacactgccaacgcccccgaggaagccaaagcaaaagcagaagaaatggcattgacgagaccatatgcaccatgagacttcgccacaacattggccagacttcatcacctgacatctacaaccctcaagccggtagcgtcacaaccgccaccagccttgacttcccagccctctcgtggctcagactcagtgctgagtttggatctctccgcaagaatgcaatgttcgtgccacactacaacctgaacgcgaacagcataatatacgcattgaatggacgggcattgatacaagtggtgaattgcaacggtgagagagtgtttgatggagagctgcaagagggacgggtgctgatcgtgccacaaaactttgtggtggctgcaagatcacagagtgacaacttcgagtatgtgtcattcaagaccaatgatacacccatgatcggcactcttgcaggggcaaactcattgttgaacgcattaccagaggaagtgattcagcacactttcaacctaaaaagccagcaggccaggcagataaagaacaacaaccctttcaagttcctggttccacctcaggagtctcagaagagagctgtggcttagagccctttttgtatgtgctaccccacttttgtctttttggcaatagtgctagcaaccaataaataataataataataatgaataagaaaacaaaggctttagcttgccttttgttcactgtaaaataataatgtaagtactctctataatgagtcacgaaacttttgcgggaataaaaggagaaattccaatgaaaaaaaaaaaaaactcgagactagttctctctctctctctctctctctctctctctctctctctctctctctctctctctctctctctctctctctctctctctctctcc

SEQ ID NO: 28858 - DNA, 652 bp, Glycine max
  Clone ID: PAT_MRT3847_12605C.1
gatgagtggcaacgctcaggcaaggataatgtgtatgaagctcaagatcagtggcccactgaactacgccgtgctcgcttaattccagccgtggactatgtacaggcacaaagagcacggggaaggctaataaaggaaataagagagtccttcagcgtggatgcattcattggcaatgcaactgactgggagaaagtttgcctaggaaatcttgttggcttaccagtcatagtagtgccaacaggacttaaaaatatctctgatccaccacctggtggcactagaagaagaacgacaattcccacgggcatttatgctccccctaaccgtgatcacattgctctggcgttggcaatggcttaccaagaggtcaccaatcaccataaacagcgccctcctatcaacgatctcgggccaaatgataagcttcctagctgattcacttactgctacttaccctctcagggttttgggcttgggtccttaagcaacttgttagaacagcttcagcatgcatattgcatatatggatgtaatcattttcacatggagttaaaaagaggtagaggagatcgagttgtaggaaataaactacttttgcaaataataacataccacattaatcttcaaatctattcttatatcacacccc

SEQ ID NO: 28859 - DNA, 763 bp, Glycine max
  Clone ID: PAT_MRT3847_126060C.1
attctctccttggtccttaaacactcatcagtcatcaccatggccaagctagttttttccctttgttttctgcttttcagtggctgctgcttcgctttcagttccagagagcagcctcagcaaaacgagtgccagatccaaaaactcaatgccctcaaaccggataaccgtatagagtcagaaggagggctcattgagacatggaaccctaacaacatgcattcagcgtggacaagcagatagcgaaaaacctacaaggagagaacgaaggggaagacaagggagccattgtgacagtgaaaggaggtctgagcgtgataaaaccacccacggacgagcagcaacaaagaccccaggaagaggaagaagaagaagaggatgagaagccacagtgcaagggtaaagacaaacactgccaacgcccccgaggaagccaaagcaaaagcagaagaaatggcattgacgagaccatatgcaccatgagacttcgccacaacattggccagacttcatcacctgacatctacaaccctcaagccggtagcgtcacaaccgccaccagccttgacttcccagccctctcgtggctcagactcagtgctgagtttggatctctccgcaagaatgcaatgttcgtgccacactacaacctgaacgcgaacagcataatatacgcattgaatggacgggcattgatacaagtggtgaattgcaacggtgaagagagtgtttgatggagagctgcaagaggacgggtgctgat

SEQ ID NO: 28860 - DNA, 1766 bp, Glycine max
  Clone ID: PAT_MRT3847_126061C.1
attctctccatttgtccttgaatataatactcagcatggctaagcttgttctttccctttgttttctgcttttcagtggctgctgcttcgctttcagtttcagagagcagccacagcaaaacgagtgccagatccaacgcctcaatgccctcaaaccggataaccgtatagagtcagaaggtggcttcattgagacatggaaccctaacaacaagccattccagtgtgccggtgttgccctctctcgctgcaccctcaaccgcaacgcccttcgcagaccttcctacaccaacgctccccaggagatctacatccaacaaggtagtggtatttttggcatgatattcccgggttgtcctagcacatttgaagagcctcaacaaaaaggacaaagcagcaggccccaagaccgtcaccagaagatctatcacttcagagagggtgatttgattgcagtgccaaccggttttgcatactggatgtacaacaatgaagacactcctgttgttgccgtttctcttattgacaccaacagcttccagaaccagctcgaccagatgcctaggagattctatcttgctgggaaccaagagcaagagtttctacagtatcagccacagaagcagcaaggaggtactcaaagccagaaaggaaagcgtcagcaagaagaagaaaacgaaggaggcagcatattgagtggcttcgccccggaattcttggaacatgcgttcgtcgtggacaggcagatagtgagaaagctacaaggtgagaacgaagaggaagagaagggtgccattgtgacagtgaaaggaggtctcagcgtgataagcccacccacggaagagcagcaacaaagacccgaggaagaggagaagccagattgtgacgagaaagacaaacattgccaaagccaaagcagaaatggcattgacgagaccatttgcacaatgagacttcgccacaacattggccagacttcatcacctgacatcttcaaccctcaagctggtagcatcacaaccgctaccagcctcgacttcccagccctctcgtggctcaaactcagtgcccagtttggatcactccgcaagaatgctatgttcgtgccacactacaacctgaacgcaaacagcataatatacgcattgaatggacgggcattggtacaagtggtgaattgcaatggtgagagagtgtttgatggagagctgcaagagggacaggtgttaattgtgccacaaaactttgcggtggctgcaagatcacagagcgacaacttcgagtatgtttcattcaagaccaatgatagaccctcgatcggcaaccttgcaggtgcaaactcattgttgaacgcattgccggaggaagtgattcagcaaacttttaacctaaggaggcagcaggccaggcaggtcaagaacaacaaccctttcagcttcctggttccacctaaggagtctcagaggagagttgtggcttagagccctttttgcatgtgctaccacacttttgtccttttgggcactagttagtgtgcgtagcaataaataagaacgaataaaacaacaaaggctttgctgccctttgttaagtataaaataacgggtaatgtaattgtacccttgtgtaatgagtcactcaagtacctatgcgggaaaatcataaattaaaagagaaatttcaatgaaaaaaaaaaaaaaaaacaaaaaaaaaaaggggggccccccgattatggaccccttcccccggggatttattccgggccg

SEQ ID NO: 28861 - DNA, 1752 bp, Glycine max
  Clone ID: PAT_MRT3847_126062C.1
tacggctgcgagaagacgacagaaggggacaacacaaacattctctccattgtctttgaacactcatcaccatggccaagcttgttctttccctttgtttccttcttttcagtggctgcttcgctctgagagagcaggcacagcaaaatgagtgccagatccaaaagctgaatgccctcaaaccggataaccgtatagagtcggaaggtgggttcattgagacctggaaccctaacaacaagccattccagtgtgccggtgttgccctctctcgctgcacccttaaccgcaatgcccttcgtagaccttcctacaccaacggtccccagggaaatctacatacaacaaggtaatggtatttttggcatgatattcccgggttgtcctagcacttatcaagagccgcaagaatctcagcaacgaggacgaagccaggggccccaagaccgtcaccaaaaggtacatcgcttcagagagggtgatttgatcgcagtgcctactggtgttgcatggtggatgtacaacaatgaagacactcctgttgttgccgtttctattattgacaccaacagcttggagaaccagctcgaccagatgcctaggagattctatcttgctgggaaccaagagcaagagtttctaaaatatcagcagcagcagcaaggaggttcccaaagccagaaaggaaagcaacaagaagaagaaaacgaaggaagcaacatattgagtggcttcgcccctgaattcttgaaagaagcgttcggcgtgaacatgcagatagtgagaaacctacaaggtgagaacgaagaggaggatagtggagccattgtgacagtgaaaggaggtctaagagtcacagctccagccatgaggaagccacagcaagaagaagatgatgatgatgaggaagagcagccacagtgcgtggagacagacaaaggttgccaacgccaaagcaaaaggagcagaaatggcattgatgagaccatttgcacaatgagacttcgccaaaacattggtcagaattcatcacctgacatctacaaccctcaagctggtagcatcacaaccgccaccagccttgacttcccagccctctggcttctcaaactcagtgcccagtatggatcactccgcaagaatgctatgttcgtgccacactacaccctgaacgcgaacagcataatatacgcattgaatgggcgggcattggtacaagtggtgaattgcaatggtgagagagtgtttgatggagagctgcaagagggaggggtgctgatcgttccacaaaactttgcggtggctgcaaaatcccagagcgataactttgagtatgtgtcattcaagaccaatgatagaccctcgatcggaaaccttgcaggggcaaactcattgttgaacgcattgccagaggaagtgattcagcacacttttaacctaaagagccagcaggccaggcaggtgaagaacaacaaccctttcagcttcctggttccacctcaggagtctcagaggagagctgtggcttagagagccctttttgcatgtgctaccacacttttgtccttttgggctctagctagtgctggtagcagtaaataagaatgaataaaagaaacaaaggcttagatgccctttgttaagtgtagaataacgggtatagtaactatgtacccttgtgtaatgagtcactcaagtacctatgcgggaaaagcataaataaaagaagaaattccaataaattttctgtcc

SEQ ID NO: 28862 - DNA, 1372 bp, Glycine max
  unsure (1)..(1372): unsure at all n locations
  Clone ID: PAT_MRT3847_126063C.1
ctcgagccgctcctatcatgtcatatcatgcattgcaagtagcaccctaagtctttaaccccttcacctcacacacacgacatttgtttctctacgccagctcattcattatattcattcaaccccatcaccaacccaacccttctctctctctctctctcttctctctctctcaaacatttagacgttttctctgtcagatctcaaggcttaacgtggtgttgggtcttcctcggcatcgcgttacccacatagttttctgggcaaaaacagagtcttttggtggggaaaatggcgaacgggttagagagagaaagtgggttgacgacgttgtgcttcgaggaggagctgaaaggcgtgaggtggtgtaggatcttcctcggactcgcgttcgattcacgtacacccacatcgttttcggggcaaagtcacactctttggagggggaaaattttcgttaatgggtaccttgaaatcacttgcgaatgcacccctggttaggaagaaggggagttgactggggcggcacgtgttggacactctggaagagagactgccaggaaatggaagaataatgtctgggtaattgttaatggtgagaaggttccattgtgtaaaacagtgctgctcaaatactacaatcaggtgtcaaaagctgcaaatggctcccatagatccgaaaatggccgggcctctggaagagagactgccaggaaatggaagaataatgtctgggtaattgttaatggtgagaaggttccattgtgtaaaacagtgctgctcaaatactacaatcaggtgtcaaaagctgcaaatggctcccatagatcccataatggtcgggcttgtcaccgtgatgagtttgttcgctgcactagttgcaataaagagcgtaggtttcgtctgaggactaaagaggaatgccgcattcaccatgatgctttggcagatgcaaattggaaatgttctgatcttccatatgacaaaattacatgtgatgatgaagaagaaagagcaagccgtagagtttacaggggatgcactcgttctccaacatgcaaaggttgcacttcttgtgtgtgctttggctgtgatatctgccgcttttcagattgcagctgccagacttgtgctgactttacaaacaatgccaaagcttgactcccttcatatcatattctctgccattttctcacttcacatcatgtggcctatttatgcctcccccctctataagaatgtttaatttgattttcctaattgcacaatcaccagtctgactgagttcaccattcattgttctcacattgactggatcataaatttcaatcttagctatttattctctttcaaaaaaaaaaaaaanaaaaaa

SEQ ID NO: 28863 - DNA, 1834 bp, Glycine max
  Clone ID: PAT_MRT3847_126064C.1
aaaacaactcaaacattctctccattggtccttaaacactcatcagtcatcaccatggccaagctagttttttccctttgttttctgcttttcagtggctgctgcttcgctttcagttccagagagcagcctcagcaaaacgagtgccagatccaaaaactcaatgccctcaaaccggataaccgtatagagtcagaaggagggctcattgagacatggaaccctaacaacaagccattccagtgtgccggtgttgccctctctcgctgcaccctcaaccgcaacgcccttcgtagaccttcctacaccaacggtccccaggaaatctacatccaacaaggtaagggtatttttggcatgatatacccgggttgtcctagcacatttgaagagcctcaacaacctcaacaaagaggacaaagcagcagaccacaagaccgtcaccagaagatctataacttcagagagggtgatttgatcgcagtgcctactggtgttgcatggtggatgtacaacaatgaagacactcctgttgttgccgtttctattattgacaccaacagcttggagaaccagctcgaccagatgcctaggagattctatcttgctgggaaccaagagcaagagtttctaaaatatcagcaagagcaaggaggtcatcaaagccagaaaggaaagcatcagcaagaagaagaaaacgaaggaggcagcatattgagtggcttcaccctggaattcttggaacatgcattcagcgtggacaagcagatagcgaaaaacctacaaggagagaacgaaggggaagacaagggagccattgtgacagtgaaaggaggtctgagcgtgataaaaccacccacggacgagcagcaacaaagaccccaggaagaggaagaagaagaagaggatgagaagccacagtgcaagggtaaagacaaacactgccaacgcccccgaggaagccaaagcaaaagcagaagaaatggcattgacgagaccatatgcaccatgagacttcgccacaacattggccagacttcatcacctgacatctacaaccctcaagccggtagcgtcacaaccgccaccagccttgacttcccagccctctcgtggctcagactcagtgctgagtttggatctctccgcaagaatgcaatgttcgtgccacactacaacctgaacgcgaacagcataatatacgcattgaatggacgggcattgatacaagtggtgaattgcaacggtgagagagtgtttgatggagagctgcaagagggacgggtgctgatcgtgccacaaaactttgtggtggctgcaagatcacagagtgacaacttcgagtatgtgtcattcaagaccaatgatacacccatgatcggcactcttgcaggggcaaactcattgttgaacgcattaccagaggaagtgattcagcacactttcaacctaaaaagccagcaggccaggcagataaagaacaacaaccctttcaagttcctggttccacctcaggagtctcagaagagagctgtggcttagagccctttttgtatgtgctaccccacttttgtctttttggcaatagtgctagcaaccaataaataataataataataatgaataagaaaacaaaggctttagcttgccttttgttcactgtaaaataataatgtaagtactctctataatgagtcacgaaacttttgcgggaataaaaggagaaattccaatgagttttctgtcaaaaaaaaaaaaaaattagtttacctctgaaaataagggctacaatgaaaaggatagccaaaaagtggacaattaggtctttgagaaa

SEQ ID NO: 28864 - DNA, 183 bp, Glycine max
  Clone ID: PAT_MRT3847_126065C.1
tgctagaatacgacaaaaggcatattcgaagatatgaacatagttctgtttactccataggaatggcagccccaacgggaacataggctgcttgagacctctcttgtgcaaatctccaccgaacagtttcagtcactgatcatatcttccgcttctacttcaccgaaaactatttcttctgaa

SEQ ID NO: 28865 - DNA, 391 bp, Glycine max
  Clone ID: PAT_MRT3847_126066C.1
ggattctaccaaacgaataaaaaagtgttaatggagacagcaaggatatttgtatcctggttcctaatagtagtagttattatttgcaattaaaatctcttcatttttctctctttattacattttcattatggtgaccaagatatgatctgttatcaatatatattcaatgacattcacagtcccgagtcctaacctgagtttaaagcttcagatcacaaccgatccaccattcaccactttctcttcacaagctcaagttactgacaggcaaatctaacaagaaaagtagtctctgaagtcgatccagtgccttgtgaatttggaattggtggtgaatgtagatctaaaagccatagcaatgtcttttatcggtacccagcaaaagtgc

SEQ ID NO: 28866 - DNA, 507 bp, Glycine max
  unsure (1)..(507): unsure at all n locations
  Clone ID: PAT_MRT3847_126067C.1
gcacgagcacattctgtgttcactccctctttcactctatttttcttctctctctctagtacttcccgtgaggataagagaagaagaccaagtggggtgtgaggcttggaaaaaaggcgtgactgtgatatggaggaggatgagattcangcatgtaagttccctanagttggaaatggtaggagtagtgaccaataccnagaggaggaagaagagggtgacctaagaanaaaaggtgttggtggtggtggtggaagtgatgctagcacaaaccacttccaccaaagtagttggcactactcttctaaaatcntaagggtgtctcnagcatctggtggcaaanacaggcacancaaagttgatgacctcnaaagggttaagaaacngaanggtttngctctctgtgaccacagcnattcanttctatgacttcaagatccttgggttacnacnacctaacaaactgtggagtggctaatccaactgctcaaaactactctgaactcc

SEQ ID NO: 28867 - DNA, 255 bp, Glycine max
  Clone ID: PAT_MRT3847_126068C.1
taaaaatactaataataatataaaaaaaagattaataaaaaaattatatactacatcaatatagaataacaactaaagacttaaatacacaatatacttttacaaatcatcaaattctcctaaaattaacaaaatcactacacttactgaatcttattacatacataaaatatatactaatattcacctatctacaatttattttattaacttaaaatattctcagatatctaatactttcatacttctaatact

SEQ ID NO: 28868 - DNA, 1262 bp, Glycine max
  unsure (1)..(1262): unsure at all n locations
  Clone ID: PAT_MRT3847_126069C.1
cccgggtcgacccacgcgtccggcgcttcagaacctatggaaactaaaaatcccatccaaagctgcaatatttgcttggaggctaatcaaagatcgattgccgactaagtctaacctgagaaggaggcaaatagagataaatgncagcatatgccctttttgcagaaatctgcaggaggatgcagcccatttatttttcaactgcaacaaatctctacctttatggtgggaatccttatcgtggacaggaatagtgggggccttctccataatccctaggcaccactttttgcagcaccaaatcgggatgaatggtgggaaacgaaacaataggtggaagtgttggtaggtagctctaacgtggacaatttggcagcataggaataagatcattttctcgaatgaatcattcaacgttactaagctgatggatgatgcactgtttttggtatggacttggctttgagcatcggagaaagactttacaatgcactttaactattggtctaccaacctaacaataggtttttccgcagattaggagggctcactagctgtggggtattaaaatttaggaagtctcacaagccatggggtcctgttgctgtattcattttgaatagggtggaccacatcagtctgaaaatagcctgaccagtggaaccactagactatttcatatcaccttgtaattctagtaccactggtactcatcatataatatatatacatttcttttgctgataaaaaaaacagttatacattgacatactgatacccccctcaaactcaaggaggagagttttcattggaaacactcttcacattgagtttgcctctcagagcctcaaatcttgatgcagacaggggtttagttagaatttcagcccactaattcagagctggaatatgaacaattgagagctgcttggccaaaatcttttctctgacaaaaaacacatcaatccccatgtgttttgttcgattgtgaaaaactggattgtgagcaatagaaacagcactctgattatcacaaaatattactggagtagtgaaagaaacttataactctgtcagaagggtataaatccaagtcaattaagtggaagtttgagcaatgctgcgatattcagcttcagtactagacctggcagttaccttttgtttgcgagaccaccaagagactaagtttggaccaagaaaaatggcagtccctgaggtggagcgcctgtcatccacatcagatgcccaatcagcatcac

SEQ ID NO: 28869 - DNA, 272 bp, Glycine max
  Clone ID: PAT_MRT3847_12606C.1
ctaacaataacaaaactcaaattatatagaaaaagagatgattaaagcgtgtaaaactcgaatttcgaagggaaaacaccaaatacctatgggctcaaaataggattccagaaaatggggcaaaaataagaggagaacagggaaaattagcgggaacggggggaagacaggggggggtttctcttccagggtgcgctgggagatggagcggctttgggggacagatggcctttaccacgtaaacccctggggcttttaccaggaggagggga

SEQ ID NO: 28870 - DNA, 265 bp, Glycine max
  Clone ID: PAT_MRT3847_126070C.1
gacccacgcgtccgctcgggtactctaaatcgtctggattcattttattctccttgcactctgacatggaacgtgaggtagttatgataatagtctgtccaagtccatttctgatgaggatcacgattgcactagctgcataacatatcaaatcttatgcccaagactactacttgatgaacaccagtaatcttatactgcacatgaaccttgttcactagaagattcactattctcatccacaatggcaaaaccatatgcgaat

SEQ ID NO: 28871 - DNA, 345 bp, Glycine max
  Clone ID: PAT_MRT3847_126071C.1
atggagggaattaagtgtttgttttttgtgctgagagtttggagatggccatgcatggcgcagctaccaaagttcctgtggaagaaaatttttgggagcgttttggagtaaaatgcgcaagttttaggcttgtgggaacaacaacatccgacctttaaacattctgaaaggcgtgaaccaacaaagatacataatgcaacaatttaatagacttaaaagtaaccaacagctttttatgctatgaacgcgaagtcatacacgactattatattggatagataacaccgtctctctaatatcatctatgaaaaaaggatatgggggagaattaatgaaacttatatg

SEQ ID NO: 28872 - DNA, 495 bp, Glycine max
  Clone ID: PAT_MRT3847_126072C.1
gtctatcagaaaactagccgtacctgagttagttaactgtgagaaacagttaactaacctctgattacaagagatacaaaaactgagtaaaaaacacttagggagtaaaatactactctcttataccttaggacaaatatatgtatctcacacttcatgaatgaaaaacagaacttggatattgagttttgggatttttccagttggagagaactgactctcttgggttcttcattgagccaacctctgatcttatcaagggaccttaacccttgtggcgatctcttcccccagcttatccattctcctgaattgtggcaccctccgtcttgactcgtatcatttgttgtcacattggctacatatttagaaataactcaatgggcattgtggtaaataagattagatttgagatgcctatgtatttgacaagtaaaattgagcatttggagctgaaattagttttatcaacagcatcttgtcctacctaggagc

SEQ ID NO: 28873 - DNA, 262 bp, Glycine max
  Clone ID: PAT_MRT3847_126073C.1
ctgcggagaagacgacagaagggacctttaccaatatatcaacatcatctctggttatcacacttccttcaggcctgggaatcctatccatctccaacagaatgtctttcaattcacatctacaaagcaaaagtagattacttacattctgaagaatgagaatatttcaaatcacatcttaaaatttaatttataacatgccttcccctcttaaaacaatggccagaattaattaaatactttttggatttattgaataaaa

SEQ ID NO: 28874 - DNA, 466 bp, Glycine max
  unsure (1)..(466): unsure at all n locations
  Clone ID: PAT_MRT3847_126074C.1
ggctgcgagaagacgacagaagggtattgtctctttccctggtttgccacatataaatacaaaattcaatactgatgttggatttactttacttgaaaagagattttagtatttatctatttcacttcactcaaataataaatattgggtgcttctattagtgcccacattattccgactaggtattgaaataatgttttatgttaacgctacaatatttgaaaattgaagatttagagcatcaagataagaaagtcatcaatggtggagattaaagatgaaggttatcaatggtagagaacaaagaccaaagccattgacagtgaagatttangagaagttggtaatggttatggatagttaggaatctttgtttataaatattagacttgtactcagtaataaaggttgaaacttgtaaacacccacatatcatcttgtccatggtcacgatgcttagtgatag

SEQ ID NO: 28875 - DNA, 615 bp, Glycine max
  Clone ID: PAT_MRT3847_126075C.1
aagatattctattaaccaatatagtgtttctctttgtcagaacttcccttttgttcttaggttaaagaactttttaatgttggttctaccgacaggttgcggttagggtaaagttcctctttgtctactttacttgtttttaagatgattcattagtagattcatatcaataagtcttgaagaatggtggttgaaagccatctaggttaggagatttgtatgatttcatggatatgatagcattcttcatctcatcaagagtaaccaaagaaattaaagaaaaaggtgttgcttgactgagtgagggaatgtttctaacctacggagactcatgagaggaagcacaaggcaagcaggaaataccacaaaaatactccttagcatgtacccccaaagcttggggatcattgcaccattctttagactcaataagaataggatggaaatggttcctcttgcgtctagtcttggtttggcaatgatatagccaagtatttttgtcacccaatcttatccattgttccctagattttttataccaaataggcttctattgatgttgaatctccttatactcatcttggagttgcttttccagaataaaaaatactcttt

SEQ ID NO: 28876 - DNA, 1313 bp, Glycine max
  Clone ID: PAT_MRT3847_126076C.1
ccgcgggtctttcaggggtctctgcgcctggtgcccgggcgggtgtccaggggacccgtgcttggtgccgctgagtcgaggggtctgcgtggagcccacgcgtccggcctctctttaaggacgtcctatttgctgctcctgctcatgacaacactggttcagctgttgctgcaaatctctcactaacccgtaattctcagcaagaatctgcaccatcaggttattttccttgcagggagcatgatgtgttgggaaatttagaccatccctccgaccaggattttgctaggactggaccaatactaaacagagggaagaaaaaggaactgctgcttgatgatgttggtgctagtccttcgctgagatctgcatcaactcctggtagttctttaataggtggagcaaagggaaagaggagtgaacgagacagggacaaagactcttctggaagaaattctgtttcaaaaggtggtcgttcttctgcaaagggtgagcgtaaaacaaaagcaaagtccaaaccaaaaacagctcaactatctagttctggaaatggatctctaagcaagttaatggtaaatactaactcggagaatcaattggcttgtggctctaatgagtttgtttccggtgatggcaacagaaaaagtaaagttgggtctgtatctcataactataatgctaatgatttgtccattggaactgaggaacccatagacatcacattagactccatagaactaggtgtaggtaatgaacttgatggatctcaagacctggattcttggttgctgaacattgaggaagatggtttgcaagatgatgcgtttggcctagacataccaatggatgatctgtctgggttgaatatgcttttatgaagacgaatgcaatatatatatgctctcaatcccatgcaggatttggtatttatgaacagtgctgtgtcggtggaaagctgcatatacaattcatgcctctgatgactggaacttgtaattatgcccattctttttgtatacttattatctaccataccaaagatagaaacccaaagaaaggggtaaagaaaaagaaaaatgtagtcaattgttcatatgatctagagctctttaggttgtaactactacattcttcaacaaaattttgatcagaactaagtgtaggtgatgaacttgatagacctcaagacctgcattcttggttgctgaccattgaggatgatggtttgcaaggtgatgcgattggcctacacataccaatggatgatctgtctgggttgaatatgcttttatgaagacgaatgcaagatacga

SEQ ID NO: 28877 - DNA, 160 bp, Glycine max
  Clone ID: PAT_MRT3847_126077C.1
attcggggggcgcaagaagtcaacgacaaccttgagtccctctttcaaattttggatcaaatcgaataaaagaaacctcttcgaatatcgagagccatgttttttttccaatatcagtgttcattcttacaaacggggcgtataatagggaactaggtca

SEQ ID NO: 28878 - DNA, 148 bp, Glycine max
  Clone ID: PAT_MRT3847_126078C.1
gggccgctcaagccggccggccaggaatgcgaatagcctcgcttcaacgtcaccgactcagttgttgtcagcgagtgagtgagtcgtttctctgcagcaacaaggtttatgtcactccaaacagacgagaaacgggtcgtgggactat

SEQ ID NO: 28879 - DNA, 278 bp, Glycine max
  Clone ID: PAT_MRT3847_126079C.1
agcatacatagttgtttttacatattaacgcatatatggggcaggagtgcttaagacacgagtctacaaccattacggcttaacccctaaatgcattaaccaatactatctaacagctatgtatccatccatcatagcatactttttatacatgcccccagagccatcaagctatctaagaaaattaagtgcgacaaatgcctaggatgactatatatccacttctttaacccctaaatgtaaccatacttttccagccttatgcatacaaaatatac

SEQ ID NO: 28880 - DNA, 197 bp, Glycine max
  Clone ID: PAT_MRT3847_12607C.1
acacactcccgtgaaagacgcccatagtgtctaattaaagacgtccaatgaggaacgatatactatcgagtcccataccttcagcaaccgtcttgctataaatagacccaccattcccaacgattacctcctggcctacactaataccccctacgctcaccacaacggtgcccataacggttaccctcatatccccg

SEQ ID NO: 28881 - DNA, 251 bp, Glycine max
  Clone ID: PAT_MRT3847_126080C.1
aacaaagatgctcgactcacgaaaaccacaagccttcttaacgttgtctccgccaccaagaggccctcttactactatgccatctaatcatctacttgtacctaacgatctctaaatgacaactccgttaccctacaagcattcactaacatcgggagacaccattacctatataactttctcctcagactcaaagaccccaaatactaggattatatctacacctttgaacgactctactatcctaaaac

SEQ ID NO: 28882 - DNA, 913 bp, Glycine max
  Clone ID: PAT_MRT3847_126081C.1
tagagctaaatgacttgaagatacgatacaggctcgatggaccacttatactccatggaatcacatgcacattcaaagcaggacacaagattggaattgttggaaggacaggcagtggaaagtccactcttatcagtgctttatttcgtctagtggagccggcaggtggaaaaattgtagtcgatggcgtagacatatcttctatcggccttcatgatttgaggtcacgttttggtgttatacctcaggatcctaccctttttaatgggactatcaaatataatttggaccctttagctcaacactctgatcacgagatatgggagaatcctgggatcattcacatgcgagaaaccgtccaagagaaacaagaaggcctgttctcttttgtcgacattgttagatctctctcgagcatgggacaaaggcaattgttttgtttggggcgtgctcttttaaggagaagtaggatattggatgctggatgaagcaactgcatcaattgacaatgcaactgatttgattctgcagaaaaccattaggactgagtttgcagattgcacagtgatcacagtagcacacaggataccaaccgtgatggattgcactatggttctctcaatcagcgatggaaagttggtggagtatgatgaaccaacgagcttgatgaagaaagaaggatcgctattcaagcagcttgtcaaggagtactggtctcattttcaatctgcagaatcacattgataatgcaaaatattttgtttttgttgctgttttatgacaacgttgttgtctatctttctttgatattagcataaaaaatgagtcaacaaagttgtgcgtggaataagaaaatgttaagaaccttgcgagttacgtttcaaaacagaatataaactagaccttgatttaa

SEQ ID NO: 28883 - DNA, 431 bp, Glycine max
  Clone ID: PAT_MRT3847_126082C.1
cggacgcgtgggcggacgcgtggggccgatggaaatcgccgcctgcctggcttacgcgctctccgtgtggcttgccgcgcgcaacaatgtgcatacgtggtggacgggcattatcggctgcgtgctctacggctgggtcttctactccgttcagctttacgcggatgtcaccctgcaactcttctttatcgtcagcagcattgccgggtggatcaactggctgaagggcaatcacggtcagcaactggcggtgcgcaaaacgccgctgcaacatatagctttcctgctggtgggcgcgctgattgtcgcgggcggatatgcctggctactgcaccgttttaccaacgcctggtcgccgtggctggactcggcgattatggtcttcagcattctcgcgcagtttatgctgatggggcggcggctagagagct

SEQ ID NO: 28884 - DNA, 1536 bp, Glycine max
  Clone ID: PAT_MRT3847_126083C.1
ggcgtgatgcgggtgctgggctaggcgaatggaatgctgactgtgttgttggagaaagggtttttgccaaatgatgttacttatgctcatttgatgcagggttatgctcgaaaggaggaggttcaggaagttttaaagttgtattatgaaatggagtacagatgtgtgagtcctggattgtcggttttcgggacgattgttcagtgtttttgtcgttgtgggaaggttgaagatgcagagaagtatttgaggattatgaaagggcgtttggtgaggccagatgtgagtgtgtaccaggcgttgattgatggatacatgaagaagggggagagtgctagggctcttcaccttcgtgacgagatggcttctttggaggtgtaatgtgacattgttgttgtgctaaagagtggtgaaaggaaggtagtgcttgttgtttggtgacatggcattttctgcgatgtagaatgccaaattgatgatatagatatgttatttcctgaaacaaaatgctgcatcaagaacagtggaaagttgtgaaatgtggaatgggctgatatttataaattagatgtcatgatgcaggtgcttggctattattaaggttttactcatttcagaagtgattttgggaaaattgattggaagagtgtgagaagttgttaatgtatgtctaaacgtacagataaagcagggaggtttagagactttgggcatcctgagtatgcaacggaagaggcaacacaaaatgtatgcaaaggaaaatattaatatttataaaaaaggacaatattaatcatgtgctaagggggtgctttctagccaaagagatctggaccttctctctaggagtatggtggatcaatttattttttctcccaatgtctttgcatgtggatgagctccaacatcaatattgcaaaaagacagggtgtgaatcggagcctatatttgctgttgtaattgacaatttctgggaagcccgaaacaaccttattttccaaaacaaaagtacctatgcgcagtggctctgcaaaattattagaactcgggtgaaggaaattatcaaggcctatgacacttttggcttggggaaaagtttgaccaaccttggcaatatggggtctgatcaaataaatatcaagtggaaaaatcctccaattggaactcacataacaagctcaattgtgatacaacaacccgagtaggaaattataaagcaacttatggggaaatcttcgaatatcatatagtaaaatttattttttgcttattctgataaacttgagttttgccccctttgtgcaagttgagctccggatatttggagcatttgtatagagatagagaataaacacaaaaacacttggaagttggtttgctgttcttcctttttcaaacccatgctatggttttgaaagaatcaaatccttataaactaactcacaaggtaaaattaattaatgtaatcaatggagaatccattatgaactagcagattcatttttaaaaaaaaaaaaaaaaaaaactcgagactag

SEQ ID NO: 28885 - DNA, 561 bp, Glycine max
  Clone ID: PAT_MRT3847_126084C.1
tgagtgtgttacacttttatttggttgtttactgcgccttcaagttgcttccacgcttcctgccctcttttttgggcttctttaccatcaaacttttatcattttgtcaattgtatgatctaagttttttttttttttgaattttatcacatgtttttagttttctcgcattatcaccaaataatgtcactaatttttattttttaaaaaatataatgatgttttgttatcagttttggtaaaacaatgttattttgttatgaatgtgataataaaatgtgtgaaaaaaaattgaatgataaaatgtgtgaatattgaagacttggatgataaaatttgtaaaatgatgataattggataataaaatatacagttaagcctacatattaatgatagttggttatttctttgtcaacatttcataactttcagttctaaattcaaaactatggctattggaatgttagaattcatcaacaaattcggtaaattaaaattttcccatgttctattttacattattatgaaaataattatctgactatgatcacaatttataaa

SEQ ID NO: 28886 - DNA, 291 bp, Glycine max
  unsure (1)..(291): unsure at all n locations
  Clone ID: PAT_MRT3847_126085C.1
gtcgcatgcnagcgtacgtaagctcggaattcggctcgagnaggnatattagatnagataaaagagaagcttcctggtcatcactccaagacagaggaggaaaaggannaggaanaggngagtggtgctcatngatatttangattgagacanggcttttttnttggntggagnngcatgattgtggtntgctttgttttcantcatcatatgacagccttgtgggtttcttnggngtttcttgatgcatacttaatttacnttatnatngngnanttatctcgccattgn

SEQ ID NO: 28887 - DNA, 387 bp, Glycine max
  Clone ID: PAT_MRT3847_126086C.1
gcccaggcctatctgcaacgcctggagcaggaaatccagttgatggcctgccacctcgacccgaaacagccggtggagcagttgcactttggtggcggcacgccgacgtttctcagccacgacgaactgcgccaggtcatgacaggcctgcgccagcatttcaatttgctcgatgattacttcggtgactacggcatcgagattgacccgcgtgaagccgactgggcgaccatggggttgctgcgtgaactgggcttcaaccgcgtgagcatcggcctgcaagacctcgaccccgaggtacaacgggcggtcaaccgcttgcaaagtctggaagaaacccgcgcagtgattgatgcggcacgcaccctgcagtttcgctcgatcaac

SEQ ID NO: 28888 - DNA, 126 bp, Glycine max
  unsure (1)..(126): unsure at all n locations
  Clone ID: PAT_MRT3847_126087C.1
atatatcacaccccctactgctatctcttctcacttattgataaattnacactgacagcaattttcaccatctccttggaggctccctttctacaatccaaacattcccacacccatacacctatc

SEQ ID NO: 28889 - DNA, 239 bp, Glycine max
  Clone ID: PAT_MRT3847_126088C.1
aaaaaaaaccaatttttggggcaacttttaaaaaatggaacaaatttggccctgtttggggtgacacaatctggggggaaacgggaaacgggtttttttacaaacccctggggggtggggggttaatgggtcagaggattctttaaatgtgtttttacgggggatccgttttcaataaagacccccccaaaatttcttttttaattagaaagggagggggaattttttttgtttggaaa

SEQ ID NO: 28890 - DNA, 1858 bp, Glycine max
  Clone ID: PAT_MRT3847_126089C.1
agtaaacgtagtagtatgcctaaatatgtagtgaaagatatgaagccgaggacaagctgtttttgtcttttgtgggatacgaacgttgagtaccaccccaggatttgaggtgctggagagaagggataaaagtgtatggtatgggggcgtggtgaccgagggctcgaaaggaggaaacttttggctacagaaagtagtttctttagtcgggtttctttcaaaaaatggtgcagagtctctgtttgatggcttctcatggttaccctcctggccttgtcttgcatccacaagtactgggcttgccctgcagtaccatgaagggctaccaaacattctttccttctccagtagcaaaagcagacctgatcagatatcagtctccttgtcttgatccaagtccatgtgaggagtcaacgaaatctcaaaatgaatggtttgattataagaagtttgtcaatgttgacttctcagttgaaaggcccatgcttattaatgaccaagctaactgctcaaatgcagttctttttggctttggcattgttgaacaatgctctaagcatgatgaaattttaaaggtgctaatgtctgagactgctgaagcagggatagatggagggaatttatccttgttatcagacttgatgaaattgcagttgtcaggcattgatgaaacccagcaaccatcatcatctcttatctacccaactggaaaattcaacatcctaaagcattttctgtattttgttcaaggttcagccctttcatcaaagatcacggttcatccagatggtcaaatgacatttatgggtaccgcaattgagttgaaagatcttctctctgtagttgctgagtcatacttatcaaaatggtcacgaaaggatgaaaagcaatctatgcttgttccacaacttcagttgggtgaatatcaatgaattagagagaaatcattcctccacattgaagaatcaatccaccttaactgctcctttaaagagtcctgagaaagtcaaactcaagccatcaccaagaaagaacaagaaagtaggcagggaaagggatctctacaagaactcttcacatgcttgtgagacccttctgtccctgatggttgacaagaagcaacgtcgtaaaacagcaattctctcactgaagaaatccaggcctgagcttccggagctcctgacacaattttctgctggcattgccggtaccggccttgcagtcctgctatctgtgatgtgtaacctagcttgtggaagggctaccttttgtacttctagcttgttcaacaccgggtttggacttgggttggtttggctttctggggtagtaaataagctaagggccacaattgtcaacatcagcaagaatgcaggaaagttgggtttgaaagaagaggaaatgatgcaaaagctggataagagcataagagatatttactatactgctgcagcattgctagcagtggtagtgctaaggcttgcttgagtaacatctccaaagatgtagttatttctggctggttggatgctacagtgatggcttttggtgaaagaaagcaaatggcaaagcaaatagtaagaatcaaggttcaaagtagttccacggtgagatctttaaggcaccaagttgatcagctattgggtgttgtagttaatttggtattttcagttaacccaggaagcattgtttggttttgtagttagcttgtaatatagtagaattttgcaatggaatcaataaactgactttctttattacttcattttgcaatggaatcgataatcggactttctttataggccaaaaagaaaacacagcaaagcccattttttatgtaaaatgagatcatgaaaaa

SEQ ID NO: 28891 - DNA, 240 bp, Glycine max
  Clone ID: PAT_MRT3847_12608C.1
ggtgtggttgctaaatagagcttgctggtcatgggagtcttcagaacttcaattttagaaaattattctttatgtcctttaatgatattgcaaattgtaatcgatctcctttctaacatttcagtgaacaaggatttgtctacaaaggaaaatttgttcagtttccatatttatattcgttctattgtaatacaacctccgtcttcacattttatataacttatatcatgctcaattcgt

SEQ ID NO: 28892 - DNA, 944 bp, Glycine max
  Clone ID: PAT_MRT3847_126090C.1
ttttttttttttgtttccttgtttctctctgctcttttttgttgttagaagaatgtttcaacaagtggatattaatgaggcaaaaaggttaaatgaatctgttaagtacagacgttgggtttttaccaatattatcgctgaatttgtaacctttaaacataataaggattgctaagtttttcaacttagctagataaaaaaaaaaaaaaaaagtaaaaggtctaaaaatgctggagctgacaaattctcccactcgtttcctttcttattaagttccaattcgagattaaattaacatgagcaatcacaggattgacatccgaacataaagattcatcccttgccaactgagttaagagacttctacccaagatacctgtgatgccatacctaccctcttctctccaatttgtaccacagaaagcaatcctttgaaagatggtgctagtaacttgaactaatcccatatataagctttcatgtcttggaatagaccctcataaaatataggacaaaatcttagtcaagatccatgtgtagaggactgatagagtagctccaactggaatagtaaccacccatgaagccacaatctccttcacagtttctgatctaacactgttaagtcctcttgcaaatccaacgcccattactgcaccgactagagtgtgggttgcagagatgggtagtcccagctttgaagcaaacagaaccacagaggcagcagcaaactcagctgcaaatcctctagttggtgtaagttctgttatcttctttcctattgtagctatcactctataaccccacatcattagccctgcaacgatgccaaatcctccccaagcaagaacatcagttggaatcacaatctcagttcctgcggcaccaccttgaagaatagctagcgcacccgcccggacgcgtgggtcgtacccgggaaattc

SEQ ID NO: 28893 - DNA, 764 bp, Glycine max
  unsure (1)..(764): unsure at all n locations
  Clone ID: PAT_MRT3847_126091C.1
gcaaagaactcatgtttaattttgtatttccaccaaccattgggctaagccaacaaaattttacttacacaagtttacaaatttacatatctgccaacaacaaaatggagatagtattgttgtgtcaaaatagaaaaagataagatacttgtaataataactcaaataaaaggaaagaaagaaggaaaaaaagtggtgtcagcctaaaattgagaccatactcagaatgtttgttagtaataataattgtcagcagcactgcatcatcagttgccatagactgtgacagtcaagtagactggaagccactaaacagaaagcaaccggatttgttgttcgtactgtttgtatgattggagcaacaggcagctaaaaggcacctattctaaaaaacagaaatgaccgccacaaacatcctcaccacactttgcaagtattaacctcaggcacaagaaggccctaccatgagttggacgggaagattggcagacaaagagattcatttagttaaaatcatcatcaccctcccagcattttcatcatagtgtgagaacttgagccactagctcttgaatctcctcctttcatcttttggcaaaataatagacccacaacatatcaaaataatatctcataggcccctctcccaagttcctaacacatgactttgcatctcttttaggggccagcagattcttgtgtagctaaaggcaatttgnactgggtgccaagacaagctaaaaccttggccacttgctaatttc

SEQ ID NO: 28894 - DNA, 389 bp, Glycine max
  Clone ID: PAT_MRT3847_126092C.1
ttttaatatatttattaaacaagtacaattcaatacaaacaatttcattatatgtcatttctttagatttgtctgagtcatatccagtctttatgttatttaaaaaattacaccatcatttttattattttttttccttctatgcagggtgcgtatttgttaattttctgatatcaagttaaaatttttacccaaattccaaatgcccgtttttatgaaaatcagaatatatttcattttataacttagccttgcatagttgcatttgataacacgtgcatgccatggctgacagtcatgtctagcataggcttgacttacattatacaaaaattgagaatgacatagtgcaccagaacaagaaacgaagaattaagagtacaaacaga

SEQ ID NO: 28895 - DNA, 1122 bp, Glycine max
  Clone ID: PAT_MRT3847_126093C.1
tacggctgcgagaagacgacagaagggcaccccaagaagaagaaggaggacaacttgtggaacaccagagtctcttcacgtgttccccgaccacgctcttgaacggccttgccaggggtgccagaggcatgcttggtcgtggtaggtccgcgcattcgtttccttcgcaggttttcgacaacttcagcacgcaccgtagactcaccctctgtctctcctcgtccaaaggggttgacctcttgggcaacgtggccacctacgagtccgaggttctcaaatctctcaccttcacacgacaaagaacacttgtttaattgtatttccaccaaccattgggccaagtcaacaaaattttacttacataagttacaaatttacatatcaacaacaaaatggagatagtattggggtgtcaaatcagaaaggataagatagttgtaaataactcaaataaaaagaagaaaaaagtggtgtcagcctaacattgagaccatactcagaatgtttgttagtaacaataattgtcagcactgcatcagttgccatagactgtgacagtcaagtagactggaagccactaaacagaaagcaacaggattggttgttggtactgtttgtatgattggagcaacaggcagctaaaaggcacctattcaaacagagatgaccgccacacgcatcctcaccacactttgcaagtattaaccccaggcacaagaggccctaccatgagatggacgggaagattggcagacaaagagattcatttagttagtcctgccaataataaaatcatcatcaccccccagcattttgatcatagtgagagtctcagccactagctcttgaatcttctcctttcatcttggcaaaataatagccccacaacacatcaaaataatatctctaggcccctctcccaagttctaacacatgactttgtatctcttttaggggccagcagattcttgtgtagctaaaggcaatttagactgggtgccaagacaagctaaaccttggccactggctaatttccagcagggttgcattagaaccacgatagtgccaccacttgtcattaaccaattagcaatataaatcccctgaaatcttaaaggggac

SEQ ID NO: 28896 - DNA, 344 bp, Glycine max
  Clone ID: PAT_MRT3847_126094C.1
agcagggcccccaagggcaccaggatttgtttcgggtccagttccaaattttggaacaccgatggcgcaacaacaaccgccggcggaggcgaccagagtttcaatttccgccagtcgggggacccgccgccgaagttgatcggccacttctttaaaaggcaggaagcctccggcaggatgcagttggccatggatttggagatggaggacctgaaccccgaaggcaacaccggaaagtaaacgccgggggttgaatttccgttgactaactgggtttgaggggagctaaaggtttccttgggggaacctacctgcattgggaatttcctggaagcgcaaaacaa

SEQ ID NO: 28897 - DNA, 296 bp, Glycine max
  unsure (1)..(296): unsure at all n locations
  Clone ID: PAT_MRT3847_126095C.1
gaagtcgcangcacgcgnacgnnagcgcggaangcggntcgagntacacagnacananacgagaagaannnnggcngnnatnctcnactagtnnnnagncnngtnncnnncnangcannannnnnacagnttagncganncaggncacnnctananaancgatanancnngangntcnanccggacaaaatggagggagcaagaggggagaagggaggnagnnggnaaaaaangaacccnngcgannggaagaggcnggannaggnggacgnnaggggagagtgnggngggggnga

SEQ ID NO: 28898 - DNA, 694 bp, Glycine max
  unsure (1)..(694): unsure at all n locations
  Clone ID: PAT_MRT3847_126096C.1
ggctcgaggttctagatcgcgagcggccgcccttttttttttttttttacacacatttataatttcatcaaattttcataaaaagtaaaattgttcttcaatattaagtctcctaagtcctaattaataataacattatagtaataagtaatgtctaacaactaacattaacacctaccacaaccaacgacggttaaaattaaaaggaaaaaaaatgtacacactaactccgggccccactgaaacaggtccatttggtccaacctcttctctaactatgactcttttttttttctaacctgaaaaaaaaattcaaaaaccgggaagcgacggtggcgaagcggtgtcgggctcaggcacgtcctccttcttccgccgcatctcgaggacctttcggtggtggttggagtgcaactcgctggagaaagtagggctacaggcgggtctatattcgggtaataaccgacccgacttgtagcggaccccacacgcgttgcacagagtcttagccccgagcggtccgggggcgccactgcggcgttttctgaacgccacagtggctgcaccgtcgcgccgcgccgccgtccgaagcggtccgcttcttccccctggagttntttattttctttgccataagctttttttggaaagaaggcaatcttgttcttcaaaagattttcccaagccttcccac

SEQ ID NO: 28899 - DNA, 669 bp, Glycine max
  Clone ID: PAT_MRT3847_126097C.1
aaaaaaattaaatttattaacactcaaattaactgcttgttggtagttgtaatctaatttcaagttatttgaataacaatttatttgtttattttattttagtcatttaaatattttttttttactctaatccttgtgattctttttgttttaatctgttatcaagcaatgatatagtaacaatgttttctaactcattaatgaagagtttgaccatcaattgcatgtaattttttatgttaaattatgttttttaatccttatttagttatgacgtgagaaaataatatatcgtcaataacactattacataatctattaatactgttatttgacaataaaaactaaaaccaaagattctaaatttcacatgattaaaataaaaaaaatctttaaagaacttaaaaaaaggtattttatatagaccaattagtcttactctagttttgaatctcgatatttatctcaagtaaatttatttcttacggaagatatatgttaaaaaacattaattgacattaatggtatttataagcttgtttttttggttatacaaaacacaaagagcgtcaaccaagcaataacattaagtaatccttggtttcgttgaaactaacatcattgaactaacatatacacacagattgcatcggtcctctctcttttttt

SEQ ID NO: 28900 - DNA, 490 bp, Glycine max
  unsure (1)..(490): unsure at all n locations
  Clone ID: PAT_MRT3847_126098C.1
tacggctgcgagaagacgacagaagggtagtgatgtgttggaattaaattttgatatagaaagcttagacaccaacaccaacttggtggttgaaaaggtttcaatttcaagtaacaaggatgttgctattgctaaggagggtagcgaaagttcaaccaataacaaactggcttcagttgggcatgcaatgcaagagaggcattgctcattgaggttctcttcacataacacaaaattcttattttccaagcgtagcaggagccagagtttaactcttccattgtgaactagaagccactgaggatatattcacctggcaaagtcaagtaaaaattctaaaggacgttcttctgtgtgaatttatctaagttttcaaggtatatatagataaatgattatttgtatgaagcattgntctatatttgtctttccgtatttcatttacattagtcgtgtgtttcagtatgttaattaataataaccaagaaat

SEQ ID NO: 28901 - DNA, 285 bp, Glycine max
  Clone ID: PAT_MRT3847_126099C.1
cccacacctccgcccacgcgtcctcccactcgtccaaaaaaaaaaacaaaacggtcgagatataataaaaaactagtatacaaatataacatatcattcactactcccaagttctacaacatactattttaactatcttaattatgctatttccctctatagatcaaatatacttttacacattcacatctttattcacaataaattctttatctccgcccgatatatcatcctgcttcgactcctctattaccactactacaagtcttacatcatcctctaata

SEQ ID NO: 28902 - DNA, 372 bp, Glycine max
  Clone ID: PAT_MRT3847_12609C.1
tttttgttcgtcgatccaaccctgaacccaggtgtttggagaagttttatcagcatcttgccctatccaaccctatgggctgagacatataattccagtgaccgatatgctaaccatgacttccaacgtggaatcggaataccgatgcctgaacagttggatgctatttccgccagaccaatcaacgtcatttgaggaagtcttgatatctccgatccacgattggcattcgcttaagatggttgagagtgtggaaggtactgcgctgaggtgggcgaatgctgatcctccaggggcggatggtgctgagcctagcagaccgattgcaccggcgttggtggtattggggtaggacggactggaatggtaaca

SEQ ID NO: 28903 - DNA, 514 bp, Glycine max
  Clone ID: PAT_MRT3847_1260C.1
cccacgcgtccgggagtacattgtttagatgcaaacaaatatattggggatctcctggcagaatttaaagctgcaaaggatcggagtaaaggagaaatcttgcactgtaaactgatattcaagaaaaagttatttcgtgagtcagatgaagctgtgacagagcctatgtttgtgcaattatcttatgtacagatgcaacatgattatattttgggaaattaccctgttggaagggatgatgctgctcagctttctgccttacaaatcttagctgagattggatttcttagcacaccagaatcatgcattgactggaattcacttctggagcgtttcctgcccagacaaatttcaatgacacgagcaaaacgggaatgggagtatgacattctttctcgttatcgttcattggagaatctgacaaaagatgatgcgcgacaacaatttctgcgtatattgagagcacttccttatggaaattctgttttcttcaatgttcgcaagattgatgatc

SEQ ID NO: 28904 - DNA, 479 bp, Glycine max
  unsure (1)..(479): unsure at all n locations
  Clone ID: PAT_MRT3847_126100C.1
ggtctcgcggatggcaccgccgctcaggggggttccacaacccccccgcgtcgtccccgaagccgcgcgcttctgctccgatggctgcggcctccgctgcgccgtccgccgcccccgttcgcccgagctcccccccgggcctccccccctggccccctccctttccccctgcccgccagccgctcggtaaggggtcccttcccttctgcccttgactgtccctcatttccacagtgcgctagccacactgatggcgttcgcagcgcttctgtcatttactgttcctgatatgaacagtacagtaactaaattaatggcgttaggagctgaactagatggacccatcaaatatgaggtccatggaaaggttgcagctatgcggtgtattgatggacatatcttangcctctatgaacccgtgtaaagatacacataacataggagattcagtatcaacagtaccctcttttgtcatggtg

SEQ ID NO: 28905 - DNA, 468 bp, Glycine max
  unsure (1)..(468): unsure at all n locations
  Clone ID: PAT_MRT3847_126101C.1
tccacgcgtccgctcactcatcaatctcgtttgttctcactaactattacttcatcatgtcgtcgagcacagttggtcaagtcatcaaatgcaaaggtgactgactcatccacccttcttctcagtctcatcttattttcatctcttttcagttttgatgctacacatgccatagcatattagcatcccctgctgaagtttttttttctaggaaaagtatttgcttttttaagttcgtttctgttatgtatggtcactcgaattttaagagtgaaccaatcttagtcttgacactttttttgtggggtacataaacttgtatttatttttatttctgtaatttagaaaatataacgatccttttccttttctctgtatctaacttgggtcgttatttttcttattattaaaaaatgttaattgccctccattctaatcatattgntttaaagggcttaatgatataca

SEQ ID NO: 28906 - DNA, 308 bp, Glycine max
  Clone ID: PAT_MRT3847_126102C.1
atgagacaaccgaaaggaggggaatcacattgaatattcacattataaccgctagtattctttttatgaagggactaaacaatttcatcattcatgacaagagcgacttactatttaatctcgcttcactcacttatttacaattttaagcgttccaaagtcctaattccttatgtcaaaatctcctatgtgctcttcaaacgctcattctctcttaattcatcttaaattcctgcgtatctccaattctatgtctctcttttctaaatgggcattcaaagttttacattttgttcacaattatatta

SEQ ID NO: 28907 - DNA, 784 bp, Glycine max
  Clone ID: PAT_MRT3847_126103C.1
ttaaaatttagtttttttttttataaaaaaaaactaatgtaacatacaatagaaaaagtactaacataaaaggctaacttaaagacatagataaacaaaaaaagctaatttaaaaacatgggaaactaatgtagaacgataaaagccacgcgattcaacaaggccatgaaactattagtaacttacagattataatgtcagtcatagtctaattattatttattttgatgtagtaaataatatgatcttagttttattgatttatttaattaacaatgttattattagtattatatatatatagaaggtctaataagttttttttataagcctaagtttaatctttttaaataattaggtctttttaaaagttcaaacctagcatttttattaaataactaaggtcaggtcatattttcacctctaattgtaagtgtaaattaattttatattaatcatataatcacaaaccatcatatgataattgtttatgataattgtgttaacttttataataattatcttaaaattcatatcaaatctaataaaattaatttacattatctttgttcttaattactatatacgtatttcatgagttgtagttttctgctgttaaaatttgggagaaaatggtgaccaaataacatttctcaatacaaaatgcagagttcaagatagaaataaatgatgcctcagcggcttcccctttcctttcctagttatttccaagaacaattgttttaaaggggaaaaattaggaacacattgagtaataaaaaat

SEQ ID NO: 28908 - DNA, 308 bp, Glycine max
  Clone ID: PAT_MRT3847_126104C.1
gatgagaactaagaggaaggaaatggcttcctcaatgatctcgctgcccagctgatactagcggtaaccgtgccagttccggcttggatgctcgatttgccgtgcttaaatccatggctggcttccccactagcgagaccaacaaggacattactttgattgctatgcaattgtggaagagtactatgcatgcaagtgttgctcaccaattgtcatgatgaagttctagactctttgctacttgccagacctcgatgatgcccaattggcataggaagttcgataccttctaaagaatggatggattc

SEQ ID NO: 28909 - DNA, 522 bp, Glycine max
  Clone ID: PAT_MRT3847_126105C.1
cagaagcgtcaactttctgaaaagaacactttcaatatctgaacgtgaaggaggaggaacaagcaacgttgttcccaagggctatgtagctgtttgtgttggcgtggaccttaacaggttcgttataccaaccgaatatttgggtcaccaagcctttcaaatgttactcagagagactgaggaagaatttgggtttgaacaaactggggttttgagaattccttgtgaagtgtcgatgttcgagagtatcttgaagatagtggagagaaaggacaagtttttcactcagaaatgcagattaagcattgagaagatgatgggatactgttcctcaaacaaccttgcttattctcatcaacctcaaagtccaatgtgcagatagtttaggattttgtgaccattttaattaattatacattttttttatttctttttcttttgctcttttgtggaagccaattaatgcatgtgaggtaacccgtttaagcaaagaatacaactttcattgtctaaatgttgtat

SEQ ID NO: 28910 - DNA, 867 bp, Glycine max
  Clone ID: PAT_MRT3847_126106C.1
aaaatgggttctgtttcacttcacgatttttttctttctcttgcaaaaatttatgtctgtttttgattgtttaattaattatgcttttttgttcggtaatttaattttgtatttgtgtttgactctgttgcatgtacctgatgaaattcatgttttgtggattttgtttttgatcatcatgatagtttgatgatgttatctcctggagtaaattgagtaaattttgtatcagggttcgactttgttccgtgttcctcatgaaattcctgctctggaatttgatgatgatttactctgaactgattggtgttaattgtttactttttaaatttttttgtcgtgtttatgattttggtctttgtgattgaatttcatttaattgtgttacattgattaacttgttgtctgcgtgatgtattgattagttcgggtaagttcaagatgcttagtatgaagcacggacatggacaccggccatgacacagtgacgtggacacctgtcaaacatatcaaactcaatccggtacgggtgtcggtgtcggtgtcggtgacactgcaaggggctggggtgggctggggtgtccgtgcttcatagtgcttagttagcatcttttcctgattagttactgtttgaaattttgaacacctgcgtgctgtagtttttggcgctgttgcatggttacttggtaaacgtcttgtacttggtacttgatattattaagacgaacatgtttttttagttgccatttgcaagggattttatcaaatttggtaccaattgttttggttgctgaccggcattatagtcaacgaggatgatgaccatgtcaaatctaattcctccttcagattggcaggggcaggaat

SEQ ID NO: 28911 - DNA, 548 bp, Glycine max
  Clone ID: PAT_MRT3847_126107C.1
aaaaaaatcttttttctcttaaagaaatcaaaggcccctttattgattttcctttgggggggcacccatttttttatgggaacaattaaaagggctgggggggactttgaatttttgggaacattccaacaaaaaaaaaggcaccttacccttcccttcccgaacacccaaaaaactcccgattttttcgcaaacagattttttaacaacaaggaatttaacccccctttgaaaaccccccccccctaaaatggcaactgggggggggggttacccccaaaacatgccctggtggggactttacatgatcaaccaaagccttaacttaaagcacaaaacaatggggacaaattttcccattttttggggtcttaaccccaacccgacccaatttgggcttagcacccacaaaggggggggtaaaaaccttggccctggaaacaaaagaattaacggggttcctaaaccttgggcccggaaaaaggatttggcccgaggggaaaaggccctttccttggggaagggttggggaaaaaacattggcgaat

SEQ ID NO: 28912 - DNA, 459 bp, Glycine max
  unsure (1)..(459): unsure at all n locations
  Clone ID: PAT_MRT3847_126108C.1
attcggctctgagggaagaaacagatttattctatacccgataagtaacactacgcaatggtggggagacgagaggtgtttacannnnnctctatgaatatttaaataagtaaatgccgacctactcacttatcaccccaatgacccctctctaacaactttcctttttttaccatcggggtggtccctcccccncctcccttaccattttttttttttcccccccaaccccccccccccccccaccgcaagccaacgccccccacccccccccccccccccgccaccgacccacaccccccccccccccccccgcccccgcccccccccaccccacacccccccccacccccacacccaccccacccccccccacaccccccccacccccccacccccccccccccacacaacgccccccccccccccccccccgccccagcgccccgcccccccccc

SEQ ID NO: 28913 - DNA, 745 bp, Glycine max
  Clone ID: PAT_MRT3847_126109C.1
cagtcttacttgaaccggaagtagtttccctggacaaaacactgaaccggaaccgcacgcgagggtctcggtcgaaccggcctcggaggtttcgaagctcgcactcgaccgggcactcgctggtccaaccgggagaaaacactgaccggttcactttgaggttgcctttggaggtgaggaagcaattaataaaccggcaattgcaacgtgcgagtagcttgatcgtgttacccagggaaggtagtttgcggcagggttaccgaaccggaggagaagggagtagtagggggaagatttcgaggcggttggaccggagtttgaaatcggaccggtggattttctcgatggctgcgcccttttttgcaagggcgttgtctattagatcgcctagggttcgaaacaattatgttgaaggaacggcgtcgtcgtcgtcgtcttccaccgcgcctatcttgccgccgacggccgttgactcggcgaggcctctggtctaacctgagtttctccaacctccacgtgtcgttgtttttattttttgttttttcttttcttacaaggcacgattttgtttttggtgcaaaatttgtaaaatgtgtataattaataaggtagcatgtttatatgttttagaagaactgggtcatgtactaaatttcatactcttgaggttgttaagctggttagttagttaccttcagattttaacaaaacagcaagcgaaaaaaaatgcaaaattatcttgttt

SEQ ID NO: 28914 - DNA, 429 bp, Glycine max
  Clone ID: PAT_MRT3847_12610C.1
gacgcttactgccctcatgctctggctcggctggcggctcgaggctgcttctactcagcagctgctcctcttcatcgtctaacgggggtcttacacggggccactggccaagcctctattatgccccgcgcgaccttgatttcgcaccatgacaggatctttattggccttgcgagggatggcggtgaatgcattaccgctggcagctgtgatccatatcctattctagggctacaagatgtgtggtaacaccaagtgccatacgcacttatgagtgtcggctctgcaggctacattatgattgaggcggatgggagctgccatggcaacatactaagtaggcatgtggagggtgtgacataccagtctgctgcgaaatggctgggctacatgatagctaatctttcctatgcaccactatatgagact

SEQ ID NO: 28915 - DNA, 523 bp, Glycine max
  unsure (1)..(523): unsure at all n locations
  Clone ID: PAT_MRT3847_126110C.1
ctgcaggtatccccggtccgggaatataattaccnncgggtcgatcgatgcctcaacttatgtcgnngcggccggccctcttgatttattattctttgttgatcgtagtaattattttcattcgataactataacgtactctttttctgtgcaacaccagatgatagaaacgacaggcgaagtcgaaactgctgtaagaagcgccaatcgcggcgatgcagaaggtggcgctattctcggcgagtgcggtgttggcggctcaggagaactcggacgtgatgacgctggtgaatcacatgctcgggaagaagttctgtgacaaaggatgggaatgtaagggctggtcgataaacatgcgtgccgtcactattactgattatgccccgacctaccagttggagaatcatctgtcgaggcggaactctccggcggcgcacgccgctggatttcgggactaccactcgttgatcgccgctgtcacgcttttacaggggtaagggctcggcaccacctggaacaagac

SEQ ID NO: 28916 - DNA, 652 bp, Glycine max
  Clone ID: PAT_MRT3847_126111C.1
caaagtcatttccctttattaaattgttttcacagaccagaaatacaaaataaaagtagaaataggcccctattaggagctacaggcctgacttggcatgacccctgctgcagcaacttgaacaggacaggaagcagcttttactacagtcagaaagtaggaaagtaggctgaggacttgggtccttcaatgcactgcgagtagaagacaacacactcctaccgagtctctctccagattgcaaggagccttccttgcaaagcagcagaggttaggtgcttccctcaaagcctcagggcagtggaagccaccaagagcagttactcagatggcacagaatccaaggactatgtgagagactggagctgtgacgaggtgggaattccctcctagcatcctcagccttgcggtcccactcctccttcttctctttggacattcccttccagatctcccctgccttcttggaaagatctgtgatactgatgccaggatgatccgacttgatcttctcgcggcttgcattaagccacagcatgtacgcagacataggcctctttggggcgtttggatctttacccttctttgcctctgaagacttcctgcggctctttcgatccttggccatcttagcccttttgagctgttcccg

SEQ ID NO: 28917 - DNA, 235 bp, Glycine max
  Clone ID: PAT_MRT3847_126112C.1
ctatttttgccgtgtaagcgtgtttacctatctagttggtgatttatatcacgaatctaggaaaggagaacaatgtgatatattctactactatatgtatgttacactaaattacttatatccctagtgtgaattgtgtgaaaaaaagaaataactgctaacctagaatactgtggatagagtgattgccctatgaatggtcataaaagcttgacttgactctcataaatagtaa

SEQ ID NO: 28918 - DNA, 359 bp, Glycine max
  Clone ID: PAT_MRT3847_126113C.1
ctatcccatattaccaaaacaagcactaattggatataaagaaatctcaatatttgaaactaaaatcagtgaaccggtttgttattctttccgccactctcccgacaacaatagcaaatttaacaagtacaaaatcgaaacagaaatctcactacttatgagggttaaagagtaagcaaacaaacactggtacgaacaatgatagtgtgttgaacacgagtttccaactgttacttcacgaaaacaaagcgggacagaatcggaaagagtaagtccaagttgggggaaagaaagaaacatagaggattctaggttttatttagcgaaaacaaatttgacaaaaacaaaaaaaaaacagt

SEQ ID NO: 28919 - DNA, 693 bp, Glycine max
  Clone ID: PAT_MRT3847_126114C.1
caaaggcatttttagaagtggtgaaaacccgtagcttcccgtgggagaatgcggaaatggatgcaattcactctttgcagcttattctgcgtgactcgtttaaagatgctgagcatagcaattctaaggctgttttggatcccccgtatgtcggaactagagttgcaaggggtcgatgaactaagttctgtagccagagagatggttagattgatcgaaacagccactgctccaatatttgctgttgatgttgatggccgcataaatgggtggaatgcaaaggtttcagaattgacaggactcccagttgaggaggctatggggaagtccttggttcgcgatcttgtgtttaaggagtctgaagaaactgtggacaagcttctttctcgtgctttaaaaggtatcctttctaacactctggcgttctggtcaattcattgagtatattaggcaggagaaccctttaccattttgatgagcatgccaatccaaccattttttttttggcgaagttttactcgtaaacatgatggctagtcaactggacagtaataatagttcatagcatgataaataactaccttttccaaattatccaatgctgtacacaactatgcaattaatggttcagtcattattagtaattcaataaaaacctcaacataggcataaaattcaattttgtaacaatgc

SEQ ID NO: 28920 - DNA, 1343 bp, Glycine max
  Clone ID: PAT_MRT3847_126115C.1
ccacgcgtccgcgcgtcgcgtgcgagagaaacgccaaacaacaaaagcagcagcagcgttactttgctgcacctgccattgtcactctgtctttcttctcttctctccttttttcacttttaccaatttagctcttccccctcccctctccaaaatttcacacaacaataatcataacttcatgaaatagttttaacaaaaaagagaaagagaagaagtgatagaaccaactttttctcttttctctgcagtggtggtgttaattaaattccaatggcttcagcaagcggagcggagaattcctccgtcccgccgtcgccgttgccgcctccgccgccgccgcaaatccacacctcgcggacgaagctgagccaccaccaccacaacaacaacaacaacaacaacaacaacatcgactccacgagcaaggccatcgcgcagtacacggaggacgcgcggctccacgccgtctttgagcggtccggcgagtccgggaggtcctttgactactcccaatcaatccgcatcacatcggaatccgtccccgagcagcagataacggcttaccttctcaaaatccagcactgcggcttcatccagcccttcggctccatgatcgccgtcgatgagccctccatctgcatcctcggttactccgacaacgcccacgacatgctcggcattactctgcagtccgtccctttgctcgacgacaagaatgacgccgccttttctctcggcaccgatgtccgagccctgttcactcactctagcgcctgactcctcgaaaaggccttctccgcacgcgaaattagcctcatgaaccctatctggatccactccagaacctccgggaagcctttctatggaatcctccaccgaattgacggaattgtcatcgatttggagcctgtgcttacggaggatcctgccctctctatagctggagctgtccagtcgcagaagctcgcggttcgcgcgattttgcagcttcaatgtctccccagtggtgatgctaagcttctctgtgacactgttgctctgaaatctcatactagtcaggggtttcatatcctcttttttctctgtagttttggttttaatttttaaccgactaagattactattgtattctaggagaaaatatatgttcatttgatcttttgtcttaatattcatacagtttactatccttgtttggttaaaatgattaattcttgtgattctaactactgaaatatttttctgtagtgtttgtttgccaccgagacatttagcattggtttgaacatgcctgaataatttgttcaaatgagtggtcgtgctggtcgacgaggcattga

SEQ ID NO: 28921 - DNA, 369 bp, Glycine max
  Clone ID: PAT_MRT3847_126116C.1
gtttatttttgatgaaattcggctcgcgtagcttggagttagggtttttggtcagttgttatatttacccttgggatcggtgtgccttcataacattgttggattcatcgagctttagttgttgacatttagtttttcgcgaacttcgtagcttagctacttataaatattgaatatccgtcactttagtctagctgatttgttacagtaaattttaggaaccaatttgaagggtttttaatattttggggactacatagtacttagcatgatttctcatagttttaggactattcaagtaatttttatgctgtaaggactacttaatagagtgagtaataattcaagaataaaattggtggtttacta

SEQ ID NO: 28922 - DNA, 752 bp, Glycine max
  Clone ID: PAT_MRT3847_126117C.1
taattatgtctgatgtaaataatagcaaccagatgtaatattattgataataatatataaattataaattacaaaatatcacgatacattttctggttgaataatgatagtgaatatctccgctactacaaacacttgataacactgataattaatatctctatttttttatcgcatcatatcatccctcatggttatacttctctctttatttcgatatataaatgtctaagtggcatatatatggctaatttctgcccatcattttcctttctggttaattattagcaaaggctaatccaggtagattatagatattttcactctttaattaaacacaggcatagaatctctccatattcctgcaaggatactaccaataattgactgaaacacaattgaaacagcaccaggtacggcagttaggggatctccaaagtgctttgtagccagaacaatcccgagaactgagttcttcatgccaacctgagtggatatggttcgcgatgatgacacatctaacccaagcaatcttccaaatatgtaaccaaagaaaaacccagaagcatggaggaagaaggtagctaaaatcacttgtccaccacacacaaagattgctgaaatactctgggcattagattttcacacaaaattgccccagttgttactggcatggggtggcttcatgggagagacaagtttaacaaagggttggaaaaactggttagaaatgccccccccaccccaggaaa

SEQ ID NO: 28923 - DNA, 1325 bp, Glycine max
  Clone ID: PAT_MRT3847_126118C.1
aaacaaatagtcaaagaaagaaatagctcaaataaatttttataataaaaatatatatacaatttttttagcaaaaaagtggataattaaccttaaaatgatttatagtgtcataaacaaagaactgcactcaaaacttctttcattaattaaagatatttttatttcaactcctcagctgtattggttacaaaaaacgccactttaattcacatgaaaatgcatgaaatgcggcgttgtttttttatttaatttgtttgatatatagcgagaagtaattggcaagcaatttcccacaatctctgacaatatactcaattgtactataaggatttagaaaattgagcattatggcatatacggatttaattataatggaaaaaacaaaacgaaggaaatgatgaagttgaagtcttacatgtcaaagaaggtctggagccttgaatcaaagctctggtctgtaatttgttcccaaaattcgcgcaactgatccttgcttatggaagccgatgttatgccccggcgacgagataatgcatcaaataattcgccagcaaactccttcgactcgttcatgccaatgcactgactgaagcgcgttttgggcaatttgccatcaacggccaactcatcaaagcgtttgtccacctgggaccaaccttcggttccaacatttttggtcatgaacttgagccctttgagggcacgagcagcaccagacttggccctgtcaaccctatcgaacttcttgtttgatgtcatgcgcttcagttcccgcgacacctgtctcagccgatcggaaaacgacgacggcctcatctcgaggcggctggcgaggaacgccgtctcggagtcgccgccgcggatgttctggaccgaaacggcgtcgtcgcggacgtccagcgtgatctccaccatctcctcgtcgtccttgaacctcgcacttttgttcttgctgctgtttcttttgttagaagaaaccaaaggcccactcaaaggcccgctaagaggcccgctcagaggcccactgaagcccactctcctgctccggcttcccgtgctctccgtttccgaccatgactcgtgttggttttcgtgaatctccatgttgctactctaattctcttcacagctcccaacctatgttgatatatattcttgtaattttgtaattgatgatcaagaaattaaaatgagaaactctatggtattgaatggggagagtgggagttataagttataacccaatgatttgtgctatttttattttttttcttttgcaactagaaatgtaatgaaggctgaggcgcggacgcgtgggtcga

SEQ ID NO: 28924 - DNA, 2536 bp, Glycine max
  Clone ID: PAT_MRT3847_126119C.1
cccgcgtcgggaagaagagaggaatagaagtaactttttctctcttctctgcagtggtggtaatttattttccaatggcttcagcaagcggagcggcgaattcctccgttccgccgccgcaaatccacacctcacgaacaaagctgagccaccacagcagcaacaacaacaacaacatcgactccatgagcaaggccatcgcgcagtacacggaggacgcgcggctccacgccgtcttcgagcagtccggcgagtccgggaggtccttcaactactccgaatcaatccgcatcgcatcggaatccgtccccgagcagcagataacggcttaccttgtcaaaatccagcgcggcggcttcatccagcccttcggctccatgatcgccgtcgacgagccctccttccgcatcctcggttactccgacaacgcccgcgacatgctcggcattactccgcagtccgtcccttcgctcgacgacaagaacgacgccgccttcgctctcggcaccgatgtccgagccctcttcactcactccagcgccttactcctcgaaaaggccttctccgcacgcgaaattagcctcatgaaccctatctggatccactccagaacctccgggaagcctttctatggaatcctccaccgaattgacgtcggaattgtcatcgatttggagcctgcgcgtacggaggatcctgccctctctatcgctggagctgtccagtcgcagaagctcgcggttcgcgcgatttcgcagcttcaatctctccccggcggtgatgttaagcttctctgtgacactgttgtggaaagtgttagggaattgacgggttatgatagggttatggtttataagtttcatgaggatgagcatggagaggttgtttctgagagtaagaggcctgatttggagccttacattggattgcattatcctgctactgatattcctcaggcttctaggtttttgtttaagcaaaatagagttaggatgattgtggattgtcatgcttctgctgtgagggtggtgcaggatgaggctcttgtgcagcctttgtgtttggttgggtccacccttagggcacctcacggttgtcatgctcagtatatggctaacatgggctcgattgcgtctttggtgatggcagttattatcaatgggaatgacgaggaaggcgttggtggtcgcagttcgatgaggctgtgggggcttgttgtctgccaccatacctctgccaggtgtattccttttcccttgaggtatgcttgtgagtttctgatgcaggcgtttgggctgcagttgaacatggagcttcagttggccgcgcagtcgttggagaagcgggttttgaggacacagactctgttgtgtgatatgcttcttagggactcgcctactggcattgttactcagagtcctagtataatggacttggtgaagtgtgatggggctgccctttatttccaagggaactattatccgttgggtgtgactccaactgaagctcagattagggatattattgagtggttgttggccttccatggagattcgaccggtttgagtactgatagtctgggtgatgctggatatcccggggctgcctcgcttggggatgcagtttgtgggatggcggttgcttatattacagagaaggattttcttttctggttcaggtcgcacacggccaaagagatcaaatggggtggtgcaaagcatcatcctgaggacaaggatgatgggcagagaatgcatccccgttcttccttcaaggcgtttttagaagtggtgaaaagccgtagcttgccgtgggagaatgcggaaatggatgcaattcactctttgcagcttattctgcgtgactcgtttaaagatgctgagcatagaaattctaaggctgttgtggatccccatgtgtcagaacaagagttgcaaggggtggatgaactaagttctgtggccagagagatggttagattgatagaaacagccactgctccaatatttgctgttgatgtcgatggccacgtaaatgggtggaatgcaaaggtttcagaattaacaggactcccagttgaggaggctatggggaagtccttggttcacgatcttgtgtttaaggagtctgaagaaactatgaacaagcttctttctcgtgctttaaaaggtatcctttctaacactctggcattctggtcaattcattgagtatatttggtaggagaaccctgtgccttctggaagagcatgccaatctggctatttttttttggcaaaactatacttgtaaacatgatggctagatgtttagtaggtgcacaggatacttaatggtattggagtcaactggacagtaataatagttcatagcacgataaataactgccttttccaaattatccgatgttgtaaacaactatgcacataatggttcagtcattagtaattcaataaaaacctcaacataggcataaaattcaactttgtaacaatgcaaagcttgtaaaaaaaaaaaagacgaaaaaacactcaaa

SEQ ID NO: 28925 - DNA, 368 bp, Glycine max
  Clone ID: PAT_MRT3847_12611C.1
cgcacgcgtgcgtccaatcggacatattgatgctccattgacacagggagtcgaaccttaaaacactgagcaaaaggctcagatgctagcaaataagaataaatcgactcttgatgacttcgaagcgcacaaaggcttcatggaaagacataaactctctgagctgaacacagaccttgcgaataacacagttggaggctccatgctgattagcggaacactgtcctatttgatgtcagacggcaagtctaaagcaagcgttgactggctgtgcattaattgtctgaaaagaatgaagtacaagctggccacagtctggattactgctaacactcttctagcaggggtctgagctatggaggggactt

SEQ ID NO: 28926 - DNA, 929 bp, Glycine max
  unsure (1)..(929): unsure at all n locations
  Clone ID: PAT_MRT3847_126120C.1
gtagctcgggnatcgctcgagaataaatggttagaggtccaaagaaggcacttaagagaatcaatgctcccaagagctggatgctcgacaaattaggcggcatcttcgcaacaaaatcttcccaaggtccacacaaatacagagaaagtcttcctctcacagttgtgctcaagcaccgtcttaaatacgctcttactggaagagaagtcactatgatcgtcaatgacaaggaaggaaacatcgctgtcgatggcaagatcagaagagaccctagattccccgctggtcttatggatgtcatcagcatcaagaagaccggagaactttacagagttctttatgatgttaagggcagattcatcctcagaaacatcggtgctgaagaagcaaagtacaagctttgcaagatcaccaagaaggctgttggcccaaataagatcccttacattgtcactcacgacggtagaactctcagattccccaaccctgaaatcaacgtctacgacactgttaagctcgacatcgccactggtcaagttgttgacaccgtccaattcgagaccggtaacttgtgcatgatcacctccggtaacaacgtcggaagagtcggagttatagtccacagagatagacacattggaggtttcgacatcgttcacgtcagagatgctagaggacactccttcgctactagaatcggaaacgttttcatgatcggaaagggaaagaacccttggatctctctccccaaggaaaagggtattagcttaactcctcttgaagagaagcaaaccagactcgaatctagaagaaagaccagaaagcattaagttaagcgttgttttataatagataacgaaatttgatcatacaccttacatgatttgttaagaacgaacatgaattcagaacttgataaagtttaaaaa

SEQ ID NO: 28927 - DNA, 136 bp, Glycine max
  Clone ID: PAT_MRT3847_126121C.1
aaacggggaaaacccaaattaatttcattcagggtacttgcaaaaactataacagggggtaatgatttggggctagactacctagcatagaaaattaccgaataaaagcataaacttgggcttagcagtttcctcc

SEQ ID NO: 28928 - DNA, 407 bp, Glycine max
  Clone ID: PAT_MRT3847_126122C.1
actaccatagctggaggacttggaactcacttttcatctcccagatactacagaactgaactgccctctggaggcatattttgtagctctttacacctccccttccactgttagtatctcacccactcgggggggggtatcccagcatgactctaagccttatccacctgaccagtatcattcccctcagaatacctatgcctctcctatgagagcctcctgcataactgatgatacaggccgtttcaacttgaagcccacgctgagagagtcggaaagtgtaatgctcgcccctgactctgataatcttaatagtttaaacagtgccctcagcaatggaaacaactctgacccactacagatggactgctggaaacaaaacatggcggctatttccaccaaaaacc

SEQ ID NO: 28929 - DNA, 381 bp, Glycine max
  Clone ID: PAT_MRT3847_126123C.1
gagctagcaattaagttgttcaccaattaagctttcaatagaaactgattagtgaggaaaatgggttctaagggtgttgcactcgttgcccttctccagctctctctcaacctcctcttctttccacggttagccctaacacccttgcctcggttgcccctccctcaagctgtgcccattcagtccactcccaccgttattgcaaccaccacctccttgttatgtccctgcccttgtctcaccaccatggcgaaaacgaccaccaccacctagtaattgtccatcctccaacctcttcatatttgtgccactcttttgaacgggccttcatggctgcgtgcatttgcgacgcagtcaaggccgtggtctttggaataaacg

SEQ ID NO: 28930 - DNA, 1781 bp, Glycine max
  Clone ID: PAT_MRT3847_126124C.1
ctgtgggctcgagggttttttttgttgttgtgtaatgatactcattgtcaccaccaacacgctttcactttactgaacaacgacttcatcttcactcttccttcaaatttccaacaagaaagtttgttcaactgtccctttattggcgttagctatgctaccgactggagcaaaagagacccaattacgtgagaacaacagacagaaggtccatcctctaccaatagcagaggccatgaatctgcttaaagaagcaatggaaaccctaatatctaaagtttttctaaatatctgcttccttgaagacatcttatatctagcttcaccctgctcatagtccatacgaccctgataaaatctacactgccgataaaacttgttattagtgagctgaaaaatctgtctgaactcaagcatttctacagggagaacaacccaaaaccagtgtgtgtttctccccaagactcacgtttagctgcagaaattcaagaacaacagagccttctgaaaacttatgaggtcatggtgaagaagttccaatctgaaatccagaataaagattcagagatccatcaattgcagcagcagattgaggaggctagccagaagcgagcaaaactagagaaaaatctgaagcttagaggtttgtcaaccaaagaatcggaagatgaaattggctttttccctgtcgatctaactccagatctcttcacctctgccgtggaagcagctgcaaaagccattcatgatttttctaaacctttgatcaacatgatgaaagcagctgggtgggaccttgatgctgctgccaactcaatcgaacctgatgttgtttatgcaaagagagctcataagaaatatgcatttgagtcttacatatgccaaagaatgttcagtggctttgagcaggaaaacttctctgtcaaatcagacaatattactgtaactaaagagagcttctttcaccagtttctcgcattaagagagatggatcccttggacatgctggggcaaaatccagattccatttttgggaaattttgcaggagcaaatacttggtggtagttcatccaaagatggaggcatcattcttcggaaatttagaccagcgaaattatgtgatgggtggagggcatccaaggacccctttttaccaggcttttcttaaactgaccaagtcaatttggcttttacacaggttggcttattctttcgagccaaatgtcaaggtatttcaggttaaaggagggagtgagttctctgatgtttatatggaaagtgtggtcaagaatttgataatggatgacaatgatgaaaaacctaaagttggtttgatggttatgcctggattttggattgggggaagtgtgattcagagtaaagtctatctctctggtatgaaggtggctgaatgattcctgaacacactcaagacttcagaaaatgcatagttgattgtatgtggtttgtttgaattgttgtttctttatcttgtaagataatgctgttgtctgtaatttttaatatcctttttagtggttgtaagagtaaatgagccctttaagcttgtttacattcaaggcccctcttgtattgtgaaaatatcctgcacttgaattctagtgtttgtgggagaggggaataggaaggtatataacaaatgttccttaatttaggagtttcaatgctttggggagaagcaatgttctggtgtatgagttttccacagttgagggcactaaactaatcaacaagtgatgcattttcacttaaaagtatt

SEQ ID NO: 28931 - DNA, 386 bp, Glycine max
  Clone ID: PAT_MRT3847_126125C.1
gcttctgaaggagacactgaacttgctggaagaggatctttactgaactgactaagctaccatatgtcgaaggtagtttgtgttaactgcgccagcgcagccatcggatcatatgtggcactactcctactacatcgtggttacacattaccatgccaaggccacggatatacatgacgaatatgagacgaaccatttttacgtaatggtatgagcatatagtaatatccatttaattgctagggaccttactggcatctgctgcattgacgttatcataaaggattggtactgcgtcatgaatcttgaatgttctgacatcagtggtctactgatagattaggtgatacagattttggtgctcactatgaattgatcggatgctg

SEQ ID NO: 28932 - DNA, 1591 bp, Glycine max
  Clone ID: PAT_MRT3847_126126C.1
gtttttttgttgttgtgtaatgatactcattgtcaccaccaacacgctttcactttactgaacaacgacttcatcttcactcttccttcaaatttccaacaagggttcaagggtattatgcttgctggattcattctcttgctgaaatgcagtctttctagaaagtttgttcaactgtcccattattggcgttagctatgctacccactggagcaaaagagacccaattacgtgagagcaacagtcagaaggtccatcctcaaccaatagaagaggccatgaatcagaatccagaagcaatggaaaccctaatatctaaagtttttatgaatatctcttccttgaagtcagcttatattgagcttcaagctgctcatactccctacgaccctgataaaattcacactgctgataaacttgttattagtgagctgaaaaatctgtctgaactcaagcatttctacagggagaacaacccaaaaccagtgtgtgtttctccccaagactcacgtttagctgcagaaattcaagaacaacagagccttctgaaaacttatgaggtcatggtgaagaagttccaatctgaaatccagaataaagattcagagatccatcaattacagcagcagattgaggaggctagccagaagcgagcaaaactagagaaaaatctgaagcttagaggtttgtcaaccaaagaatcggaagatgaaaatggctttttccctgtcgatctaactccagatctcttcacctctgccgtggaagtagctgcaaaagccattcatgatttttctaaacctttgatcaacatgatgaaagcagctgggtgggaccttgatgctgctgccaactcaatcgaacctgatgttgtttatgcaaagagagctcataagaaatatgcatttgagtcttacatatgccaaagaatgttcagtggctttgagcaggaaaacttctctgtcaaatcagacaatattactgtaactaaagagagcttctttcaccagtttctcgcattaagagagatggatcccttggacatgctggggcaaaatccagattccatttttgggaaattttgcaggagcaaatacttggtggtagttcatccaaagatggaggcatcattcttcggaaatttagaccagcgaaattatgtgatgggtggagggcatccaaggacccctttttaccaggcttttcttaaactgaccaagtcaatttggcttttacacaggttggcttattctttcgagccaaatgtcaaggtatttcaggttaaaggagggagtgagttctctgatgtttatatggaaagtgtggtcaagaatttgataatggatgacaatgatgaaaaacctaaagttggtttgatggttatgcctggattttggattgggggaagtgtgattcagagtaaagtctatctctctggtatgaaggtggctgaatgattcctgaacacactcaagacttcagaaaatgcatagttgattgtatgtggtttgtttgaattgttgtttctttatcttgtaagataatgctgttgtctgtaatttttaatatcctttttagtggttgtaagagt

SEQ ID NO: 28933 - DNA, 288 bp, Glycine max
  Clone ID: PAT_MRT3847_126127C.1
gggttgcgggggggtgtgggcccacggggggaggagcccaatggcaggacacaggcacacgcggccaccgcatgaatggacctggctcttaaggaagagaacaaggtgctgataatgaacgcgggcgttgtgaatgacctaatatccctgctgcaaagaggagactgagactccctagcacaccagcaaacacgatgatctgatcctgcttgaatgtataaggtagtctgattattcgcagaggcagaactcgatctttctatgtctgctattgcactggacagaacc

SEQ ID NO: 28934 - DNA, 1478 bp, Glycine max
  Clone ID: PAT_MRT3847_126128C.1
ttctacgcgtccgcccgcgatatatatatatatatgtgtgtgtgtgtgtgtgtgtgtcaaactctatttttgtttcattcatacaaatacaaattaataaaaacaacaggttctttgctccttgtggctctcatcaggctctgatcacacttcgatggcaaagtttggattatctccactcttggtgctttccatattgttgctgatcatgagtggtggtgcagtgagaggccaaagagaaatggtgcctgccttgttcatatttggtgactctctcattgacaatggcaacaacaacaaccttccttcctttgctaaggccaactattacccttatggcatcgacttcaatggaggccctactggtcgcttctctaatggctacactatggttgatgaaatagctgaactgcttggacttcccttgattcctgcatacacagaagcctcagggaatcaagtgcttcatggagtaaactatgcttcagctgctgctggaatccttgatgccactggcagaaactttgttggacgcataccatttgatcagcaacttagtaactttgagaacacattaaatcaaattactgggaatcttggagcagactatatgggcactgcgcttgcgcggtgcatattctttgttggaatgggcagcaatgactacctaaacaactaccttatgcctaattaccccactagaaatcagtacaatggacaacagtatgctgatcttttggttcaaacatatagccagcagctcacgaggctttacaatcttggagcaaggaaatttgtgattgctggactggggcaaatgggatgcattccaagcatactggctcaaagcacgaccggaacctgctctaaagaagtgaacttgctagtgcaacccttcaatgaaaatgtgaagaccatgttgggaaatttcaataataatctacctggtgccagattcatattcgctgatagttcccgaatgtttcaagacatccttctcaatgctagatcttatgggttcgctgtggtaaatagagggtgctgtggcattggaagaaacagaggccaaattacatgtcttccattccaaacaccatgccccaataggcgtcagtacgtgttctgggatgcattccacccaacagaagcagtgaacattctcatgggaagaatggcttttaatgggaaccccaattttgtttatcctataaacataaggcaacttgctgagctataaattgagcctgctaataagtggaatcttgtggtgtcagcttgaatgatcagtttacatttagtaattagaagtgtgtggagtaacaaatttagtataggaatctattaatggtcagaatggctctcatgtactgctacctacatttacaattacaactttcatatgaactagtggttacataacctctttttctacttttcttataatataattggactatgcacttttctgcagatatttt

SEQ ID NO: 28935 - DNA, 477 bp, Glycine max
  Clone ID: PAT_MRT3847_126129C.1
ttcggtcacgtcctccttctctctcacccggtgcctgtgcctgttctcttctccataactctggtgcgagagaatcttcaccaaaaaaaacctcggagatgatgaagcgaaagctagaaacgttggtgtggctaacacgaaaacgatcgattcagtttctaatcggtgttttttttcctctacctcgtacttgtcacactcgaactcccgtttgttttcagaaccgacttcgccaccgtgaccaccacgcgctccccgaggctcctaagtgaagaggattcgctacgaaaggactccccggcgcgtcctttgaaaacggtttccaacgctgactcgccgagtcaactcgcgcgccgccgcagcagcgtcgtttccgcgttggtcctaaacgacgccgcgttcggctcccacgtaaacaacgggtcgtcggagctctacaagcaagtgaagcacgcgcgcgaggttgggcggagtctc

SEQ ID NO: 28936 - DNA, 527 bp, Glycine max
  Clone ID: PAT_MRT3847_12612C.1
caataagtggaagaaaatctctttctgtctattttgttttgactcaaatggcaaggtcatgtctacactgcatcagactaaccctacagaaaaaataattgttctcaagtatcaacgtgcagcttgagcttcatcatctgagttctgatgataatgctaatttctgaaagttgccatcattggaagctgcacttaacatgacagtttaaaaatatagctcttgtttttggatcctacttctttatattcgttttaaactattttgtttttcttttgacttgtgcacagtcatggtttagggctgataagttctttttaacaatggtgccatcaattttttttctcatctattttctgctttatgtcccccagcctgcctaacttggaaaatgaaagatgtattttgcatccacatggaatatacaatcaaactttttaatccgagcctagaaaattttggctggatgattttgtgaatctcatggttttttttttctccctttacttatgttctcacatctcagcag

SEQ ID NO: 28937 - DNA, 482 bp, Glycine max
  Clone ID: PAT_MRT3847_126130C.1
acaataaaagatcagctctttatttaaatcactgtcaccgtaaaacaatccacttacatacaacaaaacattattttcacgctgatcaatctaataaatggcttataattgaagataaaaatctcaaatcatcaattcagtcataccgagtacaaccagaactttcttcttctttttttcatcttccactcaccattctcatttctgaaaacaacaaacaccattaatgactgtgaaagtctattacatatggtcacaaaacataattcccccccatatgcaccaaatttacaacatgaccaccttacatgaacctcaatccctcaaaacatgcccccaacagcatccaaaagacatcaattctcaacccaacttgtaaagttttagggttttccaacattctggacattacatctgaacctttgcaaacacaatttcattcgccttaaaaacaagctttcaattcactaattaccttcaac

SEQ ID NO: 28938 - DNA, 775 bp, Glycine max
  unsure (1)..(775): unsure at all n locations
  Clone ID: PAT_MRT3847_126131C.1
attcgagctctgtacccggggatcctctagagtcgacctgcagggatcgctctgccgacatgggatcgtggtgattttacgaggagattagccacattcaaatctatgtcatggtttgctaaaccaaaggttgttttctttctgtcccgctagtatattgtatcattttccttactgattagggtatgtttgggtgtggggttttgtggtgaagtacaaggttatgaaaataaatataaaagatcatcacattaactttatgttaatctatcattttgcttctttcattttaaaatattatcgaatttgatagtatatattgaaaatgaaaaatttgccctcccttccctgtcaaaatctggctcctaaacacacccttagtgaatccattcttgtgcttttattactttataccaacattttagggttatggttataattcaatgcttttagtacatngtgtgtgtgggcacgcatgcgttgctaaaaacataagagacagatacagaataataaactggaaacaatgcttgaggaagataaagggtagagtgaaacttttattgattaataacaatacccagcatttggctaatggagtgttttgctccattaacagattatgcagggatttttgaaaggaacactntgtcgtatgaagcagagcatgtgatgccttatatgatttgttaatcccttatttatgcgtaagctgttgctggagggtgaaaaactaaattctattttgcttnttgctattttattttattttatt

SEQ ID NO: 28939 - DNA, 306 bp, Glycine max
  Clone ID: PAT_MRT3847_126132C.1
acttgctgagcaaaggtgctctttatcttgaatacaaggacgggtaaccttacacaacattagcagtgttttccttcacaaacaataatccctttttccgaaatcaaggatgacgcaacctgtaacactttaacgattttaatgttactgtcgaaagttgggatttaatacatgaaggggaaggggaatatatagacatcaccttcaatattaaataaacaggtttcaggtctatctgttgcctatgcactgcatagaatggtgaatgtctccgacattcttccttcttcatatcatacacaagcg

SEQ ID NO: 28940 - DNA, 260 bp, Glycine max
  Clone ID: PAT_MRT3847_126133C.1
gactaattcatcaactttttttgtatttgctttggcctttgtagtagtatgatttcagttactgaataataataacaagtggggactatgatgggttttgtagtggtggagtttctatttaacgaaaagcttgacattattcagttagtggtgtttaagcaaatataatgaataaggaaaggaaatataatgaaatgatggcaaacataattatacttcctttccttattcattatatttgccatcatttcattatattt

SEQ ID NO: 28941 - DNA, 311 bp, Glycine max
  Clone ID: PAT_MRT3847_126134C.1
gttgggttgggacggcctaactcaaataatacattaaatccaaaggccttttgaagcagcaataccaagttaaatttttgcatttagaaattaggggggccatgacatcctatcctccatttaaagaaaatcccctgggcaattacacagaaattggcaaaattgaaagcaaacaagactggccctttttgactccaatgcctttataaaaaccgggtcggggtggggaccttgaactttaaagggaaattttcttgggggggaagggcttccctgggtggatgtaaaaacgagcctcaccatgttgatta

SEQ ID NO: 28942 - DNA, 177 bp, Glycine max
  Clone ID: PAT_MRT3847_126135C.1
gtgaaaaccctaaggggaagacaataacccttggggttgttgctatgacaccattgacattgtcaaggctttgattcaagacggggaaggaaaaacatccggatcagcagcgattggaaaaacgccgggaagcaacatggaagatgggaagggccggtggcggaattacaaccaccc

SEQ ID NO: 28943 - DNA, 459 bp, Glycine max
  Clone ID: PAT_MRT3847_126136C.1
cacgcgtccgtaatatctcgcgttgggtctagcgaaccattaattaaggtgagggacagaaggaagcaagatcgggcatgcctgcactgtggaacccatacactgagccctgacacaagctggggcctgacacgacatcggaggtcggaggactacagataaaacaaaaaggatctcaggttccccggagctcataagcttacggctgatcgcgaacgaggaattacagtacctattgccttgcgcaagggacaaaccaccaagcactatcgcacagtcattgatgcccctggacacagggatttcatcaacaacatgatcaactgagacatctccaagcatgactgcagctagcacttatcatggataccactactggtggttctgaagctggaatttcaaaggatgtgacaaactgcgaaacatgctctgctttcatgcaccctaggcgtgaaacag

SEQ ID NO: 28944 - DNA, 469 bp, Glycine max
  Clone ID: PAT_MRT3847_126137C.1
aaaccccaacaatttttttaatgaaaattctttacaatttcagaaaatttacccgggcttgaatataattttgccggctataaacattttttgggaacaaaaacaatggggttgggctcaacaaattaaagcccaaccccccccccaataatcatagttttagttccctttttttatacaaaaaagtaaatcaacgtaattggcttacccgtgtcacgtttttggggaccattttttttatatttttaaaaatccgcaacattgaattgaataaggaactttttcaagcaagggaactttttgggggggggccttggggaaaacctttaatatcagggcaatagttgaaaatcatgtattttttttgcccccaatggtttttggccacccccgtggcttccaatgattggccaggggaggaagaggttagggccttaaattttttttataaggctgtgaatggggcctt

SEQ ID NO: 28945 - DNA, 397 bp, Glycine max
  Clone ID: PAT_MRT3847_126138C.1
cccccttgtccctctctttctctcttctttctcctctcagcttccttttccttttgaaattatcacataaaagaacaaaaactcccccttaaactgataaggtatataagccacccttcagagcaatttgtccatcttcttcaatttattagccgaagatgtggtgcattagaccttagtctttgtcatagtttcttccacaacaacttggtccaaactttccaaaaattcacataagagcaatagttctctccctagaaactgatatgctatataagccgtcctttggagcaatatatccatcctcttcagtttagcagaaggtgtcgtgtattagaccatagtctttgtcattgttggttcgcaacatcaaagtttagcctttgagcatcagcaa

SEQ ID NO: 28946 - DNA, 258 bp, Glycine max
  unsure (1)..(258): unsure at all n locations
  Clone ID: PAT_MRT3847_126139C.1
gaaagcattgaattcaaaaacttaagttcattccttgtgttttgctttcttcctcaaaaccaaacatgntcgaacacatgccggcaactgcngactgcgcctgacaagactagctgcaccaaagggaacagctattgtgttattgtagagactgaaaaagagtacatcgagactggtggcattggatgttcagcccctgaaccatgtggggaagtcaagtgtggcactactgcactttcaccggactgcacctgtggc

SEQ ID NO: 28947 - DNA, 332 bp, Glycine max
  Clone ID: PAT_MRT3847_12613C.1
gggggggggaaattatattaccccccccaaaacattccaattagggaaaaaacacccaaacacaaacccatagaacttttcatggtttcgaaacaccaacaaggaaaattttagatggagacataaacaccttttgtccccggggaccctaaggagggtcttaaattcccacccccaattttgaaaaaagaaaaacctatcctttacaacgttccgactgttgcacattttcacacacaccaaccaaaaatttggcgtaactctttttgttttcccccaaataaacccctaaatttccacttcctccccaaaagagcccctcaaaaattaaa

SEQ ID NO: 28948 - DNA, 529 bp, Glycine max
  unsure (1)..(529): unsure at all n locations
  Clone ID: PAT_MRT3847_126140C.1
cgcgancacaggcggccgcattttagaaccggaaacaaaagcaaccggcacaagaccacaagaagcacacaancccagccgacaacgccgcgaacgaacaccaaagggaaagaaaaccacgctctgtgctggccacagacttcgcgaatcattttcttttccactcttagcttattggctgaacactctcctatttgatatacgacttcgagtcagatctaaacttcttctgtttctttatcagctctctgcttaattccaagtacaagctggcgaaatcttggattaaagctcccactctcctatctggtataggacttcgagggtagactttcctatttctctcctttctttcactcccttctattcactgatccgcattgccgtacaaagcggccttatttgaaaaacactctggcggtcggcgcaaatgtttactttgtaaatttctctggagacacaggcatactgagaaacaatttttattgcagagattggacatctggtcgttattatccatggccctcaa

SEQ ID NO: 28949 - DNA, 1050 bp, Glycine max
  Clone ID: PAT_MRT3847_126141C.1
cagtacccctggtactgtcttaactcattaataatactatatttttgccttccaaaaaaaaaaaaaaactcttattattttattggaaaaaagtcaatttcaagtttacaactcttgtaaacatatgaaatttcatttataggatagcagattaacaggaagtatattgtttgtggctcgcggtttctctaaatatgtaatgtgaaaaactacttaagaaagcgtagagactaggtactaggtaatcttggtgcattctataggtgttgtcccttgtgttcctttgtatttgttgtatggataatttcctcttcccttggtcaaatttttcctcttttctatctatttttttctattaaaaaaagatattccaacagtatatcctaattatcttgtatgtgtattcctcctgccctccctttcatttctattttatggattaccttcttgcaacatgcctctgttattggaaaacccttctgtcgtcttctcgcagcccgttactaatgtattttctttctgtcttctggactctacagcatcaatttgatgctggtaagtttactactttttttgataaatgttattatgtcttgggtaattggggttattgtccgattgtgcatgcatatctgatcttgtcctccccccacccaaaaatcttctgtgtatgatcttgtttaaacaatattgtaaaatgtccaggcttattagtttcctttctctgagcggtttatgtgacaatctgcaaggaaagggaagatgataggtagtgaagtaaactttaagagtttagacaagagctagtctttatttatttttagttcaagacagtggagtcagtgatgtatctgtttggaggaaatgttttgtctcttactggtaataattctgatacggagttttctttttctttttgtaaactaattagtgtcaatgtcacagttaccgagtggtctggtgggctgtatgtatctccaaccatagctggaagcacgccttgaagtcttattgccggtgcatgggcagcgatgatatctttcagggaag

SEQ ID NO: 28950 - DNA, 809 bp, Glycine max
  Clone ID: PAT_MRT3847_126142C.1
tatgtctgttgatgtcaagaaacggaaaaatgatagatttaatattaaagaaagagtctccaattttagatataatcttgctttaagagggaggctttttggcagaagggttcaatcaatggtagaatcacatggtaacgtatttggtccctttgtgagagatgccacaagtggaccaacagttctcatgaactgtggtgtgaggcatgagaactccactgaggtacctcctagtcctgcttctgtgtgcagcagtgttcacgaagacttttggaggcaaactgaatatttaagtccaatatcaactcctgatgtgtcttcaagagacgataatgttgtgccccaggttttcagggatatcagctctggtttgagtgagctaaggagacaactcaatcaacttgaatctgatggtcctgaggatttgactatgaaacaggagcctgctgagtctgaattagaccaattagaggatccagcagaatcttacgtaagagatctacttgtttcttctggtctgtactttggttcatgggataaatctttattaagaggggacacatttgcaaaacctattggcaactctgtttatgaagaagtggaagaatctcacaagaaattggtcaaggaaaatgatgaaatctgtatcaaggatcagaatgagagtaagctagaccacaaagttttgcttgatttgttaaatgaggcactttcagttgttcttggacctcctttgacattgtctaggttcaggaggaaattacgcaactcttccattttgccaccttctggaagggacctgtgagctt

SEQ ID NO: 28951 - DNA, 184 bp, Glycine max
  Clone ID: PAT_MRT3847_126143C.1
cacaaagctctccgactcctggagggtctgcacccgtatgagtgtttgaccgatctgttcgatcattagcacgtaatctgccgcaaagcgagcgatgaaggagcttgtacgacttctcctactgcctgtaaatcatcaatgaggcttccccttattttttgtaagggtggctatggcaccaagt

SEQ ID NO: 28952 - DNA, 1297 bp, Glycine max
  unsure (1)..(1297): unsure at all n locations
  Clone ID: PAT_MRT3847_126144C.1
ggctcgaggcacgatctcggtgacttgatctgctgtataccgcgggattgtagtgcggaggcgtggactggcggaagcgatcggggagcgtctcgcgaaagcggagagaatgttcagcttaatggacgggtttctgaagaacgaccctctcactcttcaaaaggatattctgaatcatgttgagtacaccgtggccaggtcacgctttagctttgacgattttgaagcgtatcaggctttgtcacacagtgtaagagatcggttgattgaacgctggcatgatactcatgtttacgtcaagagaacaaaacctaagcgcctctacttcctttcgcttgagtttcttatgggatgttccttgtcaaatagtgtcatttattatctcagagagagccttcaatggtgttttttttatccccttaatatacatgtatgtgacatccatgacaaggaaggagatgccgccttaggaaatggtggccttgctcgtctatcagcatgccaaatggattctttagcaactttggattatcctgcatggggttatgggctgcgatacgaatatgggctgtttcgtcagatcatagtggatggctttcaacatgagcaacctgattattggctgaactatggaaacccttgggagatagaacggattcatgtaacatatgaagtgaagttctatgggactgttgaagaggttgagatgaatggagaaaaacatcaagtttgggtccctggagagacggtagaagctgtggcttatgacaacccaatacctggttacgggacaagaaataccatcaaccttcgactatgggcggctaaacctagtaataaatttgatttggaggcctataacactggagactacattaattctgttgtcaacagacaaagggcagaaactataagtaatgttttgtaccctgatgaccgtaatcatcaggggaaggagctgagattgaaacaacaatatttctttgtctcagcatcgttacaagacatcatccgaaggtttaaagaagcacataataactttgatgagttgccagataaggttgctctccatctaaatgacacccatccatctctttcaattgctgaaattatgcgaatattagttgatgaagaacatctggtctggaataaagcatgggacattgcatgcaaagttntctcttttacaactcacacagtggtagctgaaggactagagaaaatcccttgntgatctgcttggcagccttctccctcgtcatttacaaattttatatgaaataaattntaaatttat

SEQ ID NO: 28953 - DNA, 890 bp, Glycine max
  Clone ID: PAT_MRT3847_126145C.1
cccgcgtccgggcaacggcacgatctcggtgacgagatcggcggcaaaccgggggattgtagtgcggaggcctggactggcggaagcgatcggggagcgtcgcgcgaaagcggagagaatgttcagcttaatggacgggtttctgaagaacgaccctctcactcttcaaaaggatattctgaatcatgttgagtacaccgtggccaggtcacgctttagctttgacgattttgaagcgtatcaggctttgtcacacagtgtaagagaccggttgattgaacgctggcatgatactcatgtttacgtcaagagaacaaaacctaagcgcctctacttcctttcgcttgagtttcttatgggtcgttccttgtcaaatagtgtcatcaatcttggcatccaggatcaatatgcagaagccctaagccaacttggatttgagtttgaagttgtggcagagcaggaaggagatgccgccttaggaaatggtggccttgctcgtctatcagcatgccaaatggattctttagcaactttggattatcctgcatggggttatgggctgcgatatgaatatgggctgtttcgtcagatcatagtggatggctttcaacatgagcaacctgattattggctgaactatggaaacccttgggagatagaacggattcatgtaacatatgaagtgaagttctatgggactgttgaagaggttgagatgaatggagaaaaacatcaagtttgggtccctggagagacggtagaagctgtggcttatgacaacccaatacctggttatgggacaagaaataccatcaaccttcgactatgggcggctaaacctagtaataaatttgatttggaggcctataacactggagactacattaatt

SEQ ID NO: 28954 - DNA, 569 bp, Glycine max
  unsure (1)..(569): unsure at all n locations
  Clone ID: PAT_MRT3847_126146C.1
ccattataccatttgctggtttgtccttcctcttctttctaaaaggctgaggggaagtgaatggcttgtctttcttcttaattcaattattttatctctttgattttttctattaataattccctcatttgcacaattgtttaatgttgtctcatcttaaaacagttccccactgtgaggtctattgaaattgtttgaatgtaggcaatttctgcgctattgtactgttttttgtgtttttatgctgctcaaacaaatagttacatgctatgatttcttttaaaaaaggaaaacttattggtagttttacaaattttagggaggttttctataatcctggatcattattgttcactctagaagatgaacgagcagactggaggattangctcttcaactccatcaaatgttccaatgaaaaggaaacaaggcagaccacacaaagtagatagtggagttcagggtatgaacatgcctgtaatgcctagctcttctagtaagttaaattctaaccaaacagaaggtacagctgttgtttgtgatgatggaatactggggaaagagaatgc

SEQ ID NO: 28955 - DNA, 477 bp, Glycine max
  Clone ID: PAT_MRT3847_126147C.1
gaggcttgtttctctctcttcttcccttgctctgtgtcgccggaacacacaatagggaatactgtgaatgaaccacccacccaacagcttgtgttcttaacaagacaaagcttcgggtgtgattgagttcattttgatccttccagcttggacggattgaaggttgtgtgttattctgacctccgcgtgcgtggtatggatacgctgttgaagatgttggtggctaatagcttcagatctatggcatataggacgcttttttctatgcggaggatgaggtgcatgaatcaactgatgtaacggaatctgcatacagggcatggttgtgagagagaatagaacagccacctcctgaggcatcaattgaactatgttgagagctgctaacttgtttaggtaccgcataatgggagttggaagaacttgataaagccgtcaggctaaactaccgacctcacagtgatgacaatacatcca

SEQ ID NO: 28956 - DNA, 485 bp, Glycine max
  unsure (1)..(485): unsure at all n locations
  Clone ID: PAT_MRT3847_126148C.1
tgaaacatctgcatacctttgagtatcatcactttcctcacaatctttgattttttcaaaccccaagttttctctctcatcatcaaatggcagctttttcatcccaatactaccattcctttgtggttgactccgcatgcttctcaattactcctcccattataaacacttctagtaactttcttccttctcctcattatcttcacaataataatattcaggaaacgtcttatagtgtcactgataataaggaaacaagctgttttgaacaaagctccaaggttaccatcagtgacattgaactttctgtggtaaaaaaccatagtcctgagacttccatggtagtggacaagcttgaaaaaggtgaacaggtcactcagaaggtggtgacccgcatggagaagaagagaagagcaagaaatggatcttcctcgagtgaccctntatcaaaggagtcaacagaagggggaaagaagaaacaaaag

SEQ ID NO: 28957 - DNA, 261 bp, Glycine max
  Clone ID: PAT_MRT3847_126149C.1
accaggtcccttactgtctatggcattgttgtggtcaagcaattcgtatctagaggcaaaatagtggccaactgcatatgtaggtagaatgcagcactacttaagcctaatgacaattaatacaatgcacgtagacctaagcagaaactgaacttgtaatatttatgtatctatatttacgattggatttctgttcatgtaattaatcagtattgaaataaaaaaaaaaaaaaaaaaaaaaaaaaaaaaaaaaaaaggggg

SEQ ID NO: 28958 - DNA, 396 bp, Glycine max
  Clone ID: PAT_MRT3847_12614C.1
attcttttttttacggataagttttatcgggccataccacgacaccccaaggcgtatccagtctcacgcatcattgactatgcgaccttacatcttgtgccaaccccagattgctctaggcaataagcatcctttatggattgcctggaccttgtcttgaacagctcaaacatttcaccctgactctgatgcatcagatctagctcaactaacaggcaatacaacttcataagcttcaaccatctaatgatctaagcttcgcctgaatctgcaacaggatcttcatccatgagagtcttacccgccattgtcgctctcattggcactctctaccgtaccttagtcaggagacttgtggaaacctgatcctgacgggtgagggtctgaatcttttgc

SEQ ID NO: 28959 - DNA, 362 bp, Glycine max
  Clone ID: PAT_MRT3847_126150C.1
ctcaggcattcgcatcgacacctcatctctgccattcgattcaacaacagcaaccccgactcgcaaatgcgagaaagtattgttctctttggatgatctgaaagaagcgctgcggagaaggggtcccgatagttttggcgccaagaaagttcttcttcaattattaggtcaaaacggtgtctcttccttcacggtggaggaagacggcgatgcagcagacggtgctatcgaaaccgcgaaacttcatttcttcggtgccacactgcagctccggggaattaatccacttgttcagccactgacagatgcctctggaaatgttctcgtgtataatggtgagatcttcggaggacttcatctcg

SEQ ID NO: 28960 - DNA, 334 bp, Glycine max
  Clone ID: PAT_MRT3847_126151C.1
tagtattatccaaaaaaaaacatgtggcagtcccagtatagttgtagaagatattagctgctgcatacaatttagtgaacgtttcatttacagcggataagttatcaatcgcctcgcacatctggattcaaagtatgacgttaaggcgaaacttgttattttgttaacttccgcatgatgatgaaggtgagaaaggtgaacaacccccatgtttattcatggacattaaaagaaaggcctcaaacagatattaattctttcttcattttcaatcttcaattctacatcccatttacaaacatcatgaactcacattgccaaatgccaaatatat

SEQ ID NO: 28961 - DNA, 802 bp, Glycine max
  Clone ID: PAT_MRT3847_126152C.1
cactcacatatcgaatccctgtaactccatggcaccaccgaaccccccacccacttcagagccaagttcctccgccgtacagaaagtgaaaagcaacctcgtcttccgttcaacctggcccgaactcaacggcgccatgggtgacctaggcacatacatacccattgttctgtccctaacactagccagggacctcaacctcggcaccacattgatcttcaccggcatgtacaacatcatcaccggcgccatctacggcgtccccatgcccgtccagcccatgaagtccatcgcagctgtcgccctcgccgaccccaccttctccataccggagatcatggcctccggtatcctcaccggagcaaccctgttggtcctaggcgtcactgggctcatgcagctagtttacaagctcattcccttatgtgttgtgaggggaattcagctagcacagggtttgtcctttgctttgaccgcggtcaaatatgtgagaaaagtacaagatttgcctcggtccaaatcattggaccaaagatattggttcggattcgatgggttggttctcgccatcgtatgtgtttgctttattgtcatagtcaatggtgctggcgaggaccatgaccatgaccatggccatggccatggggaagaatcaacccaccaaacccaagctagaataagtaaagtgagaaaaataagaagggttattttcgcgcttccttcggctttcttggtgtttgtgtgggaagtggtgctgactttcataagaaggcctaaggtgatgcatgagaataaatttgga

SEQ ID NO: 28962 - DNA, 1285 bp, Glycine max
  unsure (1)..(1285): unsure at all n locations
  Clone ID: PAT_MRT3847_126153C.1
tgtttttttctagtgtctttttggntttttttttgaaagaaaagcaactcacggctgcaaatatattgaagaaaaaaatgtttcaatttaggaaaaatggaaccgaaatttacaaaggcaaatgttttgacactacaatgcgcatgtttagaactccaaaaccaatctctttccaagaggacgtagtttttaattgataaatgccaatggaagaccagtagtgccaccatcaaattgcacaaaggcgaaacctgcattaacttgtagctaacttaaaatttcaagttaaatgacctgtaaagacttgaattattttctgactcttggtttcttaaaactttcttttttttcctgtgctcttttacaaagaggtgtctgttattaaaatggcagatgtattttcctttctggattttttggaaaacctccttttggtataaggctttagatcaccttttgtgtctttacaggctctctgactttccaaacgttgttcttcctgaacacgaacttgtccaccttccacccagggctactcgtgtcgatcaccgtcacttcgctcttcgtgaaccccttcaattcgttcccctcttcctcgtcctcaccgcggtccgcggcggcctcctcttccacttccggcaccgccgggtcgccgctgggagcggcaggcaaggcggcggggacggagggtttggagtttgtggtggtggtggtggcggaggaagcgaggaagattttagggtttgtctgtttccgggggcattttttgttggttttggagagggtggcgcccatgcagaagagctcagcgaggatggtgctcatgggcatgggctcgtcgcgggcctcggaaggagggttccggggcgggtcattggggcgggcctgaggggattgcggatgggccgtgaggaggaaggaatcgaggttgggttcgtcgccggtggggatgcccttgttggaccggaggcggtcgagccagttcagaccggattttccggtctgggccgagcagagcatggggaaggttctagagaaaatggacgggcactgcaaggagtaagagagaaacaaaggggaaaggaagaatgcgcgtcggtgactgccacgtggacgacaaagtgacactgagttttaaaagtcaaagcctcagcagtgtggatacgttgtgaaccacgcccctctaaaaccgctgatgaggatcgttacttccagccataggctagttacatagatctccttcctttccatggtcttcacatacttcttaccaaaatgggctttt

SEQ ID NO: 28963 - DNA, 314 bp, Glycine max
  unsure (1)..(314): unsure at all n locations
  Clone ID: PAT_MRT3847_126154C.1
gttgtaanagcgtngtaantcggaatcggntcgagngaaagancnatggatgagngtnantgatngngtaagcannngnnnntanttagatgtnttacttganntnanatntattnnnacgtttngttgccnnntnaatcatncatntgnaattaaanggntgnattnngngtcnatatgcttnnttgtagggnnatngattggtnngnnatnatnaattcannatnnangcacnnganataaggnggttnaatattatgggggaagaganancaanaaagacgttggagnaaccntgcagaaancggagtcng

SEQ ID NO: 28964 - DNA, 588 bp, Glycine max
  Clone ID: PAT_MRT3847_126155C.1
gcgcggttctcggcttttattttcaatttggtgccaaggtacctaattttcgcttttccatttcataattgatataaaatatatagttttaactagactaaattatactaatcacttttgtaaaattatacaatttttattttattttttaacatttccaatatccttccctcctagttataggaagagtgcggtttaatatattttaaaaaaatttaaaagttagtataatattatttaaaggaatgtggtgcataattttcaaataattaagaggattaatatagagctatttttttttaattttacgaaacctaaaaaataattagtataatttactcttttaactaatgtgcactccatcacatactttgttttatttaattgagtcttagaattctcactttcaaagtttttagtttaccaaccggtaaggattattttttatgtaacttttaatataattattataaaaactaataaattttgtcatatgatgttttgaaatgattattttataaaagcacgtattatttattctttaattaatatttcatatgtttttgtatttaatataaaaagtgcata

SEQ ID NO: 28965 - DNA, 307 bp, Glycine max
  Clone ID: PAT_MRT3847_126156C.1
cccacgcgtccgcttctcttctcacacaatctctgttcaacaacgctagagaataatatctcaagtatcatgtgatgagatgaaccaagcacaacaacttcaagaagcttgaagtttgaactgtcaccttccttcggatgtgatttgggctccaacccctagaccacctttctgatcatcatcaatcaactctatttttaattcgtgcttgtgttgtgaattttgtttcgttaatctagtctgttcgagttgtaatgctgctgttagcttatttagtcctagttctaaattcaaataatactgattt

SEQ ID NO: 28966 - DNA, 1292 bp, Glycine max
  Clone ID: PAT_MRT3847_126157C.1
ccctcccggaattcccttctcacaatctttctttcttactctcaacacttcgcctccaatcttctcttctcacacaatctctgttcaacaacgctagagaataatatctcaagtatcatgtgatgagatgaaccaagcacaacaacttcaagaagcttgaagtttgaactgtctcaaacatgttctcaaagcttcagccacaacaccagcaacagcatcaaccttttcaattctctcgtgaatgtcaaacgtccgaggacgatgacagccgaagcagcggtggccctaacaccgccgtcgcccaaaaatcagttttaggcggcggaggatgcagcgatggggccacaattgaagtggtgcggcggcccaggggccgcccgcccgggtccaagaacaggcccaagccgcctctcataataacgcgcgagcccgagcccgccatgagcccgttcattctagaaatcccgggcggaagcgacgtcgtcgaagccctagcccggttcagccgcagaaaaaacactggcctgtgcgttttaaccggttcgggaaccgtcgccaacgtcactctccgtcaaccttctttctctcccgctggcgccaccgtcgccaccgtcactttccacggccgcttcgatatcctctccatgtccgccaccttcctccaccacgcctccccggcggcgatcccgaacgccttcgccgtgtccctttccggaccgcaggggcagatcgtcggcggattcgtcgccggcaggctcctcgcggccggcacggtgttcgtgattgccgcgtcgttcaacaatccgtcgtatcaccggctttcgtcggaggaggaggcgcagaacaactctggcggcggcgcaggagacgcgcagtctccgccggtttccggtggcggcgtggagagcggacacgttccggctgagtcgtttatgtacagctgtcaccttccttcggatgtgatttgggctccaacccctagaccacctttctgatcatcatcaatcaactctatttttaattcgtgcttgtgttgtgaattttgtttcgttaatctagttgtttgagttgtaatgctgctgttagcttatttagttctagttctaaattcaaaaacaatgatttagatttttggtgtcatgcttagtgcgttaattaccccttgatccttggtttctttttcatactagtggaaagctgttgacattgtgatttttgctcgacagaaagaaaatttatatgatttagttatacttcttatgacttcattcagataaaacttgcttatatta

SEQ ID NO: 28967 - DNA, 443 bp, Glycine max
  Clone ID: PAT_MRT3847_126158C.1
ggctcgagatgtgagttacaatactcacttgtcaatcatgtgtgactacggaggtgaatgcagatttgaagagcacatatcagtttttactttttatactagtggcatccacactatagtgtgtttgtctatgtctttcaatcttgatctgtcatgcaaaatccactctttgggattttgatcctctcgttctagtgtttaacatcacaggacgtgtggagagagacgcacagaccatacatgcgataaatgtgtagagacctatgcagtgtcttcgtatatctatcactccctgcacatatggtcatgagaaaattgatgagtaattgattatgtatgtatatatgaatctgtgtgtgcatgaatttattggagatttaattgtaagcaatgttcgatatttagttaagaaaaattaagatctatcatttattaggtggtgt

SEQ ID NO: 28968 - DNA, 379 bp, Glycine max
  unsure (1)..(379): unsure at all n locations
  Clone ID: PAT_MRT3847_126159C.1
acggntgcgagaagacgacagaaggggggctgagaactattcgtgctcaacggcgttctccaagtgactgtcctcgtcgctcccctagctattctccttatagaagaagctatagccggtctccctattcttcagaccgaagtaggagtcgttcttactctcctgactataggaggaggaagtcaaactatccatatcactctaggcgaaggtcatactctccatactacagccggtacaggtcttattctcgatatgatcgacacaggtcgtattctcgctcttgctctccttatagcaggtcacctgtcagcatccgcgacagatcatactctccttatgactcacgatatgactcaccggatgatcactcctacag

SEQ ID NO: 28969 - DNA, 239 bp, Glycine max
  Clone ID: PAT_MRT3847_12615C.1
catgcactaaacctcaacactaacatgataaacagacataaagactactaaccagcagctttgacgactgcaattgtggatggtcatgcaagtacagcggacgccctcactagttcccaaagcaaaactcaagcaagcactaaatacatgctacataaacaaactgcaatgactatgctcatgcttatcaatctagaaacgcaaccccatctatcgatgccgagcgcattatatgaagt

SEQ ID NO: 28970 - DNA, 165 bp, Glycine max
  Clone ID: PAT_MRT3847_126160C.1
cttctaaagagcgctcgcccgcatcgtacatatcgtgatcaagagaagaggagcgagttttgctattcctctgcagccctagccatggctgcctatagatgcctgcctggcgggaagaaaccagcagtatattcgctacaagacacctcacttgcggctggagta

SEQ ID NO: 28971 - DNA, 411 bp, Glycine max
  Clone ID: PAT_MRT3847_126161C.1
ctccacctccaccatcaccttctcctcctcctctacccccgccaatgtttcctccctcacccaatgaatctgttgcaggtttatgaacgcaatttgtataccttggtttaatttgtacgcaaatccagaaagaattgaagtagttattcatgtccctttactccacacgaaaaggaaggaatggcttatttatggctcctactcttgtaacttatgcggtcacaccatgtggaacatgagatgatcttgtctgtacaaagaggcaatgaaatttaagcacctaactagaaaccccgagacaagaccatgacttgccaatattcaggtgctgccattccaattagggacacaagaaaacacatcacatgtgctcctaagtaattgttatctaacttatcgcacatttatttt

SEQ ID NO: 28972 - DNA, 128 bp, Glycine max
  Clone ID: PAT_MRT3847_126162C.1
ggcagttcctccgatttgggcgacggaggctgcaacagactcattctcaagtgcactagacgactccgatttactttttccaaacctgtcaagcttcactattactatagtttcattttatggagact

SEQ ID NO: 28973 - DNA, 747 bp, Glycine max
  unsure (1)..(747): unsure at all n locations
  Clone ID: PAT_MRT3847_126163C.1
gccagtttgatcagtcagtccaacaggtgactgactgaacagattagctgattgattaaaatccatcatgtgcagtcaaaaccaaaatgagcaacaaattaactggatgcagttttcaaaatccatcagtttaaaaaagtccaacagaaaatatttcaaaattcattcaaatacagcattgggacttgacttgtttgtgtgtttctgaccctctacctattcaacattcaaacgttattctgcttgtcaacaggttgagtcactctcttctgagaaggcaagtcttgtattcagaattgaggtatgctttctactgagaatatgatactaattcttgaaattgtgatatacttgattttcaattttcataatcaacttagcaggctgtctcaagattgctggatgagaacatgtcagcatcaggtgcagcaaatatgaatcctgcctcttcatcaagtgacttagaatcaggattatgggagctctccaattcaaagttgaagcctatgctaaaagccagaattcattctggcaagagacagcttggatcattgcttcaacaactagattatatttttgtgactggagcactttttctgaaaaggaactcaacggcaaaattgtgggctntgatatatcttgtttgccttcatttctgggtgttctatattcttttatcacattctagcccatcaaatgagggtagatctggtgcccagatctcattggagaacatcaataacactg

SEQ ID NO: 28974 - DNA, 725 bp, Glycine max
  Clone ID: PAT_MRT3847_126164C.1
ctactaaatgaacttttattttccatttattctttattcacaagcaaataacgttacatgcaccatgtcaaccacttattcttctgcattcgtaggcagataatattaaatatacaatgtcaaccacatttattcatatgcttgataaaatcacccattagggaagagtcttgctccaaggggattttcccaagcttattaagtgcacgcatcaacaaattttaaggtagtgcaagctagtgtaacattgttctttctacaatgttggagggatccatctataaccatgtgtttgaacataaccagctttttccagcagtaatttatctgcttctacaggacctcttgttccaggttggtaaggggttgacttgaactcccccttatcaatgcggtgcaaaagtggggtgaagatctcccatgatgccttcaactcatctctgcgaacaaaatgttgttgatcacctctaattgagtcaagaatcagacgctcataagcctctggaatggttactgcttgatagcgttgcctataagacaaatctagttcactttgaactgtttccatctccagtccaggtttcttgactgtaagcttcatgtacatagcttctgaaggttgcaggcgtataacaaactcatttctcccctgcttttgacacttaaaaatatcaccaggaacatccttgaattgaacccgtatgtctgcctttctcgaatttaag

SEQ ID NO: 28975 - DNA, 246 bp, Glycine max
  unsure (1)..(246): unsure at all n locations
  Clone ID: PAT_MRT3847_126165C.1
ttnnnnnnnnntttttttttttttttttttggtataatcttgaatttactacatgatctattgggtgtatgagggtgtgaaagggaaacttaacaaatgccttgtgaattcaaaccaagactggatgaaaaattaggggctggttgggtccatgtcccatgagcaaaaatgggggccaggttttttaaacgttacgggagacccaacccccttctttaggttttaagaatgaaatttcatttttta

SEQ ID NO: 28976 - DNA, 434 bp, Glycine max
  Clone ID: PAT_MRT3847_126166C.1
gcagtctgtactaaaattgatgatatgggggcggacatagctcccactaagctctatggggacaagtttgagtgatacctaacagacttctatgatctagtagttacgtttgcaaattacaacatcatcacaattacataccaaaccagtaaaaactggacaacaaacagttaagcaagttgttcattagttacatacccttctctcctcaagggcaagcctcttgtgtagccgctcttggtgattaaaaaattccaaaaacaaatccctcatgtcactagctatcttgaattcttgagttcctgagtatacaaccttcaaactgtcgctccttccactctttcctttttgtaatatattcgttgatgtattcacaaatcttcctattgatgctttaatttttttgagccccactagctttttcaagtactacc

SEQ ID NO: 28977 - DNA, 324 bp, Glycine max
  unsure (1)..(324): unsure at all n locations
  Clone ID: PAT_MRT3847_126167C.1
ntgtcgcatgcacgcgtacgtaagctcggaattcggctcgaggnnangntantngtgtnctttantgtgaaagggctggnacggntnntnatntgnacactcanaaganccttcctttgcggnttntcttcttgacgaagaaganggtctctcgtgtngttgttgattcttgnagaaggnaagaagganggngaanatgatgaggctatggantncttatctgcnattcnnngnactttttgtgagttcattggttcatatgcntnatgggttgtacatatntagctccgcggtggctggggatctctcacaagctctcaatga

SEQ ID NO: 28978 - DNA, 217 bp, Glycine max
  Clone ID: PAT_MRT3847_126168C.1
acaacaaatactcatttctactcccacaatatctacctttatgagccggacttttaaagtattatcccctacaaccccctaacaaacattaaaaatttttgattctgaattatgtgtttcactaatacccaaaatacaaactttacactaagctacatgggcaaaatccactaccttttacgatcacaccacaaactcttcccgacataaattgctt

SEQ ID NO: 28979 - DNA, 128 bp, Glycine max
  Clone ID: PAT_MRT3847_126169C.1
ctatgatttttctggactcttgtattctgagctgaactaactctgttcttccctcgtatagtgaagtgcataataaggacatagaaccttgcgtggacatggcaacaacagcgttgtccacgaacagt

SEQ ID NO: 28980 - DNA, 606 bp, Glycine max
  unsure (1)..(606): unsure at all n locations
  Clone ID: PAT_MRT3847_12616C.1
aattcggcaccagttgtgttgttaaccgaagcaccttgtctgtgccactgtcttgtctttaaatgcaatgagatatgaagattttaatccatcaattttgcaatagaatgaatgatgatcatctaaacatgcacttaccatgcgtgatctcttgcatantttttaanttttttgttgttgtttatgaattataatctttaatactgtttttcatggtatccagtgtatgggtgcttttataattttaaagggcacgattattcaatctggattgcttcttttgacctcctaaatgacttgtgttatcatgtgagagcataatactgttgtgcaatctgtgatgaattttnccaaattattctgattaatctgtgattattatactaaaatcaccatctttcggctgagatagcaaaacagtattatactctacgggtttatttaggctttctatgtgcaacatctgtcttcaaatgttattcctatttcatgtacaaatttcattcatggaatgcgttcttacaatataatctntctctctggattttcctgtgaattgtcagtccatgctgattaagtttatatttaaatttcccattggagtgc

SEQ ID NO: 28981 - DNA, 239 bp, Glycine max
  Clone ID: PAT_MRT3847_126170C.1
atatcaccaagaatgttacttatgactgaattaacaaggagctgtctaatcaccattggctgaaaacggcagggaagatatccatctgtacgcggcagatgtacagatattccctaatggagtttggagactttattatcttactggatcttcagctcctccattctaagtacccttacttgtgctctcgtcaaatacaaccttaggcgactcgtttcacttcttacttaaagagttcc

SEQ ID NO: 28982 - DNA, 1116 bp, Glycine max
  Clone ID: PAT_MRT3847_126171C.1
tacggctgcgagaagacgacagaagggggaggttggcaatggaagtcctttagactacactactacagtaccaccaacgatcaatgcaatattcatcaaaatgggtacaagagatgttcatgatgatcttcatactgatgatgatgatcaagaagactcagagttagaggatcaagaatcagcaaaggcagagaaatggaaaaaccattactcatcaaatcacaggattctccttgttggagacggtgacttttcattctctctttgtttggccagagcctttggttctgctcacaacctcgttgccacttctcttgattcctatgatagcattggaaagaagtacagtaatggattgagcaacgtgatggaacttcaagaaagaggttgccttgtttttcatggtgttgatgccaaggaaatgagtcagcatttttttctcaagacccagaggttgaacaaaaggttgctgaagggttttttagcaaatgccaaggctctaataaagaaagagggtggggagattcatgtaacacacaaagagggtgatccatacaacaaatgggatctggtgaagaagccagaaaagagagggctggtcttgcaacaagttgtgccattcttcaaggatgattatcctggttatgacaacaagagagcccatggaaaattatctgatgcacctttcccggttggggaagctagtacttacaagttcaaggtccaaacatctaacacttgtaataattgattgtagttctaagtgttgggttttttttggaagatcaaagttatttagaaaacattgactttcatgtaccaaaacaggtaacatgatgccaatcttggatttgtatcttcctgtggggatggcgatcttctgtaaatatggatggctggagttcagtctgctatttttcaaggggctgttttgctttagttctttgttgcagacttgtgttcaacttcactggtggtgttgaataggctgtaatctcttttatttaactcatgaacttaggaaaaagattgaagggaaagggagccttatttatccctgaaatttaaccgaatacccctccccttgtgaatgaggcaaaaataaagaatttgccc

SEQ ID NO: 28983 - DNA, 354 bp, Glycine max
  unsure (1)..(354): unsure at all n locations
  Clone ID: PAT_MRT3847_126172C.1
aaaccctctcctcctcccaacaacccattcgcaacaaccccccatccaatcctccaaaagctccaaaaaaaaaagggtacggtgagtttccggctgctctcttacctccctccttctctcttgtatggatcggagggggcctgaagagaccacagatttcccatctacggtgaaagatgacaggccgatatctgacccagncaaaccaacccaagaaggatgtttgagccctctcgctcaacccaactatccccagtccttaaaggaactacgatagacttcacactgttggtcttctgaacgtttgaactggagggggaacctttagttgacacggatcaagaaaaggatatg

SEQ ID NO: 28984 - DNA, 428 bp, Glycine max
  unsure (1)..(428): unsure at all n locations
  Clone ID: PAT_MRT3847_126173C.1
ctttacaacctgaaacaaaagtcaatccgttaccttgattttcaaagaaatcttctcaacttttttctctactcattcgtgtacgatttcttaagggaaagaaaaacactttctgtgctcgctacacaccttcgtgaatcattttcttttccactcttaggttaatttgccgcacacctctcctatttgatataggacttcgtgtcagatttaaactcctttcggcnctttctcagttctctgtttaatttcaagttcaagctggggaaancttggattagtactcccactctcctatctggtataggatttcgtggggtagacttttacaattctttcctttctttcactctcttcttctcactgatcccgattgcccgtcaaacgcgttcttatttgaaaaacaacttggcgttggtgcaaatggt

SEQ ID NO: 28985 - DNA, 429 bp, Glycine max
  unsure (1)..(429): unsure at all n locations
  Clone ID: PAT_MRT3847_126174C.1
acgtagctccgaactcggcccgaggctcccgcgagctcacccggtgctctcagatcactctggcatatactcagacagttaaggattcagtatctgcccaaggtgattctttcacaaatgaggatgagagaacanaaaaggcttcaaaagatcctaaaagtaaggttaaagtgaatccttcagaaagcaaccgtggatcaaaggagagatctgatagaaaaactaataaattgcaatcgaaggtatcgaatagcaatcaaaagaaacctatgaactcaaataaagggccctccaaagttacaaacaaaaatactccctcaaccaattccaagactgtgaaagttcctgtaaatgtatcatcagaatcttctgaaggtgtagatgaaaaacctgttcaagaggtcaaggaacctgatgttggggatggat

SEQ ID NO: 28986 - DNA, 340 bp, Glycine max
  unsure (1)..(340): unsure at all n locations
  Clone ID: PAT_MRT3847_126175C.1
gttggctttgagtttgagtttgagtgcatcagcaaaacaactcagttcacaagaatacaagaatctcaatttcaccaaactcaccttatactccaactacaacactctctccaattacatcaagaacaaacacttaatatcaaattatttcaactattacaccaaacactccaataataccactaccaagattacgtactctaaanctttactaaaaatctacatagaaaaacttattttctatcctaaacttattaactttattaaaaataaagaagatcaatgtgccatcagtaaaattcaatgtatttttaactctccaccatacctaattatacta

SEQ ID NO: 28987 - DNA, 1517 bp, Glycine max
  Clone ID: PAT_MRT3847_126176C.1
ggcccgagcctacactaggctcaacgattcatccaaactgaaatggcggaaggaagaagagcatcttatcaagtagtgatgctctctcactcacacccacaaaccttgccacgcccacattcatcacttccttcttcttttcttcttcttcttcctccttcttttttccgaatctccaacaataagaggctgcaatcctcaactttcgccctctcccaaaatgaaaccaaattcccaacgcagccttacaagaattccaacaattcgcctcaatcacttgctcacatctccaattgcaaattccccttggctcggccccttgtttcttcttctcatcccgctagtactaattcatccaccaagcttctcaactctatgctgctcttcgccttcctcacacttcaaccctcttatcctgcacttgctgcttcttctgacttctccactatatttggggatattggtgacttaagcacaggttttgcttcagcgtttctgctaatatttttctctgaactgggagacaagacctttttcattgcagcgctactagcagctaggaactcagctggtgttgtttttattggaacatttggcgcacttgcggcaatgactttgatatctgtggaatgactctgatatctgttgtccttggacgaacctttcattatgttgatgaaatcttgccattcaggtttggagaaactgatttacccattgatgatattgctgctgtttgcctattggtgtactttggggtctctaccctgctggatgcctcatctagcgatggccaaaaatcagatgaagagcagaaggaggcagaactagcagtttctgaattttctggaaatggtgctgggatactatctgctgctagcacagttgccagtacttttctcttagtttttgttgctgaatggggcgacaagtcatttttctccacaattgcccttgcagcagcttcttctccccttggagtcatagctggagcactggctggtcatggtgttgcaactttgctagctgtacttgggggttctttacttgggacgtatttgtcagagaaggttattgcctacatcggaggtgttctctttctcgtctttgccgcaataaccttatttgaaattgtgcaataggggttaaaagaaatgcaatataatctccgtgcaaagggttcaagaacgtaatgacctctagagttgtatgattctgcactctccatttatggcggctacagaaggaaaacaaaatgtactataatcctgcatctgttttaggaatagacttttacctttcaatgcaatcctcataaattatgtcatgctagtcattgaaattttgtaatttcattttaaacgaacattttaattaacataaattatgtgaaacatgatttaattgttgataattattccgtgtattatactggtatttgtaaatggacatgaaatgtaaaaagtattatatattttaagaaactttttatcattcgtaataaaaatgatcctttt

SEQ ID NO: 28988 - DNA, 257 bp, Glycine max
  Clone ID: PAT_MRT3847_126177C.1
atatactcccgcatgttaaatggcgaggatcaaacctcaagctctgctacagcaaagctaaaggaagaagggtccttctcggataagtgccgtgactgctatattttacttgctgattcttgccttggttgggtttttcctgtttgcttcgtacatacatttgtccagcagatcactattacaatccgtagatcacttgtcagtctccgagggtgataatacttttgtggactccaagagatctgagctgccttgat

SEQ ID NO: 28989 - DNA, 340 bp, Glycine max
  Clone ID: PAT_MRT3847_126178C.1
acgatttgacaacatgcaaatatcctctggtattttggtctctaccctgctgcttgctcatatagcgaatgccgaaaatcagatgaagagcagaaggaggcagaactagcagcttctgaattttctgtaaatggtagctcttatactatctgctgctagcacagttgccagtacttttctcttactttttgttgcttaatggggctacaagtcatttttctccacaattgcccttgcagcatcttcttctccccttggagtcattatctggagcactggctgttcatggtgtcgcaactttgctagctgtacttgggggttctttacttgggacgaattt

SEQ ID NO: 28990 - DNA, 301 bp, Glycine max
  Clone ID: PAT_MRT3847_126179C.1
cagtgaggtgttcgggttgcagaggttccgccagtgcgagctcattcacgggaggtgggccatgctcgccactctcggagctctcactgatgagtggctcactggtgttacatggcaatacaccggaaaggtgtagctagcggaaggttcattatacctatagtaaccacttccattctcaatcaccacactgatctggatcgaggttctcgtaattggctacatatagttccagaggaacgcagagctggacccaaaatagaggctggacccatgtggcagtaaccttctacccacaggg

SEQ ID NO: 28991 - DNA, 827 bp, Glycine max
  Clone ID: PAT_MRT3847_12617C.1
aaggatataactagaaaaccctagtgttctagtctagttaagttcatctctcaaccttatacttcaaatcatttttcaacccaataatggcttctttccaaggcatcaacaacaacattgaaaccctaattccaccagagctcctcataactcagatcatgcaactccatgcaagcatctccaagcttgaaaccctaaggccatgcaagcaagtcaatagcctcttcactcacctagtgaagctttgcaccctcccttcctccattggcattgaatccttgccccaagaggtgcaagacatgcgtgagagcctcattaacctaagtggccgcgccgaggggctcctagagctcgaattctcgaccttcataagcctcacacccgagccaatgaaaaacgtaaccctattcccttactacgggaactatgtcaagctagcaaacatggagagcaaaatcctcacagaaaacggagtggtaaaccctaagaaagtggcctttgtagggtcagggccaatgccactcacctccatcgtaatggccacacaccacatggaatccacccactttgacaactttgacatcgacgaagaggcaaacgaggtggctcgaaagatcgtggcttcggacgtggcacttgagaagaggatgaagtttgagacacaagatgtcatggaagtgagggagaggttagggcaatatgattgcatctttttggcagcgcttgtgggaatgagtagggaagcaaaagtgaagattttgggacacataaggaagtatatgaaggaaggaggggtcttgcttgtgagaatgcaaaagggcaagggc

SEQ ID NO: 28992 - DNA, 286 bp, Glycine max
  Clone ID: PAT_MRT3847_126180C.1
cccacgcgtccgcccacgcgtacgtccacgcgtacgacaacccgtccggtcttttggtttttttttggtggtttggctggggcaatccttggggggcaatgaaaaagaacccaattggaaaccataaaacccccaagtttaaccacattaaaaaactaattgttgacaaattaaaaaggtccattgtgaaaaaggaagcaattgcaaatggagggtttgttgaagcataaattccaccaccaactgcaattcctgccatacctgatccccactctgcaatgaaggg

SEQ ID NO: 28993 - DNA, 665 bp, Glycine max
  Clone ID: PAT_MRT3847_126181C.1
cacgacctctgttggttgtcgcaattcggaacacagcctaaacacaaattcactgttcacagtgttcatctctctcctgcgcccttcctttgacttaacgagggaaccgaacaaacacaacttttatttatggctgtggcctaatttgcttccttttccccaatcaaaattcaaaaccctaactatatccttcgattgattttttgttcattaatttgctgctagctattaaattgtgagagtcagagatgtccgaaaaattctcggcagcacttaggatcggagatctcaacgatttcatcgctccttcgcaggcatgcatagtctccctcaaaggattgaaaaagaatgataaaccggaggtatcaaatgctatcaagcaggtcaagtttgaacctgttaaaatttctcttaaggatatgttggcatgcagagggaaaaaatactttacattaaaagattgtgtttcttatggggatgctgttgataatgtcaaagagcaacttttatttggaatcatcatttatttgtctgggaatgcagtggatgcgtcacaatcagcagagacagttgtgctgggagaagcaaagtttggatgagtttctgaaccaatgttaaattcaggaaaagggccgttgattggaggtctttttttttttccccaa

SEQ ID NO: 28994 - DNA, 2512 bp, Glycine max
  unsure (1)..(2512): unsure at all n locations
  Clone ID: PAT_MRT3847_126182C.1
cctcgggcaaaatctcattgcccaagaatttgggaatggccttcatcaggcttgaggacacgacctccgttggtagtcgcaattcggaacacagcctaaacacaaattcactgttcacagtgttcatctctctcctgcgcccttcctttgacttaacgagggaaccgaacaaacacaacttttatttatggctgtggcctaatttccttccttttccccaatcaaaattcaaaaccctaactatatccttcgattgattttttgttcattaatttgctgctagctattaaattgtgagagtcagagatgtcggaaaaattctcggcagcacttcggattggagatctcaacgatttcatcgctccttcgcaggcatgcatagtctccctcaaaggattgaaaaagaatgataactccggtttatcattctttttcaatcaggtcaagtttgaacctgttaaaatttcgcttaaggattgtttggcatgcagtggatgcgtcacatcagcagagacagttatgctggagaagcaaagtttggatgagtttctgaacaatattaattcaggaaaggccgtgattgtgtctctttctccccagtcaagggcttctattgcttttcattttggcatttctccaattcaggctttcaaaaagctgacaagattttttaaatccttgggagtgaaggcaatttttgatacaagttgtagtagagatttgacccttgtcgaatcttgtgtggagttcatcacaaggtatagacaaaatcaagtggttgaagatgagaggagtaaatcaagtctacctatgattgcatcagcttgcccaggttggatatgctatgctgaaaagcaacttggatcctttgttctaccttatatttcatcagtaaagagtccacagcaaacaattggagttatcataaagaactatgtgtgccaagaattaggactcaggccagaagaagtttaccatgtcaccgtgatgccttgttatgacaaaaagcttgaggctgctagggatgactttgttttccaatttgagtcccatgctgaagggcgtgagagtgaaattaacatgatttcagaggtagattcagtattgacaactggagaagttttggaattgattcagtcaaaagaagttgattttaaaagcctagatgagactactctggacaaaatactaacaaatattaatgaagatggatacctttatggggtcagtggaagctcaggtggttatgcggaaacaattttccgatatgctgctaaaacactttttggaagacagattgatggccctttgaccttcaaaaacatcaggaattcagattttcaggaagttactctggaggtggagggaaaaacagtgttgaaatttgctctctgttatggtttccggaacctgcagaacattgtacgaaaacttaaaactgggaaatgtgattatcatttcctagaaatcatggcatgcccttcaggttgcttaaatgggggaggtcaaatcaaaccaagttcagggcaatctcctaaagaactaagtcagttgttagaatcagtttacatggaaaatgttttggtagcatcaccgtttgacaatcccatcgttaaaggcttatatgacaagtggcttgagcagcctggttctgtgaaagctgggagatacatgcacacacaatatcatcctgttgaaaaaagcattacttctcagttgcataattggtgaggtgttgaaactgaacttttcatattgtttcttctcaaggtcattttgtggtattaggcggaagagtactttaatccttttgctatggctccttgtggatatgtttgcatattggagtcgtccaattttggcgttgaacagatttttttgatgtatatagatccttgatctgcacccatatagatagaaagaatcacattttgtaatttaccatctggacctcggttttgttgttcctgcgggtcctctattatttttagtatctaggttctcaataaaatattccttgattacgtgttggtgtgagtgactgattaggtgagaggactagagtgacagtgcagttgttggagcacaaattgtatgctttacatttatgtactcttaaatttgaatgaagcaacaaatatttctctggtagagatttgacccttgnctaagtttgtgtggagtgcaccacaaggtatagacaaaatccagtggttgaacatgagaggagtggataagccctacctatgattgcatcaacttgcccaggttggatatgctatgctgaaaagcaacttggatcctttgatctaccttatatttcatcattaaaaagtgcacagcaaacaattggagttatgatacacaactatgtgtgccaagaattaggactcaggccagaagaattcaccatgtcaccgtgatgccttgttatgacaaaaagctcgaggctgttagggatgactctgttttccaaggngagtcccatgctgaaggccgtgagagtgaaatt

SEQ ID NO: 28995 - DNA, 773 bp, Glycine max
  Clone ID: PAT_MRT3847_126183C.1
aacggctgcgagaagacgacagaagggtaaagtaaagccttcattgaaagcaacttcagattcaggaaagccatcttcagcctttgtaaattctggttttcccagtaatttggacaacactaataaaaagaattcggataaccattttgaagattcaacaaaatctcgttctagagttatgcaggctcatttgcaacatttgagagcagatcatgcagaagttggatctcaaaacaaattggcagaaatgagcagtaaatatagaaatagtgaatctggggttagccaagattttgacttggaaggtcgcagtgaaagcaatagaagagtgcctgcaaatgcatctaaaccacaagacagtaaacgcggaaacgtttcctaccctgtgaaagaaattaaaagacaaacacctaattcagtggaagagatggctgatggaggaaaggattctgttgcagatagaaatcatagcgatcaaaagaagagagaatcatcttcagatgaaaatagttgctcttattcaaagtatgaaaaggatgaacctgaattgaagggaccaataaggactttctcccagtaagctgttattcttaattttttctttaaactgttgtttcagtgattcatgttgtggcagggttcgcctttttagttaatcacttgattttttgggcatctgatacgtttttttcctatgcaatgctagatataaagaatatgtgcaggaatttcaagataaatatgatagttactgctccttaaacaagattttg

SEQ ID NO: 28996 - DNA, 201 bp, Glycine max
  Clone ID: PAT_MRT3847_126184C.1
atgcgcgagtacacctgagagggggcgccacctgaggagatgatggctacataccatgtaaccttcatgcatgtgttgatctcccctagaccactgagacaggatcctgacgatgctgaccatgcgtataggaagttaccatggtggcctttgacgcagattcgctcagtcacgctcttcacctcagcacattccgcgatc

SEQ ID NO: 28997 - DNA, 901 bp, Glycine max
  Clone ID: PAT_MRT3847_126185C.1
acgagcaaaagtgacttaccatccacaaccctaaaccaacccctctcctccctccacttccttatatatcttgttcgagacttctctttagcgtgcttgatggctcgagtttctcgcttcagcataataatattatcgcctgcatccacagtaacagtacccctctcttcttcatcatttcatggaggattcttcagctggtgaagacaccaagacttgccctcgtggccactggagacccgctgaggatgaaaagcttagacaacttgttgaacaatatggtgcccaaaactggaattcaatcgctgaaaagctccaaggaagatcagggaaaagttgcagattaaggtggttcaatcagctggacccgagaatcaacagaaggccattcacggaagaggaagaagagaggctactcgcggcacatcgcattcacgggaacaagtgggcactcatagcgaggcttttccccggtcgaaccgataatgctgtgaagaatcactggcacgttataatggcgagaaagcaaagggaacagtccaagttatgtgggaagagaagcttccaagacgtttacaacgattccaacaacacgttcctcgaaaaaagaacaacaccacaatctcatcatcaagacatgttgtttagtacgagatttgggttagagaatggaatattcttcgactttcgaagcctcgataaaaataaggatgatagtaataataataatcataggatagtgtcagatactccctctagtacttctctggcgtcttggaattttggttctgtgccaaccaccaccaccaaaggcgcgagagacaatttcaataacacttctcgttcttctagtgtttatctctcggaatgttccagaagctcagatagatcttttctttac

SEQ ID NO: 28998 - DNA, 782 bp, Glycine max
  unsure (1)..(782): unsure at all n locations
  Clone ID: PAT_MRT3847_126186C.1
ggttgaacctttgaaaactattgaagggcaccaagtgatttgcaaattggctgtggataacaaaaagacgaaacctttttgaacgggatcagcatcaacatcagcagcatcatccgcagcaacagatgcagcagcaagtttctatgatggtgcctcagtatggtggatatggtggtaatggttatgggatgcagcagcagcagcatcaggtgccaccgtataataaccaagttccggttgccggtggtggtgggtatggccatcgatatggcaattcgcagatggctgggccggtatctggtgactatggtgcgagggtgcctcccaattctggtgggggttaccctgatggctcgcagtatggcttccctccttcgtcggggcatccgccgcagccgcgggttccgatggcgagacctcctggtggaatgtaccaaggcgcaccaccctattattgaggtgggtctcctggttgatttcgacttgaagtacttcggccaacactgcattgctgtagtcattgaggttgtggacttttgaatgccatttttgtttccaaatgttcgttgaaggaggcaagctatttctttaatcgtagttcaaagtgagacaattacttgtaatacttttgtaatgaaatacaaatgtcgtcttaggataagtgtatgtgacagatggttttgatataatatattgcgcttcatttattttacgaggttnnnnnnnnnnnnnnnnnnnnnnnnnnnnnnnnnnnnnnnnnnnnnnnnnnnnnnnnnnnnnnn

SEQ ID NO: 28999 - DNA, 369 bp, Glycine max
  Clone ID: PAT_MRT3847_126187C.1
aagagattcccactaaagcgtattattgactttggaagtggaattgatgaatttacattaaagcatttatatggttccactgggccttctagagctgaacaaacctatgagtatactcctcctgaagctttgctgaatgctacatggtatcaagggccaacaagctcaactttgaaatatgacatgtggagcgttggtgttgtgatgttagagttggtcttagggacaccaaatgtcttccagataaatgctttaacacgtgctcttttagacagacaactagaaggttggaatgagggtgtgaaggagctggcatacaaacttagatcattcatggaattgtgcattttaatccctggaatttccagg

SEQ ID NO: 29000 - DNA, 121 bp, Glycine max
  Clone ID: PAT_MRT3847_126188C.1
gatcacattgcagctcagacattcttcattccgtgagttggctactgtaactagaaattatagagctgaatgtcttttgggagagggaggctttgctagagtatacaaaggacgtatggaa

SEQ ID NO: 29001 - DNA, 247 bp, Glycine max
  Clone ID: PAT_MRT3847_126189C.1
atcgcaggttcgtgcatgaatctaatcaatgattctcattaacttgtgcgatggacacacgcacaatcttgcaattttactttaattagccatacttgcttcctttaacgctaaaactttgtaggctgcattacattccgaattcagattcagaggaatgcagttagatgctgctcaaaccgatgacgacgaagattgtgaacttctggctacggttcggtgtggtaaatatcatattgcacccatt

SEQ ID NO: 29002 - DNA, 307 bp, Glycine max
  Clone ID: PAT_MRT3847_12618C.1
cccacgcgtccgaccacgcttacgcggacgctttgatcgtccacgcgtccgcccacgcattcgaaaaaggagaaacataaaaaaggacaataagtaaatatatattaaacatacatatattaactcaaaatgactaactttatctttttcccaaagataatataagacgctatacaataaaaagctgaactagtttatctacttaactttaaaatgtgattcactggatattcctttgttaaaaaaaaaaaaccaacaatatttaaatatcctccattataaaataccaacaattttaaaaatattc

SEQ ID NO: 29003 - DNA, 1191 bp, Glycine max
  Clone ID: PAT_MRT3847_126190C.1
taaatagtaagaagtagatcggcgtgatttggtaggcgagtctcgtagccatcgtgattgcaacatcgaaatggaaacgccgaagagatttgaaggtaaggtagccatcgtgactgcttccacacagggaatcggcttagcaatagccgagaggcttggcctcgagggtgcatctgtcgtcatctcttctcgcaaacagcaaaatgttgatgcggccgcggaacaactgagggccaaaggaattcaagtgttgggggttgtttgccatgtttcaagtgctcagcaaaggaagaatttgatcgacaaaactgtccagaagtatggaaagatagatgttgttgtgtccaatgctgctgcaaatccttctgttgatgccatcttgcaaacaaaagactcggtccttgacaagctatgggagataaatgtcaaagccactatacttcttctgaaggacgcagtgcctcacttgcagaagggttcttctgttgttatcatttcctcaattgcaggttttaacccgccaccttctctggctatgtatggagtgaccaaaacagcccttcttggacttactaaagccctggctgctgagatggccccaaacactcgtgtaaactgtgttgctcctggttttgtgccaaccaattttgcttcattcattacaagtaacgatgctgtgaagaaagaactggaagagaagacattacttggaaggcttggtacaacagaagacatgggtgctgcagcagcttttttggcatctgacgatgctgcttatataacaggagagaccattgtagttgctgggggaacgccttccaggttgtagattccactatcaatcttctctgttgtgggccagccccacacattcctgaagctcttgttcgtctgaaattattacatgattgaggattatgtgttactggcatgagattactaggctatgtttgccattactaatgaaataataaaagttatcactttttaagagggggaaaacacacaaagatatgcacaataagagagtaatagggaattacatggtggaaaaagaaaaagtatcatacacagtgcatttatccgaaagtgccctccctagctccaggtaagtggaaagtggcaactcacgggtatttgtctactactacttgaaatgccgagggaacttttgaagagaaatcttcattg

SEQ ID NO: 29004 - DNA, 424 bp, Glycine max
  Clone ID: PAT_MRT3847_126191C.1
aattcggcaccagccaacttaaaaaagcctcgccaatataatgttctctcactgataatgtgattcctttcacatctgcagccattaatgctggggtagctggatgctgcgctggtcttgctacaagttttcctggtatatcccttcttttaataattgatgaactatcatcctttacttgaaatttttagtaacttgttggtctctgcaccaattgaaattaaggataaaggtcaccgtaatcttacctattttgaccaaaccttttttctcaaaggtatgaattttaatttgtctttcattgttgaaatctatgaataaacatgatccttcatgccaaacacttgagacaattttgtctccaattggtggctggggaaagggtgaggtttattactatgttgaatggtctaacaaaacaaaa

SEQ ID NO: 29005 - DNA, 323 bp, Glycine max
  Clone ID: PAT_MRT3847_126192C.1
cgacgaagctcgagtcgcgtgagcgaacctcacatgaaataaaggaagagctttgcgactcactcactctcgtagagagatcagggatatcgttcgcggtaccctcgtcaacttcaatctttctctagaaaaaggcacccggattccggaccttcacttttcggaattcttcccagatcacatgggtgaatctgtctaaaaatcttttattagcgtatcaaagctttgctgtggcgtatgcagatctgagcactccacctttctatgccttcacaagcacctctagcgggaagttgcacaatcatcatcatgcataaactata

SEQ ID NO: 29006 - DNA, 293 bp, Glycine max
  unsure (1)..(293): unsure at all n locations
  Clone ID: PAT_MRT3847_126193C.1
ctgtctnnttttattttttgttgttattttttttctttctttcttgtaattgtttggttttctgtggcaccaaaacggaagaaaaacatttttcccctttccaatctaagaagggccataaacccgctttccaaagttaacggccgcgggggcccacccggaaatcacggaccggtatcgtgggggggcccaaattttccttatgggaggggtttaaaagcctgggggaaaaaaagggcaaagctctttcccctggggaaaaatcgtttcccgtaaaatatccacacaaataa

SEQ ID NO: 29007 - DNA, 313 bp, Glycine max
  Clone ID: PAT_MRT3847_126194C.1
atatgctcaagggaaggggtgtaaattatcaagacaatcttttttatcacagcaatgagcatatctaatgtacgacccagttgggtgtgaacaaagcattaagcaaccgttgattccggcactgttcttcatcagtggggggccaaagtcgaattctacatgccataaaaaccgcgaatacaataacaaggggacatctttaggttatctttgcccagaaacacaaggtttagcagaaactagcccgacatagaacgactctgctcgtttgaagtccaaagattttacggcttactgaggaaaaggcttttca

SEQ ID NO: 29008 - DNA, 2767 bp, Glycine max
  Clone ID: PAT_MRT3847_126195C.1
aggcaaggcggtagtatttgtattatggataattaaaaattcatggcagctacataagtaaaatataaatataaatagacacatctatattttaagtaaaacaaaaatcacattactcattctaaagaaaacctccgccacattttacaagtccaaaagtgcataatctcataacgtgaaaattctatggctgattggcaaagaatagatattagcctgaagtctttaatcagcatattatttgactctgtaagccttgacccttttcaatagctctttagcattgctgtccttcctaaagtgttccctaacaggctccagaattttattcaatgactttgccaatgctggtttaaggtcaccaggatgtaactctccacttttataggctgcagtcagctcttcaaagcttgtgaaagtcttattcccaccattatctgcactacgctccactgtgaactcattaaaccaaggtaagacaagatatttaatgtactccaagcatgggtttccttccacagtcttgggagggcaataagccttttttattttcacattcacttcagcctcctcatcttccatgaaaatggaagatccatgggtcactttttgacaggtttggtcccctctctgaggtgaccaggctctaacataaaacataagcctttgtgaaaaaaaagtgggcttaccacgcggcgtctgtttcgcagctcaacacaaagccccatcgtctgttctctctccgtacttcattcaggcacatcatcttcttctataacattaacccagggtcgtctccaaaaatgctacctctgcgtccacaagcacaagttggaggactacaaacatcgctgtctctggtttcctcagaccctctcctgtctcctgatgaacctagatcaaactccaacaatctccatgaatctccggctgaaagtgcaagttctcaggaaacttggcctactgctgatgcagctgcagcaaagaagatggagaatggaaaagcggaggttaattgccttgagcagaaagtgattcatcgtgtttctagttcagacaaagttactcttcaggatgttgctagagaaagtgtttgtatgatatgtgaaaaaatgcatcatctacctgaggaatatctagaagagctaaagaatggactgcgaagtatccttgagggagggaatggttcgcagcacagagaggattttttcattttgcagaagcttgttcagagtagaactgatttgactgccaagacactggtcagagcacaccgagtgcagcttgaaatccttgttgcaataaatactggaattcagggatttttgcatcctagcatcagtctatcacagacttccctgattgagatctttggctataagagatgcagaaacatagcgtgccaaaaccagcttcctgctgatgattgtacctgtgagatatgcaccaacactaatggtttctgcaatctttgcatgtgtgtgatctgcaacaagtttgactttgaggtgaatacatgccgctggattggatgtgatttgtgttctcattggactcacacagattgtgccattcgtgagcaacttatttgcatgggcccttctgcaaagagtggagcaggaccgagtgaaatggttttcaggtgtcaagcatgcaacaggacttcagaacttctgggttgggttaaagatgtcttccagcactgtgcaccgtcatgggatggagaggccttaatgagggaacttgattatgttagtaggatctttcatgggagtaaagacccccgagggaggaagctattttggaagtgtgatgatctcaaggaaaaattgaaaagtggaaaagtggaatctaaagctgttgcagggcaatattgatgtttttccaagagcttgaggtggactctgcaaaatgcctggaaaatggagaaagtggaacgttgattgctccgcaggacgcatgcaatagaattgctgaagtggtgcaggaggctataagaaagatggaaatggtagctgatgagaagatgaggatgttcaagaaggctcgcttggctcttgaagcttgtgaacatgaactagctgacaaggccagggaggtgacagagctcaagatggagagacagaaaaagaagctgcagatagaagagctggagaaaattgtgaggctgaaaaatgcagaggctgatatgttccaattgaaggctaatgaggctaaacgagaggccgagaggcttcagaggattgctcttgccaagcaagataaatcagaagaagaatttactagcaactacttgaaacaacgtttaaacgaggccgaggccgagaagcagtatctttatgagaagatcaaattgcaagagagttctcgcgcttcgcagagcagtagtggtggtgacccttctcagatgctgatgtattccaaaatccacgatctactttacagtgttccttccaaagcagacagtcagggtaatgagcgccacccttttcggacaaatccctgagagtccattgtgtttgtaatgccaattatgttccctgtcatagctaagtcattccctttgaacaatttaggatgagccacttttatggcaatgttatcatcattttcatcaattttatctgctttttgtacaaggagatattggaaaaagcttcaatatatgtttgaaactaggcttgttgtaagcattattaatatgttttttgtaaggaattgtcgactgttgcatgcttttgtaaggaatttgttgattgttgttgcc

SEQ ID NO: 29009 - DNA, 424 bp, Glycine max
  Clone ID: PAT_MRT3847_126196C.1
ccctcgcgtccgcccacgcgtccggagagagaagcagaaggctcttggacaaagctccaagctctcgctggtgaaagactgcgagactcgctggaattcgatcctcctgatgcttcagcggtattcacagctccgggagccgctcgcagccgctcatgcccacttctctcaacacctcgatgctcctgacctccaacagctcgatgcggtcacgaaagtgctgggtccactcaaatggatgtcgaaccttttctcgactgacaagcaaccctacttcggctccgtcctcgtcgttgtttgggttgcgctcaaacgccacctcgtcagccttccagaagatctcgatttcattcgacgcatgaaggacgctatccgcagtcgattgcaagagtggattgcttctcttcaactcgaaaccaacaag

SEQ ID NO: 29010 - DNA, 839 bp, Glycine max
  Clone ID: PAT_MRT3847_126197C.1
gtattatgaataattaaacatttatgacaagtcttacataagtaaaatataaatattaaattgacgcatctatatttcaagtttcaagtaaacaaaatacgcaaacaaaaatcacattactcattctaaagagaacctccgccacattttacaagtccaaaagtgcataatctcaacgtgaaaattctatggctgattggcaaagaatagatattagcctgaagtccttaatcagcatattacttgactctgtaagccttgacccttttcaatagctctttagcattgctgtccttcctaaagtgttcccttacaggctccagaattttattcaacgactttgccaatgctggtttaaggtcaccaggatgtaactctccacttttataggctgcagtcagctcttcaaagcttgtgaaagtcttattcccaccattatctgcactacgctccactgtgaactcattaaaccaaggtaagacaagatatttaatgtactccaagcatgggtttccttccacagtcttgggagggcaataagccttttttattttcacattcacttcagcctcctcatcttccatgaaaatggaagatgatgggtcactttttgacatcttttcttgcccttgctgaagaccaggtaacatgtggtgtgacaagataatgggcttgttcttcctcttaatgtcatcacaatactctctggcaagtacgttcactttccgctgatccattcccaaatggcaaatgtcggccttgaggaaaaatatgtcagcacactgcatgcatggatagaatatctgagcagcaggtaattcatcctgttcacttcgtcc

SEQ ID NO: 29011 - DNA, 1523 bp, Glycine max
  Clone ID: PAT_MRT3847_126198C.1
aaggggcgccccctttttaaaaatttaatgtttttaggtgttaacaaggagttaaattagttgggtttttatgtttgaaagtttgagtttttttatttggagtgttagtttttttttttttttttttgttttttttttttttttttttttttttttttattttttatttttttttcctttttttttttttttttttttttttttaagtaaacaaaaatcacattactcattctaaagaaaacctccgccacattttagaagtccagaagtgtataatctcataacgtgaaagaacgactgtttggcaaagaatagaaattagcctgaagtctttaacgagcatattatttggtgactctgtaagccttgacccttttcggacgcgtgcgcgtgggcattgctgtccttcctaaagtgttccctaacaggctccagaattttattcaatgactttgccaatgctggtttaaggtcaccaggatgtaactctccactttcataggctgcagtcagctcagcaaagcttgtgaaagtcttattcccaccattatctgcactacgctccactgtgaactcattaaaccaaggtaagacaagatatttaatgtactccaagcatgggtttccttccacagtcttgggagggcaataagccttttttattttcacattcacttcagcctcctcatcttccatgaaaatggaagatgatgggtcactttttgacatcttttcttgcccttgctgaagaccaggtaacatgtggtgtgacaagataatgggcttgttcttcctcttaatgtcatcacaatactctctggcaagtacattcactttccgctgatccattcccaattggcaaatgtcggcctgaggaaaaatatgtcagcacactgcatgcatggatagaatatctgagcagcagtcaattcatcctgttcactccgccccattatttgactacacctgataatcctttttagattgttcttctgagctatatccaacacaagaggccagtactcatcagctctggcgttaatctctttcgaggaccacaaaaactcaactttgccactatccagatccatcccaacagccttccaaatctcaatcaagtaacggccaaccgtttcaattttcttcaagtcccctcccatcttgttgttgagcttggcaaaccaatcagcaatccatattttgacgcggcaaccagcagatgttagcttgttcacattgattgtcttcataacaccctgagcaatgtgcattcgtccggagggttcgaagccatcgtagcaaacgggttcgggctttttggtgaggaggttaaggagttcgtcttcctgaatgcactcttctccgacgctcctcacaatttgaaacttctcatcgggggtcaacagatgagttggattgggattggatgattgggggatctcagggtcggagacggataaggattccacggcttcggtgagtggttgttccattgcgttactctctcaaagaaagatagtcaa

SEQ ID NO: 29012 - DNA, 466 bp, Glycine max
  Clone ID: PAT_MRT3847_126199C.1
agaggcttcaaatgattgctcttgccaagcaagataaatcagaggaagaatttactagcaactacttgaaacaacgattaaacgaggctgaggccgagaagcagtacctttatgaaaagatcaaattgcaggagagttctcgcgcttcgcagggcagtagtggtggtgacccctctcagatgctgatgtattccaaaattcacgatctgctttacagtgttccttccaaagcagacagtcagggtaatgagcgccacccttttcggacaaatccctgagagtccattgtgtttgtaatgccaattatgttagctgttgtagctaagtcacctttgaacaatttaggatgagccacttttatggcaatgtaatcaccatcttcatcaattttatctgcgttttgatattggaaaaagcttcaatatatgtttggaactctaaccattattaatatgcttttgtaagg

SEQ ID NO: 29013 - DNA, 550 bp, Glycine max
  Clone ID: PAT_MRT3847_12619C.1
ggaacaacaacgatgcaatgaaggaagaagaaaaatagaaaagggtggagtggttatatagtggccaaagatgggagcatgttgtggaggtcaaagggagaccgaaatctcaaccgttggatctctgagtttgaaagacgaagcgcgcaaatcgtgatcgactcagaagagaacaatgcttgcttatctgtaatttttgctatttgtttatattatttttatggtaggattgtcttcttgttatatttgttaggtttaattacccttttttagatattttctaatttttctaaatatttttgtatgatttctatcttgtctaaattttgtatttgtcattgtaaaattgtttccgtcattttatcaaatgttgtaaaaaagtgtgatacgaaccaaatataaaataaaaaataaattctattaatattttctcaattttactctaattacacatttacctcatcaaatgttatataattcatgtaaaatttagagagtttcattataactttctctaaaaataaatgtggtttagtttaaatataacatt

SEQ ID NO: 29014 - DNA, 139 bp, Glycine max
  Clone ID: PAT_MRT3847_1261C.1
tggtatttctatggattccatgcacaagatgcttgccactggtggcaataacaaggcctggagaatgaatagaacgtctgacctaccgcgtcaggccataaacaccatgttatcaagcaacaaaactattcggaggatt

SEQ ID NO: 29015 - DNA, 107 bp, Glycine max
  Clone ID: PAT_MRT3847_126200C.1
cacttctcatattatacattagatagtatcaaatcaattctgatcttgggatcacgccgcttctgattagtcctcacgccgcttctgattagtccacacaacatacg

SEQ ID NO: 29016 - DNA, 993 bp, Glycine max
  Clone ID: PAT_MRT3847_126201C.1
tcgacccacgcgtccgcagctttaaaacgacgctgtttccgaccctctagacggcactaccgttgttccaccgcagagcttccaaaattcggaccccgggatgcagcagcagcagcagtacccgaacggggccgtttcggacccggattcgcgggcaattgtgccggtcccggaggaagggcggtcctcttcggtggcggtgaccacgccgcggcagcggcgcttcaaggagctggtccgcctgacggatgtcggcgggccggagcaacggcacttccgggacgtggtccgccggacgaggatggtttacgactccctgcgcgtcctggcgacggtggaggacgagggccgggtggatgcccgccgggggcgcagcgatctgcgcgcctcggcggtgatgaggaactgtggcctgtggctgaaccgtgacaagagaattgttggtgcaattcccggtgtctgcattggtgatgtgttcctttataggatggagttgtgtgttgttggccttcatggtcagcctcaggctgggattgattatctccctgccagcatgagttccaatggtgaaccaattgccactagtgtcattgtttctggtggttatgaggatgatgttgatgagggtgatgttatcatttactctggccacggtggccaggacaagcattctaggcaggttttccaccagaagcttgaggggggaaatcttgcaatggagaggagtatgcactatgggattgaggtcagggttattcgtggggtgcggtatgagggtgctgcctctgctaccgggaggttgtatgtgtatgatgggttgtataggattcatgagtgctggtttgatgtggggaagtcgggtttcggggtttataagtataagttgtgtgtagatgatgggcctactatcatggggactcttctagtcttcacggcgcttatgcttaagaaggatccccttgagtttcaaacccatgtgttgtttggtctctt

SEQ ID NO: 29017 - DNA, 363 bp, Glycine max
  Clone ID: PAT_MRT3847_126202C.1
gcggccgtcctttttttttttttggtttttttttttttttaccataggtatttttgagcccaggcattatgacctcatccgagttcgtatcaacatcaccaaacgaagaaacatgctacttatcaccaacttagactactttttactggtggatgaacaaaatcatcgatccaggggcatcaagaaaaacttgactttaggagccagttttattttagagtcagaggcacacacaggagggactctaacaatgtaattaaagcctggtccaacgcacaagaaacttcagtagtgagagccttaaacgggaattcagggctcaaaagtcaagctggtagctaggcgactcactgacttaaatag

SEQ ID NO: 29018 - DNA, 446 bp, Glycine max
  Clone ID: PAT_MRT3847_126203C.1
gatgacacgggtcaaaagttctcttcctttccggaacttcactttcatttgtattactgtgtagtttcgaagatcacaaatttaggagtctcatgcccttaaatttcttgatgtactttatgttgagagcattattatgcaaatagtgtctagattcagtgattaggaaactgtatgcatgatttacattaaccatacatatgcaacctcctttatggaagcaaaacaccgtttccacatctctgtccactctatttcagcatccaatatcttttttcgttgtctctaacttttaaggaaaaccttggtatttcagtcttgtcttgaaaattaggtttggaataaattaacatggaggtatcattgtggacaaagtatgtgtatattttgagtgaggtgtttgtatttttgaaaaaatgtgtgatatgcatgatggcttaaagttt

SEQ ID NO: 29019 - DNA, 299 bp, Glycine max
  Clone ID: PAT_MRT3847_126204C.1
tcggtttgatgttcggagagtcgaatgtggaatccattttggattcccgctcacagttatttgcaatagcatttttaatgagatgctcattagatatagctatgaaaaattactgcgccaggctaaagctccaagtatgttttgacaatccttcaaaaattctgtttctttgtgtgagtatggcgatgacaactaaactagggatcatgaatatgtcaagccttacttcagaggttgtaaactgaagagctttctagctgggcataatattaccatgactggtggctttgacataacta

SEQ ID NO: 29020 - DNA, 503 bp, Glycine max
  Clone ID: PAT_MRT3847_126205C.1
ctattaaataactccccttatagatgccacagtttggtttaataccttgagattcatggtttccagtttttggtcttttcttgggcatttaggacatatggaaaaggaaatacatttatatttatcatggaaaaacatgtttgtattggcattaaaccttggtgaacgggaattcaatgggagacaaggattcaagttcaatgggcctcgaaaagggtaatccggctgaaattgcatatctgaagcaaaatactgtgctttgttcaacaaaaattcaataagtagaccccacaaagaatcaggatcgggtggtagcatgaataaagactatgttatctgggttgaatccccatgttccttccctaatgccctgaagggtctgtagcagctgtttcatggatggcctgaattccttgggacactgcacacactgaaaggctaactctgctactggtggtatcatttccattattggttttatcagaaccaaaccgaaaacttgg

SEQ ID NO: 29021 - DNA, 244 bp, Glycine max
  Clone ID: PAT_MRT3847_126206C.1
gtataacgctgctgccgaaacccttcccgatccttgaggtaagtgagtagtcggtggttcagggtggtgcatactgctaagggtaagcaataggatgtggttaccatcgcgtagaccatcatgctccataagcggctccatggctgcacatttaagagaaagctcctagagctattaaggagataaggatatttgcccgaaaggccacggggaccactgatgtgagggtggatgtgaagttgaa

SEQ ID NO: 29022 - DNA, 489 bp, Glycine max
  unsure (1)..(489): unsure at all n locations
  Clone ID: PAT_MRT3847_126207C.1
ctccgatcaaccataaccgctgattcgccggaaaccctactccgttcaccattaggtcgaggcactcttccgttcagctcaatttgaatcccgtcgacggcgaggagaggaaacctaatttgcgaacttcgttttccttttttttctttttctttcgggaacgaagaggaacattgcggagtgaaacagcgctagtgaagtttaaatagggtttttgaggcaacgaaggttccagaagaaggcagtaattggaattaattttgctggaattatatgctctgcagctgcggctgtgcttcttcgatgagttcgtgctgaattctgttacaattcgcggatagctctgttcagacaccatgggttacgattcggatagcccctcgcaagatgggagggatgaagacgacgaagaagaatatgaggattctnggcagggtaatcgttttcttgggttcatgtttggaaatgtagataactctcgtgatctcg

SEQ ID NO: 29023 - DNA, 1415 bp, Glycine max
  Clone ID: PAT_MRT3847_126208C.1
cccacgcgtccgtggcttcaattttgcaaccctgagctaagcgggataatcaccaagtggttgaaaactgataagtgggtaaccaatcttgacttgttaacaggtctccgacagtttgctgacaatgaagatctgcaagcagaatggctgtctgcaaagatggctagtaagcagcgcttggcacggtatgttttgcaggtgacaggggagagcattgacccagatagtctgtttgacattcaagtcaaacgtatccacgaatacaagaggcagctacttaacattcttggtgtgatttatagatacaagaagctaaaggagatgagccctgaagaacggaaaaaaactactccgcgcacagtgatgattttctagttggcaatgacttcatacactacatggatactcaagcaaaagttgatgaagggtatcggtaagactaaatctcgtaggcattttcacgttttactttcctctacttgtttgtcatcaaaataaaaccctttttgtatagttacataagtatacagccatattacctcattaaagcaaaattgttaaccgtttttattaatcttaatgtatggactttgaacttgctagcatgcattcaaaatggtttagtcaaactatagtgcttgatcttaatctcattcatttgtactatgtcagccttgtctgcaaattttcacataagcctactgcaaagttggtgtttagtgttaacaattttcaccctattaatatgaggttttaatggtgactgacaatcacataggccaatagtttcagacatagtaataggaactaggaaggattgaagaaaaatatggtctggttctgaatatatttgtagctctaaaactttaaagttgtcctaattatatgtttttatttgtctgatttgcttgcagtgataggaaaaaatggctaaaaatgtccatcctaagcactgcagggagtggaaagttcagcagtgaccgaacaattgctcaatatgccaaggaaaatttggaacatagaagagtgccgcgtgccataatttctgctggatgtgtgtctcttgcactcaagttactgtattagcaccaacagaatgataagtattaagtaagtgaaaaataaaaattgagaaagtaatttacttaacaccgaacctcaacacgagcaagggagtcatggatatagaccacgtctgaaaaatattgagatataattaaagataaaagagatggaaacaaattaggttgtgacagatagagctttctataagcaaataaatctatagtttcatattctgttttttaattaatgtcaatttactcggccttccaaatttgagtattattttttcatctttgtaatgaactaatgtggtacatattatggttcagttgaataaaatcatgttctag

SEQ ID NO: 29024 - DNA, 260 bp, Glycine max
  Clone ID: PAT_MRT3847_126209C.1
atcggatgcaactttggtggttgcaataataaactattttaggaagctttaaaacctgccaatctcataattcttccctcgatcaatcatcaatattcattattattctccttgattcctttctggttttttcatttcttttatcttttaatattttgtttttaaatcatatccctgaaagtacacttttcaaatcccaactctctaagcaatttttctctaagaataggaagaagaaaaataacaaaagggttgggctg

SEQ ID NO: 29025 - DNA, 456 bp, Glycine max
  Clone ID: PAT_MRT3847_12620C.1
aagactcgcttcattagttaaattgtatgtatatagtttttaaattcaaataacttcatcattttacattccccctctcccaaacaaaggaaagaaattaacacaacatagaaacatgaagatttaaaggtgataactttcaaactaaaatagtagttttgtgtctattccttaagagtatattacaaatagtcaagtgatgcagtgtgtttaagagtatattactagcattcgggctttttatccgttgtcttaaagataaccagaggtcatactattgcgaagtttttattataagacattattgtatgtgtttctatatgaactctgagattattgttgaatatgtacttatatggaagtgatgggctgggcaataataataataataataaaatggcagcctcactagctatctagagatcagctcatagccattaggctggctactcatat

SEQ ID NO: 29026 - DNA, 4019 bp, Glycine max
  Clone ID: PAT_MRT3847_126210C.1
gaaatttcgggtaaggccgggggggataccttcaaggtgggcaaggccttcccagctaccaggaatccccggccaaaggtgattaagctaacccacttttgtagttcatgtgactctttgcttctttcacgctcactactctctttctttaatttttgtcaacttccataggagacaggaaataaaaatctcaacttgcttgatattttcttcctttctatctttttgtcactttccacgtaaagggtctcagtctcacttatggtatcatttagcatcatatctcttgattcccttttgtggcttagcaataacactccttgaaatatcttcccatatgcttccacaccctgattttcttttttcttattaatctcttgttttccctctcgcccatttcatcgattcttgatattgatagatagagagacagcattgcttgaagttggaagaggggagaaagatttggaaatggctgctaaagtagatgctaatggtggtggtggtaagggtggggtttctgcagtttctgccaaggttccagcagtggcacatccattggctgaaaagcctgatgaggttgcatccaatattagttaccatgctcagttcagtcctcatttttcccctttcaagtttgagctggaacaagcttactatgccactgcagagagtgttcgtgaccgtctgattcggcaatggaatgaaacgtaccttcattttcacaaagttgatcccaagcaaacttactacttatcgatggagttccttcaaggtcgagctttgaccaatgccattggaaatctgaatatccaagatgcatatgctaatgctttgcgcaaatttggacttgaacttgaagaaatagcagagcaggagaaggatgcagcactaggaaatggtggtcttggtaggcttgcttcttgctttctggattccatggcaacacttaatttgccttcttgggggtatggttgaggtatagatacgggctatttaagcagagaatcaccagggaaggtcaggaggaagtagcagaggactggctagagaagtttagcccctgggaagtagtgaggcatgacattttgtaccccatcaaattctttggtcatgttgaggttaatcctgatggaagccgaaaatgggttggaggagaggttgtgcaagcactggcttatgatgtgccaattccaggttaccaaaccaagaacaccatcagtcttcgtctctgggaggcaaaagcgagtgctgaggatttcaatttatttttatttaatgatgggcaacatgatgctgcttcagtgcttcactcacgagctcaacagatttgtgcagttttatatcctggcgataccacagaaggtggaaaacttctacggttgaagcagcagttctttctctgcagtgcatcactccaagacataatatccagatttaaggagaggagacaagggccctggaactggtcagagtttccaacaaaggttgctgtacagttgaatgatacacacccaacacttgcaataccagagttgatgcgattactaatggatgatgaagggcttggatgggatgaagcatgggatgtgacatcaaagactattgcttacactaatcatactgtcctccctgaagcactggagaaatggtctcaacctgtaatgtggaaactacttccacgccatatggaaatcatacaagaaatagacaagagattcactgcaatgataaatacaacccgattggaccttgagaatgagctttccgccatgcgcatcttggatgataatccccagaagccggtagttcggatggcaaatttgtgtgtggtttcttctcatgcggtgaatggtgttgctcagttacacagtgatatattaaagtcagaattatttgcaaattatgtttcaatatggccaacaaagttccaaaataaaaccaatgggataacacctcgaagatggctccaattttgcaaccctgagctaggcgggataatcaccaagtggttaaaaactgataaatgggtaaccaatcttgacttgttaacaggtcttcgacagtttgctgacaatgaagatctgcaagcagaatggctgtctgcaaagatggctagtaagcagcgcttggcacgatatgttttgcaggtgacaggggagagcattgacccagatactctatttgacattcaagtcaagcgtatccatgaatacaagaggcagctattaaacatccttggtgtgatttatagatacaagaagctaaaggagatgagccttgaagaacgtaaaaacactactccacgcacggtgatgattggaggaaaggcatttgcaacatacacaaatgctataaggatagtcaggttggtgaatgatgtcggtgctgttgtcaacagtgatcctgaggtcaacggctacttgaaggttgtgtttgtcccaaattacaatgtgtctgtggcagaggtgctgattccaggaagtgagctttctcagcatattagcactgcaggcatggaagcaagtggcacaagcaacatgaaatttgctttaaatgggtgccttataataggtaccttagatggagccaatgtggaaatcagggaggagattggtgaggataattttttcctttttggtgccacagcagaagatgtccctcgactgaggaaggaaagagagaatggactgttcaaacccgatcctcgatttgaagaggcaaagaagtttattaggagtggggtgtttggaagctatgactataatccattgcttgagtccttggaaggaaattctggttatggccgtggtgattactttctagttggtcatgactttccaagctacatggatactcaggcaaaagttgatgaagcataccgtgataggaaaagatggctaaaaatgtccatcctaagcactgcagggagtggaaaattcagcagtgaccggacaattgctcaatatgccaaggaaatttggaacatagaagagtgccgcgtgccataatttctgctggatgtgtgtctcttgcactcaagttactgtatatagcaccaacagaatgataagtaaaaagaagtgaataataaaaattaaaaataatttctgaaaagagaaagtgaaggagattttagctttctataatatttagcttgtcatataagatttcagctgtattcttatattaattgctttctcaaccatctgcttctgacagatagagctttctatatgcaaataaatctatagtttcaaatccttttaattaaattctggttatggtcgtggtgattactttctagttggtcatgacttcccaagctacatggatactcaagcaaaagttgatgaagtgtatcgtgataggaaaaaatggctaaaaatgtccatcctaagcactgctgggagtggaaagttcagcagtgaccgaacaattgctcaatatgccaaggaaatttggaacatagaagagtgccgcgtgccataatttctgctggatgtgtctcttgcactcaagttactgtataagcacaaacagaatgataagtaaaaagaagtgaataataaaaattaaaaataatttactgaaaagagaaagtgaaggagattttagctttctataatatttagtttgtcatataagatttcagctgtattcttacattaattgctctctcgacagatagagctttctatatgcaaataaatctatagtttcatgttctgtttttcaattaatgatcatatgagaaacagcctgctgtttgacagggtaaatttgtgaaatgccaatcgttctaatttaccaatattttttttacttcttttaacccatgttcataatgagtcatgggcaccgatgtccttgggccctgtcccgggcagctattttaacattttattttttttggtgacaggcaacatctatggcttgaacaaattcgtcaacactgtctagtggaggatttcattctgcttttagtctaggaggtgccaatggactggcaatgtatt

SEQ ID NO: 29027 - DNA, 377 bp, Glycine max
  Clone ID: PAT_MRT3847_126211C.1
tccggctcgagtacggctgcgagaagacgacagaaggggactgccttcattgctagcaatacttatcgctacctccgacggttttacttgattcttgcgtagagactttttggctgacttggagtaatctgttctccctaattgagatgatctagcagtttctatatagcatgaatccccatccttgaaattattacttggaagcacaatacaagacaagtccaatcctttacccccaagggtgctaccacagctttcactgggtgatttatctccagaaatgcactgcagattaggcttagagtgaaccatttcatcatcttggtgatcatccttacaagacatcatcccactaggcttcaaccttgaggtcaaca

SEQ ID NO: 29028 - DNA, 239 bp, Glycine max
  Clone ID: PAT_MRT3847_126212C.1
ttttttttttttttttgaacaccttcgaacgaaaacaagatacttcaaaaaatatggtttcgggaaaacctaaaacaaaatgtagcaaaaataacagtttcttttgttacatgtatgggcaaaaaattaatgtagtaccgtaaaaccaattaataaaatatattataatagaggaaaattattctgctgcacaaaaacttgtgcggcactcattctcaatcatctcctgaacctcattt

SEQ ID NO: 29029 - DNA, 370 bp, Glycine max
  unsure (1)..(370): unsure at all n locations
  Clone ID: PAT_MRT3847_126213C.1
ggaccggccgaaacccgggcacccacgcgccgaatagcgaccggagcngacaacagacaacaggggggcactcgcagccaaaaggaacggcaggaaccccagcccaaaaagcaccagaggcacggccaagaagagaacacgacgggaaggccgccgacgaacggaccagcggggggaccccacacgggaagagggngggagcaaagcccaaggaagacccagaagacccaagaaacnggagaaaaacactacaacgaaaccnaagcgaccacganccaaagccagacaaagcccgaaacacaaaagagcgcaggcacccancgaccagagaaacaagggcccacccggaaaagagaaccaccagacccaa

SEQ ID NO: 29030 - DNA, 194 bp, Glycine max
  unsure (1)..(194): unsure at all n locations
  Clone ID: PAT_MRT3847_126214C.1
tgaatctccgagttttgcagattcatttcggagatgctcggtgatgttagcttctcacgcctaatcattcgagctatatatgttgaatactttcaaaatattccctttttataatttctgttcaaggaaataattgtaattggtcaatacagtgtgacatgaatggaagatatggatgatttttaaacatgtna

SEQ ID NO: 29031 - DNA, 249 bp, Glycine max
  Clone ID: PAT_MRT3847_126215C.1
ataccttagaatgtttaggtactgaaagatcacattctcgtactcataaaacggggggatttctttacaactagtccggaatagtgagcccgaactgtgctgagggaatgaactttacagaaaatctgagctgttcaatacacacgaagccagtctgcttgcaaaagtccctggtcaataaggggggaacccatcttaaataaggcggtcccttattccccgtgcgtggctggaccagtccatatgtga

SEQ ID NO: 29032 - DNA, 379 bp, Glycine max
  Clone ID: PAT_MRT3847_126216C.1
tcgggatttttttatccaaaattgtagaggcaaagcaagcagatgggatttggaaagtataaacaagttgttggaggaaggagcccaaagcgagagtccatctcattctctctccactttctattatatcttcatcttcttcttaactcatgatttgtctatttttccatcgaagaatggtgggaattcgttgcacggtggtgccaccgctacgctggtggctttagtcggcgcagccgcgattctctctgccggacattcatccgattcgggagtttccgtcgagatcaacgtctcctacttcggtgctgtctacgctcatgtcagcacactatccatcttcttcaattctttcattacttttcttgttacatgtaat

SEQ ID NO: 29033 - DNA, 718 bp, Glycine max
  unsure (1)..(718): unsure at all n locations
  Clone ID: PAT_MRT3847_126217C.1
gcggaatcaaaggtgacaaatcatttcctctgttattcaagaatactaaccttgccaatcaacacggatgaaacaaacctttctattctaacacaaatagatgacataattttaccaatatgaaaccgagttttgaaaagggtgtgaaaaaacccttctgaagaaaatagtcttagacaccgtaatatatcaaaaccaagctaaaggctaaccagtttgcagggttcttgaaactaaatatgaaacaaaaaagactaaactgataatccctatggtaagacaaagttacaaagctttagagccaactagtaaaaacagcacagcttcactgcattgagccccgtagctggtaacctttttacatgcccttcttcatttacacccttcttttggttttaggcgtcctagagtcttttctgctaaaaattataggtgaatcatcagctaaatcaacagcagaagtatccgcagatttcacagatttggagatgccggcagaagctgaagctcttctcttactggactgagaattgatgtttgcacccttggcagactccaacgccgatttttccttgccctttcctgcttctgctgatgcttatgcttgcctctgactctgatgtgcttctccttctaacagtaactcaacctcgtgcggntcccaacgcctgncttttgaggggcaacacttcaacatcaccatcggcatacaaaaacc

SEQ ID NO: 29034 - DNA, 424 bp, Glycine max
  unsure (1)..(424): unsure at all n locations
  Clone ID: PAT_MRT3847_126218C.1
aaaaanactgttgganggcngtnactngaatagattctcttgnggntnccannatgagctatgtgncannaactcttagtgaagngatgtnangnagtgtnntagctcgagctcaanaggntntangtataananngcactanngnatgtantnnacgaggngacgcngtggantngnngagttggcgtngtagtctgacngntgcggngangctngacggngggnatnncngngtngattctgnacgtttgtcnntgngtnnncnggcaataccatangatngnngnncgacttgnaatgncggnangcnngtttnannccagnnacngngtngnnngntngaattanngctatcgngccatgctgttaaggatnttancacattgnntgatnnancacctganatcttcggctgcatctggc

SEQ ID NO: 29035 - DNA, 580 bp, Glycine max
  Clone ID: PAT_MRT3847_126219C.1
ttccgttccaaggaagcgtttcccgtcatcactgtatgacgtcctccttctttgggggggggggggggggacaagttaataagttaggaggaggaacaccaccagatagaccggatatgggtaccctggataagaacagaccaaacctaccaaaacctagattatgagataagccgcgtattagagctggtggctgtttcgaagaggtgcgcgttacagtgtacggataagcgaaagtgagcgtggcgtaagaacccacaatagcatcttagagatagctcaccattatacgtgatacctaagtaaacggcccaccacgccaccacctaagataagacgaaaacctagcgaaaagtatcgtaaagacgtgaccatcgtcagctatgaattggaccagatggtaggacctaagttttgtggcgacagcctatacgggtgtctgtgattggtaatgcccgttacatcgtgatcagacatggtgttcaggggatagtttgcaacccgggagtacaagacgctagtcgccgaatgttagtagaggggttactccaggtgctcaccccactccacagcccccaac

SEQ ID NO: 29036 - DNA, 686 bp, Glycine max
  Clone ID: PAT_MRT3847_12621C.1
caaccatttaagctcgcttcttattgttctcttttcttgcgtgaagcttgcgtaccttccgagttgtactaggttgccgagctcgtaaccctctccgcaatgaccaacaaagaatacggagacaacaacaagatatcagtttgtgagacgtcaatgttgttggtggcaaacatcatcagattatcgtctctaagattttccggccatagtttcagaaaagaccttgatcctccacaagaggaagcaacctatgtgggcaaaggcaacgaatcttcggtatcaaaattttacaagagtgacagaacacaggagccggagaggatcaaaaggcctcgttcctacctcatgaaaccaccaaaggaggatccaacaaactatgtgagtcaggcactagacgacgttgacatcaacgctgagaactatatcagccatattcgtggaaagattagggacagtggtaatattgaatattgatacaaagcaaaatgcttttcaccatatcttccacctcgaactgtcagcttagtggtggggttagatagatgcatgagggcatagctttgattgatcgttgccaccattatacagaagaaaataaaaagcttctgcctctagtatagtcaagtaggttttgcactttttgtgaattattgtgtaaagctataataattagctaggttgccaat

SEQ ID NO: 29037 - DNA, 198 bp, Glycine max
  Clone ID: PAT_MRT3847_126220C.1
ggctcgaggtaaattacatacaatgaaaaataaagtcatattagtgcttttcttatgagctagaaagagtagcatgtgaagaaaaaaaagcccttttttcaaaatttcttcaaatgcaccctaatttatcttctgacacctgttctctatttttaggtcttgtacgatgatggtgatgaaaaaacattatttcttgtg

SEQ ID NO: 29038 - DNA, 539 bp, Glycine max
  Clone ID: PAT_MRT3847_126221C.1
caacggtctgtgagttgcatcctcacatacgactgactacatttcggataattttgcaaaatctcaataaaattacccttgttacataaagttcgttttttcctgaatgacaaagttatatatagactacactaaatgagatgttgtaaatgtcaataaaattatctttatagaatcactttaatagagacaaaatcttatacatgatttaacattgatgtagataaggattaaaaatatctaacggtattccttcaaatgatttttgtcagggacatttctctcttcaagttacttggcaattttgcatttaaaataaaaataaataaataaccttgacggcttggccgaagcaactatgttaagcttaaatgagatcaattttaagtttatgtttgtcttcaacctggtctaatggtttgcttagtgcaataccatcaatggtcacatgttcgagactagacagtcccttcacaaccaaaaccaacaacccgcaacaacagatcaagtttaagtttatgataatgctttcttttcag

SEQ ID NO: 29039 - DNA, 342 bp, Glycine max
  Clone ID: PAT_MRT3847_126222C.1
gtttttcttgaatttattgtaaaattatatagtaaatggcttactattaggattggacggtgatagtcttgtatcgtggagattcaaatgcatagcttttctatagatggatgtggatcttaattttggcaaaaaaaaaaaaaaaaaaaaaaaaaaaaaaaaaaaaaggcaaaaaaaaaggaaaaaattaaaaaaggggcgtccactctaaaaaatccatgctttcttacgcgggcaagcaacgtcatacctgttgtatagtgtcaactaattttacttcactgaccagctttttacaccggagcgactgtgaaaacccaggctttgcccaactaattgccg

SEQ ID NO: 29040 - DNA, 284 bp, Glycine max
  unsure (1)..(284): unsure at all n locations
  Clone ID: PAT_MRT3847_126223C.1
cgtaagctcggaattcggctcgagatccattcacacaaacgtgtatcttactgggaagttccctgagagacgtttgaggcctgggattccaaacttgatttattaaacgtatagtcaccatcaaaaagaaaaaatagggggggccaccgactagggatctcgtcgacccgggatatgatttcgggaccggaccaggagcgactccatatccccccacgggggcggcttttaactatgggcgggctctgggcaaaaggtgtccccggggaaatttntancccccc

SEQ ID NO: 29041 - DNA, 862 bp, Glycine max
  Clone ID: PAT_MRT3847_126224C.1
cccgggtcgacccagcgtccgtacgcgcggtaagagacagaggggaatgaaagaaagaggcacatttcagcccttattcaatgctttaccaaactcactcatcatcctccagtctttcaatttcatcccttcacttctttccacaaccccatcatcttttccctcttttcttctctctcaggcggagaaagaaatggagtgtttggaagcagcgttgaagagcagtttcaggaaagacatggccctcaaacaaacgttgttcctagaggagttctcgtcctcctctaacgttcaaaacgtcgtcgcttcctccgacgacttgttcgctgacgacctcctcaacttttcactcctcgaaaacaacaccaacaacaataacaacaacgaagaacccgaccaacaactcaacaaccacgactccaccacccctcagaacaaccaggaaaattacaattataacccctccgtcaacgacaacaatttcaacaccgaactcaccgttccggcggaggaggaagttgcggacttggaatggttgtctcgtttcgtcgaagattctaatttctcggaatattctcttcccttccccgcaaccgtgactgagaaagtgaaagtgaaatcaccggaaccgggaaataccgctttcactttcaaaaccccggttccggccaaggccaggagcaagcgaacgcgaaccggtgtccgggtttggccgctcaagtcaccctctttggccgccgcgtcttcaacaacaacctcgtcctcgtcctcgtcttcgccctcgagtccgcaacgtgcggactcgagggcaagaagcgtgccgctgcggacggcggcgccgcgcgacggtgcagccactgtg

SEQ ID NO: 29042 - DNA, 390 bp, Glycine max
  unsure (1)..(390): unsure at all n locations
  Clone ID: PAT_MRT3847_126225C.1
gttaaaacgaaagttagaaatggtaatccttttcccagatgcatgtattgacctgggtgattctggttgctcatagattatgattattattttcttatatttggatggtggattctcttatgaggattgctatatacataaattatatactttcatttatgactctgttggctctcctgttagccttggtagcttcctcttgtccccttggggccaacttcaattttttgcaatattctagaaaataaacttataatactttctttgtttaaccattgacattaattgattccttatactcaaaggttgaggctcttgctgaaattgacgttgccacaaagctcttgaaagatgacgcanaaatgcagggagatcctctgaatactcatt

SEQ ID NO: 29043 - DNA, 473 bp, Glycine max
  Clone ID: PAT_MRT3847_126226C.1
cccattacaaaaggggggacccataaaaggggaagcgggttaagggggcacataaaaagccggtcgggaaattcatttttggctttcatgggttcaactaaaatggttaaacacggaaagtgggggcccttttaatcttcccccatcacaaagggcatttaatcggggtctaaatctcgggggaagaaagtccctcccttaaaagggggagggggttaaagacccctaaacctgggggatcgcccccccctttggggggtgggaggcaatttcttaagggccgagatcgttttttttaaaaccgccctggttttttttagaggggggaaaacattctcttaaattaggggtaaatgggggaactatgctttttttccccaaagaaacgggccaccccccgcatgcagttcaagaaagcctggccccaagagccccatggttaccccaaatttttacgagtttttccaactcgg

SEQ ID NO: 29044 - DNA, 249 bp, Glycine max
  Clone ID: PAT_MRT3847_126227C.1
cgggtcggtaacatttggtttttatttacttttttggcgcgatccaagggccaaaaagctgccacagatcttttcattatgaatctaacgacacgcctatgacgggcatcgggacccaactagtcaacatttcgaagttcctacctttttacatgaaatcatagcaaaggattgttccccaatgattgtatgtaaaaccacaaaggcgactcagcaagtaacttagatagaacataactttttccatgt

SEQ ID NO: 29045 - DNA, 379 bp, Glycine max
  Clone ID: PAT_MRT3847_126228C.1
cggacgctagaagaccacagaatgcttccaatggagatgtgtattaattagtacaacttgcagatacacggtggtctagttaataactccatacaccggagcttatgtttagacatggggacaatattcatttaattactggatcaatattgaatgacagggaaaactaatgtaagggacgctatcgtggtcgatgatgcatatgccggctattatttgatatattaaagaaacaaagagtaaacattgtaaagacaactgtttatattatctaatatataatactattgaacattaatctttattagtaaatcaaaatatttattcagcacatatgcgatggtgcgtaatgatgctagtgcatatattaacaactatt

SEQ ID NO: 29046 - DNA, 245 bp, Glycine max
  Clone ID: PAT_MRT3847_126229C.1
ggttcgctggcgctcctgcatcatgttttccacccaggaccacgccgccgtcgctattgtgcgggtctgtgccggcgtcttcgcctggaggggtgagaccctacaagtgtactgtgggtgcaccgagcgcggcatcgactgcagcccggtcgactgacgtgcgctcctcaacgacgtcggtgagcgctgtgcgcccatctttcactagcggcggctcgggctaggtgcatctatgagaagaccgg

SEQ ID NO: 29047 - DNA, 372 bp, Glycine max
  unsure (1)..(372): unsure at all n locations
  Clone ID: PAT_MRT3847_12622C.1
gcnacacacaaataccatctgcggttttttaaaaaaactaggtcactacacaacatatcatcattctcacactaatacctcctttattcttactactcaccctaatatcaaattcctcaatatatcttatctaccatttcctttgcaaaaaccccaatacaccttattctccaaactattccttatcatctaaattcattaccacacccccatttttcctctccaatctccctcaccacctacacttattttaagtgaacctttctcttctttttcaccctttttaccaacctcctcattttatttaatctatacaacacaacctctcttattaaaatacctcttctctacaaaattatttcatttttcctt

SEQ ID NO: 29048 - DNA, 392 bp, Glycine max
  Clone ID: PAT_MRT3847_126230C.1
gggtccaaataaaattgctattgctcactactgacttgctcgctacggtatctaagtgcgcacataagccctgtggctgcataaacatgcactaccggagtaacaaatgcacatcagacggaggagggtctactcagcacatactgactagttacataacagacagagtgttcaaccagtgatcgtacatagatgcatatcaaaacaacagccttgaaggtcacgccacctgtgataacactgacccatcccggataatgacgcgtaggcacacagccaccaccaatataggaaatcaataggcactgaggacggcaatggcaaatatcccaggcatccatcgtgctggaagcgtaggggcataaaccagaggtccgatgccataaagaaca

SEQ ID NO: 29049 - DNA, 793 bp, Glycine max
  Clone ID: PAT_MRT3847_126231C.1
ccacgcgtccggtctcctcactcgtcttcattccaaaagatgaaaatgtttaccttttacaaattcgtgttcataaatagaaaaacagtgcctaaagaaagcaacagggtcaccatcaggattctgtagttacggtttgttctgctgtcgttataactgtagcctccgttgttgaatttctccaaaatgcaaccgtgtcatatgtgggccttgtggtgtttacatgcgtcggttgagcctttgattgagccagacagagataaaaaatcttgttgcccaagtgagggaaaaagggttgccttggacacttctcaccttgttctctggtatgttatccacccccaggtgcttttttgtttgttattgcactgtttggtcctttttctgggtgtttttgggtggcatgttgggtatgttgtgagacccagatggattttgacatgttttggtcttttggtttgcttgctaggcaatcaagcatatactttctttttcatgtattcattttttaagcagtttagttgttgatccatttttttagtgttctgtttggtggatcattggattgttttattgtgaatttcagttggttgggggattattgttgggatttgtttatttctatgcagggaacaaaaggtttttatatatcaactaaaacatcatagactattataataactgtatttttgttcaaaatgaacaagtggatgctttttttttttccttctttggctgcaaactgtgatgcagtctgatagaatgttgctctctgatttcatgtctttgctga

SEQ ID NO: 29050 - DNA, 180 bp, Glycine max
  unsure (1)..(180): unsure at all n locations
  Clone ID: PAT_MRT3847_126232C.1
aacgcttccgcccccgcaccagnaangcacgngggagcgcgagaaagcaccaaggaacgcaacgcaggcccagaccgacccaaacgaggagcaaagaacagaggggaggcagaaaaaaccccggcagcaacagcaaggggaaacacaacggcgcgcccaagcagggcggaaggccccacc

SEQ ID NO: 29051 - DNA, 1722 bp, Glycine max
  Clone ID: PAT_MRT3847_126233C.1
cccacgcgtccgctccatcttccaccttcctccttcctcacccccacacaatatcctcaccccttcgctcattttttctttttattattaaaactaaaattatactagtatataaacctatgctcattccactctttatctttccctccaatacctcctccacccctttctctctctctctctctctctcttcaatactctctcgattatttccctttgatgagtgttgaacggccaagatggtgaacgacgacgagtgggtgcgtgcggcgatggaggatgacaccgttgtggtggagcttctgctacgcctcaagcaaggtaccgttttacacaaatctcaccaccagcagcttttacctttctcctggggagtcaaacagccgcgctcaagatcaaggctaacctccgccgccgtctcccgatgcgacgccgccgtttccaccagatgcagccccaccacgcccctctcttggagcgccggcgccgacagttacgaagactccagccgccaccaccaccatcacgccgccgtatccaaggctactgctacaagtggatacactggcaactctgcttctaccaagaggtgcagaagaaaaaagacctttgcagaattaaaggaagaggagagctccctgctaaaggaaagcatatatctgaaaaaggaaatagcgtctgtaaatgcaaactttgaggcacagagagctaaaaatgagagtctgaagagaatgaagcttgatgtgggatcaaaatatcagaacaatccaagttcaacatctgttgaaccgcagcgtctgcttgctggtcaaccccatcagagaatagtggtatctacggaggccctcatacgtcccattcaagaagatactcattcacttgcatcagaatctaggccaaacaggataaaatcaaccggggacagcttttgcgtgatgtagtatcttcggaggccctcatacgtcccattcaagatgatactcattcacatgcatcagaatctaggccaaacaagatagaatcaaccaccgggaaaagttttttcttgataccagatctaaatatgatgccgtccgaggatgtttcttgcactgacaatctatgtggaatgagttgagacgacctctttctcttactatatgtgttggggatacaaatctgaacaatgtacaggcccagagagctatttgaaggctctatccaatagaaaaccaatgaatatcgtggtgcactagaaacgtttcttgatctgactactaattcttatgaatggaaaagaaattggtagtcatatatatgggaaaattttcttgggtagttctagccattaggctgtagagtagagagatatgctaaaaagttcgcaggttcctccgattccgaaattcttaaaaacctttccgatttcggaattcgtcaatcatgtcagatgtaccaattcttttgtaggttaaacgctcttggattcccttagaaggtatctaaaatctaaaatcaatatacaattttatatttttattcataaaaaccatcggttgctccttcatttcttgttttttaacgcacactatcaaaaaaccatccctaaaaagaatacagaagataaaggatgaactaagaaagctggcagccatagattgtggaaaaccactatatgaaacactgtgcacactggctgatgctatcggatgtgccaactactatgcccagcttgcaaaatga

SEQ ID NO: 29052 - DNA, 1225 bp, Glycine max
  Clone ID: PAT_MRT3847_126234C.1
atcaactcgactgttttgggtggagaccgatgaaaaccgcaacacccttccctctcctctcccacataaaacccacaagccccttcttcccattgggtaccgcagaggcatggccaagaagagaaaatccatatccacaagcctcgacgaggtggatcgaaccatctactcttccttctccagtgccgccaattccctctctcacctctacactctctccatgaaccaccagaaactctccttccaagccggtgaacgccactcccttgaaaaactctatcagtgggtctggaggcaacaagagagtggatcaagagttgcaactgttgatatactcagctacattcagaatgagctggattactgtggagaggagccatgcatgtcccctagagctccactgcatcaacaacagtcacaaccggtaatgcaagtcactactggtgcaggttttccagtaactacaggattttctggccaaactattgtggggcaggagctcagacctgagcactgtgataatcaatcaaagaattctatgttttcaaatgctttgtcaaaccctgttcgtcaaattggtgagggagggaaccacccaagtggtctttccatggggaatggaaaccagagcaccgactctgctgctttcagttccaatgattctgccatggacatgcatgcagactagtcctgtccaaggttttatctacttaatatttgtttgatcacccctctacattacctgcaaaagaagtgaataaccaatggaagggcatatctggttttgctcgttgcatcctacaacaaatagagcagtgtggaaccagttttattatcttattaaattagttaaaatgcgtatgtcatccaagtgaccgcttggatgttaaatgttctttgtaaagttttttcaaatagtttaaaggcatttaaatttgtaccttgattgtctcctcactcctctttctcaaagacaaccttttcaatgtagggattgcttctatctgaagtttcctcatgtaaatctgtccttttcgcaaaattctatatgcagcaatttacaacttcaggcatcttttgtatatccctttgcttttcatgtctcgtgtcttgccctctccaaaaaaaaaaaaaaaaaaaaaaaaaaaaaaaaaaaaaaaaaaaaaaaaaaaaaaaaaaaaaaaaaaaaaaaaaaaaaaaaaaaaaaaaaaaaaaacgggggggc

SEQ ID NO: 29053 - DNA, 314 bp, Glycine max
  Clone ID: PAT_MRT3847_126235C.1
actaggctggaggcgccacattctgatttaattatgcttaggttttgtgaaaactctgacagggacgaatataacccttgatgacgacaccagccacaccattttcttagccacgaccctcatgtaacagaaagcacggattcttctggatcagcagagtttgattttcgccggatagcagcttgaagatggaaggaccctggcccattacaacatcctgaaggaatcaactctgcatctcgaacttacgcttaccggaggcataattgaaccttacctcatggatttggctcgcaccttccatcttgcactga

SEQ ID NO: 29054 - DNA, 216 bp, Glycine max
  Clone ID: PAT_MRT3847_126236C.1
aactttcaggtcaaagcatatatcccggactatgtctgaatatgactggatagtagcccgaatagactggggggaactacagaacaaattgctggacaaagacaccagccgatggagaagagctatgctcaatgcagactgaagtctgacgctgaagaactgcgaggaggcaaaactgcatcactgaaggcatgtaggtttactgtttgctagcat

SEQ ID NO: 29055 - DNA, 304 bp, Glycine max
  Clone ID: PAT_MRT3847_126237C.1
gaaagaagttaagagagttttttttgttccacactgaccaacccttggagacgcaagtgatactttcgttacctatcttggtcttgtatcccttagccttattttcaaacatagtctttggtaaatggttcaaattggacgttcattcaagagtaactgggctcgtaacaagttgggaccaatggcattactcacagcatgacactcagggtgacaagcgggtatgcttgccatgatgtgacaagtcacatcgtaggaagcactagcgagagacacacttcgttgttgttcgtgacaagcttcg

SEQ ID NO: 29056 - DNA, 864 bp, Glycine max
  Clone ID: PAT_MRT3847_126238C.1
aagaagttgactgcatactaaacatgagtgctttgacaaaacaaattgttttggatttgttgcctgatgatgaattggataaagactttactgatgcttactcggagcaattggaagaaagtgattacagcagcagcgatgatgatgataatgatagtcaacttgtggaggatatacaattcagaaatggaacatctggttcaatgtattcattctgtaaaggagaaagtattggagaatttgtgccatttgaggaaaatgtttcttcctccccacttacaactagtgataagttgaatagtggttctgaacagcatcaagctaataactgtgatacggtggatttggactccaaagttcataacactcaatgcaacatttttactgaccaatgccaaagagaaagcacagagattttccatacatttatggcctgtagaaataataattcttcagttatttcacctgacagagaattggacgaatatgttgtaaagagaaatgaattttctgaatctgatgctaaagtagatgctacagacacaacagatttgttttgtaaggagaaagaacccatgcccactaagtgcagtgaatgcaagaaccaatacctcgctatccaagatgcttgtgataagacaagtatgcttgcatataatctcataggtcatttgttggaagagtttgtcatgattgaaggcctagatttaaacttgagcaagagtttatacctcactggtaataatcgcattgaagatgttgaagaagagcagtcatcatctgggaaacatgcaagagattttgttcaagtaattgaagagctgattccttcctttccagatagtagcattgaaagactaaaga

SEQ ID NO: 29057 - DNA, 401 bp, Glycine max
  Clone ID: PAT_MRT3847_126239C.1
gaaagagctgatggattagccacttgttcagaaaagaagatctatgaacgatcagtaggttgtgttcgtagcaaatacaagacagacagatcaagagccacagggttctcaaccgcttgagagaacaacaagatctagaggagtgacagtttctgccactaccaaaaggcaaacatgtggcaacatcaaagacaacccatacaggtccaagtgattcacatccagcatcacatgcaccaactggaaaattttccacaccaccaagagtcagggcaacggcaacaccaaacttgtacacaaatgttcttggaagtgtagactctcttgacgtatccattaatgcatcgcgaactgacaagattgccgaagtcacaatgacgatctgcgaagatcctttttca

SEQ ID NO: 29058 - DNA, 1019 bp, Glycine max
  Clone ID: PAT_MRT3847_12623C.1
ggctcgaggaaaaatagcagaaatgttgctgttttccaagcaaatccgcttatgaatgggctttcaccttctgactatgttctaagtgcattttcagatgttcactccaatgatttggagcaaacattattggctttaccattttcagatgctttgaagcttctgtcgtacttgaaagactggacttcatactctgataaggttgagcttgtttgcagaataggcacgctgctgttgcagacacattacaaccagcttcttgccacgccagctgcccgacctatcttgacagttttcagtgacattttttatgaaagggtcaagggatggaaagacatctttggttttaaccttgccgccatggatcatattcagcaaatgatggcttcaagatcagatgctctttttcatgatgcaagatcaaaactgctagagatacgtgctcggcaatccaaacgcttagaagaaaggtctgatactggggaagtgaagcggaagaaaaagaagacataaagtatcgtgtatatttggacatggttacgcacttagattatgtcaatgacctgagtatttcaaccacggtgggagaaatttgcgtcgactgtcggaagtgattgatgaaacactgcagattcaaagcaaagttgtcataatatcaccttcaacgagtagaggtttggatcaccagaaaaaggctttatgaccttgtcagcgcgattccttttaccagataattttgctgttttaatctgcggcttatatcttttgatgtcaagatgatatcatttgaattttgaagagcgagtttttcggtatacgattactgatgtgggtagatcagaaaaaggtcattacttttttatgttataatgtgtaacattagaaatttcacataagtttaatatattatacaactttttctcataattatttaccctgtcggcgagtaaaattttccccatgtaatgttattaaaaaaaaaaaaaaaaaaaaaaaacaaaaaaaaaaaaaaaaaagag

SEQ ID NO: 29059 - DNA, 273 bp, Glycine max
  Clone ID: PAT_MRT3847_126240C.1
taaaatatccttaggtccaactttttatgattgtatttccatcattttttggcgtaatattactgcttttatattttgatatggtcattgtaattttaacaaacttacttgtaatgctaaaaatttattaattaaatttttattttttttataacccattttcacaccatttaattacctttttaattcttataaattttacttataaccatttattccatcccttcaattataattaattatatctacttcaatttaaaaacattatttttt

SEQ ID NO: 29060 - DNA, 254 bp, Glycine max
  unsure (1)..(254): unsure at all n locations
  Clone ID: PAT_MRT3847_126241C.1
ccggaacggaaggaccgggccgagcgaacggtccgctccaagccaaagggagccaaccacagagagggaagccngagaaccagccacggggcgaccagaagaaacacgccgcggaaaggggaaggaacggggcggaaccaccgggaacaaaggaaagggagaaaaaaaggggcggggaaggcagcgcaaccaacggaggacccaacgacgggaggaggagacacacgccaagagccaaggagggaaaagcaaaa

SEQ ID NO: 29061 - DNA, 545 bp, Glycine max
  Clone ID: PAT_MRT3847_126242C.1
ggcggctgtcatctcagacaaatgaactttatcagctagccgctgttgctttctgcttgttatctgcatggtgcagtgataagcttggccttagtctcgagttgggttcatttatggctggtgttatgatttccacaacagactttgctcaacatactttggaccaggtggaaccaattcgtaacctatttgcagctctctttctctcaagtattggaatgcttattcatgtgcacttcctttggaaccatgtggatatcttgctggcatctgttattctggttgtagttgttaaaactgctgttgctgttttagttacaaaggcctttggttatagccttaagacatcatttattgttggtatctcacttgctcaaattggagaatttgcttttgtcctcctgagtcgtgcttcaaatcttcaccttgttgaggggaaaatgtatcttcttcttctagggactacagctcttagtctggttacaactccacttttgtttaaattgattcctgctgtcatgaatctgggtgttctcatgcactgg

SEQ ID NO: 29062 - DNA, 480 bp, Glycine max
  Clone ID: PAT_MRT3847_126243C.1
gagagaactagtctcgagttttttttttttttttttcgctcagcaaaaatagatattttattaatctaagaaagtaccaatggtactataagtacatattggctgtagggatctatttggttccattaattacagaaccaaggaagatacacctaacaattttacatatattcatcatctcccaaccccttctagttactaaactcttcctttcaattagaggaccattgattaaaatgtactgcaaaatccttctccatggatttgacccatgtccaaattaggaggactgcgtcatccagcagtttgcttccatcaaaacttgcattttgaaaaactattttgtttctgtgctgccatattgttcttgttagagcaatccaccaacatttccatcttatagccttctttccatgatcgttcccgattccatgctgcaaatagtgatcccttgggttttgaggcagagctgtagttagg

SEQ ID NO: 29063 - DNA, 147 bp, Glycine max
  Clone ID: PAT_MRT3847_126244C.1
ctcggatttcggttcgggagtagctccatttccagtttatatggaggccaaatggagaaccagggggaaggaaggaggttggcaggaaagaaattcccagttgtgtggttgatttcaggacacaaaatgccagttttaggcttggga

SEQ ID NO: 29064 - DNA, 222 bp, Glycine max
  Clone ID: PAT_MRT3847_126245C.1
ggggtaaacttttaacaaatatagcagggtatttaaggccagaagctagttaaaaaacttcattccccatttatactattattaactaggctttctacccctttggggggccctcattcccccaagagctttggcgcttacatttcaaagggtttggttttcacctaaaactggggaaggggcccatatccttgaactaaagataaaccacccctggctaaa

SEQ ID NO: 29065 - DNA, 571 bp, Glycine max
  Clone ID: PAT_MRT3847_126246C.1
agacagagcggccaaaacaaagcttaattcattcttcaacagcacgaacggaaaaatgcaccacaatggcctctggaagtaggggaataactatccatgattacccaccatatgccataccactttcacctgaacgcacgtttcaaaagctgcagtgctgcaccttagctagatctagtgcgagtacaagtccgagacaccggatgagatggtcagatcatccgtaatcttgtggacgaactgctccgggatcggcttctcaacatagtcgtcgctgcccgcgccttgtggaaaccccacgttcatctccgaactcttggacgtgacgaactgcacgtcgcgaccctcccacgaaatgtacacaagacaaccgtccgtcttgtcaatggccacggacgggaccacgcccttgcactgcacctgcacgcccttacagttgacgatctcaatgctagacacggcgttgtcgaaaatcagcttggtcttcttgcacgagtcaaacacgatatttttggccttgccctccacgaggatggtggcaccctcacagccaaagatgtacacctgttgc

SEQ ID NO: 29066 - DNA, 225 bp, Glycine max
  Clone ID: PAT_MRT3847_126247C.1
gcccggaagacccacgcgtacccacgcgtccgcacacgcgtgagaacacgtcttataggacctcaaaagggaccctatgcatcgtgtgatgggttcctactgaaagatacactcttccattatcccgaaaggtagtgacggatgacttattcagacacctactgaccgctgcatatatatggacatctctttacgacccataaagatagacgggatggatcacta

SEQ ID NO: 29067 - DNA, 276 bp, Glycine max
  Clone ID: PAT_MRT3847_126248C.1
taaaaaaaaaaaaaaaaaaaaaaaaaaaaaaaaaaaaaaaaaaaaaaaaaaaaaaaaaagaaaaaactaggactataataaatcctaaacttacttacacatccttccaacaacataacaaatctttaaattacacctaaattaaataaactaccacgccattttacaacttcataacttctaaaacctcgtcgtctctcaacttattatcctttctgcaaatcatcctttttccatcttccttaataacaaataagccccctcctattacccttc

SEQ ID NO: 29068 - DNA, 425 bp, Glycine max
  Clone ID: PAT_MRT3847_126249C.1
ggctcgaggtgagaaaagatgggattagcatgaccttcttgtaactgtgtcgcttggatctgaccagcacatgggattcatatggctatctagcttacatgggcgggccatatgcctggactactaagctagcgctgctttggagcactgaagctcactgactcttactattttgacagagttctgtactggtcgtcacacggtgacctagtggtgctgacaactgctactctgggcatatgcctcattgggactccttaaattgctgctccacactatgccgtgactgagaaacctgttgccaccgatgtttcaagtgttgttagctgaacttgagatagattggcatgttgcatataagacgggttgacactgaacacgttagctggaatggagctacttatctgatgacttgacgcatatgc

SEQ ID NO: 29069 - DNA, 329 bp, Glycine max
  Clone ID: PAT_MRT3847_12624C.1
gggtgtttttctttatgaaccacgtaaataagctcttcggtgtttcttctctgggccataacatccagcgcgcgaacccacccgaggccaagagtcatactagacccccaaggtactagagcccacctacacctaataacacatcccatccgctcgcactatcatggccggggccaccaagagcggccaaccagactagtcactgctagtcccccacaatcaacgcctccaacccgtaacctcacattctgcaccacctaacccctgacacagaacacactgttgccacggacaagaccggacacacaatgaggaatgaccttccttaa

SEQ ID NO: 29070 - DNA, 597 bp, Glycine max
  unsure (1)..(597): unsure at all n locations
  Clone ID: PAT_MRT3847_126250C.1
ggaatcattggaggccatcttggtgtctgttggttgctcatcaagtttgtttgaaactaatttttgctgtatgtgactttctagacctgtctggtctgtatgcttgagaactactccctatcacggcaagagaaggagcaagagcgttgtaggcagtgggaactgaagaaacttcagggacaaataatagtggaaaaggaggtataagtccttcaaaggtccagagtgtaaaaaaaaaacacctaggttgtcaactaaaagggcagcaagtagaagagtctcccttggatgtcaaaccccaaaatctgattcaaaatctactcagttattctccacagggaagacagacaaagcacaccaaaatgagcaactaaataacctggatgatgatgtttcatgtttatcatgaggtagttaacttcttttagatctactccctcccccccctctccagttttccgtgcctctggcttgcagaattctcacttggtatttggtaaggatttccttcctgtttgattgaaaggaaataacatgaaccaatgcaaaattccttacgaaattgcttcccttattttgggctanaatggtaagggg

SEQ ID NO: 29071 - DNA, 336 bp, Glycine max
  Clone ID: PAT_MRT3847_126251C.1
cctattacttactattactcacggaccgatcattcatgctcagctaggcaaccaacggagccccccggctgctgggacgactgcggatcctaccatgctttatgtacttttttacacatacattttatagctgggggcgtggcatatgataaatagcttccacacgacgtgtatatatgttttcatactactactggaacaagtcacttccctgcttctaatgcttgatccaggaatcaaatgctggatgctcttcacaggctgttaagaccacctctgaatggatagataataaagccatgtgtagctcactgccaatccgagaagcctgataca

SEQ ID NO: 29072 - DNA, 390 bp, Glycine max
  unsure (1)..(390): unsure at all n locations
  Clone ID: PAT_MRT3847_126252C.1
tcacaacgcgaccactactnnagtattctctcttctattataccgccgcaagccgaagaagaagagaatggcagaagtatagaagcagaatcaccggttggcatccgccatggaccgcggcatcgctagctcgtcttcctgcggatattcgatcccttctccttcgcgccacactctctctttctccgcgccactcgccgcaaatagcataccttctcaactcttcgccaacgtctccagctcgcgttcttcgccgtaatccgccgagcctgaaactccgcgcccgcagaaaaccgcttgtcaactggagcaatattcgagggccgccctccgacaaagagtctgtcaactggctgtcttccatcgaggaattttggagattgtttccta

SEQ ID NO: 29073 - DNA, 421 bp, Glycine max
  unsure (1)..(421): unsure at all n locations
  Clone ID: PAT_MRT3847_126253C.1
aatggatgagtttttaagtggatttcattgggccaatgaacttgtgtgatgaatgaccatggagtctgtggagtgtgcttagtttttttgatgggttagttaatggatatgacctgaggtgggtgagttctctctgtttagataagttctgtgtaatattgtatgagtctttttggtggttgggataatattataactgaatttgtttaatgtggtggaatgaaaggaatgattgattgatgagacaatttgaggcgctgtgacagtgattctgttaagatcttttttaaattgtcataataagatatggcaaatatgttgtgcatcagttttttttttttagcaaagttngtgtatgctntttagttattctctaaatgaaaatattgataatacagaatggtcattatgtttcttttaa

SEQ ID NO: 29074 - DNA, 489 bp, Glycine max
  Clone ID: PAT_MRT3847_126254C.1
attaaagcctcatgctggtgggcatttttaatcacacaattgtgaccttaaactttcggccaaactatatagaatgcaaaagattcgccggatcatacaatccttatgctcggacctaacaatgccggtacaatctttcttatggaaagggcgctcaccgcatacatgaatgcacgaaacgcacactggaacataccgtcttctttctcaacaaatgaaaaactatgctaaacgggggccctttctaaacctttacttttggaggcagactctgatcgtgctttaaaaggagaactgttaatcacacctccaatcccggcctgtggagggtccaaccagtctatgcgaaccgtccaatggctgagttgagaacaccgcttcaaaacgcgcatgtgtgaaggagaaacttgccaacttatagcatggcttactctgataaaagccttaccatgatgtccccacaaatccgccacataaaggctatacttg

SEQ ID NO: 29075 - DNA, 596 bp, Glycine max
  Clone ID: PAT_MRT3847_126255C.1
ggagacacagtgtttgctctttcccttctgcacttgcatagagccttccagcacttcctcttcaagagaccacaatattttgtctatattatacctagtaccaacatgaagcaccaatacaaatatccatggcctctgctgctaccatttcattatcagaagcagaaccagaagcaccaaaggttcatgcatccgacatttcaagcatcaaagccttggcagaatcaaagggagcttctcacattccttcaaccaaccactctatcatagacctccatgatgatgtagctgatgagcttgcagcttccataccagtcattgacttgtctctcctcacttcacatgaccctcaaattcacaccaaagctctgtaccaacttggcaaggcctgtgcagaatggggtttcttcatgctcactaatcatgagattccggagaagctggtggaggatgtgaagaaaaagtctcgtgagtttcatgattgtccggtggaagaaaaggagtttagtgacaaaggcccttttacacccatcaggtatgggaccagctgtgatccctgaacaggagaatgtcattattgggagagatatctcaag

SEQ ID NO: 29076 - DNA, 188 bp, Glycine max
  unsure (1)..(188): unsure at all n locations
  Clone ID: PAT_MRT3847_126256C.1
gtgttttggaacaatttgttaattttggtttttatttttccttatctaagggaaaaantaaaccaaaattnacaaattgttncaaaacacnaggaaacaatncntnatgntcatgnggtnaaatnngtagntattgttctanttacnaaaaaaaaanaaaacngnccngggcngccgnttngtgggct

SEQ ID NO: 29077 - DNA, 202 bp, Glycine max
  Clone ID: PAT_MRT3847_126257C.1
gcatcagcatggtcaccaagatcatcctccactcttgcttccacgttatcttgaatcttgtcctcagcaccaagatcatcctccactcttttttcttccgcatcatcttgattcttgtcatcaacatactcagcatcttccacagatattccaccaaaaaccgcagcgagcgtagccccatgccttcgccgtcgcattataa

SEQ ID NO: 29078 - DNA, 413 bp, Glycine max
  Clone ID: PAT_MRT3847_126258C.1
catggaagtcgtcacgggagatgtggtgtttgtgggccagttttcatcaacaagctgcatgaggatattgtgcttcgtggactgtaggatcagatctctggtactgcttgatcacatatatgttggacataagtctgctggctaatgtatcatatacatgccaagatcgattggaaaaattatgtgccactggtatggctatgacacttctaatgatgtatcctatttgatgcaccaacatattgcaaagtgagaggtcatacaactacttttgatgggccaaatgatgacatctgacacaaattgctaggtactaaatgtccagaaagttgctaatgctgaggagacttacctggtcatcatgatcaatcacgtttaaagcgacaatctgatcatcaaagtaaacatgagtg

SEQ ID NO: 29079 - DNA, 1138 bp, Glycine max
  Clone ID: PAT_MRT3847_126259C.1
gttcaggatttgaggattcaagtagggtttgaatctgagtcggttgagataagtgcgatttactcgtgcagtggaaggccaacactgatgagctcaggggcggtgaggatgggggatttgtacgccgaggaagagagggagctattggttgagttgagagttccagcatcgtcaggaactggggcccacaaccacgtgatgacggtacggtgtttgtataaagaccctgccacgcaggagatcgtatacggtagggagcagggtcttctggtgccgccgccccagagttccggtacaaggattgagaggctaaggaatctcttcataaccgcccgagccattgcagagtcgaggaggctccttgagcatagccctgacttcaccagtgctcatcatttgcttgcctcggcgcgtgtgcttctcatgcagtctaattcggcttcggctcaggagtatgttcgcggcttggaggctgagctggcagagcttcactggaggagacagcatgagcagatgcaggtccaggtacagcagcggagaagaggggccgagagagaggtcatggcgctgctggacgagaacggcgagccgcttacgccgacttcggcttggagagccgcggagaagctggctaagatggcaatgatgaagaagtctttgaatagagtcagcgacttgcacggcttcgaaaacgctaggttttaattttattattaataaatgtagaggcatatttagagagaagagaacaaaagaggatggggcatgatagtctaagggaatggggacaagctggtagcagacggcgcggccccttctgcattggaagaaagggtatgccccactctaaaatgggagagattcattgcttggttcctcgatcatgtctttttgtcttgcattgtgccttttatgtacacccttcttttccatttttaatcatttgcttttcaagatcacagccagaaactgctccagtcaatgctcccatgttgggatcgctagtttatcataactatcaagggtagaaactagaagaaaagactagatactgctccagtgggggcgcccgtgttggggtcgcttggcgccggggcctttctagtagtaatttataaagtctctctctttttttctc

SEQ ID NO: 29080 - DNA, 2043 bp, Glycine max
  Clone ID: PAT_MRT3847_12625C.1
agaactgcaggcgctaccaccattgcaagtacacctggctcttttttaaagtactgcaaactgttcaatgggagccccaccaattcaagagttttgggagtgggagatgggggattggagaaagagtagagcttttcgaattctagccattgatagaggccatgtttcatatgttgatactgatttcaaatctgggaccaaacgtgcaattatattgcccacttttccattagactctcgcttcatgttaacatcttcatgccgtcacaactatgaatgtcaatctgtggccccttcatcttatgagacaatccgagctctggtattttctctttctccaattgtatcagttgtagctagagtctatgattcacgatctggaaaccttgatttagttctagaaactcagatgatcaagcattctggtgataactccagggggaacctctatgttgctccatggaattacagagcatttgaggatgcttctcctgataggttttggcttcaaatcgaagcaaatgacattgcaggcagatcaactttgactgaattgaggccgttttctatcaatggtcatagcctcaaactttcatggggctggaaggagtttttggtcatgggatgtcaatgggcttccctttattacccattattttggtctgctctttactttttgttcatcttccttcttcttccaaaagctcttcttgtttttccaaagaagatatacacttacaagaacttcattgccaataaaggcatagtaaatggtgtattatggtttctccaggagctctgcaggatccccacattatggtttggttggataggatacctattttatcttatgttgtgcccctggtttatggggcaagtttttactgaagggaaaaatatggtatacatgacctatatgggttgggccatagagacttctaatggaaaggggaaggttgagtatgttgggtctccagatattatggtggtggttcttccccatctattatttgtggttttgcctgcaattttggtcactggtgctctgacggctgaaagagcaatttaccgggaacacatgttagcatttttggtaaagaaaaaagatgatatttgtatggactctagaaaatctgtattgaatggcagcatggtatctaatgttcaccttagcaagcgattgattcggaagcttctttttgtggtgtgcttggcaatatgttggaagcattttatgaattgcagaactcttctaaaagcttatgagatgaacccagtactccatttcttaggctatggtatatcaatccccttgttgttggcacatgctatcagcaaaaccagaagtgctgaatgaaacttgttccagaggttcacatgtgccaagtctccctgttttgagtacaaccaaaggatgcactttgtggttgcgtggtcggtgttagaattggttgaagctagccggattcaacaaatattaaagacccatcaagtggcaagagagggctggttgtttggatattcttctcatcattcacgatgatatttgtgttgtctgtattctttaagcttatgctgtatgcactacggtttagtggttttgcatgggttgaagatggtgtattatggtttaagcttattgtttgaagaaccaaaaaataccgatgcagtatgcaacaagttatcgtgctggctgagtcactttgtaaaatttgatttgacacttaaaatattaatgtaatattaattactttttcaacgtatctaataagtgttattttagtttttttaatattagtaataggattagctttataaaattacttctatcatttctctaattatttctttgatctataaaaatattcataagtcatctagtatcactaagcttattcaaacctgaagttactattaataaatatgaattttaaaaattaatgtattttaaaaataactcctaaaaatttgaaaaatctcaattgttttaacaataacaataataagccttaatttaataaataatatttggaattttaattt

SEQ ID NO: 29081 - DNA, 685 bp, Glycine max
  Clone ID: PAT_MRT3847_126260C.1
ctcgttgagcatagcgctgacttcaccagcgctcatcatttgcttgcctcggcgcgtgtgcttctcatgcagtctaattcggcttcggctgaggagtatgtgcgcggcttggaggctgagctggcagagcttcattggaggagacagcatgagcagatgcagattcagcagcagcaaatgatgcaacagcggagaagagggagcgagagagaggtgatggcgctggtggacgagaatggcgagccgcttacgcccacgtcggcttggagagccgctgagaagctggctaagatggcaatgatgaagaagtctttgaatagagtcagcgacttgcacggcttcgaaaacgctaggttttaattttctttttttggaaaattgtttttctttttttattattactaagaaaaatgtagagacctattagagagagagagagagagagagagagagagagaggagagaacaaaaggggatggggcatgattgtagaatggaatggggacaagctggtagtagacggcgtggccctttctgcattggaagatgaccacagagatagggggtgggggagttatataatggggtatgccccaccgtaaaatgggagagattcattggttggttcctcgatcatgtctttttgtcttgtgccttttatatacactcttgttttccaattttt

SEQ ID NO: 29082 - DNA, 346 bp, Glycine max
  unsure (1)..(346): unsure at all n locations
  Clone ID: PAT_MRT3847_126261C.1
aggcttgcatttctggtagcatccttttggcatttccaactcttgcttgctatatcnccagagctcaatttgaaaacttgccatggccaacatatacgtctcactttatggctgttgtgttcgtgtttctctgcttcttctagttgtctggttagttcttcaacctgtcgacgaagttcaactgctctagtatcagccagccgcaaagacctctctgctgcttcctgtgcagctattgcagtgactgcangttcctctttgagccttaattttccattggatatgttcaaagcagcctttgttttgnncnnntcttgtttcaaagcagccacctcatggaacaatg

SEQ ID NO: 29083 - DNA, 430 bp, Glycine max
  Clone ID: PAT_MRT3847_126262C.1
aaaaacccccaaacagggggggccctttttttaaaactttttaaaaaaattagccctcgggggttgcaattttttcaacaaaaaaaaattttgaaaaaaaaacggataaaattcccctcaagggcccatagaaaagggtgaaaaaaaccaaaactaaggttcggccctccctaaaaaactgaacaaaaaaaaaatgggggggaaaaactttgggatttaacccccttccccccttatggttacataaaaaaactgggggggcggatcccccaataaatttttcctttttcaaaaggttaaaagcaccttccaaaaaaggagcaggggttttttttaaaaggcccccaattttggggggacccctcttaaattgcccaagggaaaaacaaattggggccccttttgaaccagttccaaaaggggggaaaaa

SEQ ID NO: 29084 - DNA, 387 bp, Glycine max
  Clone ID: PAT_MRT3847_126263C.1
cccacgcgtccgcccacgcgtacggtttgctctataaacctcacctccctctctcggggagggtatctctctctctctctagagcgcaccgcacaggaccgatggaaacacaatgatccaaccctaacccaagcgcctcttacatacaaggcctaccattaccatcttaattgctgttccatatgctgtcaatgatctgtctcatctatggtgataacctcctattaatgcgcatatatgtcaaaaacaattcactgcattgtgattgattcctaaaatcggtatcgtgaaaaccactaatcagcgacactataacacggcttaccttcaatccgagttgaattcaccatgggttctccatacaattgaggtcaaccctgtgtattg

SEQ ID NO: 29085 - DNA, 311 bp, Glycine max
  Clone ID: PAT_MRT3847_126264C.1
tttattgatatgaatttgaagttgcagtgtgataaatattatagtccttgatttcttcgttgcaacaattttggtagcatggtaatgccatgcgtactatatgtgccctctccgaatgaatactggctatggtgcccgtactctggaagtgaaatgcgcagctttgaggcttgctgtggaagcacacaacatcgttggctttgagaccattcctgaagagtgcgttgaagcatcaacggaatacatccatggcaaacactatacatcagactcccaaacagttaaccaacaagcttacttttatgccagag

SEQ ID NO: 29086 - DNA, 332 bp, Glycine max
  unsure (1)..(332): unsure at all n locations
  Clone ID: PAT_MRT3847_126265C.1
tcgtcgagcaccagcaacagcggcgcggtgctggagagatgcaatgccagctcgtcgagcaggccgtccagccattcctcgaaagcgaagggttgatggcgctggcgcattttcaacaggcccagcgcctggctgccgacgcctgngaagtaatgttgcaggccatcgagcaggcgctcgaggaaacgccccggatcgttgtcccgcgggctgagccccagccacaggctttgccaatgcccgggcaggccctggcagaactccaccgccagcgaactcttgccgaagccggccggggcactgatcagcagcaggcggccgtgtaacccggc

SEQ ID NO: 29087 - DNA, 151 bp, Glycine max
  Clone ID: PAT_MRT3847_126266C.1
ctcacaagaacatatcagatccactcatgttctttttatagaccgcttcagctatggcgtgcttaaatataactggaaatccagggcaagaactctgctgtcaagcacgtctagcacgatgttccagtgtgtacgcttgaacttttccaag

SEQ ID NO: 29088 - DNA, 106 bp, Glycine max
  Clone ID: PAT_MRT3847_126267C.1
cccacgcgtccggtagcagaggagagggctttgcagctgcttccactgtgcttgtagagcgctccgactaggaatgaggtatgcaatatgatcgccactgaggagg

SEQ ID NO: 29089 - DNA, 425 bp, Glycine max
  Clone ID: PAT_MRT3847_126268C.1
ctcggctcgagacaacatcaacccaatttgctatttttttgcgtattcctaaccttacatcaagaattgaggaacatgacaattatggtcctgcaacatccataaccaccatgtggcatacaatcaggatgcaaacttattacctgcacttgaatactattgaacataatgggttttctgtcattgaagaaccacctttgtcatattcaccacaggaatgtggacttggacacctgacactatacagtatgttactgagagagaagatattttcaacggatacgtgttatcgcaaatcaaatgatctatcaaggatgacatctaaataactaaagaaatggggatcacgaaaggggatcaaactaaaggatcttgatatccaagaggaagagattgatatctgtgtacatcttcatgccaaaact

SEQ ID NO: 29090 - DNA, 837 bp, Glycine max
  Clone ID: PAT_MRT3847_126269C.1
ttattgcattcaaattgcagcgtgcgtttctgtactcccttgatagttcctagctactcatgctttgctcgttcactgcctcggaaactgttacctctctctcctaaagtgctttcaatcacagccttagagtgcgtgcctgaatcttatttaccttaacctcttcacgtctttattagtactacatcactttaatgtaactgcaatctttttttcttgtcaaaagaaaaagcttttttgatagcatttctgtttccatttaatgtccaacttgtcacaagtattctgaaccattcccatcatggcttcagtcatggaatttcgttaatcttgccacataaacccatctgagtctagctctgtttgtgttctgtctcaagcgtttgtgagttgtaactaatgcagcttgcaatgatgggtttccgttaatatgtttgtattgttctcaaaggctatacctttagaacttaaatttcagtttgaatgtaacaagtgtgtcaaactgccatgtaaccggaacgtttcagttggggttgctcacgtttgttctctcagaatgatgattatatggaaggattctgtggtaagaaagtgaaagagtttttttttggatcttggctttgtcatggatggactctactcttcattttcagcttataagagagtttgttttcctggctcggcaactgataacaaacttctcttatactcttgtattccacctacccaggagtttttttccatgctttcgctcactcaactcattcttgtggtcattcataacaatatatctaaaacatcttcatggtagtaacaaatgcgaattcatcgctcgga

SEQ ID NO: 29091 - DNA, 686 bp, Glycine max
  Clone ID: PAT_MRT3847_12626C.1
attgcacgcgttacgtaaggcttggttttctttagagcggggcgccctttgtttttttttttagtaaatttattatttcttattttggctgagagcccgctactaatgaacaattggttaatcacaaccatagagtatatatcggcatcgcgtaagcattgtcttatctaaattttttgtacaaaatattaagtgtttttgcaccggagagaattcatctttttttttttaattcatggagttgaagattctgaaatgaattgttgggactatttcagttaaccaactctatccctgtaaaaggaagcccgtcatgaagttgaagaacgtcgtcgacaacagccttagccatgggatgctataagaatgcttctggaacgcctgcatacatgaggagtcatgataacatttcttaaatttaaatattctgatcatcagggtttaaatggctcaatccaagcaacatcaatgcctaaccatcctaaatgacctgattcaaggtgggttgatcaccggctgatagtctacaagactccctgtaacaacattcgccaggaagccaccctttttgatagaaaatataaacttatttgggtttgtttaccaggccgttttctctgggttaatggttgaggcaggcaaacaaccaatgtgcggccttacctttggaaacttcatattatatg

SEQ ID NO: 29092 - DNA, 730 bp, Glycine max
  Clone ID: PAT_MRT3847_126270C.1
ctctaatagaaatatttctggacgtgaatgaaatatgatccagtatttcttataaacaaccttttattatacccaccactgcctccatttttgtgccttttaaatcagtgtaacaaaactgtggaccttcttgttatactctgttggccttgacaaccatctacaagttttcaaggaaaagattcactatattgccctatctcatgccaatttctgaatcattgtgtggctattttttatgtgcatgatgtttgcataaagagatataatatgattctaagctgcatgagtctattatgtctacaatatcttctttttgcaggatggagaggcttatgcttacttgcttaatgctcttgccccagaagtggcaggcccatctgccctaaacacaagtgatccaacagaaagggcaaacatggttcttgagcaggcagagagattagattgcaagagatacctcactccaaaggacatagtggaggggtcacctaatcttaatcttgcatttgttgctcaaatcttccagcataggaatggccttacaacagttgacagccagaaaatgtcctttgctgagatgatgactgatgatgcagagacatctcgggaagaacgatgctttagactatggattaacagtcttggaattgccacttatgtcaataatgtttttgaggatgtcagaaatggatgggttctattagaagttcttgacaaggtttcacct

SEQ ID NO: 29093 - DNA, 424 bp, Glycine max
  Clone ID: PAT_MRT3847_126271C.1
atttgaacacgaaagcgtgtgtgattcgttggggaagaagaaggactagggtttttttgttggattttgattttttggtgtctcattgtgaagaagaaaggataaaatgttcaacgctgatccttcatttcccagtgtccctaccctcaccactgaacagattcaaaagtacttggaggagaataaggagctgatcctggcaatattggaacatcaaaacatgggaaagttcactgagattgcacaatgtcaagccaagcttcagcataacttgacttttttggccaaacttgcggatgctgggtctcatacaccaacaccaacaccattgccagcaccgacaccttctcaggtttcccagcaggctattatgcaacaggggcaacgtatgcatcagtctgaagttgcatatcgagcacaacgc

SEQ ID NO: 29094 - DNA, 289 bp, Glycine max
  Clone ID: PAT_MRT3847_126272C.1
aattcggctcgagcctttatttcctaaaatctgggtggaggtgagcaaacttgcttttttgcgcacccactaccctgaacgctgcaagctaccttattgcccgttcgtgtaatgaaatatgtatcccgagtgctacggatctttgcatccacgagttgctcaacactataacctgcctcttgactacggttctggagcacagaaaatgcatgcttgttgattagggaatgttattaaggtcgctaccgctgtagtttgggatgataccctgtaaccgtagggggttctg

SEQ ID NO: 29095 - DNA, 130 bp, Glycine max
  Clone ID: PAT_MRT3847_126273C.1
cttccaggtgcttattaaccgagtcaaggatgttgctcgaaccatgacagaagtcgatattgcggtgtacagaaaaggttaactgtataagctccaatttacatccaaggaacagacctagtggtgggta

SEQ ID NO: 29096 - DNA, 235 bp, Glycine max
  Clone ID: PAT_MRT3847_126274C.1
tgcatggactgcttaatctacccattcccgctgtgccttgcacatctaactctatgccataaagatattgctagctatgagaagcccccaatttacaacccacctgtgcacacaccaggccgcttctagacctcgagatagaaacaccaccagagacattcttccggaagccgaaccaccaccttacaaaccacctactgacccagccccttgttaagaaacctgctctttacta

SEQ ID NO: 29097 - DNA, 545 bp, Glycine max
  Clone ID: PAT_MRT3847_126275C.1
cccacgcgttcggtgaaaaacccctctctctctctctctctctctatcaggtttgcaacgaggaaacaacaccagagctcttcgatcttccagaacattctagtaggacgaaagagattcattcttcacttcaaactgcaaacaaccaaaacactaacccgttttcatggacttctacggtcggggccccgcgagaaatgtacacaacccagtgaaccaacccgaatggcgctcaccgggcaccgacactggtctcgaagaatcgatgtggcatttgacgctgggtggtggtggcgaatcttacccggagcgacccggtgtgcctaattgtgtgtattacatgcggactggggtgtgtggatatggtggcaggtgtcgttacaatcaccctcatgatcgtgctgcggtaacactttcccatcactatgagaattgagataatctgcattaggttggtgcggcggtaagaggtacaggggactacccaaaacgggtgggggaaccctcgggtcagtattatttaaaaactggaacctggaaatttg

SEQ ID NO: 29098 - DNA, 627 bp, Glycine max
  unsure (1)..(627): unsure at all n locations
  Clone ID: PAT_MRT3847_126276C.1
aataaaccanngatgaaagtnnntaggaggggctccccagtgtnntgaaaaccgaantggtttnncaaagctgaggggcagaagccgagtnnntctgcgggtgggtaacccaagtnncaagtgagcaatagnctaataaacccttggtgagggcaccnnntaagcaagacnntatattcnnatgtgagaagccaagaagggggccccaagcatacccgatatgcccacccagtcnntggcagaagagagccaangnaaagagnnaaaagatnncagtgagaggggatgaannaattcttcagggatcttggtggcccaggggtgtacacaagggtacattgggtaacagcaccttggttctagaatgaagaaataatcaattaccatccccagtcactggcagcgtcagggttgggagttccctttcaatgaaagcttgggaagcagttaattcaaagaatgaaaccatgaacccctacnntattgatgggtttccccttcaaaagatgttnggtacctccagccattttgacatttgctggaaatggtattttggatcancaagcagcaaggggggtattgctcaagggatccatcacctcctggatgggctgcatatgccagata

SEQ ID NO: 29099 - DNA, 324 bp, Glycine max
  Clone ID: PAT_MRT3847_126277C.1
gcgcatactaacaccctttccttttttttcaatgggaacaaatccttgggtggccggatcatatttaccacaatagggagatgaattgcagtaccaaagcacacgctatataacacgtgtgaccagcgggagaggactacaacattggaaactatgctaaagcctttcagctttacatcagcgcatgggaggattcaaaaacacgttttacgtgccagaagaaccctaagatcaaggatgccatcacaccgaagtttaccgcatatctacgccatgcctatgagatacgggcggttctcaactacaggcacagatgaccggtct

SEQ ID NO: 29100 - DNA, 397 bp, Glycine max
  Clone ID: PAT_MRT3847_126278C.1
ttttcgcccggccaaatggcccgacaggcccgggagaaccaaaggggggttttttaaaaacattgcggggggaagtaaacactctctgcagcaaaaccaattgaatgagttgttgacgggtcttgagctcacaggaatgccattttttgcagcactcaagccccctattgcgaatgagcccattgagaaagctctcccaaaagggttcaacgaaagggtacaagaaacacgggttgtgtatcgggggtgaaagcaagaacagttgatcaaggcacacccttctgttgggtgctccataactcactgagtttgaccttctcaaactgaggcaactgtgaacccttgtcaaatggtgccgatgccaccacatagggaccgatctcatcatcaacgcaag

SEQ ID NO: 29101 - DNA, 353 bp, Glycine max
  Clone ID: PAT_MRT3847_126279C.1
aaaccactcccctcccagatttaaaaaaaatacttaccaaacccagagccagatccaaaaactccctggggtccaattggataacctaaaagagacctaacaaagcccaaaggggtttgggaaaagggacaccaccttgggccaaaatgctggcccaaaaaattgtcccgggcccctttaggcaactgggggacggaaaacatgtccccgggggggtcccactcaaacagggggcaataattgccccatatcacccccgggataaccaaaaaaagggccccccttgttgccctgggcttggccttgggcccaaaattccataggctttaccacaggggggggaccaaaacttg

SEQ ID NO: 29102 - DNA, 190 bp, Glycine max
  Clone ID: PAT_MRT3847_12627C.1
ctatttaactgtggttagttccacatatgtcccatgcggcccacccgacataactcccaaacacccacctgaacaagatccaccttgcccaaagcaagtttcttgccccaacgacactgtaacatcatgtgtatgcgctgatgtagaaggtttgattaacgcgctactagggaatccaccaccaaacccc

SEQ ID NO: 29103 - DNA, 289 bp, Glycine max
  Clone ID: PAT_MRT3847_126280C.1
cccacgcgtccgcagactcggacgactcagagtgttcatacaatgtacgcatcattggagcgagttgccatcatatctagcagcatagggcagagaaccagtagaggaaaacgcgactcttggaccagataggagagatggcgaacatgtctcttggcctggctggcatatctgcctactttagtgataccttcattcatgtcactgacctgtctgagaggacaacgctttctctcatcactgatggtatgaatgttaatgatgacagatatgaatgatctacttatgc

SEQ ID NO: 29104 - DNA, 2126 bp, Glycine max
  unsure (1)..(2126): unsure at all n locations
  Clone ID: PAT_MRT3847_126281C.1
ctgcaggtaccggggcggagttcccggggcgaccacgcgtgcgctctgtggggggtggcaaaaaggggaggggggcggcgggggggctaacttgtggagggggcacatgggtgggagtanttcaaagccacgcgtccgatttactctgttaaaatatgcatctccattttgttgaaggaagcagaagcacatggcagtgatatgtccgccaagccagggacaaacttggcttccccatggccccaattctaattaccacttcttctcaagaggaggagttggaaggcgcagtcgttcttattgtactttcagctcaccaaagaccaaaacgaatgcgtttacggtcagaggctgcggccaggactcggtggaagaccatcactttgtgaaggctctgagggaatcccaaccttacatttccgttcataggggcagactattcgttctgctcatatctgctcaacttgttgccggtccttacttcaatcccattctcaaggatatagctttccttaatcacctaggaatccgctttgttcttgttccggggacacatgtgcagatagacaagcttctgaatgagagagggtgccagcctatgtatgttggtagatataggataactgatgatgaatctctggaagctgccatggaagcagctgggggcataagattgatgatagaagcaaaactttctcctggaccttccatatgcaacattcgccgtcatggtgacaatagtcgatggcacgaagttggtgtcagtgttgccagtggtaactttcttgcagcctattaaattgcaacacttatgaagttgccacagcttgtgccttggctataggggcagacaaattaatatgccttatagatggtccaatacttgatgagagtggacgcttaattcgtttcttgccacttcaagaagcagacatgctaattcgtaaacgggctgagcaaagtgaagcagctgctaactatgtgaaagctgttgacgaagaaggtttcaactctcttgagtataacaattttaatggagcagtcaaatcaccacctattggacgttttacagaatggcataatgcaaccttccataatggtgttggttttgagagtggaaatggcttagggtctggtgagcaaggttttgctattggaggtcaagaacggctaagtcgaatgaatggttacctgtcagaattggctgctgcagcttttgtttgcagaggtggtgttcaaagagttcacttgctggatggaactattagtggagttttgttgttggaattgtttaaaagagatgggatgggaacgatggtggctagtgacctttatgaaggcactcggacagcaggggtgggtaaaaacattggattcgttcattgttgtggaaagagaaggtcacataattgcttgtgctgccatttttcctcactttgaggagaagtgcggagaggttgcttgtattgcagtatctcctgattgtcgtggccaaggacagggtgacaaattggcttgattatatggagaagaaagcatcatctcttggatttaatatgcttttccttcttacaacacgtactgcagattggtttgtaaggcgtggattttcagaatgttcaattgattatattcctgaaaagaaaaggagaatgatcaatctttcccgcaattctaagtattatatgaagaagcttctgccaaatattagtggaattactgttggtgtaaaatctgcttcaagttagtaccattttatgttgtttccaccaaccaggagtgaagggtgattggaagcaatatattaggcacttctatatataattggctcgtaacagtatggcctctggaattattagtatctcgttcaggtcttccatgtgtaagcattaagtttctaactttctactgttaatatattgtgaattactaagctcatgttattatcttgatgaattactaagctcatgttaatatttgttgattagatagagaatgtgattcatagttcatactttcctcatttatgggttatgccctctctgattttaccccaattcaaataattaagcaatatactttgtaatactggttaaaatctattaaaaactataaagttacaagtt

SEQ ID NO: 29105 - DNA, 160 bp, Glycine max
  Clone ID: PAT_MRT3847_126282C.1
gccgtccttttttttttggtgggtttttttacaaagaattagatcctatccatcaacaatcatgctataccggcaacctacccacggagatgagggacaaacgcaaggccgtccaccctatcagaggaccatcccataaaaccgggggcccatccaaaac

SEQ ID NO: 29106 - DNA, 415 bp, Glycine max
  Clone ID: PAT_MRT3847_126283C.1
ggctcgagggaaaaggtggtgctaatccagaaactttaagaagatgttgtggtgggaacatcgaaggagcacaacaggctgctcatgctgccataactgctgggtgacttggccttctaatagactctgcttgtacttttgatggagacggacgtgctagtgatacagtctttatagcgagcggaaatagtggaattcctgggcggatgaatggtcatgacattaccatagcgagtgggatggctgctaacgctacgaccgctgtgtgcacggctgttgatatactgtgcgtagggtgtgccgcagatgtaattactgcaatcgatcaggacggctctgatggaatggatatactacaccttatacctggagcgaactgtgctccatctgtcaccaagactacattcctgaaccc

SEQ ID NO: 29107 - DNA, 261 bp, Glycine max
  unsure (1)..(261): unsure at all n locations
  Clone ID: PAT_MRT3847_126284C.1
gttgtacagtacctttattatcaatcatgcatgcttttgtattntgtttcttactcctatgntcacattctattgcatccntcgctgaagcctccaaaactctaagtggcttcagcatcnatcttattcaccgtgaatcaccattgtcacccttttacaacccttcactcagtccatcagagcgcancaagaacactgtcttgcgctcctttgctcgctccaaacgtcgtcttcgcctatctcaaaacgatgatagatcac

SEQ ID NO: 29108 - DNA, 381 bp, Glycine max
  Clone ID: PAT_MRT3847_126285C.1
tttacgcatgcgtggatttgtgtgcggacgcgtgggctgagatggaaacaaaattgtttaaattgacactagatgatagatgaatctcctaaaggttacatgttggaactttgaagaagtcacactaccatggcaattgccaaaaacacagcactaggaaccaatctccatagtgatctattgtgaaatttttcgacagtcggaagattttgagccagagttagtgtagagatctactcattcactgtaatgaatgatttaattggtggccacagtaggattttctgagaataccacgtttttgaccctctgtgatattaatagttcttttatggggcgtgcccgattttaatttttcaccttttttttttaaacaatttt

SEQ ID NO: 29109 - DNA, 251 bp, Glycine max
  Clone ID: PAT_MRT3847_126286C.1
tgcgaaaggacgacagaaagatgctgagtggatcatgacctagttctagatgttgcatagccttaccggaatcacttccttaccttttttcagtcttacttaccctaaaccatcttcggtcttttttaaccttacccgaacttgatccaacggttgatcttacattgtacattggttctttctgtgttctgcataccttctctgttaaccttgctccatttcaggctccgtacttggattggatttgacat

SEQ ID NO: 29110 - DNA, 234 bp, Glycine max
  unsure (1)..(234): unsure at all n locations
  Clone ID: PAT_MRT3847_126287C.1
tcgccctttcgtacgnggacgcgtgggcggacgcgtgggtatgaaaaacactcgggcgccggtgcacatgtttgctaagtgaattttctctggagacaacaggttcactgatacaacaatcttcaattgcaaatattttgcacaacttcggctgtaattatacattaccaactcaaattaggaaagttttacgacactacattaggtggtatttgtatacctggcctatctaca

SEQ ID NO: 29111 - DNA, 338 bp, Glycine max
  Clone ID: PAT_MRT3847_126288C.1
ggtgctagcgtgtgattggtaggggatgtaactcgatctggttcttatgctgatctgcgttcgctctagatgattctatcttacgaaaacgtcttgctacgatattaactgtctatactgtaactccaattaaattcaacgtccgctgctttagaagctagatactcggcaaaaccgtgctacacatcaaacttatacgaccgtcaccacattcatcttactgccacttgctaaagatcaattagaggctgcccaaatgtgttttccaacagataaccaatcctaatgatgaataccacactgcttgtattgccgcattaattgcgcgtgatgtgttg

SEQ ID NO: 29112 - DNA, 400 bp, Glycine max
  unsure (1)..(400): unsure at all n locations
  Clone ID: PAT_MRT3847_126289C.1
tagttgcaccttcatttaaccttggagcttttgggaagagtccaaaaactttaaacatgagttaatcagcatcaaaatcattattaagagtagtaaaaaccttttcaccagtaaatataaaatttacaccggccaaaaagcacaatacctactcaagcataaaaaatcgaactctaccagctaataatcttaccattacttttaacattataatacgtacagtcgctatcatacgaatcatctcccatatttcaacgaacttgtnatcctcaaaaaagattccctttacancaacgagtacgttaatgagaacactctctgaagtaggtaagaatgttggcgatgggtgtgacggagctgcgcggggctgctcttcttgtcgcgacgctgtaattgctgc

SEQ ID NO: 29113 - DNA, 451 bp, Glycine max
  Clone ID: PAT_MRT3847_12628C.1
ggtttttctttcacagtttttgtttggggggcccggtcccccagaaaaaaaggacaaggtttcccaaccctcccaggttaaaaacccctcgatttgggaaaaaaacccgttaattttaaaaagcggcttcacagagcctctaggggcggccaaaaataaaccattattccttcaaagaggcacactaaacccgggcatcatgcccaaagagggggtccaaagaaaactcctaagccccccaggtaatggccacattttaagggcgcccttgcaacccacaataagcaatcaagccgtaccttcctgggaggggacggattgagaaaggggcgcaaccgccggccccttaaaggaagcccccccaccaaaaaacccctaaatatcttttggctgcgacgagctcacccctggggcccgcattcacagaccccccaaaaataaaccgggttta

SEQ ID NO: 29114 - DNA, 412 bp, Glycine max
  unsure (1)..(412): unsure at all n locations
  Clone ID: PAT_MRT3847_126290C.1
ctttcggttagtgactaagaaccgtctcttcatgggaattgttggaatgaccttcgcgcttcagataatcatcatcgagctccttggaaaattcacaacgacggtgaagctcgattggaagctgtggcttgcttctctttgtattgggcttgtcagctggcctcttgcgatagttggaaaattaattccagttcccaaaacacctctgtcccgatatttcaggagattgaggaagtccaagtcccgtgcaccaccaccgtgcaattcatagttagctaacaactcacatgtaatgtagcaacatagtaccatttttattcttctccaacataactttatgtaggaatttaaacattaattgaaaaaacttacagcttnntatacataatttagatccttacatatacctatt

SEQ ID NO: 29115 - DNA, 355 bp, Glycine max
  Clone ID: PAT_MRT3847_126291C.1
cccaccttcaggtgtctcctgcggaatgatgtcaagacccttaagacgatgggcggcgcggccaatccgccatgcggagggacagccaaggcccaaacaagctgaggccacggctcaagcaaaggcgccccccgagcagcagaggacgatgctcggagaagctagacacccgcgcggggatcagcgggaacacgacgcagcagcaaagggaaccggcacgcaacaggagaaggaccaacctgaaagaggacaacggagagaggcaccagacgcacggaaagcaaaaggagcggaaaccacggacggggaaagaaacggtgcgcaacaacaactaacccaacagatcaaccagcga

SEQ ID NO: 29116 - DNA, 694 bp, Glycine max
  Clone ID: PAT_MRT3847_126292C.1
tttctcccattacattatatactcttccaactgctgactactaactgaaatagcaagaacattttgattttccttgttgcaaatatgttgggcaccgtcgagtcaaacggtgccgtttgttattattcagagcttgggattgtcaaacattgcaccgacgacgaaattcgatgcgcttatcgtaagatggctctgaagtggcatcctgataggtggatcaaggaccctaagcttgcactagaagctaaaaaccgattcctgcgcgtacaagaggcttattcagttttgtctaataaagggaagagaaggatatatgatgctggcttgtttggtctgatcggagaggatgatgatgagggatttcttgatttcatgcaagaaatggccttgatgatgcagaaagtgagacccaaggatgagaaaggcatgttggaggatcttcaaggattgttaatcgataagatggcagataatgaagggatggaaaagtctgggttaagctggaattcatctccatgtcctacaaaaagggcacgtatcttatgattcccgtgttacaattcagttaattattttgattctcacatttcatcaatatgtagtttacatagttgagaattattaacatcgttaaattctccaccattcgggcagtagcacatcaattattagtatctcatcatttcatggagtg

SEQ ID NO: 29117 - DNA, 588 bp, Glycine max
  unsure (1)..(588): unsure at all n locations
  Clone ID: PAT_MRT3847_126293C.1
aaatctgttgggattagtagatttgaagtgtggttagttctggttattgttttgaattggtcgggacttgtaaatgtgaagtgttgtgtagccttgcatgtaagtttttatgttgattgggggcatatgcgtcaaggtagcatttttatgttttgtaacttccaccatgtcgtcgtgtgcttgttttcaagattttttcccccctaaccctgcagggccaacatgatgaattagaggctaaattttttgaagagagagcagctctcgaggccaaataccaaaaattgtatcaaccactttacacaaagcggtacgaaatagtaaatggtactacggaagttgaagaaggggcagtgaaagaaacagcacctgataatgaagaggatcaagagaaaggagtgcctgcattttggcttactgctatgaaaaacaatgaagtgttggctgaggagatttcanagcgtgacgaaggtgctcttaaatatctcaaagatatcaagtggagcaggatagaaaaccctaaaggattcaggcttgactttttttttgataccaacccttattttaccaaatnctgtcttgacaaaa

SEQ ID NO: 29118 - DNA, 425 bp, Glycine max
  Clone ID: PAT_MRT3847_126294C.1
gaattcaaataattttgtactcatactgcgcaaacgctggagcacatttcatatattttccaccaaaaaatacgaggaaaagtgcaccggggaacacacatgttctctatttggtatccttgttatccctagcaatagacacgttgaaacatgtcaagtattccatactttcattaagaaacaaaatgccatcaaattactaatttccaatcagaaacactagaaaaataacaatcaaccgcagggaactctccccccccccccccacaaaaacggggacaccatcttcatcgttccctgccctgctgaatacatactgaacatcagaagataattaatgcgcctgcatttacaaaagtcaaacgaatctggaacctagactgcatatacctgaaaacacggctgaatataggagcactcgagcc

SEQ ID NO: 29119 - DNA, 417 bp, Glycine max
  Clone ID: PAT_MRT3847_126295C.1
gtgcccatcagcctatggaactgccctagcatcatgaactgcctattccattgatctcaatgcatgtgaaaccagactaaggtcagtttatcaacattggtacgcacacaaaacagatctttggggctcttatgatgcaattgctgttgcatgtccttcaccttcaaaagatctgcgaatcttgaaatcgactgctcttaacatatgggtgcttggatttgagttccccgagacaatcatgggtttcacaaagaatcatatccatatattgtgcagccagaagatggcttctattctcgaatctgtcaaaaaatttgccttagagggtggtgatgcatatcttgattttcatgataaacttataaaacgttatggaactactcttaaggatacatttattccgggcgtatccgagct

SEQ ID NO: 29120 - DNA, 717 bp, Glycine max
  Clone ID: PAT_MRT3847_126296C.1
cccacgccccacgccacccgccacgggttggagggtcgccacgtttagcaataaccaaaccctctctactcttttttcttctccttctcttcgctagggttttagcttcttcctcttcacttcgttctttttcgcctctacaatgagcaacgacaaggacacattcaacgtcgccgatctcacttctgctctcaacgaggacaatagagcagaccttgtcaatgctcttaagagcaagatacagagtttggctggacaacactcggatattctagagtctctgtcgcccaatgtccgaaagcgtgttgaggttcttagagagatccagggccaacatgatgaattagaggctaaattttttgaagagagagcagctctcgaggccaaataccaaaaattgtatcaaccactttacacaaagcggtacgaaatagtaaatggtactacggaagttgaagaaggggcagtgaaagaaacagcacctgataatgaagaggatcaagagaaaggagtgcctgcattttggcttactgctatgaaaaacaatgaagtgttggctgaggagatttcagagcgtgacgaaggtgctcttaagtatctcaaagatatcaagtggagccggatagaaaaccctaaaggattcaagcttgactttttctttgataccaacccttattttaccaattctgtcttgacaaaaacatatcatatgattga

SEQ ID NO: 29121 - DNA, 345 bp, Glycine max
  Clone ID: PAT_MRT3847_126297C.1
caaagttaattttcattgaagtaatacaatggctattcatatcggcataagtaacaatttacagattaagttgcaaccgatctgggctcagagtctagatgcatttaacagagggatctgtatacagaagaaaatgtgacaggcatcaccgatatggagacatggtcattctaagcgaaccaaacaggcatagggggaccagtccaaggacccgggaagcgaaaggcctggaagatagtcgtgaccaaagggccttcactgaggtgcagcactagagttttcattggagtcggaaactaccaatggagggatacaacaacctggcaagggcctaccccggatttc

SEQ ID NO: 29122 - DNA, 1928 bp, Glycine max
  Clone ID: PAT_MRT3847_126298C.1
aaatctgttgggattagtagatttgaagtgtggttagttctggttattgttttgaattggtcgggactagtagatgtgaagtgttgtgtagccttgcatgtaagtttttatgttgattgggggcatatgcgtcaaggtagcatttttatgttttgtaacttccaccatgtcgtcgtgtgcttgttttcaagattttttcccccctaaccctggtctgcagtcccggcggccacggcatcccgtccctacaaatgctggaaggctgcgaaaagtggtgcaaaggaggaagaggaaaaagaggattggagggtcgccacgtttagcaacaaccaaaccctctctactctttcttcttctcttcgctagggttttagcttcttcctcttcacttcgttcttctggcctctacaatgagcaacgacaaggacaccttcaacgtcgctgatctcacttccgctctcaacgaggacaatagagcagaccttgtcaatgctctcaagagcaagatacagagtttggctggacagcattctgatattctagagtctctgtcgcccaatgtcaggaagcgtgtggaggttcttagagagatccagggtcaacatgatgaattagaggcaaaattttttgaggagagagcagctcttgaggccaaataccaaaaattgtatcaaccactttacacaaagcggtatgaaatagtaaatggtgctacggaagttgaagaaggggcagtgaaagaaacaacaccagatggtgaggaggatcaagagaaaggagtgcctgcattttggcttactgccatgaaaaacaatgaagtgttggctgaggagatttcagagcgtgatgaaggtgctcttaagtatctcaaagatatcaagtggagcaggatagaaaacccgaaaggattcaaacttgagtttttctttgacaccaacccttattttatcaattctgtcttgacaaaaacatatcatatgattgatgaggatgaaccaatattggagaaagcaattgggactgaaattcaatggcacccaggaaaatgcctgacacagaagattcttaagaaaaagcctaagaagggttcaaagaatgctaaaccaattaccaaaactgaaaattgtgaaagcttcttcaatttcttcaacccaccgcaagttcctgaagatgatgaagacattgatgaagatgcggctgaggaacttcagaatcagatggaacaagattatgacatagggtcaacaataagagacaagattattccccatgctgtatcatggtttactggggaggccattcagggggatgagtttggagatctggaggatgacgaggatgatgaagatattgaagaggatgatgatgaagaggaggaggaagatgaagatgacgatgatgacgaagatgatgaggaagaaagcaagactaaaaagaagtcatcagcacctaagaagagtggaagagcacagcttggtgatggccagcagggtgagcgacctccagagtgcaagcagcagtagatgcagaaggtcatttatgtagttgttgagttttgttggtgttcgagaatgtttgatgtgaaagtgggtttcatgttttaatgcttcttaagttgattttcctcactatatcttggtagttcgaatttgttgagagtcccttctcttattttgcgcctggtagagagaatgtggttataggtagagatgctgtgatttgtttatgttggaatttgtactgccgtgtcaggtatacttgaaatatagttcgtgctttcaactagtaatttttgctgttttactgaactcagtatacttgatttatagtttgtgcgccaactagtaatttttgctgttataagaacttgattatagctcaatcaacattgttttaagtattggaaggaagtctatgtaaaggttaaa

SEQ ID NO: 29123 - DNA, 1696 bp, Glycine max
  Clone ID: PAT_MRT3847_126299C.1
gcgaccacgcgtacggtgtcggcgttttagcttcttcctcttcacttcgttctttttcgcctctacaatgagcaacgacaaggacacattcaacgtcgccgatctcacttctgctctcaacgaggacaatagagcagaccttgtcaatgctcttaaggttagtattttctttattctttctctgtgaagttgatattgagatttgaatttctcaatttttacaagttcattttactgtttgcattgtgtgtatttttttttttcaatgtttaattgtgagcagagcaagatacagagtttggctggacaacactcggatattctagagtctctgtcgcccaatgtccgaaagcgtgttgaggttcttagagagatccagggccaacatgatgaattagaggctaaattttttgaagagagagcagctctcgaggccaaataccaaaaattgtatcaaccactttacacaaagcggtacgaaatagtaaatggtactacggaagttgaagaaggggcagtgaaagaaacagcacctgataatgaagaggatcaagagaaaggagtgcctgcattttggcttactgctatgaaaaacaatgaagtgttggctgaggagatttcagagcgtgacgaaggtgctcttaagtatctcaaagatatcaagtggagcaggatagaaaaccctaaaggattcaagcttgactttttctttgataccaacccttattttaccaattctgtcttgacaaaaacatatcatatgattgatgaggatgaaccaatattggagaaagcaattgggactgaaattcaatggcacccaggaaaatgtctgacacagaagattcttaagaaaaaacctaagaagggttcgaagaatgctaaaccaattaccaaaactgaaaattgtgaaagcttcttcaatttcttcaaccccccgcaagttcctgaagatgatgaagacattgatgaagatgtggctgaggaacttcagaatcagatggaacaagactatgacatagggtccacaataagagacaagattattccccatgctgtatcatggtttactggggaggccattcagggggacgagtttggagatctggaggacgatgaggatgatgaagatattgaagaggacgatgatgaagatgaagaggacgatgacgatgatgatgatgacgatgatgatgaggaagagagcaagaccaaaaagaagtcatcagcacctaagaagagtggaagagcacaacttggtgatggccagcagggtgagcgacctccagagtgcaagcagcagtagaagtatttatgcagaatgtcatttatgtagttgagttttgttggtgttcgagaatgtcctaatgtgaaagtgggtttcatgttgttttttaatgtttcttaaattgattttcctccctatatcttggcagtccgaatttgttgcgagtcccttctcttattttgcgcctggtagagagaatgtggttataggtagagatgctgtgatttgtttatgctggaatttgtactgccatcagtatacttgattatagtttgtgcgccaactagtaatttttgctgttataagaacttgattatagctcgatcaacattgttttaagtattggaaggaagtctatgtaaaggttaccgtaaggttcatgttagtgtttattattgttaacgctac

SEQ ID NO: 29124 - DNA, 464 bp, Glycine max
  Clone ID: PAT_MRT3847_12629C.1
acttactatttttcaaaaccacccacacactaagagaatgccctgtctcatgttccacactgaccacaataatttaacacacttttagatattacccccttgcttaggcacttttactgcccctacaaaggaacgctctacgcaactaatcgttcttctaggccaacttaacaccgaaattattattcttacatgctctaaaacacccgtcatggccgttgttgttgaaagcactaccatccaagctcaattttgttggacatgatctccatccacttgtatattgcctgagagaacgcattcaatgtggccatacggaggatcaacctcctcacgaagaccctcgttttctacggcccatatgagaatataagcgccaagatcattgatgtggacggcttgaaagacgaacccttagtaaacatggcgatgatcaatgccaccacggaatagcttgtaggtga

SEQ ID NO: 29125 - DNA, 534 bp, Glycine max
  Clone ID: PAT_MRT3847_1262C.1
ggctcgaggtgcgagtgatgaaattgaatccaaatacctaagcggtggacgaggcctacctgagccactgcttcgcccccgccggcgaggtggtctccatcaaaatcatccgcaacgagctcacgggccagcccgagggctacggcttcgtcgagttcgtctcccacgccacagcggaaagggttctccagacctacaacgccaccgaccagaccttcaggctcaattgggcctccttcggcatcggcgagcgcaggcccgatgccgccctggaacactccatcttcgtcggcgatctcgcccccgacataaccgattatcttctccaggaaatgtttcgcgcccattacccttccgttcgcggcgccaaagtcgtcagcgaccccaacaccggccgctccaagggttacggtttcgttaagttttctgatgagaatgaacggaaccgggccatgactgaaatgaacggcgtttattgctccaccaggcccatgcgaattagtgccgctacgcccaagaagaccaccagtgctt

SEQ ID NO: 29126 - DNA, 375 bp, Glycine max
  Clone ID: PAT_MRT3847_126300C.1
ttttcgcttacgcatacgggagagagggtaccggaactggccaacattgggctgtgtgggctccatttaactgcctaggtgatctccaaccaaatcaccatcagggaagaaagggtgtcgcagagcaagatgacgacgttggatatgaagcgtgtgcaaaatgaaatgaacgaggttcattggatggagccaagggtggaagtaacaaaacaatcgctgggtcacatgttgctcgctacacaagaagaacgggataatgttgattgacaccatttgcaaagcaagttgtgccaccaacaaatgttggagtggactgtgaacaactccctgaagaggttgctcatgtatacggaagtgtttacatgggcgaacaag

SEQ ID NO: 29127 - DNA, 369 bp, Glycine max
  unsure (1)..(369): unsure at all n locations
  Clone ID: PAT_MRT3847_126301C.1
gggggcaaccacgcaccgaagccgnggaagccggagccggcnccgacccngngancccccaancanccaancccaanccaacncancngnngacccccgnggagaagnnncaaanggggaggagcgncggagaagagggcanncaggaagacgagggggggaaccnccncaccaaaaagcccgaacccgnnggcnacgaaggcnncgaacccnccggacgaaggcacanngcccagggngnnangaagacaancaacgggaacaagcnaacaccngcgggnngccgngncnaaacacgganggcngcngggnnngccnagcncnncaccacgaagggaggggacnnggagaaaanngaaacgggggggc

SEQ ID NO: 29128 - DNA, 330 bp, Glycine max
  Clone ID: PAT_MRT3847_126302C.1
gttgtaatgtctctggtcaactcaactgtgatgcacctcttgagtgtttgatgtgttttggcgcaatgttatacttggagctcctttttctttcttctatagtggacaagatatctttcattaagaaattattcaaaataatgtatcgatttttcattattgattgtataagttggaatgttaatttactttcatgtctcttggacaattttgtacgcctgcagaattagttgacttcattcttctgggatattaatttcttctggaaactagaatgggctttaaattttggatattgtgcttgcttttactgtatccatcttctttcac

SEQ ID NO: 29129 - DNA, 264 bp, Glycine max
  Clone ID: PAT_MRT3847_126303C.1
atctagcctaactcagtctagcccaaaaccacaaatgtatggcctcagcctctcctctgtctctcaccgattgaagattactgtcactgaactgtgcaggagacgagatgcattttctctgcaaactcccctccattccatccacgtccactctaacgcttgttctcccaccgtaccgattcagctatcaaagaaaccatggatgagctcatgaacgagaacactaattaactgtacaacattccatgcttacagctattaaat

SEQ ID NO: 29130 - DNA, 485 bp, Glycine max
  unsure (1)..(485): unsure at all n locations
  Clone ID: PAT_MRT3847_126304C.1
ngtncntgcgggactgcactaggtatgactccncatgcactcccacgtgggggcggaatccggctcgagttcggcttccttttgtacccttttagcaactttatacaccccgacgcgtttgcggagaaacttttgagcattctcggacctatgttccttcggtccccttgatatcatgaggacagtggtgcttctgcctgttctatgccatggctgcatcgcgggggagtgaggttatttccgcgctgttttgggcggttgccaatcatataacgactatggaaaaagcagaacgatcccacccactggtgggacttgcggccaatgtaacccttatgttctctggccggacagagacatcttttgtaacctgaggcagacttcatgttctggagtccatggttgggccatctctctcaaagcaatgaccaacatacctgcgggtatggggttagcagttcgattcctgccctggtgggggaaca

SEQ ID NO: 29131 - DNA, 132 bp, Glycine max
  Clone ID: PAT_MRT3847_126305C.1
ctgcaatgcttgcctgtcaccctaagctccggccatatgacgagcatttaaaacattgacgcggcaggctaacgtagatgttccgaacaagtctattgagacactaggcatcaacccttggaggcttaacgg

SEQ ID NO: 29132 - DNA, 739 bp, Glycine max
  Clone ID: PAT_MRT3847_126306C.1
gcttgttcaagtaaggatattatgtgttaagaatctgaagttcctcagatgcctcaccagcatcacctctgtataatagaagctcagactgcaattgctcaatctgacttcgcattctctgcatctgagctcccactggatcacgattgataactgctttgttttgaatgttacgagcacggttagcatacttcagagtgttcaatgtctcttcagcattggtgtcagcagtactaacacatgctatcatgacggttgtgctgtttcctccaagagaatcctgtagtagccttgttaatttgctatcgcgatatggcacatggccaccttcttttcgctttttttcatctcccagtgcacttattacattcccaagagctaataaacccttattgatatgaatgccttcttttaaacgcatgccatctgcaccagttctttttgcacgttcagaaccagcaaggtctaccaggtgtagttttgcacacaagacatcatcaccattcttttgctccatagtgattgtgaatatagcatgtgaccgacttgattgactgttcatgtttgtactccctgtggcacgtgacagtgaacctcgagaaagataagatgacatttcttctttggtcttaacttcagcctcagtcacaccagccagtgttattcctccattcactgtttctctaatttgtatgggaactctgctgggcacagcaggctttgcagtaggagccacatc

SEQ ID NO: 29133 - DNA, 241 bp, Glycine max
  Clone ID: PAT_MRT3847_126307C.1
cggaaacatcaagagtcctgctggctctgggtgctagaaatgtgtgggcaaagaaaaacagtgtttccgtcttcgccagcacatatattccacataaaaacagtgtctctgcaacgctctaaaatattcatctgctttgccagatatttttctgtctgccctcaggctccagctcctccatgagatatggactactctttatcgaccactgtggctactctcaagcgtcattgtctcccta

SEQ ID NO: 29134 - DNA, 933 bp, Glycine max
  Clone ID: PAT_MRT3847_126308C.1
ggatgccaaactggtggatgtgttcttaacaaggttaagctaattcgcagccgctcgagatgggttgccttgctgctgggccatgaggatggccctcttgtgcctacagaagatatttgttgctctcaaagtgtatagggttggcaacagcaaaaacaaaaccatccactgaagactgcaaacatgtcattcatgagtagagtcaaaccattgtggagcaaggcaaatgcaaagattggtatggttattcgagtttattctacgtctgccttacaccaagtgtagaactatagataaaataggttctaagtagtcataaataaattttggaggatatggaccagcaagtttagctgtctgaataatacaaggtctagattgatggattaaagcggttatgtgaagttttaaattaataatggaggatatggatcagcaagtttagctcccttaataatttaagccctagatgttgtgttgatgcccagaaatgaatatttgaagttagaaaattgaaatattgcaattttatttaaacaaaacaaaattcaaaatatagggatgaggaataaaaccactattgttcgggtgtgaatcttgtacttcagcctgcagtaacatccaaggtttctaaatccaacccaaagaaggaatggggaaaaatatgaataatgagaagagaaaaaagattgtagagcaaagcaaaagcaaagattggtatggttattcgagtttattctacgtctgccttacaccaagtgtagaactgtagataaaataggttctaagtagtcttaaattaattttggaggatatggaccagcaagtttagctgtctgaataatttaagcccaagttgttgtgttgatgcccagatatgaatatttgatgttagaatattgaaatattgcaattttatttattctcatcatt

SEQ ID NO: 29135 - DNA, 286 bp, Glycine max
  Clone ID: PAT_MRT3847_126309C.1
gtggtgttgccgttgcaaattgcacaactcattccacatggcgtgacggcatgacaattcgcagcttagatacaactaagctcgcacgtcacgttcatgcatccacgagtacctgcatacgatgatcattccccaatacgcatggtctgcaacccatagtcgcacataatctgatagagagagactcacaagtgagtgaagaatctgcagccatcatcgcaggagttctaagcagcaggctcaactgctatgagtcgtcaccagctccggtgccaggggtcccccc

SEQ ID NO: 29136 - DNA, 365 bp, Glycine max
  Clone ID: PAT_MRT3847_12630C.1
cttcaaagaaataacacacctttgtgcggtgcgaacagaataattgagacgcatccagagtcgcgatatctagaatttgattcggacatccagggatcttcgtataacttacccgaactactgtatggttccagtaaagttgttggtttttctggacttaccatactgaaacgattctacagatccttgaacatcgtctcaggaggaaacaacactttctgtatattgaatttttttaacctagcaacagttccatgataattaacaggttgaaactatactgtaggggacatgccaacagtcaggttatataacagcgataatagttgtctccgctgctagatgactttgcaagaattaaaata

SEQ ID NO: 29137 - DNA, 345 bp, Glycine max
  Clone ID: PAT_MRT3847_126310C.1
gggtggttaattatattgttaaaatggttgtgagtagaagcattatgcctctgttgaagtacttgatagtgctgcgaggactctttttctcgtaacatttgcttgagcttagtttacaacttgttgattcgtcgtttctccgaagggggtaggggttggtttctcgacaagttcgaggtcacagatcgcgtcattttctgcgttaaaatctttcagaaagtctgtccttgtaagggtaaccataatgctcactttcagaatgaccttggattggatagattagatttagtagagatcgtgttggtttttgtggaagagtttgggtgcgagatttctgataatgag

SEQ ID NO: 29138 - DNA, 324 bp, Glycine max
  Clone ID: PAT_MRT3847_126311C.1
ctcactcgtactaagatgatataaatgataaagtttcagaaaaaaataatcaataatacgtgtagggtcattatgatgaattgatagcaagtattacagtatcatagaacgggtgatgttgtagataaatctggtcttacatgatgtttcatgcagaacttatggttgctcacatttacaattgatcttgcttctttcagagctgtggggcactctaggaccattatctgcacccactttgatatgtttaacttattcatgttatatgagatatgtgtaagctataaactgcaacgtatactagtgcattaatatgttatatga

SEQ ID NO: 29139 - DNA, 398 bp, Glycine max
  Clone ID: PAT_MRT3847_126312C.1
gtgatttggagtttggagcgactgaactaatcattaatttgcactcgctgtttcagcttcatcacccttcttttgcatcatttatatctgtaagtagcatttgcttaccaagttaaactgcttcctgttttgtcctatctagaccgttacggttatggatctgagttttatttatattttttcactttcttctgtgcttcctcttttgtcgtttgagtatatcaaatgaaatactactattttctgctgagttttttcttttttttagtattggtctttttcggtgtagatctgatgctttcaggagaataattatcccttctaactgtttttctctcactggatctagtgttgatgcctcatgccggatgtgattctgttcatttggattttttgct

SEQ ID NO: 29140 - DNA, 467 bp, Glycine max
  Clone ID: PAT_MRT3847_126313C.1
agaccgctcgcgatctaaattctttttttttttttttttttttttttttttttttttttttttcgcgttttttggcgcccggggggggtggccaaggggggccacccgcgagtggaagaccgggacttgcgggaagaaaagtgtttgataaaaaggggggtataaagggggggggaattaaggggggaaaatgtttggggaaaaaaatttccccccgcaaacaggggggaacaaaaaattggccagaaaaatgagggggaaaagcgggggggccaaaagggggggggccccgaaaatagctggggggccataaagggggggggtccagggggaaattttgtgggggcaaaccctttaaagaaaggggcaatggattggaaaaacccccgggggttgggcccccaaggagggtttccctaaaaaaaatatttttttcaacaggggggggggcataaaaggtgggccct

SEQ ID NO: 29141 - DNA, 856 bp, Glycine max
  Clone ID: PAT_MRT3847_126314C.1
gatgtgctgctttggctccccgatgctgctgctgcctctagctcttctccgttgcccccttctaccccttgtgatgcgtccggaatttctaagaaattcagaggaaccttctacgaaagcatcttgctttcgatgtccccattccttgtgttaaactgacaatcattctaagggcatgcacttgttatttctgttcagattggcccatctacaattcttttttaatttaagatttataataaccacaggttcagcacttggaattcgtgatgagcagcaaaggatcactgatgttgcttcttcctctaactcttcatctatgttatcttctaaacaatatgacgttttcctgagctttcgaggtgaagacagtcgaaggagcttcacaagccatctatatgaatctttgaatgaagtgaaagtccaaacctatatagatgatcgacttgaaaagggagaagaaatctcacctacactcaccaaagccatcgaaaattctcgtgtatctattgtcattttctcagagaactatgcttcctcaaagtggtgcttgggtgaactcatcaagattatggaaagcaagaaagaaaaaggacagattgtgattccagttttctacaacatagatccatcccatgtgaggaagcaaattgggagctataagcaagcctttgcaaaacatgagggagagcttgaatgcaacaaatggaaagatgctcttactgaagcagcaaatttagttgggttggactctaaaaattataggtaaataaaatgaattcagtgtattaaattttctaatgataaaatatgagaatgacaatgaattattttagattgaaaaaaaaaaaaaaag

SEQ ID NO: 29142 - DNA, 281 bp, Glycine max
  Clone ID: PAT_MRT3847_126315C.1
attaactcttacttgaaacgacccaacagactaccaaaccaacatatcctatgcatcgaactgtatgttgattttaggacgacgggccaagaaatctcatatgccccgaccacattcaattcccacacactttatcactaccttactctatgctccatgctctgaaaatccttaaccgccgcactatcaagcacacctgagaaatgctcctcctgctttcatctacaagttcaactctactacaatctgcaactaaccgtctgattccacatcttatcaca

SEQ ID NO: 29143 - DNA, 239 bp, Glycine max
  Clone ID: PAT_MRT3847_126316C.1
atctttcgcaaatattttctttcgacgaaaatggatactatcattgtggtgcttcagttcatgtggtgataaggtgaagatcttgatcttgccacttcaattttcttcttcttttttaaacatgatatggagttaaaaatgggagtgcaaacaagcatcagccttaacgcaatatgttaaatgctagttcttgtagatgagcaatgaggggcacctaactttaatatgctttgaaagtt

SEQ ID NO: 29144 - DNA, 748 bp, Glycine max
  unsure (1)..(748): unsure at all n locations
  Clone ID: PAT_MRT3847_126317C.1
agcagttgcatagaagtaaattgttcaaacagttctcaagattcttgttttattgaacatgaagagaagagtgaattaaatttgtctagaagattcatttattattcataatttgatttcatttgcgggacagccatgaaccaagggtcttaaaattttgaacctgacccctgatggcctaatcaacttcgaattgtcaattgttacacaaaagtgacttaattataattggtatctgtttccatggagcaatattttgatgtagaactggttgagttgcttattatggattacagatggaattgcaaaatgggcataggattgatgattcctaaattgtattttagtatgtgccttaatgcaatgtgctcattttgggttagtggctacactaaattgcaaactaagcctcactaaaattgttagtggctgctacaaactcatctatgcaagtatcttctcaactctccaaagctgcagcaaaagatggctaaccagctcccaacgacagccatatagcatactgagatgttgatgctaaaggatctacaccatcaaattcaaatgcaaggggcaaaggtcgtttaagattctgaatacctatgtaatcacgatttattaaactggaaaaatcctgccatgataggaattcgacataactcaagtagtatatgggcaaaccagtctaaaaacgttttgtgcattatttttctttcctgtnnnngaacatttttgtactttattgttc

SEQ ID NO: 29145 - DNA, 602 bp, Glycine max
  Clone ID: PAT_MRT3847_126318C.1
tacggctgcgagcgacagaaggggaattttgaaccatataatacttttgtgcatatgtgtcatgtgtgtcaatttaattaattagtgaatgcttgcttatatggtaaggcatttgctgaaacttcaattgtaaacacacattttgcagcatagagaaatggaagactacgttataaagacaattgttgttggagttgtttcatggacatcagcttttgtcttagtgagaagaatctttcccaaacgctcgtttgatttctgcaaccgcgttgtgtcgacgctccatgcaactttagcagtaacattggcttggctctctgttgaagattggaagtgtccaatttgtcctgtgggatcaaaatcttcacccaaacagatgcaagtcctagcagttagcctttcttatctcatttatgatctagcttgttgtcaattggatgaaagagtgaatctagacaacaccgtccaccatttggtaagcattgttggaattggagcaggtctttcctatcaaaagtgtggctcagaaatggtagcgacaatatggataacagagatatcaagcccattcttgcatttgagggagcttcttaaagagcttg

SEQ ID NO: 29146 - DNA, 429 bp, Glycine max
  Clone ID: PAT_MRT3847_126319C.1
tttctatttcgtccggcgatcagaggatgccggggggtattattggaaacaaagggggtcgttactagattccaagaatctctcaatttgttcctactttttagcgtactgatctcttaagggaaagaaaatcactctctgcgctggccacagacttcgggagtgatttacttaaccattcttagtttatttgctgaacactctcctatttgatataggacttcccgtgacaactaaactacttctgaatcttttacagcactatgtttaatttcaagttcaagctggtgaaaactcggataagtgctcccactcttctatctggtataggactttgtgggaagacttttgtattgctaacctttctttcactctctacttctcactgagccacattgccgttcaaagtggtcttattagaaaaacact

SEQ ID NO: 29147 - DNA, 473 bp, Glycine max
  unsure (1)..(473): unsure at all n locations
  Clone ID: PAT_MRT3847_12631C.1
ctccaggtggctaaaagaagaaagggtttgttgaactacatgctttttctaagactgactccgaccctacccaacacatttattaattttgcttcaccaattgtggatgtgccttatcatattttcttcttggcaactgttattggactaatacctgctgcttatgtcactgtcaaggtacgtagctatcaaaataataatttttatttagaaatgttatttatattttataataaaaagagagagaggaaagagaaaagtgagatgtaattaatgatgtgatagagaaaaaaaatgttattgtacagattacacatgttgggtaattccctctgcccttcccttttgaaaagggtcctattatcctaatgaatcatataaattntgattatgagtttttgtctttttaattattaaactagtatatcttaaaaagaatatttcaattgtcaccatgattgtacttgagtttc

SEQ ID NO: 29148 - DNA, 407 bp, Glycine max
  Clone ID: PAT_MRT3847_126320C.1
agatcagaaaaaacgaaatataaattagtaaaacagttacagaagttccaccaactcatacacttcagataaaacataggagtagttctagctactaatagtcatcgataatttatttcagcagaccatacaagttccactagttacagaaactcaaaaagaaagaaacacaagctacgacccacaaatggacttcatgaagtaaaacaaacttgcaaactacctagaagatcatgatcatgaccacatctttcgaacaaaacagcctcggtacagttttacctccctcaattttggcatagaatggtcaacactcttcatcaaggacaagcaaggtgaagacgactatggaaagaagcattaactaaaggctaaaatggaaaacatttgggggggggggggggggc

SEQ ID NO: 29149 - DNA, 1522 bp, Glycine max
  Clone ID: PAT_MRT3847_126321C.1
aattctctctctgcctctttaccactcactcacactccgctccgcttaactgtaatggaaccattccatgctccgaatccccaacttcatcgctgtcaacgtccgtcaccgtctccgtaacttccctaatcctattcctttccttctctccgtttccgtcgctgcatctctccctccgttacggaaccgaagcccgtcacagatggcggctcgcgaatcgatgatggcggattacgcgaaatcggggaagtcgtcgtgcagggcgtgttcccaaaagatcgaagcgaaggcattgaggctggcttcggtctccaaaggaaatggtccgtacgacatcgtcaagtggcaccacctccgttgcttccctctttcctctcactctcactcctctcctgagagcatcagaggcttttcctccttgaagagtagtgaccaggaagctctgaagaagttatttgctgaaaataacaagtctgaagagaaggttaatgaagcagtggaagatgtacgaaatgagctgcaagagactggagagcgtggttcaaagagattaaggagtagtgaccaggaagctctgaagaagttatttgctgaaaataacaagtctgaagagaagttgtgcacacctgatgttaaagctgtggtgaacattaaattttcagtttctgatgtcaagagcaattacaaggatgctacccttttaccaaaatggaaggcattccaaacagtcatatttcttgaacgggatgatggtctgcatgattcaagtaaaatcgctgcatttgattttgatggatgtcttgtaaaaacagatgtgaaaagagtgggtgcagatgcttggtcccttatgcattcgtctattcctgataaactacaaagcctatacaatgatggctacaagttggtaatttttaccaatgaatccaatattgaacgttggaagaataagaggcaagtagctgtggactcgaaaattggacgtctaaataattttattgtgaaagtgaaggttccagttcaggtttttatagcttgtggggtaggtagtaaatcaggtaaagtaaacaaaaaggaagatgatccttttcgcaaacccaaaccagggatgtggcatcttatggagcaacacttcaactctggcattgccattgatatggataaatccttttttgttggtgatgcagccgggagagaatcagatcacagtgtcgctgatattaaatttgcagaggccattggtttaaaattttatgtcccagaagagtacttcgcttgagcatctaattaagtcattggttcataggaaggttaaggtcttataggtgtccagttttgtttgaaagtgacattaccaactggaagtatggaacagaaaggatgtaaatgaatttctgggcaatcctaaaccctaaacttaacgcatagtcgactaatttgtgagcaatcccaaatttattttatggtgcttcaacttgattcttatcgaccagctttatttcattttaaaaaagatataatttct

SEQ ID NO: 29150 - DNA, 732 bp, Glycine max
  unsure (1)..(732): unsure at all n locations
  Clone ID: PAT_MRT3847_126322C.1
ggtccggaattcccgcgtcgacccacgcgtccgattcctttccttctctccgtttccgtcgctgcatctctccctccgttacggaaccgaagcccgtcacagatggcggctcgcgaatcgatgatggcggattacgcgaaatcggggaagtcgtcgtgcagggcgtgttcccaaaagatcgaagcgaaggcattgaggctggcttcggtctccaaaggaaatggtccgtacgacatcgtcaagtggcaccacctccgttgcttccctctttcctctcactctcactcctctcctgagagcatcagaggcttttcctccttgaagagtagtgaccaggaagctctgaagaagttatttgctgaaaataacaagtctgaagagaaggttaatgaagcagtggaagatgtacgaaatgagctgcaagagactggagagcgtggttcaaagagattaaggagtagtgaccaggaagctctgaagaagttatttgctgaaaataacaagtctgaagagaagcgcctcgggttggccccaatgtgaatgcctagttgtgcacacctgatgttaaagctgtggtgaacattaaattttcagtttctgatgtcaagagcaaattacaggatgctacccttttaccaaaatggaaggcatttcaaacagtcatatttcttgaacggnatgatggtctgcatgattccaagtaaatcgctgcatttgattttgatggatggc

SEQ ID NO: 29151 - DNA, 384 bp, Glycine max
  unsure (1)..(384): unsure at all n locations
  Clone ID: PAT_MRT3847_126323C.1
gtaagaacttgtttttctttctcaaactgctccttactagatttgaagaggaattgggcatggtgagttaggcacatggttatttgctttatttttgtcatatagctcttatgttaaactctgcttcgaacttgtcttgtaaaaaaaattgatggtgtaatttgtaaatccgtttccaataagttgttattgttgacataatgtgcataaagttaagtggtgtgttgcattattactaaatgtaatgaggacttaatcatttgcggtgagacagttactgctaatataattcacaaaaatttatgtgacatacataatattttctggcattatttcagcanatcttgcaagccaagatcaccaatttgaaaatatctgcaaaaa

SEQ ID NO: 29152 - DNA, 155 bp, Glycine max
  Clone ID: PAT_MRT3847_126324C.1
attccacttgaattcgatccatttcattttataaagctggcttcccctacttgccttacaattccaaaaaaaaatgggcgtgctcatgatgacattgagatgactgattgtgccacactatcgatgtatcatggaattcgtccgccgtcgtcaca

SEQ ID NO: 29153 - DNA, 374 bp, Glycine max
  Clone ID: PAT_MRT3847_126325C.1
gggggcggggggggtggaaatcttccaattttgcagggttacaaccggggccccagttattaactttttacgatggatccaaaaggggctttggggcttacaaaaggggttccaattaacccctaatttttgccatccttttaaaatggcaaaaatcctgggccgggggaagaaaaactctttaattaaaagggcccttccacccaaaaaggttattatggttaatccaccttaacccaaaaatgcttattttaatttaaaaaaaaaccttttcctttttcccaatttttaattaatggtgggtggaaaataataaaaggctaacttttaggacccacctatttttaaccccaaaccataaggccttttttttt

SEQ ID NO: 29154 - DNA, 553 bp, Glycine max
  Clone ID: PAT_MRT3847_126326C.1
gaagcaccataaaataaatttgggattgctcacaaattagtcgactttgcgttaagtttagggtttaggattgcccaaaaattcatttacatcctttctgttccatacttccagttggtaatgtcactttcaaacaaaactggacacctataaaaccttaaccttcctatgaaccaatgacttaattagatgctcaagcgaagtactcttctgggacataaaattttaaaccaatggcctctgcaaatttaatatcagcgacactgtgatctgattctctcccggctgcatcaccaacaaaaaaggatctacaacatataaaatgaatctttaacattttcatcatcccctcaagaataaaaaatggtaatattctaaatgaaaggaataaaaaacttagcatcaattgaacaattgaaaggaagaaaaaataacttatccatatcaatggcaatgccagagttgaagtgttgctccataagatgccacatccctggtttgggtttgcgaaaaagatcatcttcctttttggttactttacctgatttactac

SEQ ID NO: 29155 - DNA, 406 bp, Glycine max
  Clone ID: PAT_MRT3847_126327C.1
ccgcggctatactaaagccttaagcttcctgtaatgagccctcacataaaaaccacaattgatcctattctctatcgataactgaaagggttacgatgattgattgattataagagaaaaaaatgtggaaactttcttatcgggattaaggtcttgagaatttataagacacgcttgatcgagttggcttgcttgaaatcagtccaagacatgaggttcaatacgagtgtaagaggggtcgtaaggaagctgatattgtgaatcctgtcgagtcttgacattgaccagaccatttgagagctggagttatataaagtcattgatatatcgctgacagagggaacaatctggcttctcacaaagagctgcctagagctgcccaaattcagcttgtgagttcacacca

SEQ ID NO: 29156 - DNA, 326 bp, Glycine max
  Clone ID: PAT_MRT3847_126328C.1
accgaacgaggaaagaccatgaaggctgacatgacaggtgctcgctcacatgctgaagaaaaattgactcgaagaggaggcacacgctgcagcccggcaaaggatgtgacagccaagaggcgagtacagaagagataagatcgctcaggagcagatggaggtgtcagagactcctatgtggaacaaacgctgacagaaatgcgcattgacgatgttaaagctacgcacggtagcaagagggatcaaaaaatactgcaccatgaaaaagctccaaccatgaacacacaaggcggaaccaatctgggtactgagcgagtggcggagat

SEQ ID NO: 29157 - DNA, 204 bp, Glycine max
  unsure (1)..(204): unsure at all n locations
  Clone ID: PAT_MRT3847_126329C.1
caataatgagcgcatcctattcccacaggtacaaagaattacaagagacttgtttctttctttgtgccaaacttacttgcttcatcgcggatcgtggcaacaggtnagccaattcactactacgcggcatgcagatacttttataggcactaatcatcatggcgcgttcacgcggatggaacctgcgtccactatcgctgagac

SEQ ID NO: 29158 - DNA, 279 bp, Glycine max
  Clone ID: PAT_MRT3847_12632C.1
gaagaaaggaagaaacataccgtaggagagcatcaaactctgcttcttcgatttccattgcgaaacgttactttcctaacttctttctcttcatcttcttcgctcttcgatcttcgaccggggactgctcccaataccaccaccaccactcgtcgatggccacgatcggaagcttacacgactcccaaggctctcaaaacagcttcgaaaccgaaaccctcgctcgaatcgccgttgacgaactcatcatgatgcaggattcgcttcttgagtttgcta

SEQ ID NO: 29159 - DNA, 519 bp, Glycine max
  Clone ID: PAT_MRT3847_126330C.1
ggagcccctcaaggaatgggtttctagctaggactgtggaagctgctggtattagtaaaggagaaggagtccctcaatttttaacttttttttaaaaaaaaaatattctaagatgattttttaaaaaaatttcttaaaatatcatttagattctaaaacgatttaaaaaattctacaatgatgatctcattttgaactacacaagtgaaatctgacgttacactctaacttaaaaccttaagattcaagtttatgagtcttctcctcaaccttttcacttttacgaacttcagctcatttttatactccaacaagacggcttcatctccggcttaggcacggtgacggtgagcaccccgttctcgggcgtgtacccgatcttctcagggttggcgtcctccggcagccggaaccgccgtaggaagctgccgcactgcctctcgaggcggtgccgccacttatatggagaatcttattctcttctacttgcaccttcagatcctctttcttcacccctgc

SEQ ID NO: 29160 - DNA, 324 bp, Glycine max
  Clone ID: PAT_MRT3847_126331C.1
gggtgtggaaaagctatggaagacaaattaagcgtgtgttgacaattgtgcaaagtatattacaaattaatgcacgtctaataactagaaaggatttagcgctcgaggagtgtttcacattatacctcccttagcagacgactgtattgccaatccttatttgatgaccaaatctatggcgtctgagctgactattttaagctagcattctcggatgatagaaggccatcctcttttatgacatcgcataattcatcagcgcaatcaccactcttgaaaacggcttatgtccccatgccagcacctatgcacatatactatact

SEQ ID NO: 29161 - DNA, 579 bp, Glycine max
  Clone ID: PAT_MRT3847_126332C.1
ttttttttttttttttttttttttttttttttttttttttttttttttttttttaaaaaaactaagcaaaaaggataatgaaaaaaagggggacccaaagccccgaaagaacccaaagagggggggccacaccaacactgggaacaaggaaaaaggggggacaaaaaaaaaaaaaaaaaaacaaaaaaaaaaaggaaaaaaaaggcaaacataaaaaacaaaaaaaagggaaacaacaaaaaaagggaagaaaggaaaaataaaaaaacacacagccttattttagggaaatggcggaaagggggggggcactttccggccggggagggacccccaaaaacagggccggaacgaaaaaaattcccggaacaaaaaaaaagggggcgggaaggttcgggggggcccacgaaggcaataaccccccaacaaaaagagggaggcgaccaagcggggccccaagcattttaaaaaaaaacaaggcaaacccccccgggggggaaaattcctaaaaaggcacataggggagaaaaatttaagccaaaaaccgccctggggggggcggaaaaggaaccggctccg

SEQ ID NO: 29162 - DNA, 358 bp, Glycine max
  Clone ID: PAT_MRT3847_126333C.1
cggccgctcgagccggcgggccgggatctgctcaatcagagaacagcagattgttttcactccttcaccgtgctcacactgtttattgtgaacagtgcacgtcgtaaggcactaggctcgatctcctagtgcctcgcgcaacacccctaggcgacatgactgcttcatgagtctacatccagcacagagcgacggcgaccagaacggggtgacggctggcgctgtccacgatcctggccggggcgggacccctcggtaagggcacctaccgccactgaaccgcgtacactagccataacgagatcttcatcgaccgccgaggtagtcaccgccgtgaacgttaatatactggggaaag

SEQ ID NO: 29163 - DNA, 123 bp, Glycine max
  Clone ID: PAT_MRT3847_126334C.1
gccacacgttctgtaacaaacacacatagtctatctgtttctagccaaactatatatacttggcatcttcctgaccacacgcggtggtctaagctccagcctggtatccacccgtgggttatc

SEQ ID NO: 29164 - DNA, 245 bp, Glycine max
  Clone ID: PAT_MRT3847_126335C.1
tctatactatgatgcgagtgcagctcccttctgtgacggagctgatcactgctagactgacttcactctacagtttattaaaggtcctacatgaccagactggccgtggctactccagtaactatatactgttttacactctcttggagaaccacgccggtcgcaatctaattcatctagagacatcacaaactctactttcatcttcagaacctacaaacgtacctgtccttcagcttcactca

SEQ ID NO: 29165 - DNA, 238 bp, Glycine max
  Clone ID: PAT_MRT3847_126336C.1
ggctcgaggcttgtttgatccatgattttcctacttaggcagagccatcatgtcatttgttgcaatgaattgcatagctatcacagccggacccccctagcgctgagaacttccactcaggagggcattgagactccatctatggccacgaggtcacagtaatggtaggacttactactgagacaagcgggggtcaaagcactaccagagcgcctgacacaataacatacgaggtggt

SEQ ID NO: 29166 - DNA, 427 bp, Glycine max
  Clone ID: PAT_MRT3847_126337C.1
aaaaaaaaaaaattaaaattaattaaatgtcaaccgaacatgttcatgtgaataatatttcggggcacaatattcctaggggtacaatattataccgtgaaacgaataccccctaagttataagattggaatcacaggcctaagttgtccaagacttttactcttcagtggaataagatgattagttgaattagtcacatctgtttggagcttagctgtaataatgccaatctatgttggagaagaaaacctagtgggataaggattttttttttgttgttgttgttgtatgtaagagaagcaaattggtgagaactgattaacaaaattatgtgacacaacacagcagtctcaacatccttttaattgggggttaaattttataactcttggaaatttggatttcttattgtgcatagacaacaag

SEQ ID NO: 29167 - DNA, 337 bp, Glycine max
  unsure (1)..(337): unsure at all n locations
  Clone ID: PAT_MRT3847_126338C.1
acncanctacncctacntaanctcgcaattcnnctcnnncnctanctannntaccgncacaccacacnacnnncnnntacagcnanncgcncntannnnnannttgcactnncnacggncccntacgncncagccncatncgagncaatccnggnccnacnccntaancactngtatcncancaatccnncnncnntngntaangccaatnancagnctacngcnantgcatcnnnnccncgcngccatangtnnngcannnatngnccccannnaanncacannncacnnnggcccactccncttagagaatatnnantncccnaacgnnnannan

SEQ ID NO: 29168 - DNA, 228 bp, Glycine max
  unsure (1)..(228): unsure at all n locations
  Clone ID: PAT_MRT3847_126339C.1
ctgtaaagngnnnaagaaataaaataccataatccaacctttttcaacaattcaatctgtccaatgtacaggcatcatatttttaactttccaaagaaccatgatttgttaatacccaaaaaaaaaaaggttttcatttgcccccattctggtgaatccctaaaattaaaataatgcccaaattttcccaaccatggagtgtttccctacccaaatcccccaaatttt

SEQ ID NO: 29169 - DNA, 498 bp, Glycine max
  Clone ID: PAT_MRT3847_12633C.1
tggcttggaacctttgggctgatttatgtgcttgtttatgtgcgggtggtcgtgagaagatgatagaagggggcatatagttctaataatttcaatgtgcgtacagtagagctagagatagagatgtagttacggggtggagattcgtgaggcgccacaggtaaaccaagaataagttacattttaagctatggccccgttgcggcgccttcgactttaagactaggacccacgacgccggcacgaagaagaagggcgccgacgagcccttccctcgcgcttactcggccagccgggagaaggaaaacgccctaagcgaggtttcggaagtcgtctgcaccgtccgtaataagcatacggttaaacccgtcggaaaggacgtcccttatccgagagctagggcgtatttaccttacgcctccaggactaataagacgtccctgcgcgtcggagtcgacaggtcttaaatcggaacgagaggcgtccccggaaagttat

SEQ ID NO: 29170 - DNA, 270 bp, Glycine max
  Clone ID: PAT_MRT3847_126340C.1
agaagctgcaacatcttcgttctattactaactctcgtgctctaaataaaacctcgatcatagtcgatgcatcaaagtatatcgaaaagttaaagcaaaaggtagaaatactgaatcaagagatagcctcagcagagacttcaagtgtccacaaccctttgcctatggttacagtagaaaccctagaaaagggatttcttataaatgttttctcggcaaaagggtgttcaggtctgcttgtttccatattggaggcctttgaagagatga

SEQ ID NO: 29171 - DNA, 426 bp, Glycine max
  Clone ID: PAT_MRT3847_126341C.1
caaatcaacaaccctgaaaacccacataatgagaggaccatgaagagcttattcaattggtactatgcttcggttggcatttcagtaactgtttcaatgacatttatagtgtacattcaagttaaagcagggtgggttgtgggttttggtatccctgtggcgcttatgacattttctgctatcatgtttttcttgggttcttgcttatataagaaagtgaagccaaacaagagcttgctcactagcttagctcaagtgattgtagcagcctggaaaaacagacacttacccatgtctcccaagaactctgacatttggtatttccataatggctctaaccttgttcaacctacagggaaagcaaggttcttgaacaaggcttgcatgatgaagaatagagagaaagatttggacagtggtgagatg

SEQ ID NO: 29172 - DNA, 149 bp, Glycine max
  Clone ID: PAT_MRT3847_126342C.1
ggtctggactgagctaacataccgactatgggaaccatcaccatgctcgggaactgtctattgactgtccacctgacccctaacgatcttaaagggctgtccttaggagaatactgataatctgtgctgccacatctggaggactaaag

SEQ ID NO: 29173 - DNA, 213 bp, Glycine max
  unsure (1)..(213): unsure at all n locations
  Clone ID: PAT_MRT3847_126343C.1
atggacgacgccttctnctctacccctacttcttctgccccttccgatcccccctacgacgttcccctatacctggtgccccttcccgtgccaacctatttcactcggcggcttccccctacctgctgggcccccgatgaaacccttgccctcatagacgcctaccgggacaagtggtacttccttaggcgcggtaaccttaaagccacccac

SEQ ID NO: 29174 - DNA, 343 bp, Glycine max
  Clone ID: PAT_MRT3847_126344C.1
gcgatggactccaccacatatttactaaacataaagtgattatacatatgggcgaggatatacaattttttccaatctaccatgttttagcaaattaattaataacacatttatatgaatcatgtctcttgtagctctaatagcttggccagaattacatgtttgaggagctcctgaaagaccctatagcctttgctgtttgggcccttaacacggactgttggtttaatgcattaagagcagcaccgatttttggttcaacccataatatccattggtcatcccaagccttttcgttgttgaatttgtcagcaggcccattgctttttactgttttgattcc

SEQ ID NO: 29175 - DNA, 623 bp, Glycine max
  Clone ID: PAT_MRT3847_126345C.1
cggacgcgtgggctggtgctgttcgtagaggtcctcttatggtaacactcggccgtcatcgtatgctattgccaagtctattcgcagagctaggccctttccatggcagcatgatttgtttgaagatagcttaagagctgctgggattcaaggagtagaagttggcaccaagttgtatgtttccaatttggaccatggagtgaccaatgaagacataagggaacttttctctgagcttggagagttgaagcgttttgctgttcattatgacaaaaatggacatccaagtggttcagctgaagtcgtttatactagaagaagtgatgcatttgctgctcttaaacgatataataatgtacttttggatggaaagcccatgaagattgagattgttggttccaattcagaattgcctataagtgctcgggtgaatgtcactggggtgaatgggcgcaggaagaggactgttgtaatgacgcctagaggtggccaagctggaggtggtcctactatgcctaatcgtggtgctggtcggggacgtcgaggtggcccaaggagtggcagtggacgtggtggaggtgggtggtcgaggccgtggtcgcggcagcaggggtggtggtgga

SEQ ID NO: 29176 - DNA, 365 bp, Glycine max
  unsure (1)..(365): unsure at all n locations
  Clone ID: PAT_MRT3847_126346C.1
gcccgccctatccnaaccccagggggggtttttttcaaaaaaaaaggatttattccaaaacattcgcatcatttaagcagttcctgttatacaaataataagcacccgactatctgacaagcctgaaaatatagcatctaaattcctcacagaattgtatatagaaaactcttctattacaatcgaaacaaaattggctggcgatatgaaaaaaacaccaaagatacttttagatacactgcctacacatttcacaggatatcggccccgaagatctgtcatcacgtggtggccaatgagctctgtttctttcaaggctgtccagccatgttctaagggaagagagatcctagagtgcctggaaa

SEQ ID NO: 29177 - DNA, 1615 bp, Glycine max
  Clone ID: PAT_MRT3847_126347C.1
ttttcgcgtccgcccacgcgtccgcccacgcgtccgctaaacccaaaagctctcttacgctgaaaccctaaaacccctctttctctcactctcgcatggatctttcctctccttttccttccaaaccctaatttttgctactgcttatttttattcatcgatccttcgccccccaaaacactcaatcacactctctccttctcttctctgattctcgcttcagacaactctccacacgcgtttatcttattatctctagaataaagaacagaagtaacaggtggagaggtagaggaggacgtggtagagcccattctggccgtggaccaagtggcgctcttaatggtggaagaatggctggtgctgttagtagtagaagaatggctggtgctagtaatggtggaagaacaactggtgctgttcgtagaggtcctcttatggttaacactcggccgtcatcgtattctattttgtttttttttttatggggattttcctgctgactgatgttgaagaatggtgaatatcttttttctggtcataatctgatgttttgccactttggaaactgttctgttctttggccagtctattcgcagagctaggccttttccatggcagcatgatttgtttgaagatagcttaagagctgcagggattcaaggagtagaagttggcacaaagttgtatgtttccaatttggaccatggagtgaccaatgaagacataagggaacttttctctgagcttggagagttgaagcgttttgctgttcattatgacaaaaatggacatccaagtggttcagctgaagtcgtttatactagaagaagtgatgcatttgctgcccttaaacgataatccaacgggttcagctgtagtaagttctactagattgagattgttggtttcaattcagaattgcccataagtgctcgggtaaatgtcactggggtgaatggacgtaggaagaggactgttgtaatgacgtctagaggtggacaagctggaggtggtcctgctatgcctacacgtggtgctggttggggacgtcgaggtggcccaaggagtggcagtggacgtggtggagctggaggtcgaggtcgtggtcgcggcaggggtggagctggaggtagaggtcgtgggagaaaggacgctgttgagaagtcagcggaggaacttgacaaggagctggagacctatcatgctgaggccatgaacatctcttgatctcggaagccccagtttattttgtaatattacttaagattggcttccttgtacaaaagctcgtttccttggcgtttactttgaatctcttactgcttggtgcttttaaacatgccatcttatttgaccgcatttaagtcttgttggaggctgaatgatcaacttagggatttttgaagttcagagatatagcttataggaccgcatttaagtaattgttagaggctgaatgatctacttggggatttttgaagttcagagatatagattgtagtttgatttgcgtatcattattttatgttattgctgcaacctgcaattgtcttcccaattaaaaaatcattaaaaaaaaaaagaaatgtaatccctatcgtaaaattagcag

SEQ ID NO: 29178 - DNA, 1006 bp, Glycine max
  Clone ID: PAT_MRT3847_126348C.1
tacggctgcgagaagacgacagaagggggagcagcgcaagtgataagaaagggaagaaatatggggtggaaatgtcatctatcccccaattcggataagagaagaatctagaaaccagaataccattggacctcgtttctccaacgtggctttttccaagcgctaaattgctactccaacactctgagccacgttccccatctctgccactgccatcagcattctcaacacctcctccctcactcactcatcaatggcatcaacaatatcagcaatggccatgatcaacgccaaatgcgtcaacccaaagttccccaaccccaccaagctcgtaccatcaaaaccttcccttcaggtcaaccttccaaagggcctaatagcctcacccgaaaacaccaaactttccactgcgacagcaatcgcaggagcaatattcacaaccctcggaacctgcgacgccgctttcgccgttcaacaaatagccgacatagcagaaggcgacaaccgcggtctggcactgttgctgcccataattcctgcaatagggtgggttctgttcaacattctgcagccggcgctgaaccaactgaaccgcatgcgcagcaccaaaggcgtgatcattgggttggggcttggcggcttggctggcttggtggctgcgccgcatgcatcggcggcggcggcttctgaagtggcggcgatggctgaagctgcctcgaacgacaacaggggacagcttctgctgtttgtggttacgccggctattgcttgggttctttacaacatcttgcagcctgctcttaaccagctcaacaggatgagatcccagtgatttaatgtttgtgaaatttaaatagggaaggggcttaattaaatgctgtgggatatcaattatcatcatatgatcatactaatagttttcatgtaacttgcttcctgcaacttgtatctaatgctatatccgcttttcttttattatcttccattcccaagctaaaaaaaaaaa

SEQ ID NO: 29179 - DNA, 1126 bp, Glycine max
  Clone ID: PAT_MRT3847_126349C.1
cggataagagaagaatctagaaaccacaatcccattggacctcgtttctccaacgtggctttttccaaacgctaaattgctactcccacaatcagagccacgttctccatctctgccactgccataactcactcactagcttcttctctgttctcaccaatggcatcaacaatatcagcaatggccatgatcaacgccaaatgcgtcaacccaaagttccccaatcccaccaagctcgcaccatcaaaaccctcccttcagatcaaccttccaaagggcctcatagcctcacccgaaagcactaaactttcccccgcgacagcaatcgcaggagcaatattcacaaccctcggaacctgcgacgccgcattcgctgttcaacaaatagccgacatagcagaaggcgacaaccgcggactggcactgttgctgcccataatcccagcaatagggtgggttctgttcaacattctgcagccggcgctgaaccagctgaaccgaatgcgcagcaccaaaggcgtgatcattggcttggggcttggcggcttggctgggttggcggctgcgccgcatgcgtgggcggcggcttctgaagctgcggctgctgcgagcgacaacaggggacagcttctgctgtttgtggttacgccggctattgcttgggtgctttacaacatcttgcagcctgctctcaaccagctcaacaggatgagatcacagtgatttgagctttgtgaaatttaaaatagggaaggggcttaaatgctctgggatatcaattatcatcatcactaatagttttcatgcaacttgtatctaatgctatatccgctttctttttattattttccattcccaagctagccagtggtttcttttttgttgcaactgttgtgggtaccttcccttttgcgatttatagatctgattgattcagttcaagtttgtactttctttctgttgttgaatcttcaattaagctccatgcagttttgaaaggttgattaattgttgacctgctgagctttgcacctgctggctgggctttgcaacggcaaagagaaagagaaatgattttttttaaaaaaaaaaaaaaaaaaaaaaaaaaaaaaaaaaaaaaaaaaaa

SEQ ID NO: 29180 - DNA, 376 bp, Glycine max
  Clone ID: PAT_MRT3847_12634C.1
attaaggtaggaccatatgtgattaatggtattgtttaatgcatgttacttacaaaccatcatcttattcacatttcatagggagaaaaaaacccccccgctaaaatgcaaaaaaaaaccccacgcaaaacagaaagacaagagaatctagaacagaaacagcataaaatttacaccaccacacaggaaatttttggtccatgcccccaaaaagctactataacattttactagacatgaccaaatttgcagctgtacaagagaaggatggtcgcattcatgaaaccaaataaggccctcacctgccggggagattgctaacccgagcaacaccttgcaggccagaatggtcataaaaagagggcacatccgatga

SEQ ID NO: 29181 - DNA, 956 bp, Glycine max
  Clone ID: PAT_MRT3847_126350C.1
cccacgggcccgcaaagaaccaagaaaccaagcaaatcattgttctctctgtcctgtgttttgtgatttcccccttcaagccaccaccaatggccaacaacgagatgcaagttgagaggggtttggacttggaaaggtacatggggcgttggtatgagatagcctctttcccttcaaggaaccagcccaaggatggcgtgaacaccagagccacatacactcttaggaatgatggcactgtgcaagtgctcaacgagacttggagtaatggcaagagagggcacatagagggaactgcttttaagtctaaccgcacaagtgatgaggccaagttcaaggtcaagttttatgtccctccctttttgcctatcattcctgtaacaggggactactgggttttgttcattgatggtgattaccagtacgctttgattggccaaccaagcaggaattgcctttggatattaagcaggaaaccccatctggatgatgagatctacaacaagcttgttcagagagctaaggatgtaggatatgatgtgagcaaactctaggatatgatgtgagcaaactccgcacaacggaagaaggcccccaagacacaaaaggcatttggtggctcaaatccattttggggaaataggcctccatgatgatatataatttattataatgaccattatgatatataatttataatgcagtgaatgtatagcaattgcatatttagtggggcgatttcttgttagaatgcctttaaggcatgtaatcatgttagagcaaactcagttatatatgtattggcttgctctgtaatatgtatataaatttttgtgtggtgtggcactgtggttgttgcttgattcactcatatcttactacttttgctcttaagaattataggttgtatattttggcgtgtgaatattttgatgatgttattttagttactaagt

SEQ ID NO: 29182 - DNA, 1077 bp, Glycine max
  unsure (1)..(1077): unsure at all n locations
  Clone ID: PAT_MRT3847_126351C.1
tacggctgcgagaagacgacagaagggggatggggagtgaacagatagggtacgtctgcgagaagacgacagaagggtacggctgcgagagggtccgcccacgcgaacgacaacacaacacaacacaacacaattacacacacgaatttccttagttaggcattgctttgcgatggaaaaaatggaactggcagagacacctctacctttgctttcactaaaccacgtttcttttgtatgtaagagtgtgagtgagtcagtgaaattctatgaggatgtccttggatttttgctcatcaagaggccatcttctttcaaatttgaaggggcctggttattcaattatggcattggcattcacctgttggagtcagaaaaggttccggtgaaaaaaagagagatcaacccaaaagaaaatcatatatcgtttcaatgctcagacatgaaagttataatgcagaaactggatgcaatgaagattgagtatgtgacagcagttgtggaagaaggtggaattaaagttgatcagctgttctttcatgacccagatggatatatgatagaaatatgcaactgccaaaatcttcctgtgcttccaatttcttcctgccctctaaagcagctcggaggagaagctacattcaagattaattgctttgcagaagaatctatgtctatgctgatgatggacaatttcgtgatggatatgttgaagatttcaatataattaaagctttttgtaaaaaaaaatatttgtaaaagcctttttgtccgacgagagaagaggggaaataaaaagtgtaagagtaaattatatcattctcaactactaagcaaaatctttcattttctagctactactaccttacatgtgttcaaaaggtcttttagagtggggggtcctatnagtatgagatgtgtattcaccaagagaagcgacatgagacaaattatctgcgctttgcgtaacttctccaggcgcgtnggactttccttaagaggcgttcatataagtgagaatgcgaggggtacaanaataatgagtggggatattacacttttaatttnagacatcta

SEQ ID NO: 29183 - DNA, 433 bp, Glycine max
  Clone ID: PAT_MRT3847_126352C.1
cttcgagaggtgctttttgtttttagcatgcttcggggaaagtactcctgcttgcatgaatagccctttgggactacattgaccaagaggatgctatactctggacttgccggtggctctgagaacaatctgtcctgtttactgcatgatttgcccaggcgagaaagttgggaacggattgtaatctggacccatggagcttgggtgtgatgtacagaccatggagaagctagctctgtattaacatggatctcttaaccctttaaaacggaagggccagtaagaactgacctgtaaaactatatccagaaaattgcgcattactgaccatactttggacaacctgaaagagctctatatggcttgggcccctcttacgacaatactgtctcataccctttgcaggggatcgccgaccctatgacccagcaca

SEQ ID NO: 29184 - DNA, 251 bp, Glycine max
  Clone ID: PAT_MRT3847_126353C.1
tttttatttttttttcttttttttttctttgttttttttgtttttttttgtttttgttttacacccaaaaaaggggaaacctttacttttatagggaaaatccgggctgcaaatctgtttcaaaagacacccattaattttggaacttctattttaattttgaaccaccccttttttggggaaaaccctggctaaatttgaaactgggtgcatggtcccccaatgcatgtgagggattttcttttccaaac

SEQ ID NO: 29185 - DNA, 257 bp, Glycine max
  Clone ID: PAT_MRT3847_126354C.1
attattgatttagtacaaacatgaaacataaagaagaaataacacaaaacaaaaaaaaaagggaccgatccagaaaagaacgcataaaaactaaagaacaaagactgcaaaaaaaaaaaaagctcaccagaagcggagaaattgcacaagtgaattagataaccacatcagaaaaagaagagggcaaccaccacccaacattataataaggaaacaaaaactacaaattggactattgcaaggcaaaggaaccagcc

SEQ ID NO: 29186 - DNA, 401 bp, Glycine max
  Clone ID: PAT_MRT3847_126355C.1
acgcccacgcgaccggtggcttgaggagggccgttcccttgccgattacaacattcagaaagagtccaccctccacctggggctgcggattagtggtggcggtgcaaatctttgtcaagaccctgactggaaagaccatcacccttgaggtggagagctctgacactattgacaatgataaagctaagattcaagacatagaaggtatcccaccagaccaacagaggctcatttgtgctggaaaacagcttgaggatggccgtacccttggcgatgtacaacattcagaaggagccgaccctccacctggtgctccgactacgtggggggatgcataactgtggcgagaccctcactggaaagaccatcacccttgaggaggagagctcggacactattga

SEQ ID NO: 29187 - DNA, 362 bp, Glycine max
  Clone ID: PAT_MRT3847_126356C.1
cattatctatcagtatacaaacatcaccttgacaccaacacaggcagatcgctttgtcttggcatttcgaaactggctaaggcggcatggcaatggccaaccagaatggtttggcaacagcagcgaccaaccattgccatcaactgttttatcaaaacgtcaggtacaataacatgattcatgattttcattttgaagccccttaatttgaacaacgaagaatgttaacaatacacactttctaactcttttttatcgattaaaattcacttaagacatacaatgaataagttgtgtgcttattcttacccaacaattaagaagtttctggtatcatttcgctgtgctaaccaagaactaaa

SEQ ID NO: 29188 - DNA, 400 bp, Glycine max
  Clone ID: PAT_MRT3847_126357C.1
accactcctacgaagcacgactgaagaggaggcagagggacacagaactgtgaaccaataatcccacacctataaccccacaaaaaagatgaagaggatagagttagcggatagaaggatgctacattaggggcctctattatggaacactctgatcatacactccattcatgagaatcgtttaaatgagtcgaatcagttctccctatcgggattctctgtgtgggtgctggcctcgtgtgcgcacctatggaccgcctacttgaaccgctttctcacctttctgtgtcacctgagcaagtcttgtgagcaaatcttgtacatgaagaaacctcacgatgctacctctccaaacttggcatcatttattgccaccattccttaacactaatccgaaatg

SEQ ID NO: 29189 - DNA, 720 bp, Glycine max
  Clone ID: PAT_MRT3847_126358C.1
ggtattcatgaagatttgaacaacgtcatattgcctccagtgcctgacctcggctgtgaaattatcaattcatcagcatgcattgatgatgctttgaatagtttgttacggaaattgcacccagtgactctatctataatttctcccaccgacagtaaattccccaaggtatgttagttctttttcttgtctttgtttccaattcatacatacattcatgttgaatttaaatatctgtcgtcaatgatgaagcaaaatattattaccgctggaagccttcttgaactgcttttgccattaactggaaaaatgacaattgcagttagtttatgaaatgatgaagaacaaagacaaggacccaatctgttgcatatatagtacttccaagaataaatgttggcggcatctcctgaaggatgtcaactttgaagacctaaatgatgtaaagtttgaagacatcgaagtgagtgaagacagtaggacttctacgtggtataattggttgaagactgagtatacaacattggagtgtcaaattactaatcttagattgtgctggaattctcatgaacatgacatggagacatgaaagacttgtttacaaatgattgacaaaaaattgttttaaagaaagttgtgctgtggaatttgttcgttttcttttttccccctttttgttactattatattaaattatgatacagtggatactttgtttgt

SEQ ID NO: 29190 - DNA, 562 bp, Glycine max
  Clone ID: PAT_MRT3847_126359C.1
cctcgtgccgaattcggcacgaggtaacagcaaggccaagcccaattttcctccctcgagttcaagcaaggttgatcatcatgagagtaataactatgcaaatccaagctatcttacaagagggaatcactattcttctactcttcctgatcatagagaggtagatgatgttaattacaattactaccatcaattatattttccctcacccgcatgtggtgccaaatcaccttcacatgtacaatatagtagtgaggttttgtgtgtagagaaccaaagggatcctcatcttctggttggacaagattggaggcaaaggggtttgagtttgtacactaatccactatgtgtacatgaaaataaagacaagatagaaaacaacagtgaagaggatgatcttgatttggagcttagacttggttatcatccatagcatataatagagtacatatatttatgttaatatatataatctgcctatatatatatatatatatatatatatatatatatatatattatgacgtgcaattgtatagagagatgggttgcaggttggaag

SEQ ID NO: 29191 - DNA, 204 bp, Glycine max
  Clone ID: PAT_MRT3847_12635C.1
ctatagattttgatagctggaaaaatgtagatagagaagctagagagaagagaaaagaaagggatgctgatttagaaggagataggtctgatcagcatagcacatgtcttgacaaggaatcaaacgatcggtgtgctgatggagaagggatgatggagaaggagagggacgtgcttcttaactgaaattgtgacttgaagatga

SEQ ID NO: 29192 - DNA, 1120 bp, Glycine max
  Clone ID: PAT_MRT3847_126360C.1
ggctcgagggagaaaatagttcaacttctctgtctcaatcatttcattatagttttctctcccttccaatcacagcgatctccagaattagggtttcgtgatttctgtctcactgatcaagaagaagaattgtttatctacatctgaatccatgaagccgcaatcatcctctttgaatccatatgcagcctcatatgttcctctctctaaaaggggggcagatggtagaatacctttgacagaaaaagattccaagacttgtgatgggacaatgtggtttcagatgactcatcagggtgctacaaatgacccgcaacttatcaacactagcttggaatggctctcgaaacccgaagcttttccggcaaaaagccagcctgcttctagttcctacacaggctacacttcatcatcacagaatgtggcagagttgacggataatcagttggtagatgaagaacttgatatggatttggagtatcttaggatgaattttcctggtatatcttatcagtcccttgtagatgtctataatgttaacagtggtgacttggatgcagctattgacatgctcagccaacttgagtcagagggagatggaacttcatgaaacttctggaagtcttccagagacactggatattggtgatgtttcagaatctggattgccagctgattctgtttcactaaaacagaagaatgtagcagaggaaaccagcacttcatctggtcagttggcatcagccaatgtcttgtgaattggtttttcattcacaattggtttggttggatatattaataagtgtaaaaattaaaaaatttaccataggtggagatgtctcaatcatcgattttatggtctgtatagttagttcgctgctttgtcttgttttggtcattatgatcttgaaatattttcttttgatgagttgcttgtgcaattggtatccctttcaattgcatgaattggaagggtcctgaaggggagagagagagaggtaaaagaaaaacaacacacaaatgaatgtaattttctcttgggattgacaagtgtcttgttgacttgcttgctggattgtaccgtggtgagctaacttgaatcttatgctgctatagatat

SEQ ID NO: 29193 - DNA, 1207 bp, Glycine max
  unsure (1)..(1207): unsure at all n locations
  Clone ID: PAT_MRT3847_126361C.1
aataacaccggcgcgagggagaaaataatttaacttctctgtctcaatcatttcattatagttttctctcccttccaatcccagcgatctccagttagggtttcgtttcgtgatttctgtctcactggaaaaggaatatcaagaagaagaattgtttatctacatctgattcaagtccatgaagccacaatcatcgtctttgaatccatatgcaacgtcatatgttcctctctctaaaaggggggtagatggtagaacaccttcgactgaaaaagattccaagacttataatgggacagtatggtttcagactcatcagggtgccacaaatgatccacaacttatcaacactagcttggaaaggctctcgaaatccgaatcttttctggcaaaaggccagcctgcttctagttcctacacaggctacacttcatcacagaatgtggcagagttatcggataatcagttgctagatgaagaagttgatatggatttggagtatcttaggatgaattttcctggtatatcttatcagtcccttgtagatgtctataatgtaaacagtggtgacttggatgctgctattgacatgctcagccaacttgagttggagggagatgaaacttctggaattcttccagagacactggatattggtgacgtttcagagtccggattgccagctgattctgcttcactaaaacagaagaatgtagcagaggaaaccaacacttcatctagtcacatggcatcagccaatgtcttgtgaattggtttgtcattcacaattgttttggttggatatatgtgtaaaaataaaaaaatttaccttaggtggagatgtctctatcatcgattttatggtttgtatagttctatacattgtcttgttttggtggtctgttttcttttgatgagttgcttgtacaattgggaccccctttcaattgcatgaattggaagtgtccagaatgggggagaaaggtaaaagaaaaacaacacataaatgaaggtgattttctcttgggattgataatcttgttgacttgctcgctggattgtgccgtggtgagctagcttgaatcttttactgctatagatataattatgctgctttatttttaatacaacatttttattgccccttttttttattcaaaaannnnaaaaaaaaaaaaaaaaaaaaaaaaaaaaaaaaaaaaaaaaa

SEQ ID NO: 29194 - DNA, 287 bp, Glycine max
  Clone ID: PAT_MRT3847_126362C.1
aggaccaaaaataagggtttaaaccccaaaaagattccaaattttggacataaaaaataaacggcccaggcaaaaaacattttttttatttgtgcaattttaaaacacattccccaatgaactttccctcataatttttttttttttcaacagataagttttttgttgccccccgttcaaccaacttagcttttctttttttataaaaaaattttttattgttggaccttttgggctccttggggggctgtttataaaatttcctgagagatggaaacacccgggtg

SEQ ID NO: 29195 - DNA, 318 bp, Glycine max
  Clone ID: PAT_MRT3847_126363C.1
cttcgaacatgactattgtgtatatacattattacacggtacagtcactacttctttgatcaagactgaaaattcccactcttcaactggagaaggaactacttgttgccactttgcatgataaaaagagagacaactttcttcacatacaactgtgccttctattgcaggagagggcggacgaatgaaccaatcaattgtgcagcagacagctaatgctgctcctagatacaaatgtcttactgtcaccttgaatccagcccgagatataatgcatggtgcgctcctgggttccacacaatggatgtgtttgcccac

SEQ ID NO: 29196 - DNA, 1829 bp, Glycine max
  Clone ID: PAT_MRT3847_126364C.1
gaggatttccacttgtcataatcatgtttttccattttcttggcttttttatagcttgaaagctctggaccatcctccgatgaataaccaccatcccaagctttcctattcttgtgtgaaaatagagcatgatgtggctgaaacttggactgagcctctaaaacaaatgtttgatcagagctacggctagttgtagaaaataatctgagaaaagagatccccaaatactgtaaataaggaaattggtaggtattcaagttatggtggggcatacttgttcaagccccatggcgatgcccagtccattattgaagcagctggccagttgttggtgtcagagggtcctttgatgcaggaagtatactcttatccaaggacagcttgggagaaatcccccatttctcatagcacccgaatatatagtggagagagtacagtccaagggtttgccattgaaaaggaatatcatgttgagcttcttggccatgatttcaatgatagggaattgatagttagatataaaacagatattgataacaagaagattttttactcagatttaaatggattttcagatgagtcgaagagaaacttacgataagattcctctgcaaggtaattactataccatgccctatctagcattcatacaaggatcaaatggtcggcggttttctgtccattcccggcaatcattaggtgtgactagccttaaaaatggatggctagaaataatggttgaccgccggttggtaatctcgatttgactgcacttgcttaggatccttcttttccttcgcaaccccaaaaacatcatggcacaaatccttcatagtagcagaaacactagaaaactcagactcagatgtaccacagagctcaattaacttaagtttatctactttaagcttgtgtttcttagcacataaataaaaagcaaccgcggtgaacactggacgagtgaaatcagcacttgcacggcgagaagccggcaatgatgaaacaaaccgatgccgttttatttgcacgtagtgaacttcaagttacccaaacccttaaaatttttgcagcgatcacctgatggtcctagattttggctaattatgcacaggcgacattgggattcttcgtactgccagaagggaagatcgcaatgcactaatctggccaatggcaccatgaatctgttcagcatgttcaagaatcttacagtctcgaaggccaaagcaacttccctgaatctcttgcatgaagaccctgaagtaatgggattctcagagcagtttggagatcttgcacaagaggggcatgtagccatatctccaatggaaatgcaagcttacaagttggaattgaggccacaaccacaatagaatactcattactgagttgctcctgctgatttaagctgaaccacacgggattcttggaccgattcaaagacgaattgttagcaaatttttttggctgctccattgatggtagggatgagttattcttggactgcttgctcggtggagcaggtaagagaatgtccaagcaaagaggagttacattggttgatgaagtgtgagaatgaacttttgtagattgctgttatgaagacatgacatgaatgagattgtagcatctgcggcttcttgtctgtttttgtgctttgctgtagcatttgtttacgttttcagacttaaaaagatgaattttgctttgtccatgttattgtataacatgtctcttagagactagatacatgtacagatttaatacctccatgcaggggagagagtataatcttttttggaagtgggctcaacaatttacaaaacaat

SEQ ID NO: 29197 - DNA, 256 bp, Glycine max
  Clone ID: PAT_MRT3847_126365C.1
agtaataataatatcctcctttaagttaaaagtttatcattcattttcaataataatcaaggcacaaaatccttatggaacattacaaagaacatcgggctcctaccattggttccagaacaatcctttttcatttgattcgctaaccacatataacactgatccattcccaaccactgctttcaattcgtattcgacacttgcgaacttttcactcactcgcttcacttcacgccaccacttatcaccaccttct

SEQ ID NO: 29198 - DNA, 198 bp, Glycine max
  unsure (1)..(198): unsure at all n locations
  Clone ID: PAT_MRT3847_126366C.1
taccattgaccaaaaacgaaatagacgcagatttcaaacaccccgcaatcctttgatccatttggactgaatctgttctttcagcaaatataacagaaattcaaacacaagnattagctccgagcnctganagaagtgtgtcttgcctcatactattgagggntaggtgngctctcataaggtggcnacaatagcnct

SEQ ID NO: 29199 - DNA, 277 bp, Glycine max
  Clone ID: PAT_MRT3847_126367C.1
tagctgactactaatataatttaccatagatcatatcgtataccggcaagcttcacatacaagaggtcaatctccaaaacatatgtccacggatcgttccaagccagaattgacgaaacaaccccaatcattaaccttttattctctactacatgaaatgccaatcaatttgtatactaattcaacttcggcatttgcctttacactgtttctcgcgttttttcagaaacatagataacctgattcaccacactataaacagtcctataagagacac

SEQ ID NO: 29200 - DNA, 555 bp, Glycine max
  Clone ID: PAT_MRT3847_126368C.1
tgtttttttttttctttttttttttttctttttttgttctttttttttttttctctttgaggacccacccctctgcccggtggttttgtcaatagaggaccccaccccccaaagaatcccacatttgtttctttcataaatatgacccttgctgggttcccgacgtttacaggaagccattgttttcttttttgatcaaaggaaaccaatatccctaaggatgcagggccttttggtgaagagactgaggctttgcggcagagcattcttctcttggcatctgggggtccacctaaaacccacatcaatttttggaattgtaagaaaagggggttgcaaggaaggcttttacacggatgggcagggaaggccttgatgtttaataaaccgagcgttctttaatgaacgcacccgccaagggggtatagttgcatcaacaaccaccctatcagagtcccttcctgcgtccccaaaagtgggccgttgaaggggccaccataaatccttgatgaaattactcgcgaccgcagagtcaagaagacaccttggggttct

SEQ ID NO: 29201 - DNA, 231 bp, Glycine max
  unsure (1)..(231): unsure at all n locations
  Clone ID: PAT_MRT3847_126369C.1
ctctttcgtggcaacagcttacatgatagctacatggatcatagaattatacttgacgatgaggagatcttcttggcagcaaaacgggagctatgctgctcacaagactgaattttcacagaggcgctgaaggaggaaagctacatcgccgtcgactgaatttttcagatccatagtacgattctattgctgtgcttacactngtggagaaaaacaacatgcaatatactt

SEQ ID NO: 29202 - DNA, 473 bp, Glycine max
  Clone ID: PAT_MRT3847_12636C.1
atttctagtcattcgaaccacatgcaccaccatttaaaattttaacaaggttttctatatccagtcatgtaccaaatgccaacaagtactaaagaaaagaaaatgacatactgaatttagtaaaagtctcgatctctagaaagctgatgtctctattttctctacctatttggctgtgtttatctgtttgtatgagtctgtgcaaaagaccctaccattagataccattgaacttctccaacggggagtacttttccatgaggttggcgagttcctcatcaaacttctgctcatactgaacttcttcctcccaatgcctccgcttcattgcagcataacccatgccatgagcatgcaacagtttctccttttcagcaacaaagttcctcgagccgaattcttggacctcaacaaatttcagatactcttccaccttgagtctatattcctcagcattcacatgaccagtacta

SEQ ID NO: 29203 - DNA, 470 bp, Glycine max
  Clone ID: PAT_MRT3847_126370C.1
ttgttattgagttttgctaatctgttcgggatttgggatttgccaacgtgtgagtgccacattcgtcattaatggcccccccaaaaaccggtgaaacatgttttcacgtacccatcgcaaaattggcaacaaacaaattgcatagcaatcgcattaattaataataataataaaaaaaaattttgtgagtgtgtatctcctttcaaactttttaattattcaaatcccgctttttcaggtttttgaacgtggactggaggccatcccgttgagcgtggacctgtggttggcctacattgcctatgtgaaggagattgcgcaaggacagcgccaggcaaccgccaaaattcgagagtgggctttttgtttatatgctcgggttttttgattttttttttttttaaatttccaacacccagtgttctcggtccaaaccgaacggaaaaaaacacgaaatttcagccggaaga

SEQ ID NO: 29204 - DNA, 341 bp, Glycine max
  unsure (1)..(341): unsure at all n locations
  Clone ID: PAT_MRT3847_126371C.1
cgtgcgatgctaggtgncgtataccagagctatgatgcacgcgtgcctccgccctgagttcggattgcgattcgagtctatttatctaaccatgactgagtgacctaaaggagactaagggtgcgaaaaagagcgctctccgactgtctctcaactcaatgatctacggatctcacgtctgatacagcattggcgacggtagaccaagcgtgtgaaataaggaagacaggtctgctgataacagtaactgttattgcaaacatttctgatgcgcatgcgtatagataggaagacgcatggactcgtagtatcattaggattctatctggtacgtatgcaat

SEQ ID NO: 29205 - DNA, 497 bp, Glycine max
  unsure (1)..(497): unsure at all n locations
  Clone ID: PAT_MRT3847_126372C.1
aactaacattatttaaaattaatcaactcatataaacaacatataaacacgctctacaatatgaactcttacatagtcaaatgtaaaattcaacttgaaaatcaattaacattttaacatgtgtctggcaggtgtcaaagataacctatatctccgaaaccacaatcatcattcaccacgtcacccccacaaagaaaaattaagacaagcgcacaaaatacaactaggtaaaacaacttaagaaaaaacaattttcctaaactttagtcaaattctcccaatgattagccaactgagacagagtttgtgttgaagaaccgtgtttcagggcattagcagcagaatcttttaaattcctcaatctttcacgcattcctttaccttcctctccttccatcaaacactttacaacctttgcaatttcctccttttcaattatgccatcttcggtaaattttggcctctatgcgcctntaaaaccatcgggtaacatcact

SEQ ID NO: 29206 - DNA, 346 bp, Glycine max
  Clone ID: PAT_MRT3847_126373C.1
tcgacacacgcgtccagccaaccatgcgcacaatcgtacacacatgcgttcaaattcctagaacttgcacctcaggcacttacggtgtgacatttaaacagtgagttgagctgatctgaattggcaccaaagaaaaaaatacagttttcaatcctaaaccactaacaacttcttgctttcacacttctctgttgccgtgataatctggttgcagaagtttgactcatgcttaataaacttcactaaccactcaacttatatttgccgactaaaatatcccttatataactactaattctcatatgtgagaaaaactgaaccctctaatatcaccatattttacttc

SEQ ID NO: 29207 - DNA, 435 bp, Glycine max
  unsure (1)..(435): unsure at all n locations
  Clone ID: PAT_MRT3847_126374C.1
tcctctatttcggccgctcgtgaatcggtttttttataaatttttttgcttggggccatatggatatgatcgaaaaacccctctatgatactagcaacagagttggtgaatgagggcaaagctctacttccgacaaaagcctctgcctcaatactaaggcgctctcttccaacaacaggtgtgggaacaccaagnccaactccaccaaaacacaccccgaccaggaggaggaaccgggcgccaaactctccagcgacgacgaccaaccgcccaagaaggccgcgccccacacgggagccgagaacagagacancganaccaccgccgacgccaggggaagcggngagcaagccccaccagagacggccgcaggnagggagccncccaagngcagcccaccacagagcccgcccgcgacccccggcacgggaagac

SEQ ID NO: 29208 - DNA, 368 bp, Glycine max
  Clone ID: PAT_MRT3847_126375C.1
cttgtgcacacccttttgaccttgtttcactcttcacactttctctctctttatttaatctttcattttcatttaaataaggaaagtagagcacaggagaatgtgggactatatatatcaattgcgttcaaaaaaaggactatatattaattactaacgttgacatcagtttataccagctcgtcctgagctagatgcctgcaggcatacgtatacattgtagctgtcattgtacgcatggaattccactccatccttcaaagggggttcagatttgcgtgctgcacttctgctctttggtactagaggagctctcatggcctaaaagagaaaattcgacagaaaaggtgaatatactggtataaaca

SEQ ID NO: 29209 - DNA, 190 bp, Glycine max
  Clone ID: PAT_MRT3847_126376C.1
ttttcaggtagaggatactccaggtttgtaaaaagaaattccttaatgtaatttaattaattctaaatataatatcatatttaaaccaagaatagagtaggaaaaagaaaaggaatagaaatatgcttgttttgatacacgaaaggtcaccacaattgccatatcatgatatcaatatatatgtatggtc

SEQ ID NO: 29210 - DNA, 2012 bp, Glycine max
  unsure (1)..(2012): unsure at all n locations
  Clone ID: PAT_MRT3847_126377C.1
tccggnaatnntcccgggtcgacgccacgcccgtccggagaaatgtccggagaaacgtcacacacacaataaataaacaaaccaacttatcctccttcttctcactctctggattcgattcaaaagaaaaagcttatcctctgtcactatcttcttctgccaaaaccaatgccaccacccattctctagtttctaacacactctatttcaacaaccatgtcactatacgacgccgctttcgtcgacacagagctctccaaacgcacttccatcttcggcctccgcctctgggtcgtcatcggcatcctcgtcggatccctcatcgtcatcaccctcttcctcctctccctctgcctcacctcccgccgccgccaccaccaccaccatcacaagaacccccgcccccgccacccctccaccaccctccccactcccccaatctccaaagaaatcctcgagatcgtccacgtccccccgccccccgacaccgtccacctcccccctccgccgccgacaaaacccgaccaccctcgctccgcggcgacggcggcgctgtactcgagcggggagagcagagcaaccgcgagtgcgtgcgaaacggcgtcgtcgcttggaagcgtgggccccgaagtgtcgcatctcgggtgggggaggtggtacacgctccgagaactcgaatccgccactaatgggttgtgcgaagagaacgtcatcggcgaaggtggctacggaatcgtgtactgtggcttgttgcccgatggcacaaaagttgctggtaagaaccttttgaataacaagggccaattcgagctgagaaagaatttaaaatagaggtagaagcaattggtcgagtgcgacacaaaaatcttgttaggctgcttggatactgtgttgagggagcctacaggatgcttgtgtatgagtatgtagacaatggcaatctagagcaatggctgcatggggacgttggagctgtaagccctttgacatggaacatacggatgaacattatattgggaactgcaagaggattggcctatcttcatgagggtcttgaaccgaaagttgtccaccgagatgtgaaatcaagtaacatacttattgatcgccaatggaactccaaggtttccgattttggacttgctaagcttttgtgttctgagaatagttacgtcacaactcgagtgatggggacatttggttatgttgcaccagaatatgcatgcactggaatgctgactgagaagagtgatatttatagctttgggatacttatcatggagataattaccggaagaagccctgttgattatagtagaccgcaaggagaggttaatttaatagaatggttgaagactatggttgggaatcgaaaatccgaggaagtagttgatcctaagctccctgagatgccattttcaaaggctcttaaacgtgctttgttgattgctcttcggtgtgttgatcctgatgcaacaaagaggccaaaaatgggacatgtgatacacatgcttgaggcagatgacctgttattccatactgaacaaagaactgagggagagtcttcccgttcctatcaaagtgagcaaagggactcaaatttagataagagaagagatggaggtgccattgataaaagtgaagatgctagtactagatggagatgataacaagctgataatttaatggaactacgtgcttattttttggtctctattagtttgccaattcttgtgtgtaggttaatttaaaaaaatgatagtatctttttttctttctttattatatagttttccattgttgttatcagccccagtttgggattcatattcaagtgtatactctgattcgttattataaaaataaaaatatttatggctatctgacataggacgaggaatacatgaaggagaccgaagaagtgatcaacaaagtgaggacaacaatcgtgatggacaagaatgaccgcaacgtttaaaccagcgaggcttacttgagagaaatctaaaact

SEQ ID NO: 29211 - DNA, 515 bp, Glycine max
  Clone ID: PAT_MRT3847_126378C.1
atagcattcatttcttgtcttcctcccaattacgattctctcactcacatgttccctccttagtactttctctctcactctctggattccattcaaataactttgtcctctgtcactcaaagcccattctctagtttctaacacacaaacactctctttttgtttctttgttttgatttcaaccacaaccatgttctcagtatacgacgccgctttcgtcgacacagagctctccaaacgcacttcaatcttcggcctccgcctctgggtcctcatcggcatcctcgtcggatccctcatcgtcatcaccctcttcctcctctccctctgcctcacctcccgccgccgccaccaccaccaccaccaccaccaccacaagcaccgccgtcaccccactcccccaatctccaaagaaatcctcgagatcgtccacgtccccccaccccccgacaccggccacctcccccctcttcctccacttgcgcaaaacccgaccaccctcgctccgccgccat

SEQ ID NO: 29212 - DNA, 2792 bp, Glycine max
  Clone ID: PAT_MRT3847_126379C.1
cagaaaaatggatgcataaggattgaaacagttttgtagtaaacaatcaatactagatcattatgaggtctttttacagaacgttcaaacaagtaaactatacacaagttaaaattgcctttctcgtttatcaacaacaaacaaaaagcacaatgcatattatccaaaagaataaaacagaacaaaacaatcaaattttacagcactgcctaatgcatggcctagttcatttctatatacactacattctgcacacccttttgcattcaaacaaattcaagagaaaaattacaatgtataaaaaccaacaaatatgctataatgctatgcgccacgacaatgaaaaaagaaaagaaaagaaagagaaagtaaatacttaatgctgcaaacttgttcagtcagttccattatttgactttaatatcgcccttgggctcggaggaaaggtttttggaggatggagattttccagtgatagctttctttgctttcactagtgactgcttaacctttgaaatgatgttatttgattgcttttgagctggtttggctggagtttcttttggaaggtccttggatgtttttgttgcatcattttccttggtggcttgaacctcagttttctcaggctccacagtttgttctttctctaccttatccgctccaggttcaacactttcctcttcaaatttagatgccaatgtttctctaacaggttcattaatagctctagagatttcttccacctttgtctcagttttctcttccttcttgtcatcaactactttatcaacttttacactctctgctgcttcagttgtagctgcctttgcctcgttctgttcctcaacctttttgcctgcaacctggtggggaaacaatcaaattttacagcactgcctaatgcatggcctagttcatcttctatatacactacactctgcacacccttttgcattcaaacaaattcaagagaaaaattacaatgtataaaaaccaacaaatatgctataatgctatgcaccacgacaacgaaaaaaaagaaagaaagcaaatacgtaaatgctgcaaacttgttcactcagttccattatttgactttaatatcgcccttagcatccgaggaaaggtttttggaggatggagatttcccagtgatagctttctttgctttcactagtgactgcttaacctttgatatgatgttatttgattgcttttgagctggttttgctggagtttcttttggaaggtccttggatgtttttgttgcatcactttccttggtggcttgaacctcctcagttttctcaggctccacagtttgttctttctctaccttatccgctccaggttcaacagtttcctcttcaaatttagatgccaatgtttctctaacaggttcattaatagctctagagatttcttccacctttgagtcagttttctcttccttcttgtcatcaactattgagctatcattatcaactttcacactctctactgtttcagttgtagctgcctttgcctcattctgttcctcaacccttttgctttcaaactcttcttcttgtgaggattcaggggaaacattaggtgcttcaggttccttcttgtcaacatcatcaattgcagcaacagcaaccttttcctccacagcagcaggaacagaaatctctctttcttcttttagctcagttttggcttcctcatcaatggaggcttgttctggagttttcttgatgtcagccgcttcgtttaatactgcttcaatcacgtcagtgatgcttgattctttcttgtcatcaacctcttcaacaaccttttctgctgcttcaggagaaggttccacaatacttgcttgaggttcctcatttgatgaaaattgtgcagcatttacagtcaaactagtttcctcttctgtgaccgtgtcagctgaagtttcttcactcttggaagtctcaagcacaacttctggagaagtttccccaggattttgttgaggttccacatttgataaaacttgctcagcattttcagtgaggctagtttcctcgtctttatcagttttctcttctgtgaccgtgccagccgaagtttcttcactcttggcagtctcaagcacaatttcttgcttagtctccacttccttaccagcttctgctacttcctcatctacttgtagttgctctcttggcttttcctccacttcagttgacagaagtactggtttctctgttttttcaggaactgctttgggctctgagttgccattgtctgtgtcttttacctcctcaatcactgagtctttgggagggtaagcctccactatattttctagttgctcttcactttcagcttcaatttcaggaacaactgtcttaggctgctcttcttcctcttgtttttctggttcactttggttttcatcaactttagcagccacaagctctgttttctctattacactttggttctcatcaactttggcggccacgggctctgctttctctgtttgactctggttttcatcaactttagcttccacaggttctgctttctctgtttgagagttgttagtctctttcaatacctctgcctcaaattctagttctcttgtttttacctctatggcatcaccactttcttctgaggattcaggaactgcagatgtgtcttgtttctcctcttcttccttttgttccaatgattgcttttctggttctgtctggctttcatcaacttcaggaaccacatgttctgcttccactgtttccaaaggccctgtttca

SEQ ID NO: 29213 - DNA, 459 bp, Glycine max
  Clone ID: PAT_MRT3847_12637C.1
tggatatctgcagaattcggcttaagcagtggtaacaacgcattttacgcggtgacgttattccgttgcctgcggccatcccggattcgtttcagtgatcaagatttgtcttactgatcatatcatgggaaacttactttgtttagctcaagtggatcaatcaactgttgctattaaggagacttttggtaagtttgatgatgttctggagccaggttgtcattgtgtgccttggatatttggaagtcagattgctggacatcttactcttagggttcaacagttagatgtcaagtgtgagaccaaaactaaggacaatgtctttgtcaatgttgtagcatcgatacaatatcgtgctctatctgaaaaggctagtgatgcatattacaaactcagcaatacaagggcccaaatccaggcctatgtttttgatgttattagagccagtgtcccaaagct

SEQ ID NO: 29214 - DNA, 706 bp, Glycine max
  Clone ID: PAT_MRT3847_126380C.1
tggttatgttgcaccagaaatatgcatgcactggaatgctgactgaaaagagtgatatttatagctttgggatccttatcatggagataatccccggaagaagtcctgttaattatagtagcccgcaaggagaggttaatttaatagaatggttgaagactatggttgggaatcgaaaatccgaggaagtagttgatcctaagctccctgagatgccattttcaaaggctcttaaacgtgctttgttgattgctcttcggtgtgttgatcctgatgcaacaaagaggccaaaaatgggacatgtgatacacatgcttgaggcagacgacttgttattccatactgaacaaagaactgagggagagtcttcccgttcctatcaaagtgagcacaaggactcaaatttagataagagaacaggtggaggtgtcattgataaaagtgaagatgctagtactagatggagatgattacaagctgataatttaatagaactacgtgcttagtttttggtctctatcagttttccaattcttgtgtctaagttaatttttaaaaatgaaagtagtttcttttttgtttttttattatatattattccactacgtgcttttttgttctttattatatagttttccactgtagtttcttaactatctatagtttcttttctgattcgttattataaaataaaaatatttatggc

SEQ ID NO: 29215 - DNA, 374 bp, Glycine max
  Clone ID: PAT_MRT3847_126381C.1
cagcattccatgggcggctgtaaagacctcaatggaggatgtgcacatgctgggcgagttctagccaaaggcactgtgtggcttaaaaacaacaaagggaatcctgatgcactattttacggatgccagagctgacctaagaaactgagaagatgccgagtatcttgacatcacatactatcgcattgaagacccatcggctcgtaggctttgccgagacatacttgctgagataggccatattggatcgttcaaatgtggcgggttaccccactgggagtaatatagtaacgtaacattgttaggaacaatgtataaagatcacaatgcacaccaatttttggaagctgaagatgtgtatgatccacaagggc

SEQ ID NO: 29216 - DNA, 238 bp, Glycine max
  unsure (1)..(238): unsure at all n locations
  Clone ID: PAT_MRT3847_126382C.1
accctagatgtgtctgggcacaccatcagtgtgtaggataagactagcttagctatgcctacgttctttgagatgataatgatgaggaacagtaccatactgaggaatagctgtccttagcaaagctaatgcaagccntttatcttatcgccctaaaaaaaaaaaaaaaaaatacgtgcctctagctccatgtttctgtgtcttttagcgaacggttaatatgaacacttgactgaag

SEQ ID NO: 29217 - DNA, 415 bp, Glycine max
  unsure (1)..(415): unsure at all n locations
  Clone ID: PAT_MRT3847_126383C.1
gttgtgcatgacttaaaatttattttttgtctttggcgtacccggggagggaaaaagccatatttcatttgtggcaaaaacaaactctaagaacaaacaccctgaaacaaatttgcaggaccaaaaaaacccaaaacaactccccccaatttcctttttctaaaatgacaaacaaaaagcccccccccccccttgattcaaaaaaaaaaccgcagtgggagcaacacccgccccgggttcaaatcaaaccaaatgaggacaaaaccccccacacaacccggccccgtttgattaaaaaaaaaccgtcccaaacactgcgccgggggacgataacgggcccgggaaaaaaaaccccgggttaaggggggactcaggnaacaggaatcccaaccgtgtccccaccccccacttcttt

SEQ ID NO: 29218 - DNA, 331 bp, Glycine max
  Clone ID: PAT_MRT3847_126384C.1
ggccgggtcccaaatcttcatatagggtgggctggactacttgggcaacccaagcatagtgcacccccggaacatctctcccttctggacatcccaagttttgctaaagcgtgctgttgaaggttatctaattgttggtgggcccctctatgaggccactgacccaatctaccctggtggcatctttgacccattgggccttgctgatgacccacaggcttatgctgagcttacggataatgaactcaataacggtagattgatcatattctctatgcttgggatctatgtttacgccattgtcaccgatcgtggtccattggaaacactg

SEQ ID NO: 29219 - DNA, 713 bp, Glycine max
  Clone ID: PAT_MRT3847_126385C.1
accggtggcaaagacgacacgaagggggtggctggtgcagcagggggcctttttgtctacgggacgcgtgctgaataatctcattcttcaccctgagtcgcggccccttagtgcactgggaatgttactaccttttgcattaggcatgtgaatgatgcacccaacgactgctcgaaaatgcattacagccttattggttctcgctatcaacgctccttaaacgtaattggactactggaacattctcatagagatgcccagcttctaacgacagccttgctttcctatttcacactagagctaccactttcttatattgactcattttaggttttaccattgcttgagtctctgatacatgcggtgccacaatttcagcggggggttttggaatactttcaacatgagcaatggatgctgcacactcttactgattatgattggcataatatcattaccctcaaagcctgaaagtcctcatcattaatccagactaacttatgctagaactcggatgccttactacgatggaattattggcttggtatgaaacatcctgcgcgacaggctacactgcacaactcgctgtagtcacatccatgcattgacatcgtggacgtgaagacctagagctaccgtgatcgatctggacaaatggttgtctgaacttgcctagctttctggcggattcaatccatggggtacacctgatc

SEQ ID NO: 29220 - DNA, 465 bp, Glycine max
  Clone ID: PAT_MRT3847_126386C.1
gacggctaggtttatccatctcattaatgagtagtacgtttattgcattactctcttgaaggctactcttgggaacagcgttcatacctactatgggttgttaatataaataaattaatagggcttaaatgtacttatatccatttactttgtttgaaaaaacataaaatcagctttacaattttatataatattcgctttccaaactaatttcattaattaatatatttttcatctttattgtaccatgcttcatattattaatatacatctttattgaaacattaaagctcttataaatgattttttaaatacaatataatatatattctatgacattgttattattgaaaatcattttttggaacatattatctaatctttttgaccttattttattatataaatgtactttttttaggtttgtgtctagaaacctgttctttttaaataagaattttctaa

SEQ ID NO: 29221 - DNA, 164 bp, Glycine max
  Clone ID: PAT_MRT3847_126387C.1
aaagagaagccttaactgtgccacccactcgcgtatagcccccggctctaatgagaaatgattgaaaagatgttgctactaggagccaatgacatagttcttataatgagctctcgttactgttcctatgtctgcaggacaaagggctttcagaggttaaatcc

SEQ ID NO: 29222 - DNA, 349 bp, Glycine max
  Clone ID: PAT_MRT3847_126388C.1
aaatggtcaccaaaaaattggattatgatgagagagacgcgattgaggatcactcattgaaaagtacgtgtgaactatcctcctcacctatcttataatgaagaaatccctaaaacactagcttgccatgcagtaaccctacatgaaagggacccatggagacacactcgcaagcccttcatgcatatgacttgtatttcgaacgtgaaaggtgataatacttcccagtccaatcctatgactattaacaacaaaggccctaccattaaatcgacagtatatagtggcatggaatgaggctctccctggatgaaggaaccttcactcctccatggatgaaagaacctta

SEQ ID NO: 29223 - DNA, 202 bp, Glycine max
  Clone ID: PAT_MRT3847_126389C.1
tgtgtaagaatcttctcagggtgatgtgtttttgttgaagtgatgtgtttttgtttttctctttctgtaataggatatcttggtctcttataaatttcttctgctaaaaataatgagacaatgactgttcctaactaatgtagtagcattaaaggaaagtaatttacaatatactaaattagtgactagaatatagaaattg

SEQ ID NO: 29224 - DNA, 243 bp, Glycine max
  unsure (1)..(243): unsure at all n locations
  Clone ID: PAT_MRT3847_12638C.1
tggtgttctagtgtgtgattgtttgttgttntagctctttcttcttcttttggtggtccgtgtttgtgtttgttttttctctcacctgaaaatgtcttgctacggtggtaactgtggttgctgaagctcctgcaattactgcaacggctgcggaagctgcaatatgtacccatacttgagctacactgattctaccaccaactatacctttatcattgtaatatcacctttttaagctcaatt

SEQ ID NO: 29225 - DNA, 631 bp, Glycine max
  Clone ID: PAT_MRT3847_126390C.1
gtgaagtccatgacaagtttgattgattctagatgtccgacgttgtggtgaaacctattcagctcctcccatatatgccttgatgccgtaactcgttatcgatcgtgtcgcgtgccccggtggcgatgcgcttatttggcctcgtcgaagacgtaggtcaggtggcactttccgcagtactggcggttgtgcatggcggccatgaagacaccagcaccgcactcgggctgggggcactcgcggcgaagacgctcgatcttgccatcgccgtcaaccttgtagtacttgaggacagctagcttggtcttcttgcgcttgtgcttgatcttcttgggggtggtgtacaccttcttcttgcgcttcttggccataccaccacgaaggcggaggaccaagtggagggtggactccttctggatgttgtagtccgaaagagtgcggccatcctcgagctgctttccggcgaagatcagacgctgctggtccgggggaatgccctccttgtcctggatcttggacttgacattgtcaatggtatcggagctctcgacctcgagagtgatggtcttgcccgtgagggtcttgacgaagatctgcatcttgaacgctgctcgagccttctgagatgctt

SEQ ID NO: 29226 - DNA, 408 bp, Glycine max
  unsure (1)..(408): unsure at all n locations
  Clone ID: PAT_MRT3847_126391C.1
tttntctttttttcgttttttccattaaaccatagcaaggctgtcaacattcggaaggctttctttctcataacacgaccctaatacttcaccaccaatccaagcctctagaaacatctttacctaacaagattttcatttttgctagcccccataaaagaaatcacatataattattaataatgtaacatttatctacaataaaaactggataccaaacctcacatataaaaaaatacctcttttgcacctattgaaaaaccaacttgaaacactttgaacacatctaacctcacagtcttaaaaagtgacccccattgaccaataataacttaatctccttccttcacacggaaagcagctgatatatgatcaggaattttggagggccttttttcctacctctgg

SEQ ID NO: 29227 - DNA, 793 bp, Glycine max
  unsure (1)..(793): unsure at all n locations
  Clone ID: PAT_MRT3847_126392C.1
attcgacnctcgttacccggggatcctctagagtcgacctgcagcattttaggccaacccactagcctcttctgctctgttctcttttttttccttctttctcagcatgtctatgtttttttcctcaaatttttattattcctaaactgtattcagatagacaattcaaagtagcagaaaattgggaggtatctgctgttattacagtgtaccttaggactatgattttttactattagttatgaatgtcttcaattttgagaatttttatttttaagcatttacaagtgcatagtttaaattatttaatttgtattataaacttcagtatagtggctatcctactatccattatcccacgaaggttggccaataagcaccagtgtcttggattgattaacattcatgaaaatgaatgaagtcaacaacttaaaattgtatttgagaaacaggaaactgcaaaggactgacttaattacttaattgntagaagtgtaaatgcatgtaaaattgaaactagtaataagattttgcccaaatcctcaagggcacaacacaagagttgcttagtgagatggcgtgactgttgtctgaaccagtcaaaccaagaatgaagataacagatgtccatcggatttcaggtcagatacttatggtgagtaaaatagtttatatactttccttattgtataatatatctagcaacaggaatcatctccttcccctccttcctccttaaagctttcgatagaacttaaaaaaaagtgatgatgacattttctattatttaaaa

SEQ ID NO: 29228 - DNA, 247 bp, Glycine max
  Clone ID: PAT_MRT3847_126393C.1
catctccatttttcaccttatattttacacttttctactcaaaactttcctggggatattgttacatttcaacaaaaactactccatcaactactacttaactcattctcatactcctatccctacctctcttgacctacaaatccctacccattctcattataatttacatacttcattcttgaccactttacaataaaactaaatacacaatatctttactcatataataaacactataatctct

SEQ ID NO: 29229 - DNA, 539 bp, Glycine max
  Clone ID: PAT_MRT3847_126394C.1
tcgcgatacacgtacgcgtacgcgggcgcctaccttgaccctgcaatccgggacctgcacgcgcacgcgctccacctatacctagagggagtagagctagaccttgtcatggtcatagccatagcctgtgcctgagtgaaatccggacacaatcacacacacaatccaaacacgaagcataaacagtaaaggctgaggcggctatggcgtgtgcgtgctctcactcacagcgatgggctcactgtcactgtcccatttggaaaacctgaaccggccgctgcatctatgtatatgactacgcccacgcacagggagagggcgtattggtctcgagcgcgagggtggtttttaccttcgacacggagaccagctgcatgtgcttgaccttctgcgcctgagagagatagagctagcggacgccgctcactctggctagcccgcgaaagccctgattctgggtgatggacggcaacatataacaataacaggatctggcttcggtatatgccaataccaatatatagatatccacacgcacg

SEQ ID NO: 29230 - DNA, 443 bp, Glycine max
  unsure (1)..(443): unsure at all n locations
  Clone ID: PAT_MRT3847_126395C.1
caattgtcgtgaatgtgattataatatagttattttatttgcaattcaaagatagtaaaatctgtttataatatataaactatatatttattaatagtgtaaaaaattatattaccttttaattataaatttattataattagtaagtttgttgaatttactattaatgatttttggaataatatttttgagtctttttgttttaaatattgatcgactttgttgactnattaattcttttgaaaaattaattagctatctttagtagtactaatatttttctttccgcaaatttgaatcccatttaatacatgtgggttaataacttttaatggagggtgaatgtaaatttttggtgctagttgtgcgtagaaattaaattaattaagtaattaatttattaataatttttttaattggggttcaggaaaaatagggtgaaa

SEQ ID NO: 29231 - DNA, 360 bp, Glycine max
  Clone ID: PAT_MRT3847_126396C.1
tcgtgaaaaatttttttataaaaaaaaaaaaaaaaaaaaaaaaagggaaaataaaaaaaatagggggggaaaaaaaaaaaaaaaaaaaaaataaataaaaacaataaaaaataaaaatataaaaaaaaaattttggggcgggccccaattatgggcttgccccccggaattttattttggcccggttctttagggtttccacttttttctttttgtgggctttttttgggttgggttgattactggacttagttgtttccttggaaaaatttgtttccggcacaatttccgctttacattcggcctggatgttttagggtttaagttgggggttctttttgggtgcgttaactgactttt

SEQ ID NO: 29232 - DNA, 487 bp, Glycine max
  Clone ID: PAT_MRT3847_126397C.1
aattcggctcgagctcgagccgaatacggctgtgagaagacgacagaagggccttgctctatttaaatatttactatttaggattggatgcgcggttcagagcgaaaagaagtagaggaaattgtttaattattttaagtaattagttttttttaaaattaaatgatatgaataaaataaaaatatgataatttttttagttattttaatttaaaattaaaaaagtaaccattaatttcgtattttctctatttcttctttccaaaggtagattatattaataaactcgtcatgatgtgttttgtccaaaattcatcaaagtaactctcagcttgatttgccatggtgtagatttgggctcaatcatttgcctggttcaaagctatcccaatgaagcccattgtttatgcggtctctatctctagacgcagacccacccacacgcgtatgcttaaacaagatgtttatttatttatttatgaaaaac

SEQ ID NO: 29233 - DNA, 380 bp, Glycine max
  Clone ID: PAT_MRT3847_126398C.1
ctctctctctctctctctctctctctctctctctctctctctctctctctctctctctctctctaaaccaataaagaaaacaaatcaccccacaaagacacaaacacactcacactcacacccaccattacctcctaccataccaccaccaatccctctatctctatctctaaatatatcactatcacccttactcacaccctcactccctaccccaataccgacagttacactcacatacacaatcactctcactatctcattaatatacatacaaatatatatatatatatatatatatatatacatatatatatacacatattatatatgtctatgtaacgatcctgctccctttcttgattaaacccgaaaaaaaa

SEQ ID NO: 29234 - DNA, 518 bp, Glycine max
  Clone ID: PAT_MRT3847_126399C.1
aaatcaaagccccaattctgaatttgataccgaagcactccaacaaagtacaaacgtacatagcataattataaggcgcagttttaaggtttggggggtccagaaaaaaataaaaaaaatgggaggaggtttttattactttaaaaaaggaaaaggaaaatacggggggaggcttgcattcaaaaagttatatatcataggataggaggaccttggtgaaagggagaaaaaaaatgaagagggccttttctggttacagtagccttgattggcaaagatgaggaaaaccaccgtggttaaccaaaaatgctagacctcatcaagatgaagccgggcctttcattgagggacgctggccaaccccagaggatcaaagaacctgacaccggggtacaacttttattctgggaaaggttccgtattcttttaaaaaggtatgtcccctttcattatcacctgaatccaaagcagggggggaaacgaaaatggaagaggaagccccggggaagaagaacctt

SEQ ID NO: 29235 - DNA, 294 bp, Glycine max
  Clone ID: PAT_MRT3847_12639C.1
gggcagggaatttactcactgcctcactgtgagagcaacgaataacaggtatggtggacgccggatagagccacagtgcgaactgcgagctgtctccggagactcggaacgatctgtagtcggcgacggggctgagctgatcgccgaagaagggaggccacgggtggaagttcacgtcgatcggccacggttactaccatgttgagatgccgcacggtgctatgggcgctatggacccgaacttcgaggattctgtggagattggcatcgtttgatcgccgtggtttccggtgg

SEQ ID NO: 29236 - DNA, 384 bp, Glycine max
  Clone ID: PAT_MRT3847_1263C.1
gacacatttgtttgtatagatagatacaatcagatgaatatgaatgtgcttgctttgtttgttgctagagttttggtagcatagggatgccatggatcacacaaccaaacattccctctctatctgaatactgggtttggttggcaatacatcaatgaagtgggatgtatcagttagttgcttggcttgcgagcaaacaacgtactcaggtggcagactgttcctgcatcttgcttacagtacatagctaactacgttctatgaaaccaatatatatcaatctccatcccagttagtcaacaagcttatttctatccaaacatcctcactctcactaacaaacatatctctgtcttgcacgtagattacactactctctctaat

SEQ ID NO: 29237 - DNA, 474 bp, Glycine max
  Clone ID: PAT_MRT3847_126400C.1
ggtcaaccgacttccctctcccgtgtcgtgttgtgtcttcttctctaaaatcaaaaaccctaacttctgaacctttcatcgcatcgccaccgattcccaatctccactaatcaaagaaaagaaaatgagtagatgctcgaccagaactacctacgttgggaatctacccggtgatatccgtgaaagagaagttgaagatttgtttctgaagccaaatggctacacagccaaactctcctccgcctcctcctctttctactggtgtagcatcgcattcgccgtcaccaccattgaagcggactagaaaggtctcacgcctaagatcattggcgactagacaagttggggcagagagacccctggtccatgtggatcctgctactggcaaagcagacggtccccacagcaagaaattcataacatatttaggaatcgttgctcgtgataaggtggatgtcacatacaaaaattgga

SEQ ID NO: 29238 - DNA, 539 bp, Glycine max
  Clone ID: PAT_MRT3847_126401C.1
ctcgagccgctcgagccgctcgagccgattcggctcgaggaacctttttctgttttcgttccatataatcatgaaaatctctgctgggagttgtgattttcaaccataattttagattattaagttttgggcttggggaaattattttgattatattcttagttctaaggtggggtgttaattaatcatccccaactttttctgatgttcagctcagccccccacttaaattcaattttttttgctgtctttttaaagatctttccctcatttattttttttgggctactgaaagtagtactgctcctttccttttcccatttttttcctttccaccatctgataaaggataatggacccgaagtaaaagttaacatatttgtttgtatcataccactgctgttgtaatccttctcaaagcggattgcagtggttaaacaaccgatggaaggtttaaaggctcctcttctcctgctgctcctatgttggagagacgggcaaggccttaaacggatcaagctttgaactgccaggtgcaa

SEQ ID NO: 29239 - DNA, 432 bp, Glycine max
  unsure (1)..(432): unsure at all n locations
  Clone ID: PAT_MRT3847_126402C.1
aagcacgcaaccgggtggagtaacactaactccaaaaaacctcactgtatggccatcaatctcagcaccactgcttctcttcactccaagccttcttttctgacccataaacagaacaacctgagcaaaatctaccatccttcttcctctttactcacaacatgtgctcaaacacaagggactgacactggagttacacaggaagatgcttctgctggtaatggtatatatgctaacaattcctacccactctttattattattattattattgaatcaaatatgggctcatggggataaccatgaatttccatatttgttgattaaccatatgtgtatggtccattgcattcacatgtaagagaataattcatatttgattcattttgtgtctaaaattttcttagatcanggagtcataacaatcacgta

SEQ ID NO: 29240 - DNA, 279 bp, Glycine max
  unsure (1)..(279): unsure at all n locations
  Clone ID: PAT_MRT3847_126403C.1
agcattnncagcaacatcgcaaacgaacncaacgtananttncttcnctcagcatncgtatntnagagccnctggttgtgttctaagaggatggnnancgttactgaagggcagttgcggttttgtattgatcnanggggcacgtttactgctgtgtntgcagaaatccctggtccagactgatgggcaagttttgaagcttctgtcggttgaccctttnaactatgatgtgcaccggtgnnagggctaggaggntcttgaagattcatggtgcgaaaa

SEQ ID NO: 29241 - DNA, 464 bp, Glycine max
  Clone ID: PAT_MRT3847_126404C.1
catgctcaggacacaccaccaaccgttcctcatgctcttctgctgaaaccatctctatatatgccacgggctctatgcatatgatcgatgtcgcatatacatggccgctgtcaaaatcctctcgggagcggacgtcgatcagcaatatgctataacgacggaggtagtccagcaactcctgggcgctgatagtagatctgtgcggcaaatcaagcgtactactactggcgcccttgagcgcatggacgccgttcggtgttcgagacctataaggattatcatcggagccattaggactttggctgccatgaggagaatttgcaagatgggaatatcgtgcattattcggacgaaagttctctgttgaagttctcggcgggttagacggaggctgagaaggtacggagtatattgggctatatgtcggatccggagaccgatgaagtgatgtgatagaggggaat

SEQ ID NO: 29242 - DNA, 871 bp, Glycine max
  unsure (1)..(871): unsure at all n locations
  Clone ID: PAT_MRT3847_126405C.1
nnnnnnnnnnnnnnnnnnnnnnnnnnnnnnggctaaacacaaatatttttatctcaccaaaaaaaacaaatgcatacattggtactctattgtctcaaaagaataagttttagcttcttacacataccaaaggactataagtcagtaatttccaattatttacaacataaacccaagttttcatgaatcaatgataactgaatcataaaatttcatcagaaacaggaaaagaacagatgaattctcctagaagcaacaattacatgaaactggttgacaacaccgaataacatcttcaggtgtggggaagctttatgattttttgtagaaccacagtcctagcccttataatgtctcggctacacgtatcagcttgtaatcctaaatcttcaacattcttcataaaaactcccaacttcttcttgatctcctctattgcaaccttcacagcttcttcctcaagggcaaattccacattctgaaatagagactcgatttcaacttccagccgatcaatgagaacccgaatgttgtccaagtcctttatagcaacataggcgccaacttgcatagagatggctacttccttatgtcctttcatagcattttcatagttcttcaacaaggagtcaatccactttcccattgaacctattgggattgcagtaacagcagctagagcagctgcaacatgtggagtagcaattgctgcagccacaactgagcagatcaacacagcagcaactgtagccgcaaatatcacacttgagaccttcctccaggtatggatttgttttaccttcttatcgagcttgctttgtcgtactcgcaacttctcaagcatgagtatctgttgattgtaaacagctaa

SEQ ID NO: 29243 - DNA, 2103 bp, Glycine max
  Clone ID: PAT_MRT3847_126406C.1
ctcgagccggacatgcctaaagaacacggcattacggtactctctccatgcacactacagttgcgtttgtggtacatatgaatcctgccctgtaagtatcatatcatgggcaaccttaacttgacaacatattcctacgatcagtttccaaatggaagcgttttacacaactctctcctcccctgcgtccacgtctgttctcaattttcagggctctgaattgcctagaagaaatctttgtaagaaatcttcacacactatttttgcatcacctacgctgcctaaaccgtttcttcagatttgtggtagacctcagacattgatttatacgtcaacccgactctcttctggagcacatagagcaacaatatctgctgaagctggaagacaaaattgggattttggaagatttgttaaaacactgttcttcttcaatgggttcccatctcctgctaagttctttgattttctagctgagaaaatatctgatccttcccctagtgaagtcattaacacaatgggaacttctgatattgtcctggtagctggagcaactggtggtgttggtcgaagggtggttgacatattacgcaagaaagggattccagtccgagtattggtttgtgatgaaaagaaagcagaaacttttgtaggaggtccatttgagcttccggtgtctagcattcgggcatatataaaggagccacataacaaccagatttgtgcaagtgaagtgagtaatgctgcttctgtccttgttggccctaaggaaggagacactccagacagatcaaaatacagccaaggaattaagttctttgagccagagataaaaggtgactcaccagaaaaggtagagtacataggaatgagaaatttgatcaaggccgtgaaggacaatcttggacttcgaagaggaaagctattatttggatttgaaggcaataattacaggcagcttccttggggtgctttagatgatgtggtgatgggtggagttagtgaaagcacatttcaaattgacccaagtgggggtgaaaatggtggaccaactgggatttttaaaggtgttgtttcaacagcaaacaatggtggctttacaagtatcagaactaagaatttctcagagcctgaaaatctttctgcatatgatggtttggagttccgcctaaaaggtgatgggcgtagatataaaatcattgttcgcacaagcagtgattgggacactcttggttacacagtacggctcgagactaagaaaggaaaatgtgaatcaaaattaaatgacaagtttgagtctgatggtaaattaaatgaaacttttgtggaaggtccatttgagcttccggtgtctagcatacgggcatatataaaggatccaataacacccaggtttgtgcatgtgagctcagcaggagttacaagacccgaaaggcctggaatcgatctaagtaaacagcctcccgccgttcgattaaacaaggaactggattatatcctcacatttaaactaaagggcgaggatttacttagagaaagtggcattccctatgcaatcgtgaggccttgtgcattaactgaggagcctgctggtgccaatcttatttttgatcaaggagataatattacgggtaaaatatcaagggaagagattgctcttatgtgtgtagctgcgcttgatagcccttacgcatgtgacaaaacatttgaggtcaaaagtgtcattccatttagcgagccatttactgtggatccaacaaaccctcctccagaaaaggactatgacgtatattttaaaaatttaaaagaaggcattactgggaaggaagctctccaacaaaaccctgtttctgtttagttcggctatgaatgttgcagatgtgagagtaccttgagagctgtacagttgttgatctagagtatccagtgctacagattgttcagggctcaggcacatggattggttaccggaccgaggacagctctcaaacatgttgtttgaaatttttctatgtgttgatgttccttcttaattactttgataatctccttttcctcaatacctttgaaggaagaaggaaaagcaagaagttatcagtttga

SEQ ID NO: 29244 - DNA, 570 bp, Glycine max
  Clone ID: PAT_MRT3847_126407C.1
ttgaagcaataaaaaaattccttaacattagcataaaaaggacaattcagtaaggaacaaaaattacgctggccatggaccagatggaacaattacaaagttttaacattaatgcatccaacgttctcaaccagaaaaagtaaaaatttacatcctcttgcccttttccccttattaaataacacaacttaaaaaaaggggggcagttggccagagactttgaccttagttcatctcacagtaggcaacattaaaatgggaagggaataacctgacacattttcatacccaaaaaattgaaaattttgtcgtttggcattgccaagagttcctaaattattaaatttagcaattacaaaaaaaggattaaaatgagaacatggctgttgtatgtaattaagacgctgcagattccttagcaattttctcagccttagcaatgacctcttcaataccgccaaccatgtaaaacgactgctctgggaggtcatcgtatttgccatccaacacaccctgtcagatacacaaaaacaaaggaatcattaaccatgcattagtccacaaagaaaa

SEQ ID NO: 29245 - DNA, 2164 bp, Glycine max
  unsure (1)..(2164): unsure at all n locations
  Clone ID: PAT_MRT3847_126408C.1
ctcgagccgaatcggctcgagaaagacgacagaaggggcacctgaaatgaacatcatagctgcgtttgtggttcatgtgaatcctgccctgtaaggatgatatcatggcaaccttaacttgacaacatattcctacgatcagtttccaaatggaagcgttttacacaactctctcctcccctgcgtccacgtctgttctcaattttcagggctctgaattgcctagaagaaatctttgtaagaaatcttcacacactatttttgcatcacctacgctgcctaaaccgtttcttcagatttgtggtagacctcagacattgatttatacgtcaacccgactctcttctggagcacatagagcaacaatatctgctgaagctggaagacaaaattgggattttggaagatttgttaaaaacactgttcttcttcaatgggttcccatctcctgctaagttctttgattttctagttgagaaaatatctgatccttcccctagtgaagtggttaacacaatgggaacttctgatattgtcctggtagctggagcaactggtggtgttggtcgaagggtggttgacatattacgcaagaaaggaattccagtccgagtattggttagaaatgaagagaaagcaaggaagatgttaggctcagatgttgatttggtcattggagacattacaaaagatagcactttgatccctgaatactttaaaggcgtgaagaaagtgattaatgctgcttctgtcattgttggtcctaaggaaggagacactccagacagatcaaaatacagccaaataaaaggtgactcaccagaaaaggtagagtacataggaatgagaaatttgatcaaggctgtgaaggacaatcttggacttcgaagaggaaagctattatttggatttgaaggcattaattacaggcagcttccttggggtgctttagatgacgtggtaatgggtggagttagtgaaagcacatttcaaattgacccaagtgggggtgaaaatggtggaccaactggggtttttaaagatcagaactaagaatttctcagagcctgaaaatctttctgcatatgatggtttggagttccgcctaaaaggtgatgggcgtagatataaaatcattgttcgcacaagcagtgattgggacactcttggttacactgcaggctttgacactgagaaaggaaaatggcaatcaattcaagtgccattttcttccctgagtcctgtatttcgagcaagaacagtgtccaatgctccaccatttgatccaagcattgttgtatcattacagctcatgttcagcaagtttgagtctgatggtaaattaaatgaaacttttgtggaaggtccatttgagcttccggtgtctagcatacgggcatatataaaggatccaataacacccaggtttgtgcatgtgagctcagcaggagttacaagacccgaaaggcctggaatcgatctaagtaaacagcctcccgccgttcgattaaacaaggaactggattatatcctcacatttaaactaaagggcgaggatttacttagagaaagtggcattccctatgcaatcgtgaggccttgtgcattaactgaggagcctgctggtgccaatcttatttttgatcaaggagataatattacgggtaaaatatcaagggaagagattgctcttatgtgtgtagctgcgcttgatagcccttacgcatgtgacaaaacatttgaggtcaaaagtgtcattccatttagcgagccatttactgtggatccaacaaaccctcctccagaaaaggactatgacgtatattttaaaaatttaaaagaaggcattactgggaaggaagctctccaacaaaatcctgtttctgtttagttcagctatgaatgttgcatatgcgagtactttgagagctgtgcagtctttgatctaaagagatctaaacttgacaaatctgtgatactaagttttatgataaaataggttatgtcctaacagtataaaacagttttaaaccaagttagatatgatctttaccttacaatatgcatgtatattctgtcttcaaacaatcaaacatgagtccttttcctcatatgttacagacttctagcanataggaaagcaaaagaattttatattcttggt

SEQ ID NO: 29246 - DNA, 1442 bp, Glycine max
  unsure (1)..(1442): unsure at all n locations
  Clone ID: PAT_MRT3847_126409C.1
tgacatcatattcctacgatcagtttccaaatggaagcgttttacacaactctctcctcccctgcgtccacgtctgttctcaattttcgggctctgaattgcctagaagaaatctttgtaagaaatcttcacacactatttttgcatcacctacgctgcctaaaccgtttcttcagatttgtggtagacctcagacattgatttatacgtcaacccgactctcttctggagcacatagagcaacaatatctgctgaagctggaagacaaaattgggattttggaagatttgttaaaacactgttcttcttcaatgggttcccatctcctgctaagctgagaaaatatctgatccttcccctagtgaagtcattaacacaatgggaacttctgatattgtcctggtagctggagcaactggtggtgttggtcgaagggtggttgacatattacgcaagaaaggaattccagtccgagtattggttagaaatgaagagaaagcaaggaagatgttaggctcagatgttgatttggtcattggagacattacaaaagatagcacttntgatccctgaatactttnnaggcgtgaagaaagtgattaatgctgcttctgtcattgnttggtcctaaagaaggagacactccagacagatcanaatacagccaaggaatttaagttctttgacccagaggtattatatcctcacattaactaaagggcgaggatttacttagagaaagtggcattccctatgtaatcgtgaggccttgtgcattaactgaggagcctgctggtgccgatcttatttttgatcaaggagataatattacgggtaaaatatcaagggaagagattgctcttatgtgtgtagctgcgcttgatagcctttatgcatgtgacaaaacatttgaggtcaaaagtgtcattccatttagtgagccattcactgtggatccagcaaaccctcctccagaaaaggactatgacgtatattttaaaaatttaaaagaaggcattactgggaaggaagctctccaacaaaaccctgtttctgtttagttcggctatgaatgttgcagatgtgagagtaccttgagagctgtacagtttttgatctaaagagatctaaacttgacaaatcttgatactacgtttttaaaccaagttagatatggcctttatcttacaatctgcatgtatatcctgtctccaaacatgagtccttttccttctagcaaatagggatgcaaagaatttttatattcagactgtaagaagatagaactatcgttttctttttcatgtaacagttttaggtttacatctctcagctgatgagaggaatgagaattacaggaagacatgcgtggagttagacaagcctaactgtttattattattattattgtcgaaatcaaaatccacacaccacacttttg

SEQ ID NO: 29247 - DNA, 255 bp, Glycine max
  Clone ID: PAT_MRT3847_12640C.1
gaattcgattcgagaccgagactgaaccccggtaccaactctacttgaggctcctgaccaagtcaatgagcccaatatggcctccggcaagcctctaaggctcacattgcacgatgtctacaaaataggtggtatgggcactgagccagtgggacttctagagactggggttgtgaaacctgcactggtggtgactatcggtcccactgggctgacaactgaggttaagtctggtgacatgcaccatgaagatat

SEQ ID NO: 29248 - DNA, 478 bp, Glycine max
  Clone ID: PAT_MRT3847_126410C.1
ctaatttgtgaaattcttgaagcttttttttcttagttattggttgtttaaaacagataaaaggtgactcaccagaaaaggtagagtacataggaatgagaaatttgatcaaggctgtgaaggacaatcttggacttcgaagaggaaagctattatttggatttgaaggcattaattacaggcagcttccttggggtgctttagatgacgtggtaatttgtggagttagtgaaagcacatttcaaattgacccaagtgggggtgaaaatggtggaccaactggggtttttaaagttcaggtgttgtttcaacagcaaacaatggtggctttacaagtatcagaactaagaatttctcagagcctgaaaatctttctgcatatgatggtttggagttccgcctaaaaggtgatgggcgtagatataaaatcattgttcgcacaagcagtgattgggacactcttggttacactgcaggc

SEQ ID NO: 29249 - DNA, 198 bp, Glycine max
  Clone ID: PAT_MRT3847_126411C.1
ctttgcttcactcaacttgcacacaaacaccaccaccaggacccttactcaatacttcggctgtggcataggacaagctcccttggggacaagctcagcactccaaactgaaggtcgcaatgtcaactctactcgtgaagacgccatccaccgagactcaggaaaacaaggacagtcattgaaagtaactgaggatcc

SEQ ID NO: 29250 - DNA, 283 bp, Glycine max
  Clone ID: PAT_MRT3847_126412C.1
cggtcgttttttttttggtttaaagattctaccagtgagttgtctgagagcgaacaagaaccccaagctatataaaatacgtagagagggtgcgacatttatgttttccccatattatttcccaaaaaaagtgctattggcaatgtattaaattccataaaagtgctaagagaccctagtttgccaaaggacttcaccttgttttactgtagggagttggaattccctcaagtccatgacctgacatgggaagtgccgggccacttggacaattgcacccaat

SEQ ID NO: 29251 - DNA, 250 bp, Glycine max
  Clone ID: PAT_MRT3847_126413C.1
ctttttttttattttttttattacagagtaataataaaaaatttttcaatatggaaatgcagaggggatgaacatttgtttttactacataactcccttaatccgggcccttttccagaggattggtaaaccaatcaaatatgtgaaattattctccaaaaatgttaatgataagttttatacacctccttattcgtgggattcaaccaatatggtagaatcaatctgggaccaaacctgtcggtataac

SEQ ID NO: 29252 - DNA, 257 bp, Glycine max
  unsure (1)..(257): unsure at all n locations
  Clone ID: PAT_MRT3847_126414C.1
ttcttccaantncaaccacactagttntnaggnantcatgggcaagatcaagatcggaatcaacggatatngaagaattggccgtttggttgccanantcgctctgcaaagagacgatgtggagctcgttgncgttaacgaccctttcattatcacngattanntgacatatatgttnaantacnnnagtgttcaggganactggaagnatnangatgtcatgttaaaggangannagaccttttnttcggtnaaat

SEQ ID NO: 29253 - DNA, 252 bp, Glycine max
  Clone ID: PAT_MRT3847_126415C.1
aatattttgaggtaaaccccatcactttgcggctatttgggggcttgtttctctggagagtgaggtcatccatctcataggtgacaccccaagtttccatttattttaaattgattatttgtgagaatattgctcaaatcaggaagtgggtcgttgcaagatatgtattttccacctttcatttgatataattgttcatcctctctatttttttttaaaggagcgttttaggtggggtttgtactgtggcat

SEQ ID NO: 29254 - DNA, 372 bp, Glycine max
  Clone ID: PAT_MRT3847_126416C.1
accacgccttccggtggttgtgccttatttctaaagtactgcagacatccctgcacagagggggttccagctgactggtgactggcaaagcccgttgcgcacgcctctcccggaccctgcctgacttatattgcaggactgctacactagacgcctccagatgatacattgcattagatactgaccaagcttatacgctggataagagtgtccactctgcatcttaatccatatgctctaagccaactaacgcctcataggatccatatgtccactgacgtaaacatgcacggtacacggggcctggactagtgcaaactcatgaatgacccatcggtatccaaggaccatgctatctgcgaacatccttca

SEQ ID NO: 29255 - DNA, 141 bp, Glycine max
  Clone ID: PAT_MRT3847_126417C.1
ccacgcgtccgttctgcttactttctgtacaagcaaatttacctaattcattcttctcttcttttccttcctccaaatactttccttcttacataccacaaacaaatccttctcaatttgagtctcttcggccatgattgc

SEQ ID NO: 29256 - DNA, 464 bp, Glycine max
  Clone ID: PAT_MRT3847_126418C.1
aagcccggaattcggctcgaggctaactccagcaacaacaacaatattttaggattaactaggaattccttttgatgggggagaggttgatgctgaccaagccactctccactcatttgatgggtaccgaggacttcaaacagcttgagagaccaacggcttatccacacagaggcaaaaactctgcgtgatcttacaaactcagggaaagaacaccctgcatcagaagatcatccctcatactgaacattatggaagggcgagcaaagccccgagcaagttgactaaaaaaatgattgactggtctgcaacctatgatacctttaacatccagattcctttggaagtgatcactaatcaaaagcctaaatgcaaaacgaagccccactactatcacaatgatgaggggacaaagatgaataacattgaccttcaagaagattttaatgggagccaccaagtaa

SEQ ID NO: 29257 - DNA, 460 bp, Glycine max
  Clone ID: PAT_MRT3847_126419C.1
ctattcgtggtgaaaatagtgttagatatggtatgcggcagttggttccgcgaatttaagtcgcgtccaatgtgtttgatgaagtgtcccacttccttctctgctttattttgagcacttaaactaattttagtttcacttttaccgttgcctctgctctggatttcgaatggaaggtgcaatccagtatagattgttgggtcagttatggcagcgttgatttccaaaagaatcctacgttgttcttcttggtcattgcattcactaggacgatgttactttgattcacctagtgctgggtttgcctctatttataaaccacgtgatgtatgcaacagtttatctggggagagaatgtttcctgcagatcgttctttggtcaggtctatggtccgacagttttctacttctattttaactcctggagctgatgatagtgcatttccatctgatttattgt

SEQ ID NO: 29258 - DNA, 1101 bp, Glycine max
  Clone ID: PAT_MRT3847_12641C.1
agcagccaccctttacttcggcacgacaccaaacaccaaacttcccactcttctctccccggtcccttgtgatttgctcacaaaaccagtgtcggtcacaccatctctcccttttctccacctgcaacgatgtcggttaaggagtgccaccaccaccacaagggaaagaagcacaagctctggagacgcatcttctggggaatagtgatcttcgccttcatcgtgttactgacagttcttataatctgggcaatcctaaagccttcaaaaccaaccttcatcctccaagacgtcaccgtttacggcttcaatgccaccatccccaacttcctcacctcaagttttcaggtcacgctttcctcgcgcaaccccaacgacaaaatcggaatctactacgaccgtctcaacacctacgtaacttaccggaaccagcaggtcacgtaccgaacctcaatcccaccctcgtaccaaggtcacaaggaagaggatgtgtggtccccgtttgtctacggcactaatgtccccgtcgcaccctacaacttcgttggcctcagtcaagaccagaccaacggcaacgtcctcgtcctcgttaagattgacggtaaggtacgatggaaagttggttccttcgtctctgctcactacaacctcaatgtaaggtgccctgctttcataacctttggcccccaaagcaacgggattgcccttggcaataacgccgttaagtatcaattggttcaacgctgcaccgtcggggtttgatgtcaacgccttccaagatatattgctctgcctcttggtatatttagtgtctatttatatacggtctttctcatttctttttttcatatacgtattcttcctatcttcctctacgtatttcttctacggatcactttgttgttagacatacatatgtctgtcttcgttactgtattttgaattttacattttgctatagaataaatttgtatttggagaaaataataaagagatgaagcaaaattccaatttatagcaaagtccttttagataaattaaaacgttgtttcaatttggataaagaattcagtgtctcgtgaatcatctaaaaaaaaaaaa

SEQ ID NO: 29259 - DNA, 193 bp, Glycine max
  Clone ID: PAT_MRT3847_126420C.1
aatgtggtcactctacaatgtctctcttcaacatcttccccttcttgtgaggggttttcatgggaaggggttgtcgcatccaacaacatgtaatgtcttcttcgtttaagccataaaaaaaaaatgaaaaagtatgtcagcaatccatcataataatcaattatatttaactaagagaataaaataacattac

SEQ ID NO: 29260 - DNA, 1376 bp, Glycine max
  Clone ID: PAT_MRT3847_126421C.1
gatggaggcatagacggagacgcagtcatgaacaggacagagttcagattcttattcagagcaaaatttggggcagcaaggaactaaatcctctatcagcattagtttacctctgcgttctgtctctggtgcaatccagtatagattgttgggtcagttatggcagcgttgatttccaaaagaatcctacgttgttcttcttggtcattgcattcactaggacgatgttactttgattcacctagtgctgggtttgcctctatttataaaccacgtgatgtatgcaacagtttatctggggagagaatgtttcctgcagatcgttctttggtcaggtctatggtccgacagttttcctctgttttcttaactcctaccgtctatcatgacaaactgtctagtctttatggcggcatgtgctgattgatgtctcaataagatccaagagaccaagattgtcattaatccggttgattatgatgtagggctttgccaggatcttttaattccagtaaccaactttcataatgaagacaagggctatatggttttacctggagatgtttttgatttgcctattcggaaggacattattcatcgtgttgttaggtggcagcttgcaaaacgacaacaggggactcactcaacaaaaactatcagtgaggtcagtggcactgggagaaaaccttggaatcaaaagggaactggtagagcaaggcatggttcattgcgtgggcctcagttcaggggtggtgccaccatgcatggccctaagccccgaagccatgctttcaaagtcaataagaaggttcggcgtctagggctgaagattgctttgtcagctcgtgcagcagaaggaaagcttcttgtgtttgaggatctggaggttcccacacataaaaccaagaacattgtgaattattacagtcaaatggaggataccaagaaactgctgcttgtagatggcactatagatgaaaagttaaaattatctacgcaaaatctacactatgttaacgtacttccctcaattgtaagtttcaattttattcatgttgcttctatcatagttcagatggagctttacattgtaaatttcatttgaaatttatgttatgtttcttagagccacaaaacatttaccaagccttatacttggtgggatcaggtacatggattaataatcaatagctactgttgaaatttcacattgaccatagatatggctaaagtagagagctataagggtttgggtaatcctcacttcatgagcagatgctagcatttagggttaattacgcctagcctaaattcaagatgaatggtagcagagcctattatagatttgatattgggtcaacttcaacttcgattgt

SEQ ID NO: 29261 - DNA, 210 bp, Glycine max
  Clone ID: PAT_MRT3847_126422C.1
agggtggggaaatttggccctggagatcgcgatcgtgtttgcctcgaagattgcagggactttactaatcttcgtcttgggcatccaaataaccactgatgacatgactccggaaatacccacgagcgttatcggagcattcgaacccaacgtcatcaatattaagaaggatatccttgtaaaatctcccacccttcttttcaccattga

SEQ ID NO: 29262 - DNA, 773 bp, Glycine max
  Clone ID: PAT_MRT3847_126423C.1
cccacgcgtccgcccacgcgtccgcccaatcattctctggcgagtggtgagaaaggaaacattgattcctgtccgtaagcttgcagtatgccccgccttacttcccgctcgtcaccttacgtgttaccctctctatcggcaactcctttagaccatttccctgattcttcatcttggaacaaagacaaactttccttcttccttcgacagacaactaactcggcgcaatggatgaccgaatcgacgaggacgagaaggacaaggaggaggaggagtccttggccggcttgacctctcttccacctcaccgcaaagcccattcctacagccagcagctgcgaggcacctccacacacaaacgccaccatcaagtccggaagcacagtctggacgacagccgtatatccagtaacatcgtcgaggcttccttctacgactgcggcgaggacgacgacatattttcccgttcatcctctacaaacaaccctgctgctgaggaggagtacaatgaaggcgcggattccacgactcagtaccagccattgcaggaattcataggcagcgggggcggcactggggtctttaagcctcctttcagagcgtccgtacatccagggagaccgccattcctggagttaaggccccatcccttgagggagactcaggtcgggaaattcctcaggaacattgcttgtactaaaacacagttgtgggctgggcaggaaagcggggtcagggtctgggagattcaaaacgcatacgaacctggttac

SEQ ID NO: 29263 - DNA, 1953 bp, Glycine max
  Clone ID: PAT_MRT3847_126424C.1
ctattcatggtgaaaatagcgttagatatggtatgcggcatttggttccgcgaatttaattggtgtgcaatgtgtttgatgaagtgtcccacttccttctctgctttattttgagcacttatactaattttagtctcacttttaccgttgcctctgctagggcttgcgaatggagtcgcagtcatggacaggacagagttcagatttcttattcagggcaggagcttgcgcagaaagaaactcggagatgcagtcatgaacaggacaaagttcagattcttcttctgagcaaaattttggggcagcaactaactaaatcctcaaaacagtgcaatctagtgaagattgttgggtcagttatggcagcgttgatttccaaaaggatcctacgttgttcttctgggtccttgcattcactaggacgatgttactttgattcacctgggtttgcctctatttataaaccacgtgatgtatgcggcggtttatctggggagagaatgttttctgcagatcgttctttggtcgggtccatggtccggcagttttctacttctattttaactcccggagctgatgatagtgcatttccatctgatttattgtccaaaaagattctggcaacatctgagcgtactattgggctttgccaggatcttttaattccagttaccaactttcataatgaagacaagggctatatggttttacctggatatgtttttgatttgcctattcggaattacattattcatcgtgttgttacgtggcagcttacaaaacgacaacaggggactcactcaacaaaaactatcagtgaggtcagtggcactgggagaaaaccttggaatcaaaagggaactggtagagcaaggcatggttcattgcgtgggcctcagttcaggggtggtgccaccatgcatggccctaagccccgaagccatgctttcaaagtcaataagaaggttcggcgtctagggctgaagattgctttatcagctcgtgcagcagaaggaaagcttcttgtttttgaggatctggcggttcccacacataaaaccaagaatattgtgaattattacaatcaaatggaggataccaagaaactgctgcttgtagatggcgctatagatgaaaagttaaaattatctacacaaaatctacactatgttaacgtacttccctccattggcttgaatgtctacagcattttgctgcatgatacattggtgatgtcccgagctgctgtgagcaaaattgttgagcgcatgcatactccaataaatcgttgaggctgtaactttttattgtgcttcgcttcatttactcggaaataggaacatttctgtagcaacataaaaagatccaatgagaatatctttggtacgaggtgtctgttttaattacataagttaggcaagttatgccattttgcccatgttgaaggttggaacttaggaacttgatgatcgaaatttgacgttcatgtgattaggtttatcttgttttccggtggttgaatctcatttttcaattctttcacatgcataggatctgataaacctgtacatcattcatgacctagtgtccttcattcatgaatttaaccaatatagtttgtctttggctttcaatggtttaattggattaggcagcaccaagggtgtggctgttcaaaagtttggtgcctttttaccctcttggatgcttccttacttattggtgcttcttagtcacaatgcagtctgccggagcaagactatagttttgaggccctgaggttgtaaatcacttcaatgtgtgcagtgcaatcaccaagaccttagttgggcttctcttatcatattttcctatccgttacatgatggcaagtaatggcatctatattgtgctgatcttgatacaacagtaaaaacatctatattagtgagaaaatttatgtttcgtatcaaa

SEQ ID NO: 29264 - DNA, 541 bp, Glycine max
  unsure (1)..(541): unsure at all n locations
  Clone ID: PAT_MRT3847_126425C.1
ggctcgagatagacggagacgcagtcatgaacaggacagagttcagattcttattcagagcaaaatttggggcagcaaggaactaaatcctctatcagcattagtttacctctgcgttctgtctctggtgcaatccagtatagattgttgggtcagttatggcagcgttgatttccaaaagaatcctacgttgttcttcttggtcattgcattcactaggacgatgttactttgattcacctagtgctgggtttgcctctatttataaacctcgtgatgtatgcagcagtttatctggggagagaatgttgcctgcagatcgttctttggtcaggtctatggtccgacagttttctacttctattttaactcctggagctgatgatagtgcatttccatctgatttattgtccaaaaagactctggcaacatctgagcgtactatagggctttgccaggatcttttaattccagttaccaactttcataatgaagacaagggctatattggttnttcctggagatgtttttgatttaccta

SEQ ID NO: 29265 - DNA, 224 bp, Glycine max
  Clone ID: PAT_MRT3847_126426C.1
cccttatgaagtgatcgaagaagaatcagtatctgtaaagattctttttttttgtttatttaaccatactatttcttgcacccttccacgctcaagctaaaaaaaaagtaaattactgcgattagaaggcagaccatcctgtaaaggactcatggagttcaaaaatcaccagaccctgtggcgagtggcaagcctactacctctaagacctcggctacttctag

SEQ ID NO: 29266 - DNA, 484 bp, Glycine max
  Clone ID: PAT_MRT3847_126427C.1
ccacgcgtccggctacacgtttagagaaggaaagtctcaagagcctatgtccgacgatatgagagctcagtgtaaaaacaaactgatgaggaggtggaataggaagcgcctttagatgaaacaaagatgtaagaaagtgcttaagcaaggagtggagataatgtgctttgttatctgataccacgtttcatgacatgttatgctgtgatggactacttatgatgatcttgaggtactattggacaaggacgagctatccttacctgacgtttagtgttagaatttactgatctaaagattgatgtttaactgccggttaagttatgtacttgtgagtattgagtactcgaattgtatactggaacgtaggggggacattgtgcttgatgttgatagcttaatattagtattttgagacctacattaacaagtttaatagaacaagcgaatatgataatggcacaagcctgtacatatgcctatt

SEQ ID NO: 29267 - DNA, 143 bp, Glycine max
  Clone ID: PAT_MRT3847_126428C.1
tttgcgaagagagaagaggctacagagctatcctcggtttctaggcacatgaagcatctgggattagaggaaagtgtaagaggaaggagagagtgaagctgaggaaagggacctagtagtgccaatattaaatggggactgag

SEQ ID NO: 29268 - DNA, 313 bp, Glycine max
  Clone ID: PAT_MRT3847_126429C.1
cacggatcgctgactgtggtagagcatgtgctaatagagttgctgcaatccgttgaccatgatagatgctacagcctatatataacgatgctggtcatagaacaactgcgtggctggacaaatagagaaaatcaaatggttcattggctacttcgcgaattcaggtgagtatgcgccgcgtaatgcaaaccagtgctgctgaggaccgtacacaagacacattagacgaaggttgtcgatctattgattaaacatgggagagcttacatgatgtccaggtgagggaccgcacataatgtgcaactctgacttg

SEQ ID NO: 29269 - DNA, 401 bp, Glycine max
  Clone ID: PAT_MRT3847_12642C.1
gagtgcttttttggctctctgtttcgcggtatgctgtttatgcctagggggggttgctcttgtagcaggcttttttgtaaaacggcattaattacggagtggatggcgagcaagcctagacttgtcggttttgatggaatacttgcgagcgttggatctatctactatgagccaaaaatactgaaggtagttatgactggaggaaaccaagtattaactgcttacatgcgaggacatagagtatgctttttattatcgaactatatcatcgagtggtgggtggttgtctgtgtgatggcatctactagaccactgaagtcacagaacccgcatgttgggaacgctcaggataccctagtttggtattagagtctattttttagttcaagatctatcttact

SEQ ID NO: 29270 - DNA, 219 bp, Glycine max
  Clone ID: PAT_MRT3847_126430C.1
cgcgctctcccttttttttttttttaccatctttttgccgagtatttattttattttaatctgagttgaatttcttttctgggatgccatcgaccatgatcgatccgattcattacgatttgttacacgcagctactcaggacgctattgacacaaacttatattctttttaaggcaaactcgattgtggaatagttgacaaggccaatgtttctgtgc

SEQ ID NO: 29271 - DNA, 522 bp, Glycine max
  Clone ID: PAT_MRT3847_126431C.1
aacttccaagtctttgatttatgaagtccgggatcagcaaatgtccattaaggatgagatatggaaacacaaaagcttaattgataacacgcctgtaatcctggccctttacaataagatcaccaaaaattgccagtgcctacattgaatgtactggcttttcttgttttgggtggttctataattttacgtacttcaaaaggtaaaagggtaccataaaatgaacctaatttggattgcaattgtagggcttgccatttcctatacggaaccatgtactgtcagatgactacaatcgtatgaatcaaagtgccggctaggacagaataggtaccatttcaaaccaatggctaaatccagcaaagcttctacttggcgaatgagtcgctgcttctcctgttgtttcaacctgtttgcaacagattcaggatcaaaccctggttgattatgtacttcactcttttgagaatgaacctcttgcagaaatccatccgcctttgttacaaaggccacccttaaaag

SEQ ID NO: 29272 - DNA, 415 bp, Glycine max
  unsure (1)..(415): unsure at all n locations
  Clone ID: PAT_MRT3847_126432C.1
tttttgggttttttgggtttttttttttttatttttttttttttttttttttttttttttttttttttttttaaaaaaaaagggcgggggggatataaatagggtgcatataacaaaaccagggggatataacttgggtgaaacaaaaagctanaaaaaaaggggggggggagggagagaaaatgaaaagcgttggggcatgcgtgatttaaggtcttttaaccggggcaaagggggaaaccccaataacgggtccaaaaatgggtggtaaaacaacccccccagcaaaaagggtgaggaaaaaggtctttaggggaggggagaacggatatccaggagcatgagccacctccgggaccaccataaatgcgtggacaaaagctggtggggagccgggaactggcttttcctttaa

SEQ ID NO: 29273 - DNA, 277 bp, Glycine max
  Clone ID: PAT_MRT3847_126433C.1
ataatggtcttatatttctctttttattgaccaagtgaaacaaaaggaagggtctaacccaaagggggccaccccctaaacccaaaaaaagaaaatgtacctacccccgctcttttaaactcaaatttagggccaagtaaaaaaaacccgcttttttgaaaggagacaaatactttgtttcacaagaccccccaccacatatgagaaaaaagacaaaaaacgcccgtcccttggggggtggggaaaaaagattacccagaagggggccaaacccaag

SEQ ID NO: 29274 - DNA, 181 bp, Glycine max
  Clone ID: PAT_MRT3847_126434C.1
gtcacactttctcagagacattgtgccaaaaacataggtgggcatgcgcaagcttgaggtgaagtgcgcctggccgtttgtcctactagtcataactgccgtcgacacgtgagccgtttccaaatctctctctatcatggtcgtgaacctgacaggtgcctccctaacaatatcataatac

SEQ ID NO: 29275 - DNA, 208 bp, Glycine max
  Clone ID: PAT_MRT3847_126435C.1
tgataaggattctttcctctttgatagctgccctcatgtgtcctctattgaaaatcaagatcaattctgtactcgtgacataaagggatcagaaggtcagatggtgagactcgtatgtgttactacattcaatgatacaggagttgctggtatgctaaatctgagggaccatgatcgatatgctctcagttgtgcaactcatatcagc

SEQ ID NO: 29276 - DNA, 318 bp, Glycine max
  Clone ID: PAT_MRT3847_126436C.1
agtttatcctaagtctttgggaatagggctgcaatggattcaagtcaggaggaggagacccttttgggagctactggaagcccattcgtgtgcaaggatcatattgccctcaagttgacgggagttcaatacatatatgtacaagaaaatttggggaacaagagagaactgcttgtcaaatacaacccatttcacaagagggctccagtgcttattcacaatgagacgcccataacatagactgtctggatagtctgatacattgatgagacaatggacaacaaccccattttgccttatgatgcttaccaaagagcc

SEQ ID NO: 29277 - DNA, 268 bp, Glycine max
  Clone ID: PAT_MRT3847_126437C.1
cacaatccagtgtatacgctttgctcaactcgagccataaagcgttcggttaactgcatggaccgtcggctcatattaagtcagaactcaatgcatggtgcagatgcattatccctggacccaactatcctagcactactgagagtactgtcatgtgtgtatattatatctacctcacaatgacaatgcttaaaattcatggttttgattaaaaaaaaactgcacatttcctgcaacaagaagactgaatgtagggctgaccatcaat

SEQ ID NO: 29278 - DNA, 402 bp, Glycine max
  Clone ID: PAT_MRT3847_126438C.1
ccccctgctttttcagactcagatcacgatacaacatataagaatcatgggtgcaggctcttaataggctgatcatcatggcagtctgatgctatacaacactcggagccagaaccagttggccaacatatgctcaaccacatgacatagcttcccccctttggtacatactccgaaccgggggattcttttttttgtctagtgaggaagtgtgtcacggtcgatacaagacaagcctaggttcacctagactttactatgagtggcgttagatctcacacctatataggccattcctttggggcaaatttcgaactgcagaatagcagttattctgggacaggagtacccaaaaaaaaactcacatgcctcccttgtacatttgcctatcttccaaatata

SEQ ID NO: 29279 - DNA, 300 bp, Glycine max
  Clone ID: PAT_MRT3847_126439C.1
gattcctaggatgatgcgtctatattacgcacgacggctttctgcttttcaaattatgtgtcgccccaatcctttatgcttctcttctcgccatatccattgagcgactttgccttgccgccactatgattgaatgtagacgacaaccgacatgacagtgcgtgcttgatgttcaagacactgttgcagggacttgaactttgctagaagctgggctataggcaagtgtagtgggattctaactgcgtcacacctgatgagcttgtgcacaaggaagtatcagtgcaacaccattttggc

SEQ ID NO: 29280 - DNA, 1090 bp, Glycine max
  Clone ID: PAT_MRT3847_12643C.1
atgatcttaccatatcatttcaagaccttaaagtaccaaacttccaactcttctctcttctctcttcactcttcactcttgtcgtcatttcctcacaaaaccagtgtccgtaacatctccaccttaacgatgtcggtaaaggagtgtcaccaccacaagggaaagaagcacaaactctggagacgcatcttctggggcatagtgatcttcgccttcatcgtgttgctaacagttcttataatctgggcaatcctaaagccttcaaagccaaccttcatcctccaagacgtgaccgtctacggcttcaacgccaccatccccaacttcctcacctcaagctttcaggtcacgctttcctcgcgcaaccccaacgacaaaatcggagtctactacgaccgtctcgacacctacgtcacttaccggaaccagcaggtcacgtaccgaacctcaatcccaccctcataccaaggtcacaaggaagaggatgtgtggtccccattcgtcttcggcactaacgtccccgtcgcacccttcaacttcgttggtctcagtcaagaccagaccaacggcaacgtcctcgtcctcgttaagattgacggtaaggtacgatggaaagttggtaccttcgtctctggtcactacaacctctatgtaaggtgccctgctttcataacttttggcccccaaagcaccgggattgcccttggcaagaacgccgttaagtatcaattggttcaacgctgcaccgtcggggtttgatgtaaccgccgtccaacatatattcattctgtctttgctctgctccttgctatatttagtgtctatctatatacggtcttttctcatttctttttttttatatacgtattcttgttatcttccactacgtatttcttctgtattgacggatcactttgttgttaggcatacgtgcgtgtctttgttacagcatttggaattgtacattttgctacagaataaactgcacttggaaaaaaaagtatgtaatagagatgaaagcgaaattacaatttgtaacaaagagccaattgaaataaattaaagcgttgtttcggtaaagatagaaaaa

SEQ ID NO: 29281 - DNA, 482 bp, Glycine max
  unsure (1)..(482): unsure at all n locations
  Clone ID: PAT_MRT3847_126440C.1
tgtctcgcgtccggttttctctctctatatccctgaagtcccgtccccccaataagaactaataagaaaaagcaaaaagtattcattggtgaaacttcatttccctgatgttcaaagtgtatctggtttcatcttttctgttggggcttctgctccttgctcaagcacatggaaatgataagaaaattgggttttatcaactcaagagaggagatttgcatctgaatttgacaaattatggtgcatcactcatatctgttattgtacctgataaacatgggaatttagatgacattacgcttggctacgatgacattgagcaatacaagaatgattcatggtacttcggagccactattngacgtgtggcaaatagaattggacacgctcagttcacattggatggccacacctataaattgcctgctaatgatcacgggaacaccctccaggtggtttaaagggttcagtgatgttgtatg

SEQ ID NO: 29282 - DNA, 765 bp, Glycine max
  Clone ID: PAT_MRT3847_126441C.1
caaactcgaaccttactttgcacctttgggttgaaagcctctttcaacctttttccagaactttgaattttttttattttaattttcgggtaaacacatataccatctcgtttccttgactcttcttccgttgtgaatggagagagaaggaaacgattgtgttgtgggggacacatctctcacagcttcaccttttgatggtgaagcttccattttgaggtccacccttttgttgtatcacgttggggaggtcaccctcaccttccactcagataggctgtcttggaaattggtcgaaccattggataatgatgtttcaacttgtttaggcattaaatatttttctaaggttgctactgggatcaaactttctgacatatatgctgttgagttaaatgatcatggttcaattcacatatcaagtctctctcctgctactgaatgtctatttttaggtcaagacataaagatgtacagctttactgtgcatggttttataagaagcaagacccaaccttctcaatgcatcctggttgaatatacttttggtcataaaaatttgccaagatgtcagatgtgggtaaatcaacttaatgcttccttgaaacatgaaattggaagaccaaagaatcttttggtttttgttatccaaggagtgggaaaggtaatgggtgtagaaccctggaagctgtggctcctatattctctcgtgctaaagttaaaacaaaggtgattgtgacagagagagctggagaggcatttgat

SEQ ID NO: 29283 - DNA, 1245 bp, Glycine max
  Clone ID: PAT_MRT3847_126442C.1
attcattcaaaatctatccattctttttttaattcccccccactataaatatgtatcctttcacaccaagctcttgccagacaactctgattctatgcctacgtcttcctccaaatcacaacacacccaattacaccctctgttctctgcaaatgcggtgaaggagaacacttggctttaatttggatctggatatggcgattgaagcacagttgtatcccaacaatgctcctccgtttccttttcacgtgtcaagggtagacaaatctccagcagcatatagtcatagtcacaggcaacaacaaccaggtggctggcagatgaatcagaacattcctcttgttcctcccaacttttcttgtttttccaattccaattccaattccaattccaatgtcctccaaaacgccttcaataagaatgttgttcagccttcagcctcatatcctcaatgcttggctattgagtttgatcaacagagggagattgatcaccatatcagatcacataacgaaaaattgaggattttgttgcaagagcaaaggaaacagcatgtggcagagttattgaagaaggtggaatcgaatgctcttcatttgttgagacagaaagatgaagaaatagcgcaagcgacaaagaaaagcaccgatttgaaagaatttatgacaaggttggaggtggagaaccaatcatggcgtaaggtagccgaggaaaacgaggctatggtattgtcccttcacaacaccttagaagatatgaaagaaagagctctgtatcgggtgacaaaaaaggatgcagagtcgtgttgcgatgaaaacatgagaaacagggcaatggaagaaggaacaggagaaaacagactgtccggtggtggtggcgctggtggggtagaagaggttgagcaaattaggaaaaggacaatggattgcaaatgttgtaattctcaaaattcgtgctttatgtttcttccttgcagacacctctgttcgtgtaaaacttgtgagccttttctgcaagtttgccctgtttgtagtatgcctaaaaagtctagcatagagacattaattgtataggctgaatgatctcttcaatatgacatcattttaatttttatacaaaaaattgcttaattgtcagtattaagatttccagtcagttgttatcaattttgtgtgttccaatacatgatttggtatcattgcaaaaaatgcactaatgcagataaactgttaattttggataccc

SEQ ID NO: 29284 - DNA, 172 bp, Glycine max
  Clone ID: PAT_MRT3847_126443C.1
ttttggaatagtagatttggaatgaacacatcaatataagatactgtcaacactttcttgctcccgttcttggtgtaaacactgttgagtaatttgttctgtaattaatttataccaaacaagctttctcttcacattgatgacatcacaagaatgtgattttcctttccca

SEQ ID NO: 29285 - DNA, 496 bp, Glycine max
  Clone ID: PAT_MRT3847_126444C.1
aaaatccatactgatattcaagactcaataatatggcaggtgggaggaagaaagggggattctgcatgattcaacctacaataatgttgccaatgcttgatttttctcttggtacatcataaagcaagcttttttgacatcctataattgcaatacttgccttattgagattatagctggaccccccaagagaaataatgtaaactatccaggaagtcccagcaaatgtgagctaaattaatgggttcctaagcaattattgtgaacaatatccatatgcatgaaaaatagtgcattgattacagacagaaagttctataattcaagaggatcatggcagaagtttgtacttatctgtggtcttttgctgcttactgaagacaatatgttgttctgattgaaatctctattcaagagaatgcaacgttcccttctgaaaatggcggaaatcatgtcaatgaatgagattaaataaaagtggttcatgcttgattgg

SEQ ID NO: 29286 - DNA, 366 bp, Glycine max
  Clone ID: PAT_MRT3847_126445C.1
ctcgagccgcgaaaccgaagaattagaaccgttgtttgtttacagccgggttcagcctctgaacccaatcaacctggatgttgatcttgatgattacgaggatgtgatttgcgttgttggtaaaaagaggaagatttccaaggctgttgggattgagaagactattgggaaaggagtaccagtggtggacattgaggatgttgattggtaacctcctccaccaaaaatcgcaggtattgcacaaaaaacgattgacgaggatccaactttgaaaaattggaaattaaagaaccgggaccttgcttcgtttgccgattcagcaaaggattggttaaaagatgtcgaagaggtctcaaaattggaaat

SEQ ID NO: 29287 - DNA, 212 bp, Glycine max
  Clone ID: PAT_MRT3847_126446C.1
tcgcccacgcgtgcgcacacgcgtccgaacagcatcctcagaagcgacggaaccctccaacaacagcacttccgttgcgagaaatgtctctggcggctaacgaggatttacagctcattctgcgtgtgctgaataccaacgtgtatgtgaagcagaatatactgatcgcaatgacctccatcatgggtgtagaaaggagactcgacaacatc

SEQ ID NO: 29288 - DNA, 512 bp, Glycine max
  Clone ID: PAT_MRT3847_126447C.1
aagacatcactatcttcttctcaacacacttgattcagtattctacactatcagagctcaatcacgggtcctcttttgaggggatcaaacacttaaactacacacaccttgcagatatacccaactacgcacttatcaaatacaacaagcgttctatggccaagctcacccttgtcaaagtctacaagggctatactcaagtcttttcctgcaccaactaccatcttatactcaaagccaagtattgatcccccacagccagttacaaatccatagtctgggacaagcctttcgtccatttcataaatctcacttccttcaaaccccttcattaatcttagaaccatacttttcttcactttctctcttatcatacttcatgggctagctattctgtttttctaaaaagattcctggcattttctaattaatctcaaattatatcttagaattatcaatttcctcatattatcttaactctaaggttttcttctagaaaaatttcatttttt

SEQ ID NO: 29289 - DNA, 611 bp, Glycine max
  Clone ID: PAT_MRT3847_126448C.1
cggcgctaccaatggacttcccattagcattcgcaagcaacttccctcttctctcttctccttcttctgctccagctccctctgctacctgtaatttcatgttcatgccatgcctaggttcatttcactttcggtacacatttagtctcttggcgccaccataagaggctgaggagttgtgtaccattcccttcttgttgggtccactcgtccaagtcccattaacttggatgttgaaccacctgattccaatacgagttaacatataactcgtactagacctaaaaagtggagacattatactttcttcgaggcatgaccttgtggcgacagaaacaattataatattccttgcatcactcacccaatttgaatttcaattttcaactcgtagggtcaccaaaaggatacacctcactcgcactctctgaaacccggtctttacctcgttggaacaccaatcggaaatctcgaagatatcactctgagggctattcgcgtgctgaactcggctgacgtcatactctcagaggacacgaggcactcggggaaagtgcttcatcactatcacatcaaaacaccccttatgagttatcacaagttcaatgaat

SEQ ID NO: 29290 - DNA, 229 bp, Glycine max
  Clone ID: PAT_MRT3847_126449C.1
tgctaacttaagcacaccatataaaaatacttttcatgtgcactataggcctgttgcgaatcacctctgggctgttgtttgtcatacatttcgaccattctctaatacatctcacatccgtcaaatgctccaagatgttactctgacgaactcaatatatgcccgtgtgcattctgtgcttggtagaattcataatacgtcaaagactgtccaaacttttgcagcagaa

SEQ ID NO: 29291 - DNA, 420 bp, Glycine max
  Clone ID: PAT_MRT3847_12644C.1
tttgttctttttttttttttttttgaaacaaagcaacacaacacaatagcttattcattagttctcatccattaattaccattgaagtccgaacacagaaaccaaaaatacaggatgatgaaatctcaaaaggccaaacctaagggggaatgtagtctaagtacaaacaaacaaagtggggtggcggctacaaatgctttgcaaatttttcacacttagaagcctgggggcttgtaagcgatgaagctgatgcactgcacttggcgaacgttgtcgaatccgatgatacggatgaagtcgccggggtatgcagtctgagactcttgaagctacttcaataactgagaagcgtccatgcatccaagcataggcaggatccacatggtccaggggcgtccatcggaagatcctggcgacctg

SEQ ID NO: 29292 - DNA, 1060 bp, Glycine max
  Clone ID: PAT_MRT3847_126450C.1
cttctttcggggccgcccctgggttactactcgcccgcgggctacaaccacaaggatagccatatcgtactttacattgtgcactctaattcccttgttttgtttacccacatttgtgagactatattatattggagcatatatcatgggtctgaagtttacacatggagtggtgatattaattgttataagtgcttcaatgttttcagtgagcatggccaacaaggattggtcctttggtttcaactacactgattggtggtctagatttgggaatcatcctcaaaacaaaacacagcaacaacccaggcaaattctcgtgggtggctcagagcattggcactacggtttcaactacaccgattgggccttcaagactgccccattttacctcaatgatactctagttttcaaatatgatgctccaaatgccaccagtttcccacacagtgtgtacatgttcaaaagttttgggagcttcttgaagtgtgacattaaaaaggctaagatgctagcaaatcccacacaaggttcgggagagggcttcaagtttgtgttgaagaagtggcagcctcactactttgcctgtggtgagagaaatggcttccattgcaacaacggtaccatgaagttcgctgtgatgccaatgtttcgtcccttctggaagtggccttgagaaagttgcgccgttgcagcttcttatattttgtttttcttatatgtatgccttaagattctgttggcaattcagatttttttaagctgttataataaaatattttaatgactctgtacttttttgttttgcttgtaagtttggtaactttggttaacgtttgtttgtgctcagaaaagcaagttatagctggaggctaatatggtgctctctttttagcatagccataatttgctgtttgctttgttcaattaaaggttttatagctttttctattatttaagatcttactataataatttagagtgtgcaaaagctgtgttacaaatatcaaatacaacagatgtcattatatgttgtcaaatttaattgcagagttgatat

SEQ ID NO: 29293 - DNA, 896 bp, Glycine max
  Clone ID: PAT_MRT3847_126451C.1
tacggtgcgagaagacgacagaagggggaccgacacaacaacaaccaaatcatactttacatttgcgcatctcttatttaaccacacacctgtgagagtatataggaacatataccattactatggctctgaagttaggacatggcgtgatgatactagttattataagtgcttcaatgttttcagtgagcatggccaacaaggattggtcctttggtttcaactacactgattggtggtctagattcggaaatcatcctcagaacaaaacacagcaacaacccaagcaaattgtcgtgggtggttctgagcattggcactacggattcaactacaccgattgggcattcaagagtgccccattttacctcaatgatactctagttttcaaatatgatgctccaaatgccaccagtttcccacacagtgtgtacatgttcaaaagttttgggagctttgaagtgtgacattgaaaaggctaaaatgctagcaaatcccatgcaaggtacaggagagggcttcaagtttgtgttgaagaggtggaagcctcactactttgcctgtggtgagcgaaacggcttccattgcaacaacgacaccatgaagttcgctgtgatgccaatgattcgtcccttctggcagtggccttgagaaaattgcacccaccctcttacagcttgttaaatttttgtttttcttatgttttgtctgaagattttggcaaataaagctgtagtttcagattgattgattttgatcaatttaatgatactactttttagtgttgtaaagcaattaatctaatatattgatgaaagctcataaggagaacaagcacgttgaggttgcagcttgttttttttttaccctaaaaaaaaaaaaaaaagattaccccc

SEQ ID NO: 29294 - DNA, 357 bp, Glycine max
  Clone ID: PAT_MRT3847_126452C.1
gggtcttatcatatatctttatttttatttaaaattaaaacatattgtaatttaaggggagagatctgcaacctttgcggcagaccccaccctgcattaatacacctttctttctctttccttacagatctacattacataacaccacatacacttccttgctgcttatgctaactgtacgcctccctgacatttatatatgcatatatatccctcatctatatacaccccatataaatataatggataagggctacaccaacaagcatataaatccatggacacggaccaccacaaaaactaagaaaaatctataatacttattcaagaaaaaacaataaaaatgatccaaggaaa

SEQ ID NO: 29295 - DNA, 255 bp, Glycine max
  Clone ID: PAT_MRT3847_126453C.1
tctcgagccgaatcggctcgagataatgtccctcacacgataaaatacaggtgaaaagctcatacgcgcgggagagagaagagactaagaacgtgtaattggggtacgggataggtgctcaagttcaactacggatttatggtcaacttaattacaccagtgaatactgaatagccaaggagattgatcagattcataaagacatgatgatcgcaaactgtactataatttctcagcatctacccaataatatat

SEQ ID NO: 29296 - DNA, 658 bp, Glycine max
  unsure (1)..(658): unsure at all n locations
  Clone ID: PAT_MRT3847_126454C.1
gggagtaaaattccctttctaagtatttaatgtaattgctcactgaactagagaccactatttaaggaggctagggctttgttggggaggcttgaataccagagagggaacttcgatgctgcacttcaagtatttcagggtatagacatcaagggtttggccccaagaatgatcaaggctattgccgaaagaaccaagcaaagaaaaccgcgttccaaggcagatatcatggttccgaatgtgatgtcattgcgttcggttagcctgcttcttgaggcaattttgcttaaagcaagatcgttggaggaacttgggcaatgcattgaggctgcaaaggagtgcagaataattctggatacggttgaatctgcccttcctaatggaatgcctgagggtattggtgaagattgtaagttgcaagagatgtttcataaagcattggagttgcttccaagtctatggatcaaggcaggtttgctagatgaagctgtcactgcttatcggcgggctctagtcaagccttggaatttggagccgcagaggttggcctgtgtacaaaaagatttagctaccacactactctatnggaggtgtntgaagtaaacctactccctcagttgcaagtgaatggtataacaacacctatgagcggcactga

SEQ ID NO: 29297 - DNA, 362 bp, Glycine max
  Clone ID: PAT_MRT3847_126455C.1
ggggaaggggggacagaacacatttctaactacagatacagcccgcaagaccattatactgggcatgggacactttgtcttttacaagaaattgccaatccaatattctttccttgctgaaaagaaaacaaaattccttaggaagaaaataatttgtccaacacataaaccgtatggggaaaagcttaaattccaaaaccaaacgcgggcccgttcctttggaaaatgagatcccgccgtcccctttttgtgtcctccaccacgggggccttaccatatttgattccttcaaggacatgactatgggggagcttaacaacagggactgctttttcagggggctcaaacacgggccctaccat

SEQ ID NO: 29298 - DNA, 182 bp, Glycine max
  Clone ID: PAT_MRT3847_126456C.1
gtaaagttataggatgcgtgcaccgtcctgtttctagttgcaagagagacattggtttttatggtccattaagaagggctttgaggactgctcttaatagcataattcagaggaagatgagaaacagaaatggagttgatgtaattgtgagaacatactcgccttctcattttgaaggtgct

SEQ ID NO: 29299 - DNA, 222 bp, Glycine max
  Clone ID: PAT_MRT3847_126457C.1
acaaaattacggaccaactggaatcagaactggaacaagattaagcttctccacagtcttgaagaacttgggtcgacatggccccgattgcaacccatggtcgaattaatcaaactggtccaaagagggctatcattttattcttgtaaccaaacccgctttgccaatggattagatactttactaccaaactccagggttcaacaaaacttattcccaatt

SEQ ID NO: 29300 - DNA, 278 bp, Glycine max
  Clone ID: PAT_MRT3847_126458C.1
gaagaaatgaaggtggtggctatatgtgcattgcaaaactttgtcatgaacagcaggaccaatagacgagctgttgcagaagctgggggcatactggtgattcaggaattgcttttgtctccaaacacagaattgctgcacaagccgctttactgatcaaatttttgttttctacccatacattgcaagaatatgtgtcaaatgagttgatcaggtctttgacagctgcactggaaagagagttatggtcaaccgccacaatcaatgaggaggttttg

SEQ ID NO: 29301 - DNA, 1714 bp, Glycine max
  Clone ID: PAT_MRT3847_126459C.1
ccacgcgtccgattagacaagctggttcccagaaatcaaatcaaatcatggcgtggacttcagaacatccttcactctttctcctactcctgtctctgtctctccccctcttcctcttcctcctccgccgccgcaacagcaaaacctcatcctcaaaccatcgtcttccgccgggaccaccgggctggccagtcttcggaaacatgttccagctcggagacatgcctcaccgcaccctcaccaatctaagggacaagttcggccccgtggtgtggctcaaaatcggcgccatgaacaccatggcgattctctccgccgaagccgccaccgtgttcttcaagcaccacgaccacgccttcgcggaccgaaccataaccgaaatcatgcgtgtccacaactacgacaagtcatccctggccctcgccccttatggcccttactggcgcctcatgcggcgcctcgtgaccgtggacatgctcgttccaaaacgcataaacgacaccgcatccatccgtcggaaatgcgtaaacgacatgatcaactgggtggcgaaagaagcgagcaagtcagaacatggtcgtggggtccacgtgtcgcgttttgttttcctgatgacgtttaacttgttcgggaacctgatgctgtcacgggacttgtttgacccggaatccgaagacgggtcggagtttttcagcgcgatgatggggctgatggagtggacggggcacgctaacgtgaccgacctgtttccgtggctgagttggctggatccgcagggactgaggaggaagatggacagggacatggggaaggcgctgggaatcgcgtccaggttcgtgaaacagcgtttggaacagcagctgcaccgtggcaccaacaagtcaagggacttcttggatgtcttgattgactttcaaagcaccaacagtcaagaagcactcaacgtttcagataaagatctcaacattttcatattggaaatgttcttggctgggtcagaaacaacgagcagcacaatagagtgggccatgacggagcttctgtgcaaccgggagtgtctgttgaaggtgaaaagggagctgagttgggtggttgggtgcggaagaaaagttgaagagagcgacatagacaagcttccgtacctgcaaggtgtggttaaggaaacacttcgcttacatcctccgattccgttgcttgtccctcgcaaggccacggaggacacagagttcatgggatattacatacccaaagacacgcaggttttcgtgaacgcgtgggcgattgggagagaccccagcgcctgggatgaaccattggtcttcaagcccgagcgattttctgagaataataatattgattacaaggggcaccacttcgagtttattccgttcggggctggaagaagaatgtgtgcgggtgtgcctttggcgcatagagtgcttcacttggtgctgggatcattgcttcaccgtttcgattgggaacttgactgccacgtcacgccctccaccatggacatgagggacaagctcggcataaccatgcgaaagtttcagcccttgctcgccgtcccaaaattaattgtctcttcctcctgaattcttttttcaattcaaacctatggatcaatttgtttttttacaacccaaattgtcaccacttttgttgaaataaaataaatatttcctccgtggcagggagtcttgggaaaaaa

SEQ ID NO: 29302 - DNA, 324 bp, Glycine max
  unsure (1)..(324): unsure at all n locations
  Clone ID: PAT_MRT3847_12645C.1
tnaatgcacgtgtacgtaagctcggaattcggctcgaggagcgtgaaaaggttagggtttggatttaggggggtgtctcttcttttcgttctctaatgcctagtgagtgactattctggacgtagagagtccacggtagctcgtgctgtccttctgcagggccaggaaggggtcctcaggtgcttttcagagcttgagacccagcgacccccgcccaggaggctttctccttcaccatggccgaactgatccaaaagaagctgcagggagaggtagagaaatatcaacagctgcagaaggacttgagtaaatccatgtcaggga

SEQ ID NO: 29303 - DNA, 491 bp, Glycine max
  Clone ID: PAT_MRT3847_126460C.1
gcaccagaagtagagaaaggtatatggcctgaagactactccctttctgatcatgcacggctcactgttgtatttttgccgataagaatgccatgctcccagttgatttgctaacaatgcttttggcctctctagcataggttttagaattaagacttatgtacatatatttcactataagaatgggtgaagcagtggaacgagtaatgaaagatgcaacaagagttcttttctggggggtgattttaaggagccggagccctgtgttgtgattactgtactgcaacatcacacttgacaaggtaagcaagcataagcatactaaagaggacaatttgaattcagttacctctatggtatccctagcattgctgatgatgacatttgcagtgagcaacactagtcacccagttggttttccccattaattattctctagtggaagattagacaaaaggaagcaaaataagaatgatctgtatagttgtgta

SEQ ID NO: 29304 - DNA, 601 bp, Glycine max
  Clone ID: PAT_MRT3847_126461C.1
aaaaaataacttcggttttgaacttatataacaaaaactagatcttacaaggcaagacaacatatcatttatcatgggttggtcctgaacctatcaaaatctctgagagcttaatcaaggaatcaatttcaacagatcttagacaagaaaaaaaatgttgtgagtacctaaacaaaaataagagaaatttatgatatcataaatttaagggttttggattggtacttctattgagaaactttctctccctctccctctatagaccctaaaaaaaccaaaattcacggatttctctgtctacatagcaaactctccataaataaaaccaaacgcttaatgcaatttgaaaactacattaaaacaatagtactaaatactcctacaagcatttaaactaggagaaatgattacagggtggataaggttggttgaattaccaatcaagagcagtaatgacaaccccagcccaaaggggcacaaccccatgactaagaatcctgattgcaatagcgctcccaataacctcctgaatatcggagccaatgagagcgagttccgccatgatccatagcactatccgggcccacgagagatactcctc

SEQ ID NO: 29305 - DNA, 655 bp, Glycine max
  Clone ID: PAT_MRT3847_126462C.1
ccacgcgtccgcggacgcgtgggcggacgcgtgggctacaatttccgtccttccaatcatcccgtgttctggtcaacttttctcttttctcccttctcccccatttgttcattctccgacaccgcacagcgaccaaatccaccattcattcttttttccctttttgcaacagcgcaatggcacgaagatccctccctctcctaaagcacctcctcctctcgcggcggatcccggcccgatccgtgacgtacatgcaccggccgggcgacgggtctcctcggcctgtgacgctgatccctggcgacgggatcgggccgatggtgacgggcgcggtggagcaggtcatggaggccatgcatgcgcccgtctactttgagaagttcgaggtccacggccacatgaaggccgtgccgccggaggtcctcgattcgattcggaagaacaaggtctgtctcaagggtggactcgtcacccccatgggcggtggcgtcagttccctcaatgttcagcttcggaaggagcttgatctctatgcttctcttgtaattgtttaacctccctggccttcccacgcgccatgataatgttgatatttgtgtcatcaggggagacacccgaagcgagtccttcggcctcgaacacgaggtcgttcccg

SEQ ID NO: 29306 - DNA, 311 bp, Glycine max
  unsure (1)..(311): unsure at all n locations
  Clone ID: PAT_MRT3847_126463C.1
aaacccacacaccattgggtggtgtgtttaaacgggcaaggcatcaaacanatacaccatatgaactgctagaaatattaaggggtccatgttttctcagacaagaaggttggatggtcatatgaattctgctatcaaaagaagctgaggcaactacatctggacgatgataaggctgaccaaaagtttgtcttggtagtgtatgacccggaggctactactgcttttaactaaaatctgagcgtcatgtctacatagaatgatcctcgatccaaagatgctattcataggtattacgctcaataatatac

SEQ ID NO: 29307 - DNA, 275 bp, Glycine max
  Clone ID: PAT_MRT3847_126464C.1
gcccttgccagattcacccagggtgaagccttcaaagctttttgctaccaaagcccactcaccctttgagctacagatcactttgctaggagatactcttctgcctcctagacctgttctttccatctttagaaacatcagtttttgtatggaagccaccgggagatttctggatggtggtgcatccgtgaatgcgctgatcgtttcttccagttagagtcttcatctgtccgacaagttcactcgcctcggttgcggacctaggaccatttctc

SEQ ID NO: 29308 - DNA, 167 bp, Glycine max
  Clone ID: PAT_MRT3847_126465C.1
acagggaagaaaattttcccccaggcagagagcagcgacaccaccggaaacgccaaggacaagagacaagacaaggaaggcatccccccggagaagcagcgaacgaagagcgccggaaagcagcgagaacacggaaggaccccggacgaaaacaacacccagaagga

SEQ ID NO: 29309 - DNA, 553 bp, Glycine max
  Clone ID: PAT_MRT3847_126466C.1
ccaagggaatggaaaaaaaccttttttgaattaaaatcgttgttgaaattcaaagcctccaaaaaaaaactgacttttgttcccataatacaaaggaattttcttttgttcccataactaaaactttgaaaaaaaaacaggaggaccgaggatgataaaggatagtttttcacatatccagcctttaaggccccctttttttttttttaaacatcattttatccttggcctttttaaagccggcatgagtcaccttctttcggggttctcgaaaagcaagaaaaccggtttcagaacatattgcctttatatcacctccaaaaaattcatttttagtcataacaaatttttccaagttgacatcatcagctaaggccatcctcgaggggggtatctaaaaaatgcgtctccttgttttgatatcaggaaaaggaaattttattttcctgtcaattcaaccagcccgtaccaaagctggatcaaaactttcaatttgtgtgggttgccaaaatcacttttacatctcctctaaaacaaaaccatttaactggtt

SEQ ID NO: 29310 - DNA, 1740 bp, Glycine max
  Clone ID: PAT_MRT3847_126467C.1
ggctcgagatcatccccgtattataaacccaggattgcctcttcttccaggaaccccctcaacaaaaggaaactctcattcaccttcttctctctccctcactccctctctttcttaatacaccaccttcccaaccctcttccattctccttctccaactccaacccctgcttcccttttttcattttctcactccccatcttctgagagtgatgggtgtttgctaccgctgttcccacacctcccacatcaccgccatcatcatcaccagcttcttccgccacaagccttagaattatactattcccaccctccctctttcttcaacaacaaccgttgacttcactacagtcacgtggtctttctctgaggatccaaccatggcggctggaactgtcttctgcgctgctgctactgctgcttctaatttgacaacaaccacttttcttcacaaccaaacacctccttccacctcctctcagcctcctctcgattctcttttcctctctgcctcttcccctttcctcggttcaagatctatagtgagttttggagatgttcaaggagggaaggggtgcaatgattcattcttccgcccctatgatgagaatggggatgaggacatggacgagtacttccaccagcctgagaagaagcgcaggctctccgtggagcaagtgaagtttcttgagaagagctttgatgaggagaacaagctcgagcccgagaggaagatttggctagccaaggaactcggcttgcagcctaggcaggtggcgatttggtttcagaaccgccgcgcgcgctggaagaccaagcagatggaaaaggactatgattccctgcaggctagttacaatgatctcaaggctaactatgacaaccttctcagggaaaaggataaactcaaagctgaggtggcaaggctcactgagaaggtgcttggaagagagaaaaatgagagtcacttggaacaggctgaaaccaacggattgcaggagccgctgcacaagtctttggttgattcagcttctgagggtgaagggtccaaagtgacctttgaggcttgtaaacaggaggacattagctcagccaagagtgacatatttgattcatcagaaagcccacaatacactgatggagttcactctgcacttctagagactggtgattcttcttatgtgttcgaacctgatcgatctgatgtgtctcaggatgaagaagataacttgagcaagacccttctgcctcattacatttttcccaagcttgaagatgttgattactccgacccacctcatggttcatgtaattttggaattccggaggaagatcaagccatttggtcttggccttactgaattttctctatagcatatagagcatgtctctaccttctactctcaagttcttctgtttaaacttgagatcatgtggtagaaaagggtgagttaataataagccaaagaaaaaatggcactctactggtttgttcccaatggtggtttcttgccagctttttttttttttttttttactttgcaatgtaacttttggttcaaatgtaaataaataatatcttcttgttgaggatgtagctctgaatatcacttcaaggatgaatttacatagcaaattagatgagaaaaatgggaagataaaaaaaggttatgttttcaaaaaaaaaaaaaaaaaaaaaaaaaaaaaaaaaaaaaaaaaaaaaaaaaaaaaaaaaaaatt

SEQ ID NO: 29311 - DNA, 692 bp, Glycine max
  Clone ID: PAT_MRT3847_126468C.1
cactttacattgaatgtttcacacatttagggatctgaattgtaagtttaggtcaaagatggaacttgacctaaacagtaagcataattgttatgaacacagattggtaataaaagaacctccatagaattatggagtggaaagagaaaattagtttaaatacaacctgtattccttaaatattcagcccttagatgtgacggcttggcttcaaagcccatttagcccttctgcgaaagcaacatgtttatttattccggcggccttcacattgtcccccttttttgtttagttagtttccattgcatcaataacaattttactccttcttgcaaggtagctctttttccctcttcgtaattccataattcagaggttatataccgcccacttggattatatgtatttatctctgtcaaagctgtcaccacagctttgtagactccttcacccatctcatttttcagtcccttcaacttttcatcttcatcatctatgatttcctgatgtttcccttcaattatggtaattttaaatggatgccagtctgggtcccttatatactcttcccacaacgaacacagttctgaagctctatcttctgcatcctcattattatattttatcttcatagcttcaaggaatggtctaatatcaagctcccccattctcttcacaccaacattagcacg

SEQ ID NO: 29312 - DNA, 344 bp, Glycine max
  Clone ID: PAT_MRT3847_126469C.1
tacggctgcgagaagcgacagaaggggatgcgtcaagctagtgacgttaaagaagcgcttactggaagacaacccagcttttctttccctcctctatcttcatttttatttcttgcatgtagttaggacatcttgcttgtgattgtgatttatttcaacttgtttagtaatgaacaaaaagggattttaaattatgtgtgaagagataagtagaaaatgacttagaaaaattttccgattgcttatccgctaagtgcaaaccttgcgctaagcgccatctcttcacgtgctaagtcgagcttgctcgcgctaagcgcaaagacccctgattgattggctgaatg

SEQ ID NO: 29313 - DNA, 425 bp, Glycine max
  Clone ID: PAT_MRT3847_12646C.1
gtcgccctgcgtccgaaaaaaaaaaaaaaaaaggaagggttaaaatttgaaaaacaaagcgggggcagaccacacgagggaggagaacaaataggcccggttgtgccccgcgggggcgcgtcttgcgccaggcaagcgtagtccggggggggggcgccttctggggcccgccgttgggtcgccgggggggggggggccctctctttgtttcgggcgactcctccttcccccccggggcggtgtcttttgctgggggggggggggaaacccttggtccccccgcctttactgcctgggggggggcccgcctcgccggggggggcgtttatttctggggggcttcgcggccggtcctcgcgtaggggtgggtccttggggggtgggggcccccccccccccgggcctttctcccggggggggggggg

SEQ ID NO: 29314 - DNA, 346 bp, Glycine max
  unsure (1)..(346): unsure at all n locations
  Clone ID: PAT_MRT3847_126470C.1
attttttttgttatatattgaatcatatatatttttagaataattgtaccgtcgtataggatacatatcatatattggtgcatatttgcactctctggttgtgttgtatgttttgaaaatcaatgcccgcaaaatggaatgctgaagtcacactttttcatgttctgtangggggtatactgaaaaaattaaggacatatgtaggttaaaggagaaggagagatttttttaatagctagaaactttaaacaatttttggaggctgatatttccttcttcagcatgttaataaacgttggtgatcttgcacatgatttcagtctgcaggctgtttagtgaggcttgt

SEQ ID NO: 29315 - DNA, 404 bp, Glycine max
  Clone ID: PAT_MRT3847_126471C.1
ggctcgagatgttattgctcttattgtttaggaaaaagacaatgatctgttggcattgcctgcaattgcatatagaaacaacaggaatgatgctacagatggatactctgtaccaccacctgtgattgtagagacatatactgaagatcagactcttggtggaaatagatgctggggactgtttcctaatgatgatgattttgggatggaaccaatatggccattgactgacggaagcaaagctggtccgggcttccagttattgggctccgaggcagaagtgacctgacgcattggaccatctgcaggatgactctatgaattgctcgtagtaactaaatggctatgcattggccacagatactgatatgggatctggcggggtcttgcaagagacctttgct

SEQ ID NO: 29316 - DNA, 498 bp, Glycine max
  Clone ID: PAT_MRT3847_126472C.1
atacctacgctttcgctgaagaatgctgctgaagcttttttgttttttttttttgttttgtttatttttttttttttgttttttctccttttttttgttttaaaaaaaaaacctggcttttataaaaaatgtgggggcgaggcaataaatttcccctgggtccctaacaaccagtggaaagtcgaatcttattaagagcgaaccctaaaaaaaaagcgacgctccaagaaaaaacccaaaattttccccccaagtttttttttccaggcctttttttaatccaaaaaccccccgaggggtgtaaaaaaaatttacccaaacttttttgagcggacccttggggggccccctgggcggaccccggggccgccccctgggcgaccccgggggtccccccggaaattccggcccggcccccggggggggcccaattttcccttttaggggggcaataaaaactgggcccaacccggggaattacatgtcccccgggggaaa

SEQ ID NO: 29317 - DNA, 237 bp, Glycine max
  Clone ID: PAT_MRT3847_126473C.1
gctagctattctttggcaaagcagcaatggctttagtaggtgaacaaaagcattcactcatggtgaagaaaggtccatgttcgcattgtggagttactcatactccactttggcatgatggaccaactgagaaaccagtgttgtgtagcgattgtggatcacaatacaagttaaaaggaaatttagacaattattttcccaagaatcccgttgttcagtcattccacaataagttta

SEQ ID NO: 29318 - DNA, 348 bp, Glycine max
  Clone ID: PAT_MRT3847_126474C.1
cggctcgaggaaaatgtgagttcaaagagtagtcttgtttcatacttgacagctgctttaattgggattgttttggggaacatggcatgtgtgaccaccaagagcactagtccacccagaaagtgcttgtttccttggctagctgggggcttctctatgagtgtaacatggacctacatcattgctgaggaattggtttccctcttggttgcaattgggagtgtcataggggttagtccttcaatccttggactaactgtcctggcttggggtaattctctaggggatttgatagccaatggtgcaatggccaaaaatggtggagctgatggggcccaaatagctgtc

SEQ ID NO: 29319 - DNA, 1775 bp, Glycine max
  Clone ID: PAT_MRT3847_126475C.1
gtagtggtttccgtgaaagtctggaccaactaatacagtcatatgtggaaaggctgggcggacgcgtgggttttgaagccatagactgtgatctgtgatatggaaattgggaactcgtgttatgtaaagatgtgatgtggtgtggctagtgtgaaccgtttgcttgcttcgtgtatgtacattctctccggaggcaccgtcgtgagcttttctctctggtaggtccgtgttgctgaaacctttttgacctttccaataaagcatttgtttcaccctatcaatgagaggaaccattggaataaggattccaaaccccaatatttccaatgccaccagaaaaaccctagttccattttctacatcttccggttttggtggtggcggacgtggtcgtggtcgtggagggtctcttcctggttcagggctgttcaataacaatgaaagagctccagttgagcctaattccagtgagtccaaatctgacacaacagagccacccattcctcctggttctggtcttggccatggccgtggcaagccaatgcctccatcaggtcttccttctttctcatcatttatatcttccataaatcagccacctgctggtcgtggccgaggtactgcacctcatcctcaacatgatttgcagccaccagactctggacccaaaaaacccattttcttcaaaagagaggatagtgtttctccaacagcgtcaaatgattttttgccacccaaaagatctgttgatcatgcgcatgataacaaacttccaggcagcataccaggggtgttgtctggacttggacgaggaaagtggaaagtccatgaaacaaccagatctggaaacacaagttacagaagaaaaaggcatcttcgcactcggcaagctcctggtgctgcttcatctgagactgtgcccaagagatcgccaataccaagccaggaagatgcaacgaggaatgcactgaaaattttgtcacatggtaaggatgatggaagtgatactggtagaggaagagaatatggagggagaggtgggttggatcgaggcaggggcagaggcagaggcaggggaagaggtcgaggcatgggaaggggaaggttcgtagagagggatgtggatgagaaggttatggatacagatgattatgctacagggctatatgcaggagatgatgcagatggtgaaaaattagccagaaaggttgggcctgagattatgaatcagttgactgaaggatttgaggagatgactagtagagttttaccatcgccattagaggacgagtttttggatgcactagacatcaattatgcaattgaatttgagccagaatatttggtggagtttgataatccagatattgatgagaaggaaccaattccactacgggatgcacttgagaaggcgaaaccattcttgatgtcatatgaggggattcaaagtcaggaagtgtgggagaaaacaatggaagagacaatggcgcgagttccattgttgaaaaagattgttgatcactacagtggacctgatagggtaactacaaagaagcgacaagaagaattagacagagttgctaaaactcttcctgaaagtgcaccatcttcagtagaacaatttactaatcgttctgttatttctcttcaggtttggaactgtaaatattgatattgtgttgggcataaaatgtcttttacttgggcagttgtttccctcttgtgttgataatctttttataagtatctctgccaatgatgttctattgattgct

SEQ ID NO: 29320 - DNA, 704 bp, Glycine max
  Clone ID: PAT_MRT3847_126476C.1
ggcagagatacttataaaaagattatcaacacaagagggaaacaactgcccaagtaaaagacattttatgcccaacacaatatcaatatttacagttccaaacctgaagagaaataacagaacgattagtaaattgttctactgaagatggtgcactttcaggaagagttttagcaactctgtctaattcttcttgtcgcttctttgtagttaccctatcaggtccactgtagtgatcaacaatctttttcaacaatggaactcgcgccattgtctcttccattgttttctagtaggttataaagttaaaaaaatattagagaaagcatatcccaacacaaggacacattgataaagtagagaacaacatgaaaacaaaagcctttacccactaggacccataaaatagacaacaatttcaaaacaaatacagtgagtaatacaacacttgcctaaatgtacttgttacacaggtttgatatgacaaagatattggcaatcaatccataagattattggcgaagatagtgatgaagaaaatgaaacattagtaacgaaactcctgcccaaaaacctcccacacttcctgactttgaatcccctcatatgacatcaagaatggtttcgccttctcaagtgcatcccgtagtggaattgggtccttctcatcaatatctggattatcaaactccaccaaatattct

SEQ ID NO: 29321 - DNA, 725 bp, Glycine max
  Clone ID: PAT_MRT3847_126477C.1
cgtacggctgcgagaagacgacagaaggggaccgatcctgcgtttcatctcatatactactaacaccctcagaaccgttccccacttgcttttcaattttctttttttgcccttttcgccgccctcaaagagttcaaggatttatacaattaatagttttttaatttggaatggctggaatttgctgtggagttgttggagaatccggagagacttcttcctcttcaatcgaacccacctcgcgcccctccgctcgccggagtttggaccttttgcctttgagatacatagctgctgacgtgtcagtcccggcgccggagaacagccggaagcgccagaagctggatcggtgcgtttcttccgcaagggagtgcgaaaacgcggttcagagttccaaatcgaaggtagctaaggctgttcggaatcgttcttccaagattcttacgttggactcgacaagtccaacagtttacgaggggtgtctgaggtatggggtaacgtccgtttgtggaaggcggagagacatggaagacgccgtttcggtccgtccatcgttttgccaggaaaatttatctcaagatgataagaaagagtttcatttcttcgctgtcttcgacggccacggatgctcacatgtggcgactatgtgtaaggagaggttacacgaaatagtgaaggaagagattcacaaagcgaaggagaatttggaatgggaatcaacgatg

SEQ ID NO: 29322 - DNA, 433 bp, Glycine max
  Clone ID: PAT_MRT3847_126478C.1
ttctttttttttttattttctttttttttatttttcttctttttacgttttgattgttacattctgctttttttatgccaaacctcctcattcgctcctttacaattggggcaagcccacaagcccccgcctccccaacaagaggcggccccccccaaaaaaacccccgggggcccccaaaaaacccccccccagcgcaaacaaccccaagaacccccccgaaccccccaacaaaaggggcccacccaatcccagggaaacccaggacatccccccccggggactccccccccaagcctcaaacgccccccctacccccgcatcagctactgccccccaggaggaaaaaactaaagcccccacaaaaaaaccccccgcgggaccaaaaaaaagccccccctatagggaaaacccggggggcaaaaaccccccc

SEQ ID NO: 29323 - DNA, 423 bp, Glycine max
  Clone ID: PAT_MRT3847_126479C.1
ctatcgtcgtataactccagcgaagaatggtggaaatgaccctgctacttaaactgccctgcatgccgctcaccctgcctaaccttagcccatcgaagttcctaatataacatgacccgaaccaaaacaggtgacgggtaacaggggtcaacatactctgattggatagggatcctatggaagacgaaattatggtgatcctaaaagtgggtaggctagaacaatcaggaacttgtacgccagaaaacagcctgaagaggaatttttagccgcaggagcaatggtatcaaggctgaagcatgaaaaagccgctaacttgcctagcatttgcacagaaggcaccacccgaatttttgcttaatagcctgaatctaatgggatcgttcacgactattttacacggcagaaaaggtggctaaagga

SEQ ID NO: 29324 - DNA, 375 bp, Glycine max
  Clone ID: PAT_MRT3847_12647C.1
agctcgaattcgctcgaggagatgctacccaccgctctatgagaatagctcttcaaggcctttttttaggctaatccacctcaccattctcaccaagagcactttcctttagaggaaagaggccccctacttctgctcgaccatcgttctgcatgcgcactcgtcccttctaacctccattcttacttagagaccttcagtcataatccaacgcacagtagcttctcaccactatcatcttaaccaatctctatgaccaattgtgcaatttaacgatagctctcatactaggtttaattactatttcaacactgtcattactacgataaaactaacctctctaacgacgaccttaccccagctcactttccctat

SEQ ID NO: 29325 - DNA, 715 bp, Glycine max
  Clone ID: PAT_MRT3847_126480C.1
attctccctctcccttttcctcataattgaaacgataaaagcggtttccctcaccaccccagatcgagaaaagagggttcacgagggattcgaaacaaaaaaaagggggcgaaaaatcagatctttttccgaagtggagagaggcccagaacaaaaaatgattcagaaactgagaaaacgaggcaccctgatcaagaaaagtggagaaacggggattggagagggaaaagatcagagctttggcaaagggggaaagagggtgtgatgtaaagacaagaagagaatagaagagagggaaggaagaaagaaagaaagagagaaagataaattataaggaagtttcgttgttattgcgaagtttgatgttatcatctcaggactagtagtatcatcaagtgaggattactcaatcgttgtttcgttcctactactggatcttgatgaaggcattatagagagggatttggatgggattgaatcatggtcatggatgacacagctgtgaattttttagctgttggattttgggagcttcgagattcttggttggcacgtgaacaatccgggtttcttattctcctagactaaatctcgtaaaagcacaacttgcctcacactcaacccccttagtttcagataaataatcatgatttctttcatcatcataactcaaaagccttttctcgcctccccttctgtcgtcttctcgcaccgt

SEQ ID NO: 29326 - DNA, 391 bp, Glycine max
  Clone ID: PAT_MRT3847_126481C.1
cgggtccgcgagcacactcttactcggccgccccctccctttttttttttttttaataaaaaaagagacctaaaactgggttggggaaaaaagggacattggacctttcactctaacttttctaactctccattcctatgaatgagacatccacccattattatatctgcgagctatacgtctaccactagtaaactgattcactgcacactgatgacacaccatttaagtattgagcaaaaccacttctatcattaattatacctttcattttttcttgaaaaaaagcattacccaaaacaaaacaaaaaatttctttaatattgcagtgcaaccttgaaaaatccgacttcatttatcatataagagcattcccagaacacactttatt

SEQ ID NO: 29327 - DNA, 133 bp, Glycine max
  Clone ID: PAT_MRT3847_126482C.1
agacacaaaaacgatcgcctaagatggggaagaaagtataaatttgaaagcggccgatctataggatacaagcttacgtaggcgttcatgcaaaatgactgctctcttataagatcaccaaaagacaatccag

SEQ ID NO: 29328 - DNA, 336 bp, Glycine max
  Clone ID: PAT_MRT3847_126483C.1
caccaccatcctttgagtcacaccaaagccactgtaattccattcaatctcttcactgttacatgctttctcttttcttttcctctgaatacctccaaagtttggatttttctgtcatgggtatctcttattttctctgtttctcttagtttcaatcttctcttattgtcccttaggagtttggacttgtcatgtgtggagtttacctctggggtgccatcatcatgtgttttgtgttgaagaatctgtgaaatgtgtgtgtgtgtgtgtgttctatatgctgtggtgctgcttctgttgctagtcgtgcttctagcttttgggggtttgtgtgtt

SEQ ID NO: 29329 - DNA, 1816 bp, Glycine max
  Clone ID: PAT_MRT3847_126484C.1
ggctcgagcaacatcttcattttgcttttcaaatgaccacctgttgacttccaattcaaggtcactctctgctggacagtcagagtttataactgaaatttctgagcatggcttaactcagggaatggtggctactagttcagcatctttaaatcctaatttgatggataaccctcccacttcatctggaaggaagtcttctcccggttctccattgtcatcttcaccccgttttatagaggcttgtgaaaagccagtaatgttggatgtttactcaccagatcggttggctggggaactgtttttcctggattcttccctagcattcactgcagaggaattatctcgagctccagctgaagttcttggcagaagtagccatggcactttatacaaagcaactctggacagtggtcatatgttgactgtaaaatggttacgggtgggattggtcaaacataaaaaggaatttgctagagaagttaaaaggatcggttctatgaggcatccaaacattgtcccattactagcatactattgggggcctagggaacaagagaggcttcttttagctgaccatatacatggggacaacttggctcttcatctctatgagagcacaccccggaggtactccccattatcattcagccagagaataagagttgctgatgatgttgctcgatgtcttctataccttcatgatcgaggacttccccatggaaatctaaagccaacaaatatagtgttagcaggccctgatttcaatgctcgtcttactgactacggtctgcaccggctgatgacgccggctggaattgcagagcagatactaaatctcggagcccttggataccgtgctccagaacttgctactgcatccaaaccagtttccatcctttaaggctgatgtctatgcacttggtgtgatcctaaaggaattgttaacaagaaaaagtgcaggtgatatcatttcagggcaatcaggtgctgttgatcttacagacggacgcgtgcggtgcgagcgagaaggaagggtaatggactgtattgacagagacattgcaggtggggaagaatcctccaaagagatggatgaactgcttgcaatatctctcaggtgtattctccctgtaaatgagaggcctaacatcagacaagtttttgacgatctgtgttcaatatcggtttgaaatttttgtaaatgcgtctgggcgctactgcatccaaaccagttccatcctttaaggctgatgtgtatgcacttggtgtggtcctaatggaattgttaacaagaaaaagtgcaggtgacataatatcggggcaatcgggtgctgttgatcttacagattgggttaggctgtgcgagcgagaaggaagggtaagggactgtattgacagagacattgcaggtggggaagaatccaacaaagagatggatgaactgcttgcaatatctctcaggtgtattctccctgtaaatgagaggcctaacatcagacaagtttttgacgatctgtgttcaatatcggtttgaaatttttgtacatgcgtctgggaattagtttttttatttttggttcctcgacccattgttattttctcattctttgtacccctcttgtctctcctccttaattgttttctggccttattttgggctaatcatcctattcttttcttctatttttctcttttattagaaaaagaaaaacagtatttcttgtaaagtgaccatcattgattaatcgacggcagtgtttgtgttttgatttggaaaaaaaaaaaaaaagggcggcccctttaagggattcca

SEQ ID NO: 29330 - DNA, 437 bp, Glycine max
  unsure (1)..(437): unsure at all n locations
  Clone ID: PAT_MRT3847_126485C.1
gataagtcttagattggtgatgtgttattattttctctattttcttaaccctcgatgtcactattttaattactgattagtcttaattgtcaaattaattatgcagttttatcatttgggcctattggactaattttgtgtttttaatttaatttcaggagaatcataagcaattgggtttgaatccggaattgggcttggacttgaagagagcagacaattttattttatcaaatcttatcttatccagattttatctcatctagatattatttcatccaatattatcttatcttatctagattttatttgatcaaatcttatcttatcttgtcaagattttattttatttatgggcttggacttaaaacagatttgtaagctttggggttgaaaacctatataaccctcctgtcgtcttctcgcagccgtaaagn

SEQ ID NO: 29331 - DNA, 211 bp, Glycine max
  unsure (1)..(211): unsure at all n locations
  Clone ID: PAT_MRT3847_126486C.1
aaaaaatgtaatatgtatacaaatataattgatccaanacaccatttattnttacttttagcagaaacaacaatctacattttgttatatcaacaacgccatgggcatattaacaaaacactcctcttttttatttccacactctcttaccaatacatcccttattccaacttttaaaacctcttcaccaccccttctttttcttttccat

SEQ ID NO: 29332 - DNA, 328 bp, Glycine max
  Clone ID: PAT_MRT3847_126487C.1
gctactcgatgaatattttggttggaaaaattcgatgagtatgaccccttcttaatacacatgttgttggacagaatcgagaccaattactaatacgattagagtgctaaggaaaaaccacggccacactttgaactttagacaagactaaatatatatataacgacatccacgatttgaagacgtaaaacagaacgcgtagttatataccttaacgggcaatactaagtggggtaggaagaacatgcacaatctgctccacatctggaacctcttgcagaagacgcaatacttgggacatgagcttggattgcaaacacaacgcttt

SEQ ID NO: 29333 - DNA, 465 bp, Glycine max
  Clone ID: PAT_MRT3847_126488C.1
gtctcctatagcggccgcttttttttttttttttttttttttttttttgggaaaaggggcctcgatccgcataccctaaccagttccggcaggcccgttccttggcgaggcgagggcaccacgaatacctaaacgtatagtaaccggctgccgcccctgccaggggctacacggtgccgggggggggggttgtcagacccaaacgtcattccgctaaaaaagttccgggcacggcccatgggtttaggagacctggaattcggctccgccccggtcagcctaagaaccccctccacttccccttgggtggaactggtcgcttgcgggcgctgcctcccgatcatctaggagggggaccctccgggcacgactaccggcttctcggacgcgatcatcccgctgcgactggtctccaacttggtggggggacagaaaccgttcctgctgggcggggctaaccatggg

SEQ ID NO: 29334 - DNA, 819 bp, Glycine max
  Clone ID: PAT_MRT3847_126489C.1
tcctctagagtggccgcttttttttttttttttttttttttttttttggctaggcttgaccgtgggaaattgacttattcttgctcaagtcaagtggaatcagtttcatttggctctagactacgattcgatagagaacgatttggcacatcttcgatttcctggtatgaaagtagttaggcttggttttctttgagttcaagatattcggcataagccgtctttgcttttgctcttatcgatgtgatccttgtctttagcttggcaccagggcggcttgcttacctaccttatgaatgactttcggactttcttcttttctgttagcacgcatccagtgaccgatgaatctgttgtcggaataagcgtaagcgcagcaagagaattcgcagcttttgtgcctaaaatccctactttaaactgggttggctttcaaagatagagactatcactggattgcttgctcagttcctcaatccaatttcccatttgacttcctgacattttcaagagcttgaataaaagaaaggcctgcttacccgcttcaacttcaaagaggatttctcacgggattggtgtaactgtctttctcccactcgatggattgctcctattgacctagctgtcttactcgctgtctagcccgctctccctgacttttttatccgtagcttgaaggagggagaggctagatggcagaagagaaggcaatgcctcctcgttcttcgttttcgatttgcttgtccattttttcattttcacgtgaaggaagcaaagcaaccttagtcttagtctgccctatctttttttttcgaatat

SEQ ID NO: 29335 - DNA, 762 bp, Glycine max
  Clone ID: PAT_MRT3847_12648C.1
gcgaaggagtacagtgtgcaacacgcgcacactcaaacaaacaaatcatcacaagtcaatgtgccgttggcggtgctttgcgtgtgtgttgtgttagttcatcctctctcactccttttttctccttttctaatcctttcacttcactcatcttttttccccctcgagcctattttcatcttcttttgcatttttctccgactccgtttcatgcattttcccgctgcttaaggaccatcctccaataccacgccgcttcttcttcctagggtttctctgaaccaattcctatggccatcagaggcgtcgatttcaagtggtacgatggctttttcttgttcatgctcgccaccagtgtagttattgtggcaatcaattggaagcggtatcattcttgcacgtatccgctgcatatatggattgtggtcgactacaccactgtgtttgttttccgggtattgatgtttgttgataacgggctttctgcaggaatgggtttcaaatgaagtcaaatgatgttttaattcatcaagtcctggtactaattcaactgcgcttttatgccccctccccctttgtatgcttctagagattttgggtggcagcagagatatgctcgtttctgtggaagagtagttgtcctctccttgtgttgcttctctaatctttgggcttgactgtaattggtaccctgtggtagtgtgtttgtgtaaaaaatactactcgcatgcttgcatgtgacaggtgctgtattctttctca

SEQ ID NO: 29336 - DNA, 420 bp, Glycine max
  unsure (1)..(420): unsure at all n locations
  Clone ID: PAT_MRT3847_126490C.1
attattantatatttaaatggatttattaaatggaannttnnnggagaaaactaattaggggaatctttaattggtttaaaagggaacttaatttgttccgggcttccaaaactttcccagggggggttttttttttatttttttcccccaaggttaacttgccccaaaaaacttacccacccttccccttttttttaaacttttaaattttcccccccagttaactggcccaaaaaaaaattaaaaaagggcttttttctttcccaaacttttgcaaaaaaacccgaaaaaaattttccccggcaaaaaaccttgtttttggggcggggaaaaaaagggatttttaaaaacattggtttcggcgaattttttttgaaccaccggctgaaattgttttattttttaaaaaaaaacttttt

SEQ ID NO: 29337 - DNA, 176 bp, Glycine max
  Clone ID: PAT_MRT3847_126491C.1
ggcttgggaacttcataagctcattcatttatttttgtattgccgttgtgattgtgtccggcggcattaaactttatgcatattatatcgacatggatacgattagacggtcactctacagctatatatctgccctagccattctcagatgcagcatgaaactatcggactttgtt

SEQ ID NO: 29338 - DNA, 307 bp, Glycine max
  Clone ID: PAT_MRT3847_126492C.1
ggccgaaaggaacgactttctatacataggaacagggctattaggggctaaatgcattgattcgtaacattatatgatcacaaagctacaaaccttaacacttaaagctggcagagttttacagtgacacaaacatattcaattttacacttaacacttcgtaatccattgaaaacaacaatcgactagtatgtgcttatgaccaatttaacaagtcacgatttgttggcttgatgccccaaaatacgcgcaaccaccgggggtgtgaccaatatcgcgaaaagcttcgctctcgcctgtgatccaa

SEQ ID NO: 29339 - DNA, 385 bp, Glycine max
  Clone ID: PAT_MRT3847_126493C.1
gaaaaaaaaatattaaagagggtgccaattaaaattccggaaaggcttcactggtcacgggtccaccccgggaaacccaggcggaaaaactttggggttacccggggacctcttataaatcccaaaaggggaggggcaaacctttttacaaagggtcccggtttttcccctgaacgaaggggattttctttaattgggttattaaaaaaaaaaggtaaaaaggcgggaaaaggggggaaaattcaatttcgccccccaggggccctttttatttcgaacccccttgacaggttggtgaaaaccccaaaagggggaccggaccccactaggggaaatttggggggggaagaccattcccaatcttggtgagccccttggcataaaa

SEQ ID NO: 29340 - DNA, 279 bp, Glycine max
  Clone ID: PAT_MRT3847_126494C.1
gaaagacaaaattagcgtcctttcttttgggattttagaaacatgcatgtcctgttaaacatgttaacacccattatgaaattatccaccatgccacacagttctggataagaatacgcttcctctgctgagacagcgaaagccgcatgcccttcccgattgggtatttacgaatctcgctaagccacagattcactttggcttgccgcattgcacgtatgttttaggtgcttcatattccatcaacgctctgtcatcgactattgaccgggatgcagg

SEQ ID NO: 29341 - DNA, 799 bp, Glycine max
  Clone ID: PAT_MRT3847_126495C.1
gactttcacaacttggttcttatttaatttcaactattataacaagccttaatctaatatctctcacagcccttctttgagagacctcaagagagaaaataaggtatgtgttctttctcttcagaacagttaccttatctttttcttggttttgcccttcaccctccatggccatccaagagacagcaccagcaccttcggttgaacatccataaaagaaggagagcacaattgcaagaagcaagacggaggaagaggatgatcatcttgaagcttacagaaataaagatgagaaacttgaagttgtacatggagaaccaaagcatcatagaggagaatcagaagttgaggaagcaagcaatgcttcttcacaaagagaatgatgtcctcttatttcagcttcaaaagaagctttccgaacaaaacaacagcaaaaccaattaaatggctactattagctagctataatacagtttatatggtaaggcccaaaagtaggcaaatttgaagggtctctcattgatccttctttatgaggatgaatcttaaattaatatatatgtctttcttttatatcatttgtttcttagtgtatgaagttaaattaattaattccttgcaagagtttaactgtaaaccattacaaggaatgtagtattgagcaatgttaccagagacggaggtacatggaagctccccagcccggcccccctgacttttttaatttaaaaattattcttgtgttaaaaaaaaaaaaaaaagggcgaccgccaaaaaaaagagctcgtcgaaccagaaa

SEQ ID NO: 29342 - DNA, 325 bp, Glycine max
  unsure (1)..(325): unsure at all n locations
  Clone ID: PAT_MRT3847_126496C.1
gtcgcngcacgcgtacgtnagctcggaattcggctcgagcgaacttctttgcgagtttagcgcagagagagagagagagagagagagagacntcgntttataaagggnaagagngntcannnnnnanntttnggnatggaantccaangttttnnanntngggtatnntngcnaacngtancacccacctanttgtcagcaanactcactcgtttactaaattccccaatctacttacccatccagatcataaccggaatagtcctatcccttccttaatttcccaattctcattcattgattccttcnaccaccacacccaana

SEQ ID NO: 29343 - DNA, 304 bp, Glycine max
  Clone ID: PAT_MRT3847_126497C.1
caaatcctacttagaatcaccagcttcagtggttcaccatacgcatgcatgctcagtagagcgatatgtgcacaaaagttactcatgccatacttacacagagacggctatgatcattgcctgaacgtccaccaagaatttgagattagcatgatcattaaaactggccctttaactgtatggtatcgcgagaatacatactgcttaagggattccttaatagtcaacagtactggaaattccttctttaatttgggactgttaagctcattgttgcttctttgaggaacactcaccttggcct

SEQ ID NO: 29344 - DNA, 365 bp, Glycine max
  Clone ID: PAT_MRT3847_126498C.1
gcgaccacacgtccgtttactacaaggtaatagctgatccagagaaaagggtctctacaatggatggctttgaccgtcccaagggcgagaacctctctcttccaaaaggtttcgacttacctacaaggcactgattcactattgtccacattgagatgaagagggtggtgcgccaaacattcttaaatgacgtgaggcacataaggaagaaaaggcacacggttacttgttaggtggcaatcagcgcatactccatggaatggagtggcagggcctatttacatctgtgtaggggcaacgagattctgagccgcgactatactaattccgatggctggaattccaaaccagttatgaacgataag

SEQ ID NO: 29345 - DNA, 952 bp, Glycine max
  Clone ID: PAT_MRT3847_126499C.1
gggtgataaaactcatgtgtctactcgagtgatgggaacctatggttatgcagcgccagaatatatgcgtacgggacatcttacatcaagaagtgatgtgtatagtttcggagtggtactacttgagatgttgactggcagaagatctatggacaaaaaccgacccaacggtgaacacaaccttgtggaatgggctagaccacatctgggagagagaagaaggttctacagattgatagacccccgcttggaaggccacttttccataaaaggggctcagaaagccgcgcatctggctgctcactgccttagcagagatccaaaagcacgacccttgatgagcgaggtcgtggaagctttaaagcctctgccaaacctcaaggacatggctagttcatcgtattattttcagacaatgcaagccgaccggtttagcgcaagtccaaataccagaaacgggagaacacaaggagcattgctcaccagaaatgggcaacagcaaaggagcctatcaattccacatggcacgcatgcatctccatatcaccatcagtttccacaaccatcaccaaaacccaatggcaaggcatagagttgacgatgatgatgagttttcattttctttgtcaccctttcttttttgtcatttctcattccccaagtatagatgtcacttgtgtctagccattttgttcatggacaactggagaccaaaagaagcatgcatgcatgtatgcatgcctctttatggtgtatgctgagtgttgaccttagggcaggtgaaagcttatcagctactactatctctagtgtcaaattgtcaaccaatatgtttcttcaggttgtttcgaaatattcaagattattaactcctcaattttattttattttttttcaaatttccccccggaaatgttatctcctgatttatttaggcttttcttgtgatatc

SEQ ID NO: 29346 - DNA, 286 bp, Glycine max
  Clone ID: PAT_MRT3847_12649C.1
tacggctgcgagaagacgacagatgggggaggtcgcatgtttaacgaggtgggtttcttgtctgcattcatataggcttaaacggtctcgtctgttgggggggcaaatatctcagttcttccactttttcttaggatggaagactcgtgggagaattggatttcttctttggaaatgggtgaagacaacaattccaatggtcaatcttacactaactcaatggatcgggataagcttctcatgggattgacctagagccaccagatttccccattcatcaaagtga

SEQ ID NO: 29347 - DNA, 222 bp, Glycine max
  unsure (1)..(222): unsure at all n locations
  Clone ID: PAT_MRT3847_1264C.1
tcgaggcgtggaacaaggtggatacggtacaacacacttcaactgctgacgaaatgcgtgtatgtattatcgcatatacgaattgttatgtaataagaatgtaattatgtgttttgtagcgtttgtgttntacttgttggtacccacagacgatccatgacattttaatattgaaagaaaaccgcttctgcaaatattgaaatgacaaggatctctcgggtg

SEQ ID NO: 29348 - DNA, 343 bp, Glycine max
  unsure (1)..(343): unsure at all n locations
  Clone ID: PAT_MRT3847_126500C.1
tgagganatttntntggttgaagnnanaagaattggnttnaggaggttatttgaatatatttaaggtaagaataattanaagnagaagattgagaggaaagnanntgtgatnagtgaagtattanngagtgatggaannttttgtgagtnntnatttgttgtgagattntatgtgggaaaagagaaanaaggaaaaacggactgtgagaaggggctttaagtttaaaaatggaagaangggtttgtgggagttagaaagttnggtggaatttgtaaagattttagtgttggggaggaaggtgttgaattgaagggtagaaatggtgggaanaagtggggtgaa

SEQ ID NO: 29349 - DNA, 288 bp, Glycine max
  Clone ID: PAT_MRT3847_126501C.1
acaggctacaatagtcatgcagttgcggataaaagagttgttatttagttaggataaatttgtataatgaagagcaaaaggagaagaaagagaatgtagtggaaaaagataaagaaaaaggtaaacatgcagaaattatggaaaaattattgtatgaatacattattcttttcaaaaatacaatttattcaatatcatgatttcacttattaagatcctcttgttgatttcttttacttttttatttattcctttgatttcgatgaatcaatgttaattttaactcaa

SEQ ID NO: 29350 - DNA, 1037 bp, Glycine max
  Clone ID: PAT_MRT3847_126502C.1
tgtggatggaatcaaccacgttatcctctcaatattttctctctttcctctctaaccaaaaacaaaaagaaaaggaagctaactaaacaaaattctgatctcactgtacagtatcaaccaaaccaacaatccaacaccatgaaactctctgtgttccaccatcagcaccatcctatgattctcaattgcccccttaccttgacaaggacacacaaaagactttacaacaatggttcatataggtggttaccatgccactgctcacattcttccacaagtaaaactgctgcagaaccagttacagtttctttaagtattgaaggaaggagagcattactcagttgtctcctcacaactgttgctggagtctatgcatgtgatgtggctggagctgttagcacaagtagaagagctctaagaggagccaaaattcctgaaagtgattatacaaccttgcccaatggtttgaagtactatgatttgaaggttgggaatggagctgaagctaaaatgggatcccgtgttgcaattcattatgtcgccaaatggaagggtatcacctttatgactagtagacaaggaatgggcgttggaggaggaacgccctatggatttgatgtaggccaatctgagagaggaacagtccttaaagggttggatttaggagtacaaggcatgcgagtaggaggccagaagctacaaaagtccaagaatcatgagttggacattgaattgctttctatcaaacaaagtccattcgggactcccgtaaagatagttgaaggttaatgcaatgatttaatattcagagtgctattttgacattttaagagaagaaaatgatgtcgtcccacctaaaggcccttactttttcccatgatgttaatgaaccgaaaatttaacctgtttctagactgattccaacctattattagaaaaaaagaataagtttgaaactttaaactttgattgaattgattgtttcaattcaggactaatttttgctcggagtaaacaagattatcagatgtgattcc

SEQ ID NO: 29351 - DNA, 1171 bp, Glycine max
  Clone ID: PAT_MRT3847_126503C.1
gattttctgaatgcttcaaaattgtggatggaatcaaccacgttatcctctcaatatttctctctctctctcgctcactatacacaaatcagatctcactatacagtatcaaccaaaccaactatcgaacaccctgaaactcttcaaccaaaccaacaatccaacaccatgaaactctctgttttccaccatcagcaccatcctatgattctcaattgcccccttaccttgacaagaacacacaaaagacttaacaacaaaggttcatataggtggttaccatgccactgctcacattcttccacaaataaaattgctgctgaaccagttacggtgtctttaagtattgaaggaaggagagcattactcagttgtctcctcacaactgttgttggagtctatgcatgtgatgtggctggagctgttagcacaagtagaagagctctaaggggagccaaaattcctgaaagtgattatacaaccttgcccaatggtttgaagtactatgatttgaaggttgggaatggagctgaggctaaaaagggatcccgtgttgcaattcactatgttgccaaatggaagagtatcacctttatgactagtagacaaggaatgggcgttggaggaggaacgccctatggatttgatgtaggccaatctgagaggggaacagtccttaaagggttggatttaggagtacaaggcatgcgggtaggaggccagcgactgttaattgttcctcctgaacttgcctatggaagcaaaggagtccaagaaatccctcccaattcaacaatagagttggacattgaattgctttctatcaaacaaagtccattcgggactcccgtaaagatagttgaaggttaatgcaatgatttaatattgataataaatcctttaaaactttaaaatgttaatttatctacgattaagaatgtgataataaattgatttatctctccaaacaaaagcagaaagaaaaagatatataggattctgtgatgtatttgatgtattaggttctggactaattttataatggagtaaacaagaccaagcttgcccaaatggcaattggaaacaaaacacacggaagacagaaaaccgtatttgttctcactttcaattgtatacgagcagaaaccgcaattcatattgttctctgtcc

SEQ ID NO: 29352 - DNA, 763 bp, Glycine max
  Clone ID: PAT_MRT3847_126504C.1
cggctcgagcgacctaacactcctcaatggccttgcacttttggttgatgttcctcgggataaaaacattactgctgaggttatgaagtccttgaatatccctagaggtgtaagccgcgtgcttttcagaactttaaacactgacaggcaactcatgtttaagaaagaatttgacacaagctatgtgggattcaaggaggatggtgcaaaatggctggcagagaacactgacatcaaacttgtaggagtcgattacttatctgttgctgcttatgatcactccattccatctcatcttgtttttctggaaagcaaggaaatcattcttgtggaaggcctaaagcttgatgatgtcccagcaggaatatattcattgaattgcttgcctcttaggttggttcactctgaggcatcaccaattcgatgcattctgatcaaatgatcaaatgatggggtcaaacctggttttcaattgcacggatgaacctgccattagaagcaacgtagccccgaatacaattagtggtgtccataagaagcagtttgatgcaaattgcaagctaagctgatagtagtatgttgaaattactcgtattttacgtccttgggttgtaaactaccgagttattgtgattaaacttcagttgcggactaggggtccacctgtattaacttatgtttttaatattttcctaggcaagtacttgcgcaattctgaatacgcatgcttgtacgtctcaataattatatctatttctctttg

SEQ ID NO: 29353 - DNA, 195 bp, Glycine max
  Clone ID: PAT_MRT3847_126505C.1
ggaggcaaactatctcttccacggaattgggaaacactaatttacaaaggcaaaagcttaaacaacactctctctacccccattacaaaccaggctgacgattaattcgaggggatggaaccctaataaattcccatactggcccagaattttcgttgaaacccaacagagcttgagactcaataagagtactct

SEQ ID NO: 29354 - DNA, 1444 bp, Glycine max
  Clone ID: PAT_MRT3847_126506C.1
tcataaatcataatatattttagcttgcaatttcaacattttgcttaatgatatactgatatttagttgttttttagatgctatatttgaggcacattgatagtacactgtcatgcctcttcctttctcaaagtcaaccatgaattctctatcactcttcaccttcctctgcgcaatttgtgcgcactccgtcgccgtcacctccgcggcatatccttccatccccggcacggaaaccggagagtgctccctccgcggcgtcggcgtcggcgacggtgttctggtccctccgcggcgagaagtgtacgaggaggggcgaatcttcgacatcacccacaggtatgtccccgagatgccggtgtgggactcgacggaggggctcgggcagcacttcctgtggctcgaaaagagcatgaagaatggctcgcgcgctaacaactccaacatgaagctcggtgttcacaccggcacccatgtcgacgcgcccggtcacttttacgacaattactacgacgccggcttcgatgttgactcactcgacctaacactcctcaatggccttgcacttttggttgatgttccacgggataaaaacattactgctgaggttatgaagtccttgaatatccctagaggtgtaagccgcgtgctttttcagaactttaaacactgacaggcaactcatgtttaagaaagaatttgacacaagctatgtgggattcaaggaggatggtgcaaaatggctggcagagaacactgacatcaaacttgtaggagtcgattacttatctgttgctgcttatgatcactccattccatctcatcttgttttcctggaaagcaaggaaatcattcttgtggaaggcctaaagcttgatgatgtcccagcaggaatatattcactgaattgcttgcctcttaggttggttcactctgaggcatcaccaattcgatgcattctgatcaaatgatcaaatgatggggtcaaacctggttttcaattgcacggtatgattatattacgagaatgggtcatattgtttctgtgcataattatccttatccttattaagtcaaaatactgatgctaaaggatgaacctgccacaagaagcaacgtagccacgaatacaattagtggtgtccataagaagcagtttgatgcaaattgcaagctaagctgatagtagtatgttgaaattactcttagtttacgtccttgggttggaaagtactgaattattgtgattaaacttcagttgcggactagggggtccacctgtattaacttatgcttttaatattttcctaggcaagtacttgtgcaattctgaagacgcatgcttgtacgtctcaataattatatctatttctctttgaaaaataatgaaatactactaataatctcgggccaaaaaaaaaaaaaaaaaaaaaaaaaaaaaaaa

SEQ ID NO: 29355 - DNA, 467 bp, Glycine max
  Clone ID: PAT_MRT3847_126507C.1
ttgttaattcattccagaaaattgtgatagagggattatgtcagaaaatcttaacagcttcacagaaagtccacacaaagaggtgtcagagaagtttcaatgctgaggaaccaatggggcagtctgtagagccagttgttcgcaattttctctccggggatgattatatttgatcaagttctgactcagattctgttgtcagcactttgggggaggggtttttgtcagacacagactttggaaccactactgtgtttgacacattgggaagcaatgcaacagaagaggatttggactttggggatgagaaaaactatgaggatttggattttggatatgaccccgatgatcttactgagaagatgaacataaatggatgagctaggaaacttggaagaagaattgaagctggacaagtttttagggaaaaattctgaagataggtattgcattaatttcaaacatga

SEQ ID NO: 29356 - DNA, 494 bp, Glycine max
  Clone ID: PAT_MRT3847_126508C.1
gtgcccccaatgctggctataaatttaaattgattattataggatttaagaggagaattgattccccactctggtcttaaaccacaggtcaacataaatgtgattacaaagagcaagcatgcatgattccattataaagcacactatttagaaaagaataaagagtggtgcttttgacccaacttcctcttgttcttttctccaaaaggggaagatctaaaatgaatcttgtattggggttttcattttcctgttgcatggttggctagctgcatacgtccaatatgagacacccttgaagaaattagcggtgcttcttcatcaatgttcatatcagaaagagaaccattgcctccaccacttcccccattgctactaacattatcaggcacataaaaatcagatgacctcttctcgaatttccagtcctttgtgattccatctggaataatttcatttggtgattgagaggctcggacatccttaacctttat

SEQ ID NO: 29357 - DNA, 268 bp, Glycine max
  Clone ID: PAT_MRT3847_126509C.1
cactgttccagcattcggactctccgctggagttgtagttggcaacgcctaggtgttggagatcgggatgaccttcggtctggtgtacacgggctactcaactgccattgaccccgaaaagggtaatgggggaattattgctcccatcggcattggtttgattgtcggcgctaacattatgttgggtggggccttctttggagcggacatgaacgccggtgtgacatgttggccatgatgggagagctggacactggaccacaactgg

SEQ ID NO: 29358 - DNA, 338 bp, Glycine max
  Clone ID: PAT_MRT3847_12650C.1
caccaaccacaaaagggggaaggtacaaaccaaccccaacaacacccccaaggggcaaccggggaacaaccacccaagaaccctctaacccaacaccctcaggcccaacaacaccatcaaccccatcaaaccctccctcgggaggagggggggactataacacaccaccaacacatggaggtgggagccccccaacaccaaacactgtgagcccaccttcaaacccaaatgagccaggcacccccactaaccccgtcacacccccctacccgacttacccaaaacccctcacagggacacgcaactaccggaacactcacccaggaaacaattgggga

SEQ ID NO: 29359 - DNA, 431 bp, Glycine max
  Clone ID: PAT_MRT3847_126510C.1
ccgctaaataatagtaataaaaaagaacgacacacaccaaagaaaaatttattagagcttttcgaagatatttgagatttgtgtttcatttgatatggagaagaagagtggtagcagctggtcctttaagaagatgagcaaagagttgtggccacggaggttgtcgtcgtcttttcgcagcaaacggcttcacttacccaccatgaccatcatcgttgacaacgttgttttcaagattgtctcggtggtagagggtgttgtaattgtttccacgctttgtgtattctacctttgttgtggttgtcacatttgaaatattctatgtatgtttgatgatcttcaaattcatttgttcgttcattttttgagggctagttaaagttcatcaataacagtctgagtttgtgttaagttgttaccatcctatgtag

SEQ ID NO: 29360 - DNA, 340 bp, Glycine max
  Clone ID: PAT_MRT3847_126511C.1
ctcttctctttttattcataaatccaaaccaactatgcctgggtagaacatccaacttgatgtgctattccatcccaccattgtccacatacaaaataaaatttaacccaaggtaccgataccatcctgcccccttaagactttgtcttaaacaaaacctatttgacgcctgccaataaactggggggaaccacatccaaaaggaataaatggtacatctattgctttcaataaagtgagggattctaaaactctgcattacttttgccagagagagcatctcccttgacgggtgattctcggacaccattgacaatgtttatgaccacatccatggctt

SEQ ID NO: 29361 - DNA, 352 bp, Glycine max
  Clone ID: PAT_MRT3847_126512C.1
gatttaaaatatataatttgttgaatttattataatattgtttaaagggggttattttatgtaaattgatgagtggaaatatattaatttttttttaaatgaaaaaatgttttaaaaaaaaattacattttttaattggggtggtgtatgataagaagaaaaaccagcaaggctggattatttttttatttatataacatcatgggggggatatacagtgaacttataccattatttaaggggggggaaaaatgataaataaagaaattttttttgatggtaaaaataaaaggaaatgttgaattatattccgggttggtagatgggtccatcataattttatcctatgatg

SEQ ID NO: 29362 - DNA, 413 bp, Glycine max
  Clone ID: PAT_MRT3847_126513C.1
ggtgtgggttttttttttttttttttttttttttttttttttaaagcaacaaaactgaatcactattatcaggcaacttttccctgaaaatggtggaacctaacaaagcaaatcatcaaccgaaatataaaatccccgcccttacttttagagacgggggaacccaaacaaaaaaatccccaccttgggctggaaccatacatatccggacctggccctcatttaggagacttctccaatgggccctccaccaacgtcttgagcgccccaaaaaacggggatggtccccacctaattaacattaacgcggtatcggggcaatgacccaaaaaggcgggagggccccccccaagattttaagggcctacccccattttatcaactgggccgcgggtgcaccaagttttaaaaat

SEQ ID NO: 29363 - DNA, 346 bp, Glycine max
  Clone ID: PAT_MRT3847_126515C.1
caattggccaaacttttttaaggaaaaaaggtttttaggggaataggccctaacaaaaacaaagggaaaaaggggggtttttttaaaccccccgggaaaaatcagttccaaaaaagtcctttccccctttaacggtaaattttatccacccatttaggttttaaaaatagggccccccaaccaacccatttggacttaaaggccaaaagggctatttaaaagcgggacaaaaaaacccacaaaaaaggtttaaacccccgacccaaagatccaaagcaaccgggaccaattttccaaaacccgtaagggaaaaagggggcggccaattttctacctaaccattaaa

SEQ ID NO: 29364 - DNA, 1205 bp, Glycine max
  Clone ID: PAT_MRT3847_126517C.1
gcatgagtcagctctcgctcaaccgcgcggggtgaagcgaacgccagcctcaagtgctatgttaccaggctgaaggaagggcagaatgacatctgatacgttactggtgaaagaaagaaagcttaagatagagcccctttccttgaaaagcttaagaagaaggggttagaggttgtagaaatggttggtgctttagcgtgttgtggtgttgcgtcagcttaaggaatttgagggaaagaagttggtctctgctactaaggaaggcctgaaacttgacgagagcgaagacgaaaagaaaaagaaggaagaattgaaggagaaatttgagggtctctgccatgtgatcaaggatgtgttgggtgacaaggtggagaaagttgtggtgtctgatcgtgttgtggattctccttgctgtctcgtgactggtgaatatgggtggacagccaacatggaaaggattatgaaagcacaggcattgagggacagcagcatggctggatacatgtcgagcaagaagaccatggagattaaccctgagaaccccatcatggatgaactgaggaagcgagctgatgctgacaagaatgacaaatctgtgaaggatctcgttctcctactctttgagactgctcttctaacttctgggttcagccttgatgatcccaacactttcggtaacaggattcacaggatgctgaagcttggactgagcattgatgaagatgctggtgaagcagatgctgacatgcctcctcttgaggacgctgatgcagatgctgagggtagcaagatggaagaagttgattaaatctgacttaattgcctgttacgtttttagaaacaatgattggagaaacagtctttttactatgttttatgttttttgaattttcgaaattttggaacgttggctagttaggtgccgtatgtagtagtttctttatggtaaatttgtgtcagctttctggccaatgaatttgtgcttttcttcgtattatcgtgaatatggtgattgcagaagtttcagttcgggaatgaaaatgtttttactttagtggaattaatcactttgaggtggggataagaggatggggtctaatgacacaatgctgagtttaaaaatgtcattcctaattaacgttaagtgtttttttaaaattaaaacacccctaaaccccccgaaaaaaaaaaaaaaagaagaagag

SEQ ID NO: 29365 - DNA, 463 bp, Glycine max
  Clone ID: PAT_MRT3847_126519C.1
gacacttcattcaacttccacattatatttgctatggcctttgtggcactgggattgatttctaaaagagtgtcacttataaggaccaaatgattattttaaccagaggttgtttttagctcaatttttcgatgttatgtttgagattgtttaagtgaataatgctgatgcatgctctgtggcttttgagtgaagacagaaaatgagttcttcccttttaccatcttacttgaaaggtttggagagtagtgaacaatgtaagaaattgatgctaattagtgagttattattgtctctgtaatcaagctaagtttgaacgcccccccctctttaattttaactattgacagtgtcagaaaaataggtttaggtatagctttcttgtcaattgcactctttcatagggccctattaggtttcattctcatattgaatggacgattatcatatgagaattatccct

SEQ ID NO: 29366 - DNA, 1109 bp, Glycine max
  Clone ID: PAT_MRT3847_12651C.1
tacggctgcgagaagacgacagaagggcaagcaaaattgtgtacaagtcatggaaaatggaggtaacttatgtgatgggaaagaagttgatcagttttatcaaccctctggtggtattgaggttgtcgttgctaatgaggatggtctttcgtgcggatcagatctgaaagagattgacaaagtaaaaattatacaagaaagtgatttgtttaggggggatgcttcagaaggtgctctctgggatatttttcggagacaggatgtacctaaattgcaggaatatctgaagaagcacttcagagagtttaggcatattcattgctgtcctttaaagcaggttattcaccccatccatgaccagaccttctatctgactatggagcataagaagaagcttaaggaggagtatggaattgagccctggacttttactcagaagttaggagatgctgttttcattccagctggttgtcctcaccaagtcagaaatctgaagtcatgtattaaggttgctttggattttgtctctcctgaaaatgttggggagtgctttcgtttgacggaggagtttcgcacacttccaataaaccacaggtctactgaggacaaattggaggtgaagaagatgacaatatatgctatgcaagaagtgataacaaaattagagaaagcaaggtccaggcaaaccatagttccaaagtagatatatctttaacagatcaaagccaattgaaagtgtaaatttttttagtcaagcttttatacaggtgtgatgatgggttctgtatatcgtgactgtaagaacggttccatattttgttttcgccaacacctggatggttttttttttttggaaatcatatatgacttgaacggtgtacatataaatatataattgtcaccatttgatacttaggatctcataatctatacattcggaagctcaaaaaataactccaaaattgagattaatgaactcacgttgtttacgaattttgagcttctgaatagaggtgttgacaatcgaattaaaccaagcataatattgaaaattgttgaaaaatcaacgtttttggatataaaaaaaaccataattggtccattttttt

SEQ ID NO: 29367 - DNA, 475 bp, Glycine max
  unsure (1)..(475): unsure at all n locations
  Clone ID: PAT_MRT3847_126520C.1
tacggctgcgagaagacgacagaagggtcctgttatgatgtgtatatctatttagctggagtgacccgtccttttgattaaccgtaaccctttaaacttacggagaataagaaaatactataaggaatgagttttcaaattaatctttttctgctttctaatttttttttacaagcaacagattagatgttttctctaatcttctatttcttttcctagccagaacacgtggggtgcaaccattgtttaatttaaaattaaataggcataaaatgacactttatatcatatgctcaatcaattaaattaaactcctttaataaatgtatgtttcatatgtgaattaaataaaaaaagatatggtaaaataccttgaaaaatgaaatatgaatttcttgttccaccaattgtgtatatatccacaagctaagaataatatatctcccacccccaaaagaaataacangtgtttatt

SEQ ID NO: 29368 - DNA, 168 bp, Glycine max
  Clone ID: PAT_MRT3847_126521C.1
gtcgagccgttcacaaccaaaagtgcaaagttcagtctcgcaatctgagatttgcatcagtggttaccttctaccccaagaagttccatctcgatttcagtttccagatatgagcagcaataacataccagtgaaccgtggggaccttcaggtgcctcgggtgacgtc

SEQ ID NO: 29369 - DNA, 360 bp, Glycine max
  Clone ID: PAT_MRT3847_126522C.1
aagatgacagagaggtccaaaaggagcgacaagttttgaatgacctaaggatttccaaaatatctggctcaactaattgcgatagcacagcacagagttgatagtcaagcttttttcactcaagttttttgtcgcttggaacaatgtcaacacctttctccaagtggtcatggtgtccttgatcgagaaaccacaactccactgaagcagaccaagacaaataattctcccaattgagttttgcagctgtgatgagggaggttctagaaaaggagaacgcaagtccagcttaatccatctttgatcaataccgaaaccctaatgaataaggatacaagaaagcacacgggctgacacaaa

SEQ ID NO: 29370 - DNA, 675 bp, Glycine max
  Clone ID: PAT_MRT3847_126523C.1
cttgaagggtaagtggcatattgctgatagaaggaattaaaacataaaaactgcagtaaccaaaaaccaaacttataaaacatagggaccaaaaggtccaaaaccaaatttgagtagactatagggataaaaaatgtatttaaagtttaaacctataatttatattcacctctctatattttagaagtatgtgggtgtatgttagaaaactattggcctgtttgttttaaagttgggtagaattataggcgttaacatactcagcataattgggatatgtattcaaattactgtcacaaatttttgcgcttggaacatgtgcagtgtgggaaattgattcttgggtgtaaaacaagtgggtgtatttagcaatccccacccctctccctctccccccaaaatgctaaaacacaaactactaaatctttcagtgtgttcaaatataacatctttttttattttctggtaatgtaaaaagttgtacattgaccatggatccagtttggccgtatatggcttagtaaaaaatttcttggccgctttactttgcaaagtatcctcatttttttaatcattgagtttgaattggatggttgtgtctgagcgttcatgtaggaacaacagcgaaaacagcttgatctgattcttgcagttgggaaagctagtaagctatgg

SEQ ID NO: 29371 - DNA, 150 bp, Glycine max
  Clone ID: PAT_MRT3847_126524C.1
tttcgtttcatctgggttttgcttgctataaaaatctagctaaaatttgtcgcttgctttcagcaagagctttagcttaattagcaccaggaatttattttggtcgtcatggacaaatccattttggataattaacacttccttggctct

SEQ ID NO: 29372 - DNA, 101 bp, Glycine max
  Clone ID: PAT_MRT3847_126525C.1
cacaaggctggcatcaagctcgtcctagagttttgcaaatggaagcagcttcctctatggctctctcttccccgtcctcggctggctacggcgtgaagcta

SEQ ID NO: 29373 - DNA, 485 bp, Glycine max
  Clone ID: PAT_MRT3847_126526C.1
tctcacccttcactttctaatccatctgctcctaagctctcgcatctttacgtccacgatgaagtacgccgtttcgccacttctctttagcgtcggttcctacgctgctgctatcaagcagtcgcagtgctacttcgagcttgaagcctctgggggcgccttgggctacgtcggccagacaaacaatggctatagccgcatcggcggagaccgctctcccgcaacttactacatcagcaacggggtcatcaccgattcgaccggccacggatacttttctccttgggctaattccgacttcggctccgacaaggacaagtctggcgctgctcactcaggctccttctcgatcggcggcgacggcaagctcttctacaatggcaacaacaagttctacgcctgccctgcggagaagggcgagtacgacatccgtacgtactccgacggacacgccaagtgcgttgacgtcacattcagcaccaacg

SEQ ID NO: 29374 - DNA, 299 bp, Glycine max
  Clone ID: PAT_MRT3847_126527C.1
gcaaatttcctggttgccttaacgctgtatgaaaaacggtatagccacaaacccatgtgactaacacaagctctgatgatatactcaatgatattcgactagcatgggggcgtgtgaacaaggccaagctgagagacttttatgcaagccacagacttggtgatatagacacacaggcacctccccagtgtatgcattgcactttacgatcaaaaaattgtctggtggtaaaatcatatcgtgatgaaaataatgcatacatctcaccaataaagagagttgaatcacaatctaatgaa

SEQ ID NO: 29375 - DNA, 672 bp, Glycine max
  Clone ID: PAT_MRT3847_126528C.1
gctcgagacgacagaaggggggacactgttcaaattactaccactcttcctcttctcctccttcaccatacgcaactctcttttgattatgttccctacaaagtgatacggttcggttccacccaaaacacaacatctctgccttattgatttggtcatgtgctactacctcaatcaacttgtaaaataataagatagtagataacactaacttctttttttagttgctttcctcaaccaagtgattactactggctttgtttgagaaaaaaggttgaataaaaagaagaaaaaagggttggatggggaagtctcctgatagtttacatatagatcatgcaacgtgagcaccacctgcagttatgagctaagtactctgcttcgtttgctgaaagcgtaagggaaaactgtcaacgaatctagcggagttagacgggatggcacgatagagatccatctactgatttgcgacgagctggtttcatttcattggtaaacctactattctttgcgaagacattctcaacttccttttcagcggcttactgaagcaaacacggatgaaaaggagctgtttgcgagtatccctttgctgtcgctggcgtatacatcacatatatgattatgcaagtgctggaccttgatgccaccgaacccaagacttttgtaaga

SEQ ID NO: 29376 - DNA, 359 bp, Glycine max
  Clone ID: PAT_MRT3847_126529C.1
gctgcgcttagcgtgcccacgtgtcgtttgagtttaaaatccaagcacttagcctaacctcgcactaagcccaacttgaagttgcaaattccagtgagcatccggggcttagcgcagcaggttgcgcttagcgctttctgcaacacaaaattttctgcaatatgcgcttagcctgagatgtaaggcttagcgtgccatcaagcttcaacttacagagagtagttcaggcttagcgtaacaggcgcgctaagcgcatttccaggaattcaaaaatagcaagagattggggcttagtgcatcctgccccgctaagcccagcttaaaagctcaaattacagaatagatctggggcttagctc

SEQ ID NO: 29377 - DNA, 278 bp, Glycine max
  Clone ID: PAT_MRT3847_12652C.1
gccaggtgtcaagacatgacatgcactcgccccttacctaagcattgagttcgaggggagaaagagtcaagcctggtttttgttttaacaccatgggatattgctatgatgtcggagcactagatacagaaggggctactcctgaataatcctgccactctagacgatgcaccagatctcgtggctaatttgatatagaggccggaacgctctctttgtctcaccctatgccataggtctgattgggctggacaacttgctacccatgctgccaagga

SEQ ID NO: 29378 - DNA, 254 bp, Glycine max
  Clone ID: PAT_MRT3847_126531C.1
ttttataacccgaacactttctttttgatattgatattaagagacacattggtagggcatacatacaaacagagagtacatgtttttagatgatctctttacctattacaaaatagcatgcgggtcaccctgtagggggatgaggacagaaacacacagcgtgacatacctctaaggctatggctattaccaatattataaggggcctgctaaacatacttccaacataaagcggtggtggtgaattacttaag

SEQ ID NO: 29379 - DNA, 344 bp, Glycine max
  Clone ID: PAT_MRT3847_126532C.1
gaaaagacaaaaaatctaataagttgcggcccttcacagacaaaatgctgcagagaaggtactttttgcccatcctaagccaaaagataaaaacaatgagaatgccaagaggggtactcttcttccataccttttataactcccacgctttttgtaataatcctgcttaaaaaaggaaaacttaccagaataagaggtcatgtgcccccttccagcttaattaactatcatatttctcctagagtagactttccaaaccttaggcccacttcccaaatccacaagtggggccttatcatagccattccctataaaggcagccctgtcctcgatgatgaaattgc

SEQ ID NO: 29380 - DNA, 252 bp, Glycine max
  Clone ID: PAT_MRT3847_126533C.1
tgttttgtgttgtcgttctggactcgcacataatcttcttcttccttctcgattttcctcttcttcgatctttgctagggtttcgattcgttcacctgtgctcgtctgtggtttctcttctcttctcgattttggggtcggagcttggtgtttagtcttgccggtatgtccatgtgtgagcgcatgactattgacctagatctaggattggattttatgctgaagggcattttgactctgatgcgcattcta

SEQ ID NO: 29381 - DNA, 451 bp, Glycine max
  Clone ID: PAT_MRT3847_126534C.1
gtttgtactcttgaattataggtttcatatctcattcctatagtttggtttttttgtataccgataggagcaaaaggggttggatgtgatgattataaaataattcctcgttctgaatgctaatgccatggcatgacagacacgtttacacccatagaatatgagcactgcccccgtttgtttacataactggttttttttttatgttcttacggttttgcttggtttttccataattattctgatccctgtgtgggaattgaaaaatgcttggtttgcccatattttgacatgtctgctttgtgtttagctaactcctcatattgattgagtggtgtttaaatccctaaccttacatcatagtggtttgggttacgcacaccatcatatttcaattgtaacatttcggatttttttatgaagaattggatggtgttaagtttaaataaaa

SEQ ID NO: 29382 - DNA, 491 bp, Glycine max
  Clone ID: PAT_MRT3847_126535C.1
tcgagaatttatcctcactataatgagggtcaggctcaggtggaaacaaatttggttaaattgtctcttgacgatgttgacactcctaaaggttccatgctgcatcttaaaatttctcaatctaaaattgcacttcccacaaacacatttcgaggaaccattctgcgtagagatccatcggcaagttttttgagctgagggcaattttatatcaagtgtggatgtggagcgcactcatcgttttaaaggactgattaaaatgggggccacagttggtatttctgagaatacagggatagcattggcctgtgctatgaataggtcttttatggggcgtgccagatctgatatttacactatctgctctcaagactgtgaattatggaatcctgcttgccaaaagcgatgactatgttattttatccaaacccgtgtgctgatgcatggagcttggaatttctgaagcgaacccgatttcattgtgatatcat

SEQ ID NO: 29383 - DNA, 607 bp, Glycine max
  Clone ID: PAT_MRT3847_126536C.1
ggctcgagcaagtttgtgttgtgttgtgtgtgcatgaaaggttgaaccccattttccattgacaattgaactgatggcgagccccatgttaggggatgctaccacgagctttgaagatggtaagttggcgtctatgaccaccgatgacgtcgtcagagactcagagcctctcgtattctcgaaaacgatattcgcattctcaaggaagaggtgcagagatcgaatcgggaatgggaatcatacaaggagaagataaaaaataacgaggagaaagttaaacttcataagcaattgccctacctcgttgctaacattgttgagatattggatatgaatccagaagatgaagctgaagaagatggggccaacattgatcttgactctcaaaggaaaggaaaatgtgttgtgctaaagacatccactcgacagacaatctttcttcttgttgttgggcttgttgaccctgacaagttaaaacctggtgatctggctggtgttaacaaagatagttacttaatcttggataccctgccttctgagtatgattcatgatttaaggccatggaggttgatgaaaagccaacggaggactacaatgacattggtg

SEQ ID NO: 29384 - DNA, 220 bp, Glycine max
  Clone ID: PAT_MRT3847_126537C.1
caattttcgctccaaaacatgccaaccctaaaccatgttcttacgttgacattcttacttctaccttcttggccatggcaacttcgtcaattgcccaaaaggccccttattttgcccgtcccttaaccggaaaatggttaggcctatgcggaaaacaaaggctcaaccacttcaaatttaatggccatgacatagtgagtggccgcaagcccacttcggt

SEQ ID NO: 29385 - DNA, 433 bp, Glycine max
  Clone ID: PAT_MRT3847_126538C.1
ctcactctctctttgatcaattccacatccataacaagacatctacccagaagttgatctggggcaaactctactgcgacgaatagcggatgaggaatatgacgaagattaagaccgattatacgctcacagctagtgcaatgaaatcaaggttatatgtatagtagactagctagtcatattgcctatgtattccacatgtgtgatcattgttatcagccaagctttgagtggccatctaggatataacgaattgaccgttcatgctctcgtatcaccgctctcatatgttcgtcaatgcagttctgctacaatgatgacagagttactaacactatgtggactagcatatacaacctcagaacatggccagatcggagtatatcttcatagatcatggacagatttgctcttaactgcaattttgctattt

SEQ ID NO: 29386 - DNA, 253 bp, Glycine max
  unsure (1)..(253): unsure at all n locations
  Clone ID: PAT_MRT3847_126539C.1
ataatacatcctgatctccagggggggttaggaatctagggctcatgaccccaaaattaatagaatacaatgaatatatatacaacagcaacttctaaagaatctgcataccaattaaaaagggtgtttcagatcnttatatgtaaaaacctagatcaagagggttaaaatggaaagtaagagatatgtgaagaagggaaaggtggcctaaggatatgaggaaaaggaatgttattgcttccttgtcactatt

SEQ ID NO: 29387 - DNA, 646 bp, Glycine max
  Clone ID: PAT_MRT3847_12653C.1
ccggtccggaattcccgggtacgacccacgcgtccgtctatatatacttactgtaccaaaaatagactactatatacttacaataagtgatgcaatttgtttcattactttatttgttttctgttaaatgtggttttcatctattggtgatatgtgccgtggttaaaatagggcttctatgccaaaaagtaaaagaactaacggaatatttttcttatgctctacatgagaagactgtaatacttttctttagctaattgtgtaaagtaatttttttagcaaaagacaactgcctgtttgtgatagtgtcatgattgcattttctttccaactgttatttatttgacacctttttttccatacaataaatgatatggactcaagaatcgtaacatccccataaaataggctttattaaacatgaaaaagaaataaaattttattggttaagaaatgtagaataagaaacctgaatgcctggaaatattacagaagacacattatgaacaaatcatccggccttcttttttcattccataaacttaaatttttcatctctatgttttctttacaattgtgaattatggggaaaattttaatctgcattttgatgagggaaatggctgctttgaactgtaattttttc

SEQ ID NO: 29388 - DNA, 486 bp, Glycine max
  Clone ID: PAT_MRT3847_126540C.1
ctcgagccgctcgagccgcacataagcggtctcaaggatattttgatccgaatgcaccacagtatggacagcttcttggtcatcctaggcactctctatacatgccgagtgacttgcctgaaatgcaatacaagggacgagattattgacgacttgactattcgtattctggttggcacgtcaaatccttgcttgaaaagaataaactaactggatggcctgaaacgttgtaaacgaggatatctgcagctgatggaaaaatctctaaaggcttatattatatatgataggttgtggcccagcaaaagtaggtacaattacaatactgacgggcatgcctggcatacttggtacagtagttacgttagttggagaatcgatagaaccatcagacactggagtgggatacctgcatcacttctagtgcctaatctttacaagctttcttagcatacatctattctacaggatcttataatgaatctg

SEQ ID NO: 29389 - DNA, 209 bp, Glycine max
  Clone ID: PAT_MRT3847_126541C.1
gtgattattttctttagttctaagcattgtctactctatgctgttgactgctgtcctctcaaccttcttagataggaaaaaggtctatcgtgcatcccctcagtcatgcaacattgtcatgcgtattgacagatgggcctactgcatgactggctcctggaacaggtcttctcttgttgatgtcgctgttgctggctgtgcttttccca

SEQ ID NO: 29390 - DNA, 506 bp, Glycine max
  Clone ID: PAT_MRT3847_126542C.1
gaagttcctcgaagagaagcagaagggtaacaggcagttgctggaattctacactggtaacccggatgacgccgcgaagcgggcgcactacaaggctaccaaggagatgtggacttcggccgggattgttatcaggggtgtgatcacgcaggctctgcagaagactgggggacctttcgccggaggggacaagccgggagaaccggatttccacatcatcacctggctcgcccgaatggcgaccaacgcaggtgtcgagcctggatcaccggccagcgtggctatcccaaagctccaggagaagaccggcggacacgctttcgacccggtcgtctcgaaatactgggacgcctggacgcaacgagagtcattcaagaagaacaatatccactaaatcctgcggcgcagcggtgtagatacccagaactgtgcttgcggggaagatgaggattgacgattgagccaaaacttcgttgctggaacgtatgaatgagcgttctgacgag

SEQ ID NO: 29391 - DNA, 991 bp, Glycine max
  unsure (1)..(991): unsure at all n locations
  Clone ID: PAT_MRT3847_126543C.1
cgcgtccgacggctgcgagaagacgacagaaggggaattcccaacgcttcttcaaatcttttatttcattcttcagaccaaaaaaagaaaaagggaacattgttcaacgaagcaagatgcttagcaaccgcatatggcagaggagagctttgatctccgcccggaccttattttctggctctgcttctcactcttcatcatcttcccatgcgatctcgcttcgcttcgccaaagctaatgctccttcttcttcacatgtcattttcaattttgcacgtgtggacagatattggttttctactcaacccgccctagagcttcccgcgagcaagatcgtggacgtgccgttggcacaaactggtgaaggcatcgcagaatgtgagcttctcaaatggtatgtacaagagggggattatgttgaagactttcaaccactttgcgaagtccaaagtgataaagctaccatagaaattactagtcgttacaaaggaaaaatttctaacattctctatgttcctggtgatattgtcaaggttggagaaactctgttaaagatattagttgacgagtctacatttcccttctgggattcccttgtgattccgaaaatgcaaagtcacctgatactgatcagacattagttaatgagtctgtgtttactacagtaattgatgattcagacaatgccaagttgatagattctgatcctggaaaagggagacaaactggagtatcatcaacacctgctgtaagaagtctagcaaagcaacatggtatagatataactgaaatctgtgggactggaaaagatggaaggattttaaaagaagacgtgctcaatctttctgtcaagaaaggaatcattaaaaatccatctactgtctcgcaatctgattctggagaacagctttagggagctgaaggatacaactgcaatgtngcgactaaatcttataggccatctgaggacaggacactctctcttagggga

SEQ ID NO: 29392 - DNA, 404 bp, Glycine max
  Clone ID: PAT_MRT3847_126544C.1
gcgaaaatacccgcatctaccttttgtttttggtttaaaataaaatacaaaaaaaccccaagcccggacttgggggcccctttcccactcggaccaaaattgaaaaggtttacagcagtttcgcctaaccaatcagaaacaaagagcaagggcccaaaaaagcacttgttaagaccccaaaggagccccagacgggccccaagggaccttaaaaagccttaaacagggccaaacagggaaacaaaaggacttttgggggggggttggggcaaataacaaaaaagggggaaccggggggacccttaaacaacaagtttatccacgggcaaataccaaggaattacggtgcctttgggtgccaacaaggctcaccaagcaatctcttgccgccccgtggtaaaggg

SEQ ID NO: 29393 - DNA, 274 bp, Glycine max
  Clone ID: PAT_MRT3847_126545C.1
aattggcattagtggtctctaaattgattgagtatatatctttatcgttcttgtctgaaagatctgttcatgttgctagtctcctcctgctcctcctttattggtttagaggttgtaagttgatcaatattgaaactggaattctttgaataggttcctgcctttgcagtccaagtttgaattttagagaggcctctctttcaagatatttgagagcgctataatttggaattttaaattcattcatctttcatgtcagaatagtttactattt

SEQ ID NO: 29394 - DNA, 1516 bp, Glycine max
  Clone ID: PAT_MRT3847_126546C.1
cctcggcccgcgcaaagcgcaaagcgcagttgttgctctttgaactcgaacgaagttctccgaagtcgaaacactcgttcgattcgctgaactctgaagttaatttttgttgcgaaaatgtcggtggcgaagaagttgattagatgcgtcatccttgacttggacggcacgctgctcaacacagatggcatcgtaggcaacgttttgaaggttatgttaggtaaatacggaaaggaatgggacggaagagaagctcagaagataattggaacgacgccgtttgaggccgctgctgcggttgtgcaagattatcaacttccctgctccgccattgaattcctctccgaaatttcgccactcttctctgaccagtggtgcaacattaaagcacttcctggtgctaataggttggttaaacatttgaagagtcatggagttcctatggccttggcgtcaaactctccaagggaaagcatcgaagccaaaatatcctatcatgatggatggaagaattctttctctgttataattggtggagatgaagtaagaacagggaaaccttcccctgaaatattccttgaagctgctaggaggttaaacatggagccttccagctgtcttgttattgaagactctctacctggggttactgcaggaaagactgctgaaatggaagtagttgttgtaccatcacttccaaaacagtcgcatctctatactgcagcagatgaggtgatcaattccctacttgatttgcgactcgaaaagtggggtctgcctccatttgaagattgggtggagggaactttgcccgtagatccctggtatattggtggtcctgttgtcaagggatttggtcgtggctcaaaggtacttgggatccctacagccaatttatcaacagagggctattcagatctcctttcagagtatcctgcaggtgtttattttggttgggctggattgtcggcaagaggtgtttttaaaatggtgatgagcattggttggaatccatatttcaacaacaaagaaaaggctatagaaccatggttactccatgactttaatgaagatttctatggggaagaactgcggcttgttatagttggttacatacgtcccgaggtcaatttttcatcccttgaaagcttggtagctaaaattcatgaagatcgaagagttgctgagagggctcttgatcttcccttatattcaagttttaagaatgattcgtatttgagaagctcttagtacaattttttttatcccttagcttcttgtcgaataaaaccctggtgttaattgttgtaagtgcaaaatccagttattcaactcgaaagcagttcgcatattataccctatgattcataatcatgccaatgcaatgtgatttggaacatgcataaagaaatactgaaaaaaaataagagtcattgtttgcattttactatctaagtgcctattggggattttgacctttaattgagttcctcacatatcttaaaggagatttgcc

SEQ ID NO: 29395 - DNA, 302 bp, Glycine max
  unsure (1)..(302): unsure at all n locations
  Clone ID: PAT_MRT3847_126547C.1
tcgcangcacgcgtacgtaagctcggaattcggctcgaggnntnaggattgatttcagggtgnattntgtacnntttnnatnttnancgtngnntnnncatnggggctntctgancagcttgngagatnaataatatagaattagtaggtangaagttgnatagccgatgagaaaaatggganctcagcantcnggcngngcaagagccaaagactacnaccccattngctangcanngntccatgnataancngaccctatatgaagngcataaccaactngggantttngngancccant

SEQ ID NO: 29396 - DNA, 795 bp, Glycine max
  Clone ID: PAT_MRT3847_126548C.1
ccacgcgtccgcgcaaagcgcaaagcgcagttgttgctctttgaactcgaacgaagttctccgaagtcgaaacactcgttcgattcgctgaactctgaagttaatttttgttgcgaaaatgtcggtggcgaagaagttgattagatgcgtcatccttgacttggacggcacgctgctcaacacagatggcatcgtaggcaacgttttgaaggttatgttaggtaaatacggaaaggaatgggacggaagagaagctcagaagataattggaacgacgccgtttgaggccgctgctgcggttgtgcaagattatcaacttccctgctccgccattgaattcctctccgaaatttcgccactcttctctgaccagtggtgcaacattaaagcacttcctggtgctaataggttggttaaacatttgaagagtcatggagttcctatggccttggcgtcaaactctccaagggaaagcatcgaagccaaaatatcctatcatgatggttggtttatttcaggaattttaagcttcttttgtctttgatcgtctttgttaatgcaagtatgggcttgtttcttcttttgttttctttgtgtacaggatggaagaattctttctctgttataattggtggagatgaagtaagaacagggaaaccttcccctgaaatgtgagatgcaatgatgtattgtctagccttgattactgaggaattccttgaagctgctaagaggttaaacatggagccttccagctgtctttgtattgaagactctctgaaagactgctgaaat

SEQ ID NO: 29397 - DNA, 169 bp, Glycine max
  Clone ID: PAT_MRT3847_126549C.1
ctggaatacacgggcaatgaacacgaaaggacaagccacgctggaaaggaaatcgccagacataagaagaccgcctatccaaccaggcaccgccccaagccattaagcgccgttgaaacaagccccaacacaacttgacaacacgatattacaagcacccacaccccat

SEQ ID NO: 29398 - DNA, 207 bp, Glycine max
  Clone ID: PAT_MRT3847_12654C.1
atctaacctacttgcacacatgcataacaatcccgttttctcttgaactgccccaggggaactggtccgaaacccgattaaggcacctaaccattggaagattgggccctagaagtacctaaggcacccatctgttgcctaaggtcaaggtcgaaaaccctgacacaatactaactctcgacacatttaaaaccctgagcacacacc

SEQ ID NO: 29399 - DNA, 663 bp, Glycine max
  Clone ID: PAT_MRT3847_126550C.1
gtcgtttctgttcgattggtttcatactggtgatattggatactttgattctgatgggtatttgcatctcgtgggtcggatcaaggaactcatcaaccgaggaggtgaaaagatatcaccaatagaagtggatgctgttcttctttcacatccagaaattgctcaagcagttgcttttggagtgcctgatgccaagtatggagaggagatatattgtgctgtcatcccaagagaaggatcaaacgttgatgaggcagaggtgctaagatttagcaagaccaatcttgcatccttcaaagtaccaaaaaaggtcttcattactgattctttacccaaaactgccacaggcaagattttgcgccgtcttgtggcagaacactttgtctctcaaatttgagcaactcaaatccccagtcttttgatgcttacatatatgcctgggcaaaaatgatctttcctacaggatacaataatagagattctagtttccaatgattcttgttcaattcctttgtaaaaaaaaataaaaaattcttattaaatgttcacaatgtaatgttttcaatgttttatggatacataatttcttaatccttttttttctgcatttcttactacaagaatcatatgatatgtgggaaactgaaaatttattgtcagtgt

SEQ ID NO: 29400 - DNA, 326 bp, Glycine max
  unsure (1)..(326): unsure at all n locations
  Clone ID: PAT_MRT3847_126551C.1
tgagttttcttttttttttttttttnntttncacgaacatgatatcacattaaatgaatgaannnctggtgttctggaagacagcacagatacaattaattataataattgtaacaaaccaacccaattgcgaaaaaaaaaaaaaggttttttcaattaattggtgaaccccatttatttaaccaaccgctaacggtgcggaaaggcgaccaatttccctttagctgaacggaattttttttgcaagaactacctgcccttgtttaaaaaacagcatggcaactggcactattggttttattgaaaggtaacttccttgaagcaac

SEQ ID NO: 29401 - DNA, 276 bp, Glycine max
  unsure (1)..(276): unsure at all n locations
  Clone ID: PAT_MRT3847_126552C.1
tcgagcaggatcgaaccagatatcgcttatctacgcgttcatatctcacaacacggttattctctcccactacactgaatttanttccgagttcgagacaatttcttgccagttcctccataatctccctacctccaacaacaagtttcacctacaactgtgatctccacaccttcaactaccttgtttacaactgattcacttattgtcttaattcttattaatctatctaaagacatttgcctatttcttttctacatcttgtgaaaaattact

SEQ ID NO: 29402 - DNA, 660 bp, Glycine max
  Clone ID: PAT_MRT3847_126553C.1
caatgaagttgaccgatttacttcaagggaccagattagtttctcaaccgtcagggacaaaattttgtcgagggtagattttcattttaacatgttcttggattgtgaaagacgcaactttgtagttcagaaataccacagggatctattgttgcgcctggctccaccagcttcaccccctcccccatctcctcctcctccattgccagtgcttgaaacatcacctgaaaagggtgcaaactctcccattagaagaggccctggaaggcgtggaaaagatcgacgagctggttcacggcgcccccgcaaagttgttgctggaggtagagagatggaaccaagttaacagttttgtttgggcgattatattattagtagttttgtttaaaattccacctacggaaatcattcgttgcagagctggagggaaaatgtgcaagatgagtgttgtattgtttccacataagacgctctcattcttttgactatccgcaattgtccatttttgttaattttttgctgtatatatggtaaagttttcaataattatagtggcaacccattttgctattccgctatcactaaattcctcacagaaaaagtgtacttcctctgttatactactctaaagatatattcaagacttgttcattcgtattg

SEQ ID NO: 29403 - DNA, 394 bp, Glycine max
  Clone ID: PAT_MRT3847_126554C.1
cggtctcgttttgctttgagctgctgagcaaaacttagggccgggccttttattgaggagttcagcgcatcgttctcacaatggagcttgagattgatattgatttgctgaattctccatctgacatggtgaagagaaagctcaaactcaagcgtatagttcagacaccaaactctgtctacatggatgtcaagagccatggatgcttcagcatcacagctgtgttgaggcactctcaaactgtggaggagagcggcaactgactgactgcatggtgccaaccaacaagagatctggctaatgacaccgaagatggtatatataagaagaaggtagatcgtgtggatcagcaaccacactgcaacatgtcaacgattcagcagaactgtttgac

SEQ ID NO: 29404 - DNA, 427 bp, Glycine max
  unsure (1)..(427): unsure at all n locations
  Clone ID: PAT_MRT3847_126555C.1
tttctctacatagtttctttttcactcgcccattcttctttgttaagcaacaacaacctggttcctcggatcctaagaaaatgggaaccagagtgtggtgttgtttcatgatgttcttcctctctctcaatgctcttgcaatagcattggaagatcacaacctcaaaacgacgtccagggatgacatcaagtgcaccccatgtggccaagttccctccccgccgccaccctctccggcggtggtggtgcttactattactctccgccgccaccctctcaatatatctactcttctcccccgccgccggcgtccaccggcggcggtggtggcggcgtttactactacccaccgccgagagggtactacccaacgccgncggcttccaacccaattgtgccttatttcccgttttactaccatacccct

SEQ ID NO: 29405 - DNA, 1201 bp, Glycine max
  Clone ID: PAT_MRT3847_126556C.1
ttttcactctcccattcttcttttttaagcaacaacaacctcattcctcggatcctaagaaaatgggaaccagagtgtggtgttgtttcatgatgttcttcctctctctcaatgctcttgcaatagcattggaagatcacaacctcaaaacgacgtccagggatgacatcaagtgcaccccatgtgggattatcctctttgttcttgtcgctgggtatcttccgtttaatgatcctaatttgatggttatgtataagaagatttacaaaggggagtttcggtgtccgaggtggttttcgatggagttaaggaggattctgacgaggttgttggatacgaatcctgatacgagaataaccgttgatgagatcatgaaggacacgtggtttaagaaggggtataaggaggtaaagtttggggatttgggtttggagtggaagagtgagggtgagggtgtcaaggatttgaatgcttttgatataatttcgttttctacggggttgaatctttctgggttgtttgattcgtcgtgtggggtggaggagggggagaggtttttgctcagggagtcgccagcagctccaaccaccacctactgccctccgcctccgtcgcctccaagctccggcggtggtggtgcttactattactctccgccgccaccctctcaatatatctactcttctcccccgccgccggcgtccaccggcggcggtggtggcggcgtttactactacccaccgccgagagggtactacccaacgccgccgcctcccaacccaattgtgccttatttcccgttttactaccatacccctccgccgccttccacggcggcgcctccgccggtgaaaggctcgttggtctgtgcaatttcgttcttaactctttttattgcatttctttaataggaagaaaaaaaaaaaaaaggggaaattgtggaaataagtgcacaaattagcagatcttgggaagtgaaagtgaggtgagtccaagcaaggacagtgtgcttatttcccattttgcccctgaacttgttacaatttctttcaagtatcatatgataatgataagaatcacttcttagtggtgactttaatgtaggttgatctgcaatttgttgacaatttgtaattgtatctagtcttttgattttggttagtatgaaaaaagttactataaattgaagaatgttctaaaa

SEQ ID NO: 29406 - DNA, 355 bp, Glycine max
  unsure (1)..(355): unsure at all n locations
  Clone ID: PAT_MRT3847_126557C.1
ctgaagtactcattctgaagttaattgtcttgaacacaaatgttgattcgtaaatattaaaacaagctgntagggacgtattaatactataggagtgggcattcatgcgtacgtggcgggggaacttcattccttaccttgcatgctcgtcccttcgtaaattctagaaatcaaaacgatttatcacgatatacacaagattaatgctatcgaggtataatttaatgttagtagaacatttaaatattgaaagatgtatttttatgtatctatgcatagcaatctatattttacgagtcattattttcttcggatgcatgactacagggattgacgaatgcttaattctaaaagc

SEQ ID NO: 29407 - DNA, 473 bp, Glycine max
  unsure (1)..(473): unsure at all n locations
  Clone ID: PAT_MRT3847_126558C.1
tgaacttttctttctttgcttgaggacaagcaaaattgtaaatttgggggagtttgttagtcgctttatataactaacatttgtatagaaatcattttccaaagcttgtatagttccccgatttatggtcattttggagtaaatttgattaataaatcttgttttatggttcatgttgtctctagaacatttccattgaatttaatgatgaaatctgtgcattttcaggtgaaaaagaggctaagttttgaattgcanaatgtagcagttgggctaagctcaacagttgggctaagcacatattcaccactaagcatagctttagcgcgcttagcacaaaggagaatctggccgagcgtcagcatcaaagtcgcacgctaattgtagtaggtgccttcagccaggctaagcttgagactggtgctaagcccaatttcacttactcgcgctaagcgcgagggtggcgctaagcg

SEQ ID NO: 29408 - DNA, 529 bp, Glycine max
  Clone ID: PAT_MRT3847_126559C.1
ggctaaaaagagatcacgcatgagaggagagcagagcagagagccaggggagagagaaaagaagccaacttttattcaaaaactccttccccaactttgttagaaagctatttttgcttcttttcttttaaaaaaactaagttgcttcatttttttaagagtttttcatagtatttagcctagtttgtccttttaaagataagagaagccccaagaaagactgggcaaacactacttaagaacacacctacccatccttgtgtcaagaatagacttcattagcattgtcatctcaaccaaataactaaatttaataatctatttaagatttaggaaaggtataactagttcatatatttagttgacattagcgcaaagtatgaaatgaaaatggaataaactgtgcaataacataacaaatacaaatctgtgttatttatcacgctatggtcatgtgaacatggccaagaaaccgagaaagtcaacaatccactgtatgcctgtaccattggaaatggcaacatcccat

SEQ ID NO: 29409 - DNA, 127 bp, Glycine max
  Clone ID: PAT_MRT3847_12655C.1
acggttggaggtttaaaaacccgccatccattaataatatcccaatgcatcacattgagctcttccaaatttaatttaacacacttcaagatttcaccgacttgcatatccaagcccacccgtccga

SEQ ID NO: 29410 - DNA, 327 bp, Glycine max
  Clone ID: PAT_MRT3847_126560C.1
actagtccgccctcgtccttttttttttaataattataataattgtataagtgaatgcgagtatgattacgaaacccccaaaacacttaattgagtgtgaactgattagaattaaaagggttttaatctcaatggctgagcaagggttcacatagagcattaacagaagagcgttagtgttcttgcgtattttttctttatcatccgagtcacatattcaatatatatatatatatatttatatatatttatatgcacgtatatatatatacatatatatctctatatttatatatgtgaaggcgtgctttcttagataaactttta

SEQ ID NO: 29411 - DNA, 480 bp, Glycine max
  Clone ID: PAT_MRT3847_126561C.1
gggcaaaaaaaacaaaattggcaattaacttaccctcccaaaagggaaaaaaaattgtattaataataataaacccgttttaaagcttttttcccgattgccaataaattttccctaaaattcccgcccggaaataaaccccatatttcaccaaacccccaaataatttttggctaaccgggaaaggaaaccccaaaccccatatttttccaaattcccgaatcagttcaagagtccaaaatgaatttccccccctcccatagacgggggcccctgggacaaacccaagtgggaggccaactttcccccccacaaaattgaaaaaattcccatgccccaggtttcatcaacttgacaagcaataacccaagggctttcgtcaaagggggcaatggtttccccaaggggcctgccacaaaacccccggaaaaaatgcccctaatagggccttttgcaggagaaaatcctcctggaaccccc

SEQ ID NO: 29412 - DNA, 580 bp, Glycine max
  Clone ID: PAT_MRT3847_126562C.1
ctcagctccgaaaggtaactcaaacatttaaattttaagcataataatccatggcattataatatacacacatgataacgctctgagagctgcgccaactggggtaacaagaccgcggattgatttataagaaagcacagttacaacattgctaaaaggtctatgagtcgagctggacataccaaatgccttgagtcttaacatgcttaggagcttaagccccccaataagtatcagaacgttgaacactataaagcacctcaaaaaccacaccacaatgacgctaggactcggtgacactaaaggtgattatacatttggaagaagaagcactgaaattgttggcgttggcaagtgcctcataatttgcttgtccacgagcaggaaaagcaacagcattgttgtaactagtggaggcaccccttgcgtgggggtccaagaaagaggaaccatggtaggagctgcctaggaactccccactgagagctgtatggatttcgagatgccaccaactgcttaatgctgaagaggaatggcacacggtctctctctggaagctgtgcagagacagctgcatagc

SEQ ID NO: 29413 - DNA, 597 bp, Glycine max
  Clone ID: PAT_MRT3847_126563C.1
agtatccgacagtatcagaatatatcgtcactcaattcaattaaaaaaaaaaaaaaaaaaaaaaaaaaaaaaaaagaaaaaaaaaaaaaaaaaaaaaaaaagaaaaaaaacaaaaaagaaaaaaaaaaaaaaaaaaaaaaaaaaaaaaaaaaaaaaaaaaaaaatgaaaaaaaaaaaaaaagggggggccctttaaaaaaaccaaaattaaccccaccggaaaggccatgcaaaacctttttaataaggccaccaaaaaaaaaacccgggggggccgtttaaaaaagccctaacaggaaaaacccagagctaaccaaacaaaaggacctggcaaaaaatccccaattaaacacggggggaaaaaagaaaaaggcccccacgaacggccttttaaaaaaagggccaaccctaaaaggaaaaaggaaccccccttgaaggggctaaaaaagcggggggggggggggggaaaccccaaaggggccgctccctttagggaggccctaagggccccttcttgggctttatttccattatttttaggaccgtgacgggggatttcccggaaaagttaaaaaaagggggctcctttaagggtcc

SEQ ID NO: 29414 - DNA, 418 bp, Glycine max
  Clone ID: PAT_MRT3847_126564C.1
gtcaaggaccagatctctacactataacatcgagccttaatgaaccgtccatacatcgatggaaactgtaggctgctcattacgggtgatcaacaataggaacacttgtccataacatacgtgaatcaccactgcaagagggtataaggcagaatacatctgatctatgagcaatggatctttcaccgtattacagacgcatattgctcagagtgcaccattccagaagtgatcaatgctcctataggcaccataggcctggagaacaaaataactgggattatctactcttttctgttcagttgcaaagatatagggcataaaatcttgaggaatggaccagacagagatattcaaatttctcttgattctggactcattagagcctatatgaagcacactatgacctgcttgccag

SEQ ID NO: 29415 - DNA, 318 bp, Glycine max
  Clone ID: PAT_MRT3847_126565C.1
tatgacggaaagcgcacgcgctcacgcaagctccggatcctgtatagcgggcgcgacccacgcgttcggttcattctctttgcgcagttccctacctctccttacaagatgcagatcttcgccaagaccctaaccggaaagaccatcaccctggaggtggaaagctctgacaccatcgacctcgtttaggccgggatccaggacacggaagcgaattcccccggatcattaacgtgtcatgtaaaacggaaagcagatcgaggacggacgtaccctcgccgtctacaacatccagaaggagtcaacccttcaccttgt

SEQ ID NO: 29416 - DNA, 362 bp, Glycine max
  Clone ID: PAT_MRT3847_126566C.1
caattaattccaattccatatgttcaataaataaggatgcaaaaattgggaaggttaattggaatgagtgggctggcttattaagcctatcctgaatccaaatgaaatgagatctgaattcctcctcgaattccaattccacatttccaagatataacgatgcaaaaatgttcatatatgaattgtaattatctgttattcttattacgcctatcctgaatccaaatcaaatgatatcggaattcctcgtccaattccaattccacattctcatgacctaagtaatgcaaaaacgttcatatatcaattgtaaatatttattattcttatcatgcctatcctcaatccaaaagacatgagat

SEQ ID NO: 29417 - DNA, 322 bp, Glycine max
  Clone ID: PAT_MRT3847_126567C.1
tttccccgggctgcaggcaagaaacagcttttaagaatatataatattcaagtctagaaagttaaagagaaaaaacaaaataagaaaataacacgaagcgatatatagagattattaagaaaaaacaaaaaaacatcaaaagaaaaaacataaataattaagaaaaaagtaaaaaaatttcaatgatagaggagattgtagaaaataaataaagaaaaatgaatcagaagagaaaaaaactaaattaaggaaactacaaacaacaaatgcttaatacaaatatacattagaaattatagaataaaaattaaaaattataaca

SEQ ID NO: 29418 - DNA, 614 bp, Glycine max
  Clone ID: PAT_MRT3847_126568C.1
aactgtcctcctcccccccggtaccccccactcccccacacccccaacccaaaccaacaacctcccccccggggcacccaaagggggaaacctctcaaaaaaagggccaacccccaccggccgccccccgacccccccccccccaaaaccccaaaaggaaatgctcccgccaacaaaacaccgcggcgaaagagggggcctccggccccgcaggacaaaaagcctccaaaagagggccccccccccccaaaacacctagggggaggggaggcaccccggggaaaaaaaacaccccccggggggaaaaaacccacaaagggggccccaaaaaaacccccacaaaaagggcccccgggaccccccgggggggggcaccgggggcccccccaaaaacgggggggggccagaagagaccccgggaaacaccggcccccactggggggcgggggcccccccgaaaaaaaaacgcccccccggggggccctcaaccccggggcccccaccccccccgcgagaaaggggcggccccccccccccgggccgcgcgaaacaaaaccaccggggggccatccacaccggcccccccccggagagaaaacaccggtccccccccc

SEQ ID NO: 29419 - DNA, 245 bp, Glycine max
  Clone ID: PAT_MRT3847_126569C.1
cggctcgagcccaggcatattgtgctgtccttatcattgactccaccactggtggtttttaatctggtatttcttaggatggacagactcgtgagcatgctctacatgctttcacccttggtgtgaagcagatgatctgctgctgtaacaagctggatgccacttccccgagttactctagggctatgtatgttgaaactgtgactgaagtctcttcctacgggaatagggctggttacatccca

SEQ ID NO: 29420 - DNA, 369 bp, Glycine max
  Clone ID: PAT_MRT3847_12656C.1
tctactcgtacaagacaaccacactggtcttgaagaatatgaatgggggtggaatcggggacaacatggagagcgaggacgggtgcatcactgttgtgttgtaggtagaattgcactggaactgttgcgctttctacataatcaaacaccttcggtgtacccaaggtgtgtagacggagaatgctgattgcgacaccaagaaggtgaccgctaccgaaaaagtggaccccactaaagtgagggattacctggggcagaagatagggtagaaggtgggactggtgtgtactcataccaagaaggatctggttgacgagtaagagaacatggctgttactgtgaacaacaaatgcttgtatttcaaaaccc

SEQ ID NO: 29421 - DNA, 106 bp, Glycine max
  Clone ID: PAT_MRT3847_126570C.1
ctttgaaaatatgacggaactataaggccacttgccatatagttgagtgtgccacatccggagggagatcaatcaggtgcttttagtcaaatttttctgcctgcat

SEQ ID NO: 29422 - DNA, 1377 bp, Glycine max
  Clone ID: PAT_MRT3847_126571C.1
tgagaaaaagttactctattttattccaaaggtcgaaggcgaaccagatattctgtacatgatatgatcctttccctgtttcagatatcactcgtcagaaatcaacataagattagaaggatttgtatgtgggtgttgcgtgggggaagatcggaagttgatgagtaaatgggatagaaaagctacaaataacattatataagctaattcggattttagctatacatttgatattgagaatcaatttttgtgaaaataatatccagagaagccaaatctatgtcaaaaccataactctgtcctccatactgcacatatagatattctttgggtgatatgggaagagggagaatttcagagatttcaggtaaatctggtgtaggtggaggaaaattttctgtcttagcagtgtagtatatatcagccaagagaatccacacaagatcaggatcaatagatgcaagtccatggagggcattcagagaagcatctcgaagtccaacaacactgctacaagctatccccacaaccagaccacttaccttcttcagaacgagttctagtgcagaggaactgctcttattacggcataaatcagctatcatgttaagcactgcaatctgaattttaagataggaagtctcagcgaatgaatcctctgaacacacggaactgcttctataaggtagttgtaaaggggtcttctcatctttgaaatttgactttttatgaaatggggacgtgatcagaagtttccaaatgtgtgtcccatcagtgtggaaacgccgtgtgaagaaatctcctccgcaaactggcactacaatgctgatcacattcaagcatctccggacagccactgggttcctgttctgaatacaagtaaccaggaatggccatattttattcattgccggaagcagcctgttttcatcagccgcttcttcattagcttccaaagtatccttcagttgatacaatgatagtgattgtagcgcttcttctgttgcttctttaatttctctttcaagtttataagctgcttctacttttgctattgccaacggtgccaccctcaattatatccagagcggccaagcatatttcttgcttgaatgatgctagaagtgggattgcagcagtaatacatgaaccagcaatagaaccaactgttcgtctatatcttctagaatcatttaacttgaataaaatgtcctcccacaggtcttgtgttgtttcttctgaattagagaccatagacctgacatatctggcaaacgactctgcctgagtgggccacaggcaagcttcacgttttgatgcccggacgcgtgggacgactgcctttaggaatggaacagttagatcaggatgttggtg

SEQ ID NO: 29423 - DNA, 735 bp, Glycine max
  Clone ID: PAT_MRT3847_126572C.1
gtcgcatgcacgcgtacgtaagctcggaattcggctcgagagaagattgcatttgcatcaagatggagatgcaacaactcctcagtatgggcttcccggacgagttagccgcccaagccttggctgccaccggcggcaaatccaccgtgaaagccaccgaatggattctctctcacaagcccaactcttccacattccagcccaagctcgatcgcttcttccattcccaatcacaagaacatgacgaaccctccaaacgccccaaaccttctccttctccttctccttctccagcacaaccacaacactggccctctttcttctttaagatcgcagacaagaaacacgccaacacccacattcacgaacccttgtacgagcggttgcgtcccagaacccttgacgacgtcgtcggtcaggagcatctcctcgcccccaactcccttcttcgctccgcaatccaacgcaaccgcctcccctccatcctcctgtggggcccacccggcaccggcaagaccactatcgccaaagccatcgtcaactccaccccttctactaactcttaccgcttcgtctccttatctgccgtcaccagcggcgtcaaagacgtcagggacgccgtcgacgaggccagaaaactcagactcaaatccaaccaaaccaccgttctctttcgtggacgaggttcacaggttcaacaagtccccaacaggactctgtcttaccccgtcattg

SEQ ID NO: 29424 - DNA, 342 bp, Glycine max
  Clone ID: PAT_MRT3847_126573C.1
atgcggaaagtgcccccaatccttttcagtgctggtgggcgtatcattttcggcgtagggcgggtgccacgtcggatgctcacgtggttcctctgccacgtgtcgcctttctggccgctatatcttgcgtcgatttctggccattattttgggcgcaactttctggaaggtctctcagcctctctcctaacgccccccgaggccgtgtgggttaccggctaccgtgttcgctccctcctcgcgccacgtgttgctccctccgtaccctccaatgattgcatatcgccacgtttcgacctctccgtgcgacacgtcagcgatggttgtgacgctgtgatgtga

SEQ ID NO: 29425 - DNA, 260 bp, Glycine max
  Clone ID: PAT_MRT3847_126574C.1
gtcttgatatgaatgcccagtttaagtatttggttttgtatttttgtttgagtttcactgggttttagattttgctgaatctgaatatttacatttacatcttatacacaagcaaggaatgcataaagcactatgaatagggtctgtttggttctcattctaaaacttttcagcgtgttttgaacttttggaaacgaattgcttttgctctttgtttcgaccgtaataatgtaatttgataacaattaacaagtacatcg

SEQ ID NO: 29426 - DNA, 136 bp, Glycine max
  Clone ID: PAT_MRT3847_126575C.1
gatgaacgtggtgagcgcgttaatggtgactcggaaccaactcggagcacctgaaggcatacccttcggatcggtatggttgttcgtctacgccgggatctccttttccctcgtcatcttcgccggaatcatgtca

SEQ ID NO: 29427 - DNA, 445 bp, Glycine max
  Clone ID: PAT_MRT3847_126576C.1
gcagttgaaagaactattcaatgtcaatcattttattgttagtcatgccaaccctcatattgcaccactattgagattgaaagaattggggcgggcttatgggggcaacttttctgccaagcttgctcatcttgtggagatggaggtgaaacatatgtgtcatcaaatactggaacttggttttccattatgtggacttgctaaattgtttgctcaagactgggaaggtgatgtgactgttgttattcccgcaactcttgctcagtacaccaaaattatacagaacccttcttatggagagcttcaaataggcatccaaccaagggagaagatgtacctgggataaacttttattcataaaagcaaatagtggcattggacttgctcttcatgaatgtgttgtgattctcaatcatatgagaagactaaagataatttctgatag

SEQ ID NO: 29428 - DNA, 460 bp, Glycine max
  Clone ID: PAT_MRT3847_126577C.1
cagctgcaataagtttatgtagaacgcccttcggttgggtggattcatgagctggtccatgtgtcgcacttcgcgggagattagcaccctctgaaacgaatttaataggttttgtacaatagaggggggtacggatttcagaaagatcacatgagagagcttgacgtaaatccatcactctgggaagtgaagtgatgggtttcacacgagtaacacctcgagtgcaaattcatatggatgatggagggtgtcaccgtctccatcacgaccccaatttggccttccctagatctcagcccagagaaggcttgctagatttaattggacctaagatttttcgggaaatccatccagctgcagtgctgtcatatccatctcgcttagcctgacataaccttctatcactcaaatgacacgtggtatgaaacccccttaattttgggccaactattttaaaaat

SEQ ID NO: 29429 - DNA, 112 bp, Glycine max
  Clone ID: PAT_MRT3847_126578C.1
ggctcgagactcccctggccgctgttgttgcttttgttctaccaatcaactttctctggaaatcgtgtggggtttgtccaaggatctcttagatggttgatgctgaggacct

SEQ ID NO: 29430 - DNA, 203 bp, Glycine max
  Clone ID: PAT_MRT3847_126579C.1
tggcgcgagaaaagccgttgcgaaaactgaaaagcccgggattgttgaagaggagaatgtgagatgtgaggatgatcgagcactagttcccagagccaggccgaaattcgtggggttgagaagagaggtagagtgacattagacttgtcgatagtaattaaggtgccaggaagtgaggaatcacctgacgagaactccttcca

SEQ ID NO: 29431 - DNA, 304 bp, Glycine max
  Clone ID: PAT_MRT3847_12657C.1
gaagtcaatgaatagaccatactatacataacgctccaaaagtactgtcccacggcatgtttagaaaaatgaacctcattacgatgaccaagatatggatgactggacaaaaagtgtcctttggttgcgtctcaaatttccaattcttacatgattgaaactcatcagccaccatgtgaaagaattctaccatctttctgcctcagggtccctttggtgtttgccttatttggaaaacggtatttatgatgtgcggtatgcatgaacgatggatttaagaacactcttgttttgcataacttct

SEQ ID NO: 29432 - DNA, 500 bp, Glycine max
  Clone ID: PAT_MRT3847_126580C.1
cacgcgtccgcccacgcgtccgcccacgcgtccgatgcggtacaaaagtaaatcatgctgtcctgcttgtggggtatggtacagaaaatggtgaagattattggatagcaaagaattcatatagtgataaatgttcgtcacaatggctgggtcagaataaaaagaaaactgagcacttgtaaatttggaatcgagggttactatcccattataagagtcaccgatcaacaagcccccaaatattcgtgacaatggcatcggctaactgagcccattgaggctttggaagtaattaataacgaggccaaagtttgatggagactatctttgagctattttatctttatataagtattgtaatttctgttccctaaatcatctggttgctgcacgtgttggccccagattgagtatctgtttagtctatctacagtatctatctaaataaaggtgcgatggctctatgggcatcattataaatgcatactcattttgtcttt

SEQ ID NO: 29433 - DNA, 664 bp, Glycine max
  Clone ID: PAT_MRT3847_126581C.1
aagtcccacattttcattatgtggatgagataaattgtgatgcccttgtggagcttaaaacatcttttcagaaaaataatccttatccagatgttaagtacactttccttccaatattaatcaaatcactatctatggccctcagtaagtacccctttatgaacagttgcttcaaagaggatgcattggaggtcatcctcaaaggtttgtttctccaacataatctgatgaatgatagatataaattttgctgcccttggtagcttgattttgtttaaatttttgtagtgtgaatacaatgtttgtattttttttagttaaaagtatgaattcaaggaaaaggcaacaattatttaaaagttgaaaaatatggtgaggtgaaagaggttcccttcattagccaattgtctctttggctttatggcacagcctcttccatgttcaaaataaccttcaaatgatctactgagtttgtatgcatattggtttctggcatatgatgtaagtgtttgagaagttttccctcatctattgtatccgagtttgggataatgatcatcttgattgtggtattctcaagaataatgttttcatagtttccttgcataatattttttttaatgttatttcacattactagaaattaaagtacttgatgttaaac

SEQ ID NO: 29434 - DNA, 363 bp, Glycine max
  Clone ID: PAT_MRT3847_126582C.1
ctaaaaaaacaccggaaagggcttcccccaaataaaaattttttttcccagaaaaaaaccccccctcccttttttgtttggcagttttctttttttttaaaaaaaaaaacccccggggggtttttaaaaaaatttttgccaaaatcttaaaaatggggttggaaaaaaacctatttacccgggttggcgcccttttttggcgtgaaccccaaaaattttccagggccaattaaggtaaagcccattttttgccccaaggggaattttaaggggcgtttaggaaaaataaaaatttttgtaggggcgggatttttttttttttgatttaaaaaagtggaaaaaaaggttttaaaaaggttaggg

SEQ ID NO: 29435 - DNA, 309 bp, Glycine max
  Clone ID: PAT_MRT3847_126583C.1
ttcgtccgtttgacagagggttaattgtggagtactttggaaggatgtcttacgttgctcataacgttaatcagccccaagagaaagatttgttggagggaaatttttcctttgatattaaatctcgctctagattggaaaaagttttcctctccaaaagcacatttggttgggggaaaaccctccaatttgaatttattgggggcggttcacattcttcaaaaaaattttcttgaaagggagaatcagaaaaaccccaaaaggttgatgcccgattgagaccaagaatagatccccaatataatgagg

SEQ ID NO: 29436 - DNA, 216 bp, Glycine max
  Clone ID: PAT_MRT3847_126584C.1
gactcatgggacaacacgttcatgcgcttgcattatgatatagacatatctatggaagttgaacacagatattgactaaataatattctgaaacccacattccctaccccgtcataactgatacatagacttacccataaaacaggatgagatcagcatcctcaccatcggaatcatatacgcagaccattacagtataccttacataaacaccat

SEQ ID NO: 29437 - DNA, 280 bp, Glycine max
  unsure (1)..(280): unsure at all n locations
  Clone ID: PAT_MRT3847_126585C.1
cctactttgtataaatngggtngtcttctaaaacaacccccattcacatcnttaagagggggggatcgatccctgatttgtggaatntgcttgcataggcagattcatattatnatcanttcatatacaccattnacntatcaaggttcnacatttnttttggnggtccttgatctncataaacaacattgggggtcnggaccagnaggactcncatcnnaggngcngaagngcacacaagtcaggggnttgtngnttcaaanccaggggagggtacnat

SEQ ID NO: 29438 - DNA, 217 bp, Glycine max
  Clone ID: PAT_MRT3847_126586C.1
aaatataaatacgggcatgatttgttataagaaaatgtatcaaatgctacatcgataaaccaggacacagtctttgctataagaaccacccctcaagaaaatgcagaattaaagcctacttaacaaaaccggcattcacgatatatgattgaaaaacaaatgcgaagctaacaaatagaaccttaggctcggtgggaggatactcaaacacaatatc

SEQ ID NO: 29439 - DNA, 178 bp, Glycine max
  Clone ID: PAT_MRT3847_126587C.1
ttaaaacaatatgagattttatttagagattgacgaggactcacgtgcttgtatatgcttgaatgtcgcttcctcctgatagccgaggtatacacacagtcaatggcacagttgaaacaagaaatgaaattgtaaacagagatgctatgtccatctcatgccgccaacatagcctgaa

SEQ ID NO: 29440 - DNA, 351 bp, Glycine max
  Clone ID: PAT_MRT3847_126588C.1
gtgaactctggagaaacccataagccatggccttcttgaattggtggcacatgctggtccttgtgcttttgcttgacaatatgagcttttatcgttgtgttgctgctcataaaaatggcttacgaacctgttgcatcttgggggattccctgggggatgccagaaacaacatctatttcacaacgctctctaaggcaaacatacctcccaatgggaccgatttcaaagcctctggaagaaataccactggtcgctgcccccatggaagaaccactggggatttattaggagaggaatcgggacaacgcaattatgctcccccatttttagcttccacttctacagggaaaa

SEQ ID NO: 29441 - DNA, 690 bp, Glycine max
  unsure (1)..(690): unsure at all n locations
  Clone ID: PAT_MRT3847_126589C.1
gcgnnnnnnnngaactattgattggtaaaacaaaatcccctgaaaagtaatgattctttcaccacaccggtgtttgttgaaaaaattgacgaagatgaactactagtactagacactggtaaatgcttatgctaaaacattgctttcatggaactcgagtagaggactcgcttgggcagacggggatgacagtccatcaacttggaagccttttgcgttttccccttttgattgtgcccacaatactgtgtaaaatccgatggcaattatcactgcaccaacaacactgccaacatggagtgtttcaccaaggaagacaacagtcgaaaaggcagcaatggcaatccccacaggcttgaacaagctaacaaatacaggtcctttctttttaatgcaccaagtgtttacagaaaatgtcaccacacttcccacaacagctgaatagaatacagcgatgagatcaatgtcagggcttattttccagtcatttggatctctgactacaatgagagaaagtattgcactttggatggttccaaacaggcaatagtaggctaatatggttaactgagatgaatatcctttcagaattgctgcctgtgtaatattccaggctgcaagagaaatagaggcagtggcaaagaagagacctccaataacccagttactggtttcagccaacaaaggtgg

SEQ ID NO: 29442 - DNA, 222 bp, Glycine max
  Clone ID: PAT_MRT3847_12658C.1
cagagcacaactcatccgtgagtgtaaggatggagacagcttcttccatggctctctcatccccatccttggatggcaacgccgtaaagctgggccgatcaacgggatcaatgctaacggtgcgtatgaggaagatcgtcacccttcaagtctcctcaggaatcccattctacggcccatactttgacaagtacttgagcggaatctccggggagctcccgt

SEQ ID NO: 29443 - DNA, 417 bp, Glycine max
  Clone ID: PAT_MRT3847_126590C.1
aacattcctccttgctccccaacataaaggcttttttgtgcgcaatgatatttttcactttgttgaaaaggatccagttcaccaacaacaaccattcttgtgacctcagagcactcttgattcaaaattgaatgcatcaattgcaaccaataaatctgtgtccaaatacatgctgggtggagatatccaatctatggactacgttgctacaaatgatgtcacagaaaatggtgtagttgataaatatggattttcagagcaaatcatgcagcgagcccctgatactgagcatattagggaggataatactgttgaagagtcaaatggttcacttcaatcttcagtgaatgcagtacaagaccatgtgcctgtttctcctgatgaacctgctggggagctacaaaagcacacttatgc

SEQ ID NO: 29444 - DNA, 215 bp, Glycine max
  Clone ID: PAT_MRT3847_126591C.1
aatatactcaatgatgtattaatacttcatttatttaatttactcataaggcatcacgaaaatatcagaatatttgttcaccttcaccttggtgctttgtcgggggaaaaagaaaaaatcgactacacgaaccggggcggacacactcacgggttttcactcggggtggggcatacgtgctaatggtgccaaggagcagctactgcaaaaatgcc

SEQ ID NO: 29445 - DNA, 384 bp, Glycine max
  unsure (1)..(384): unsure at all n locations
  Clone ID: PAT_MRT3847_126592C.1
atgtatattaacaactatttccaatgttgtcaaggtcaacaacctacttgggatcaggaggggggaggggggtgcaagatcataaaacttacgatagtaagaacttgccctaaattgaagaattacagattataaatctaaaacaactccacagattggaaggctggctcaagacaacaaggtagatgtgtgagagacaaaccacattggtaggttggctcaagacagcaaggtaaatgtgtgagagacatggcccccatgaacagaggtttagaacttgagatgaatgagatgcntgcacctgcgaatggcttgaacaatagatgggatctgttttgtgaaggaaaatcaacaatttacggaacaaaaatgggttaaaatcca

SEQ ID NO: 29446 - DNA, 934 bp, Glycine max
  Clone ID: PAT_MRT3847_126593C.1
gatgcaaagggtgagtgagagagacattttggtccttgaacataataatttggaccaaaatcaaagatgatggaatccggggctcacttctgcaactcttgtggtgaacaaattggacttgatgccaatggggagctgtttgtggcttgtcatgagtgttattttccaatttgcaaggcttgttttgaatatgaaatcaacgaggggcgtaaagtctgcttgagatgtgccactccctattctgatagagtaaaggataatgatggcaccaaggtttatgaaaatcaatccacaacagctgcccagatcaatgtttctcaggatgttggcctccatgctaggcatgtcagtactgtgtccacagtggatagtgaattaaacgatgaatctgggaatccaatctggaaaaatagagtggaaagctggaaggaaaaggataaaaagaagaagaagaaaaaagtctgcacctaaggctgaaaatgaggcaccaattccaccagaacagcagatggaagaaatgcagtcctcagaggctgctgctgctgaaccactttcaatggttattccaatctcaaaaacgagactcgcaccatacagaactgtgataatcgtgcgactgataatcttgggtcttttcttccattatcgagttacaaatcctgttgacagtgcttttggtctgtggttgacatccatcatatgtgagatctggtttgccttttcctgggtgttagatcagttccctaaatggtctcctgtcaatagagaagcttttattgacaggctttctttaaggtatgaaagacctggtgaaccctctcagcttgctgctgtggatttctttgtcagtacagtcgatccttctgaaagaaccccattgatcacgggtaatacaggctttctattcttgctggggactatgctggggataaag

SEQ ID NO: 29447 - DNA, 245 bp, Glycine max
  Clone ID: PAT_MRT3847_126594C.1
gcagatgatgtcaatgggtgctggattttgtatgccgttcatgatgctacctaatgctgctcatcatatgatgaacacaccccatttacatcagttaatgggacttggtatggggttcaggccaggcacagccatgccttgtagcctccctcagttccctattacacctttgcatggtatcactgacaacagagttcacatgtttggtttccctaaccaagttccacccatgccaatttctcatg

SEQ ID NO: 29448 - DNA, 220 bp, Glycine max
  Clone ID: PAT_MRT3847_126595C.1
tttttactcttttgctttcctttccctggtttccttcaaaatacttgtaatctctgatctttgggcagtaatctgttcttaaaaagcagttagtggatcagtgctatttggatccattcctactcagagaacctgctgagtggggccagcagcataagtatttctaccagcctagagttgataaaaacctctcttgtattaatacttcgcagtgctacat

SEQ ID NO: 29449 - DNA, 252 bp, Glycine max
  Clone ID: PAT_MRT3847_126596C.1
ctcgagccgatcgagccgcacagagcgtattttgctgcaaagcctagcccccatttctggaagaacgtctccgtactggtatacatcatcctctctgtgtctgagtacaaaatgctgactttagctgcgaactaagtttgagtataatgtagttgtaatctaactgaaatttgcgagtatgggattcgattgtgcagatattcgaagatgtctgtcgaagtggttcgacatttacgagtctgacatggttga

SEQ ID NO: 29450 - DNA, 615 bp, Glycine max
  unsure (1)..(615): unsure at all n locations
  Clone ID: PAT_MRT3847_126597C.1
aagtaaaaagagagaagaaaacgaagagagcaaacaaaaaaccggaaaaggagagaagcaaaaacgaacacaggaagagagatatagatgatataaaaaaaaacaaagaagagcacaatcaagaaaggagaataaagacgagaaggaaaacgaaccaagagcaccaagcgcgaactaaagagtaaataacgaaaaaaactagggtggaggaaaaaaaaaaaacagangaaaaagagaaacaccaaaagaaattgaaatgcaacgacgaaaaagaagacaaacaaaatgaaagtgggaacaagaaaagaaaacaaaaaaaaacaggcgcaatgaagaaagactgagtaaagagaaaaagacaataagcaaagggaagcgcaaagaatacaacggacccagagcataaagtaacaacgaaactaagaaggggcgcgaggaggaaaagaaatgataaaagacgaaagagaacaacatgcaagtggaaaccaggaagaaatcggcgagtagcccagacacagataaaaaacaccccaggagaaggaaaaaacaaacaggaaaaaaccgaggaaggacaaaaaaaatccacttcggacttaaaaaggcaccggaggggaa

SEQ ID NO: 29451 - DNA, 179 bp, Glycine max
  Clone ID: PAT_MRT3847_126598C.1
tcgctctttgtgtcggttcatacatctacctgcaggacgcagtatttagttatgaccatcaccggagagaccatggacgttgaggtggaaagaactgacaccataaatagcgtaatggccaatagccaggacaaggaaagagtagccctgcaccagcagcgcctcattttcttaagaaa

SEQ ID NO: 29452 - DNA, 737 bp, Glycine max
  Clone ID: PAT_MRT3847_126599C.1
ggctcgagtcaggattgaggtactgcgtttcggaagcaggtaccaaagtagtccttcgaggtttagtgatctgttttgcgcttttgaaaatttgaatatatgattctgcttctagttcgaaacttgtcttaagcatggtttagggtttgagcatagtttagggtttgagcatgattaaatcgattttcacttatcttctatagtttctgctgatttccaaatcttgtatcttagataggccagttgaatttttattcttccctagtcataacgctctgatttccaaatcgatgttttgttatggagaattagtcgatagtttcatctggccaacgtatcatatgtctttaatttattaattaaactaagattatgcataaatataaatatataaagttttgaagattaggttatgcaatagaaaggggcaaggaaggttctattgttgtttgtttgtaattgatgtttctgaaattactttttgggcgtagacacagatggctcgtacgaagcaaaccgctcgtaagtccacaggaggaaaggctcctaggaagcagcttgcaaccaaggtctcttctataattacaacaactattaattaatcttggaagctttagatatattcgaatgttaccgttgctcttcgcgaaattaggaaataccagaagagtaccgagcttatgatccggaagctccccttccacacgctgggtagcaaaattgctcaggacttcaac

SEQ ID NO: 29453 - DNA, 807 bp, Glycine max
  Clone ID: PAT_MRT3847_12659C.1
ggttttatttcaaaatataaaaaaacatttaaaaaatttgattcacccccacccccataaaatgttctacaaaattttcgaacataaaagaaattgttatagcaaaacaaggttctgaataagcacaatatgtgattttctcattttaaaatgcaaccttgtatttttcattgttacgttgtgcttggtagtattgattttaggaaaagcatacgatacagtacatgcaataagcctacaatatctatggacggaataccatgtccaccaacccttgggcatcctttcttttcgacgttgtcacagtttcacgtaaagtttgtgctctaagtctactcttacccactaattatctttgtccattgcaaatttgcaatttgcaagctctataacctgtgttctctctctctctcttccatttgtaacgctaccatagatggccaatcgatggcttaggcctgaggtatacccttgtttgcagctgttggagttgctgttgggatatgcggtttgcatgcagttggttcgcaatatctgcatcaaccccgatgtcaggtctctggcgctcgctctcgctttctctcccctcttgtgatggctggctctggtggctttgcatgggtggggcggccgtctcggggtttctggttgtgctgcggctccttggtgcgtatttctctgattgagtaccttgacttgcccatggtttaaactataaactataatgtataaaacatgagtagatgtcatttgattaaatttataatattatataaaaaattaaacataaaatatggatagttgaaa

SEQ ID NO: 29454 - DNA, 337 bp, Glycine max
  Clone ID: PAT_MRT3847_1265C.1
gatagagagagaaaaaagcgctgagagtaacgtgcatgagaggggactggataaaaatacagagagatgcagaaaaggccaagagagaaaaccagactaagaacacacggaaaacaacaggcacgacaaagtacagaaggaacagaagacaggcccggaaccggaaacaacgctatgatataaacttgggcacagcaaggggacggactcataaacacgaggagaaacatggggctatcatacatagagagagcaagaggggcaacatactcttggacgaagaaccacagcccaaaatttctgataaaggcgagaggaagcaccggacggaagacaa

SEQ ID NO: 29455 - DNA, 452 bp, Glycine max
  unsure (1)..(452): unsure at all n locations
  Clone ID: PAT_MRT3847_126600C.1
gtggggggccccaaaaagaaatccggaatatactattatcgaaatttaatctttatctgaaaatatttagcgggggtaaataaaacaaatatttgatctttttggggatgactcacacaacttgttcctatcccaaattttctggttacctttttaaaaaaaaaaaaaacccgggttaaactaaaaattttttcgatttacctttttttggaccctttttttttttttaattaaaagggggagagttttcctaaacctgagnnnnnctctcgatttaggaaattttttttaccaaggggggagatttacatcaattttaaccaataaaaaaaaatgtgttttgttttccccccaccaaaattggactttttgggggggggaaaaatttttggggaataaattaacaagaggaattttttaccggggggtttttgggcggttttcccactttt

SEQ ID NO: 29456 - DNA, 382 bp, Glycine max
  Clone ID: PAT_MRT3847_126601C.1
gcagaatgctatgatggtcaatgagttcctcgggcagagttggagtcatgttcttcccaattcaactgaatcactgggagttgaggttcttaagtcccgtgggttcttcacacatgcatcctggtattggataggggctggcgcattgcttggatttgttgttctattgaacatcacattcactctagctctcacttatctaaacccacctgagatgtcacgggctgtcatcttcaaagaatctcatggcaataggaataaagacagaacactagatgatattcgattatcactcagattaacagggaatgccccaagtagcaacctagagatagggaacttagatgataatgggacagaaagtatgtcttccaagtctgca

SEQ ID NO: 29457 - DNA, 117 bp, Glycine max
  Clone ID: PAT_MRT3847_126602C.1
gtactaggtatcattcattatgttacacctattaccgtggaatcattcattatgttacacctatgtatctgtaataaaataggtgtgacatactgaatgattccacggtactaggta

SEQ ID NO: 29458 - DNA, 247 bp, Glycine max
  Clone ID: PAT_MRT3847_126603C.1
cttgatatttactattagttttgcacaaggattatggttgttttcaacttgctgattgtagctaaatggattttctgaatcaccacgtgatatttgtctgattgtaactaaattaatgcatgtgggagtcctgaaatagtacatgttttgttgagtaatcgcctgagactgctgaaattaaacattacaaagcttgttgtgccatttaatgtgcctaaaaactgcaggttgcatttaggactaaggt

SEQ ID NO: 29459 - DNA, 244 bp, Glycine max
  Clone ID: PAT_MRT3847_126604C.1
tgagcttttacacggttattcaatcacacattgtttaaaatgatttttaattgattaatagtaccaaattttactgcaacaatgcataaaaattaaactctttagcataattagttcatgacatggttgtttaagcttcatatagttttcaagtaacagcttaagcttttatcatgattggttcatgacaatcattacttccatttaactacaaattcttaacaaggatgatgacaatagaatg

SEQ ID NO: 29460 - DNA, 720 bp, Glycine max
  unsure (1)..(720): unsure at all n locations
  Clone ID: PAT_MRT3847_126605C.1
cacgcgtccgcccacgcgtccgcccacgcgtccgatcctcttccgtcttctgtttcttttggcatcaacaacaacaatttggggtttttatttatttcgtttcggtcaaaaaaggagaaaggagaatatatattatgggaaaaaactctcccttcgcctctccagcttcttcttcttctccgttttctgatgctttttctcgaaggtactaattgaagatcccctttccttttcgttttcggtctccccttttctgaccctcaattttttttttggagcatcgtgctgtgataatatatatactctcttcttttcttttcttttcttttttttttttccttttcaagatttatggagatccctgggttagggttagatataatatttctgtagcatttttcaattggttcaactctctctctttttattctctcccaaaagaagaacatttttttctagagtagttggtgtttattatttttgctttggtggtgtgtgaggattgtgtggtgtgatctgattttataaacctagggtttttgatagtggggaaattgatgttgatgaaggtgtgtatgaggatgttgttttgctgaattgtttgtgggatggcaacagcaatacaagtagtgatgaaggagatgagctaaaataatgggcgatacttctcttctcacttgnntgtttggcaatggagaatcaccacccatccacgctact

SEQ ID NO: 29461 - DNA, 786 bp, Glycine max
  Clone ID: PAT_MRT3847_126606C.1
gctgcgagaagacgacagaagggccacatggaatatctaaactttgattccgttgataaatcaaaaaccagtgaagattcgtatttccaatcaattactactgaattccttaattcattgaacacatccggtttgccaactcattctatcaaacttaaaattggaagtcctataatgttgttaaggaacctcgaccaaaatcaaggtctatgtaatggtactagattaatggtaacaaagatggcaaaacatgtaattgcccctgaaattatctcaggtaaaaacattggtctcgctgtttatattccaagaacggctgcgagaagacgacagaagggctggccgtttaaactattaagaagataatttctgattatgctatcttatgcaatgacaattaacaagtcacagggacaatcactatccatggttggattttatttgccgaaacccatattcactcatggccaattatatgttgcgttgtcatgggtcaactcagcaaaaggattaaaaattttgattcatgatgattagcagaaaagcatgaattccactaccaatgtagtatacaaagaagtgttcagaaacattaaaagttaaatttcagttatttaatatcaggttcaattctattgtcatgctttttcaaacagtcctattctttaataatcaattggtcaatattatattatcactggattatattatttaaattattacaatcttcaatacaattcaattgatattaaatattgagaattgactatcagtttcaattctttt

SEQ ID NO: 29462 - DNA, 460 bp, Glycine max
  Clone ID: PAT_MRT3847_126607C.1
aattcggcaccaggtgggtggctaaccgaaatacacctctccagaatacatcaggagtcctaaaactcaaccagaaagggtttcttgtgcttctcaatgctacaaacagcgccatttggtcatccaacatattaagcacggctcttgggtttgggaaattttgtagtgagaaatggacaggaaactaacgaggacagcgtcttgtggcagagttttgattatccgatacaatcgtcccagggatgaaacttggatggaatttagagactggtctagaaagatatggattatcttggaaaagtgtcgagaatcctgctgagggagactatactgtaaaaattgacctaggaggatatcctcaaatggttatattcagggtacctgatataaaaacaaggatagtgccatggaatggcttgtctatagttggatatccaggtccaaatcatctatcgttgca

SEQ ID NO: 29463 - DNA, 450 bp, Glycine max
  Clone ID: PAT_MRT3847_126608C.1
gctggaggctgcgagaagacgacagaagggccacatggaatatctaagctttgattccgttgataaatcagaaaccagtgaagattcgtatttccaatcaattactactgaattccttaattcattgaacacatccggtttgccaactcattctatcaaacttaaaattggaagtcctataatgttgttaaggaacctcgaccaaaatcaaggtctatgtaatggtactagattagtggtaacaaagatggcaaaacatgtaattgcagctgaaattatctcaggtaaaaacattggtctcgctgtttatattccaagaatgtcaatgtccctttcacaatcaccctggccgtttaaactattaagaagataatttctgattatgctatcttatgcaatgacaattaacaagtcacagggacaatcactatccatggttggactttattt

SEQ ID NO: 29464 - DNA, 216 bp, Glycine max
  Clone ID: PAT_MRT3847_126609C.1
gagagacttattgtagtaacttttgcgtagcgttgttagttgacgcgatgtcgatgtggttgcacgagaatctcttctcggagggcctgtctatgccacgttcgcttctgatatggtcgatagtgcgttggcgtacgctatccggtgccgcttgccgttagacggctaactgccccagagtcatgtcgtctcagggatgatggactttggagcaca

SEQ ID NO: 29465 - DNA, 288 bp, Glycine max
  Clone ID: PAT_MRT3847_12660C.1
caacgggaattaaaaagaacaatcgggaaaccaaaccccccccaaaagcaggggggggtccccattccaaaaggggatttccctgtttaccaagaaactaaaagttataacttccccaccccattcaaaatttcggggttcgagacccccttttaagcaacataaacaaagcaatacccatagccctaaccaaagggcccaaaaaaaaggtaaaaacctttttgcttccccaaaacccccacatcaaaaaaccaaaaattttttacctggataaacaattcccgcccc

SEQ ID NO: 29466 - DNA, 333 bp, Glycine max
  Clone ID: PAT_MRT3847_126610C.1
gataaaaactactcatgaaatctaaggagacgatacacactatcaatggtacataacactgatccaacaactgatggtaagtatggtcaatcgattgggcgtgccgcagctggatatacaggctacccccgttctgaagactatgccttcctctgtaggcctaccaattttccttatgaagattcgattaacagctggccatgatcgttgagataacttttacttgatagaattcgttgcacttgataaaattgatatcaaaatatcatccgtgaataaaaaagttgaatacttgggggtcttacatgagagttaaacctcatataattggtg

SEQ ID NO: 29467 - DNA, 379 bp, Glycine max
  unsure (1)..(379): unsure at all n locations
  Clone ID: PAT_MRT3847_126611C.1
tatagggtttagccggnacgcctgccctacagcggccgaccttcacggttcgacctatgacgctggttttattaacactttttatagtcaaaacccgcaccggaggatggactgcgcacacttaaaggtgattcaactaactgcacccaagatcccaattccgcaggaactagcacgctagttcaagcgagcgcgcccccactcggacgagtgaactcaactcactaacaacactggtccggttgccaactacgtccaccgtgaccggaagcccccgacgacgctgcgtcgaccgggcggtgctgacaccggaacaagctcccatagcagctgaaccgctactcgggatgcgagagcctgcaacacccaccatggatct

SEQ ID NO: 29468 - DNA, 1009 bp, Glycine max
  Clone ID: PAT_MRT3847_126612C.1
cgggctccccttggaaacgcgtccggccattatgctggagatgtaagttcataaagttttaattttatacctaaaagatataataaataataaataggatacatattaaccagactccagaatgctgtttgtgatttgttccttctttgggccaaatgcacactttatctctgtgatgtgtaggtaacttatcaaactgaattgttcctcgacaagaacaaagattatgttgttgcagagcaccaagcacttctttatgcttccaaatgcccctttgtatcgggcttgtttcccccttcacctgaagaatcttctaaacaatcaaagttctcttcaattggttcacggtttaagcaacaattgcaatctttacttgaaactctcagtgccactgagccacactacattcgttgtgtaaaacccaataatcttcttaagccatcaatttttgagaataaaaatgttctgctgcaactacgttgtgggggagttatggaagcaattaggataagctgtgctgggtatcctactagaaaaacctttgatgaatttgtggatcgatttagccttctttcacctgaagcattgactggaagttctgatgaggtcactgcttgcaagaggattctaaagaatgttggactcgaaggctatcagattggtaagacaaaggtgtttcttcgagctggtcagatggcagagctagatacccgtagaagtgaaatcttaggaaggtcagcaagcattattcagagaaaagtccgttcctatttggcccgccaaagtttcatcttgcttcgtttgtctactgtgcagattcaagctgcgtgcagaggacaacttgctcggcaagtttatgagggaatgcggcaggaggcttctagttttggtgattcagaggtgcttccgcatgcatattgctcggaaagcatacaaagatttgtatacctctggctgttctatccagactggtatgcaggggatggctgctcgttctgagctacacttt

SEQ ID NO: 29469 - DNA, 421 bp, Glycine max
  Clone ID: PAT_MRT3847_126613C.1
gccagagcaaggaggacagagccctctgggtcgttcacaaacccgattggcacgcgcagctctcccttgatgtcaccgatctctacattaggtatctgaagagtggacctgggaaccttgaaaaggatgtggagagaaggtttagttatgctttgagcagagaagacattgagaatgctgtacttggaggaccatagccatttttctttctatctgtcatatacaaacaatggaataattccttgttgaaaatagtcaattcatatgttgaatctttaactttcatgtcagcatgccttctaaagaaaggactaaagaaaatgttacccttgtttccccataacaacattaacacttttttggttctgacattaaactacaatacaagttctagggctagtagtatcacactacaaaatta

SEQ ID NO: 29470 - DNA, 253 bp, Glycine max
  Clone ID: PAT_MRT3847_126614C.1
cctcgatgtctgatggtacgtatcgttacggatgtagcgtcagggagagatggatctgatgggggctatatgagcgtccccatatctgtcgggccgtacggtagtggcattcaattgaaatgcattcgagctggttagattggctccggtactggtctgagtagtggtacgactgcccgttcgtgcagtggggagttccctggttgagactccccgaggagttacttgaagcagtttgcaaattttggggggg

SEQ ID NO: 29471 - DNA, 321 bp, Glycine max
  Clone ID: PAT_MRT3847_126615C.1
tcctctcttttattccacattaaacatctccctctaaaccatctttcttacacaaacaaagaatcatcctctatcatctacacacaccatcctactctgcttaacatttccccaactccttattcctattattaacctcttcttcatctacttcctcaccacactccacattttcctcaaactctacctctccaaatcttgcaacaccaattgatcttaccaacctctttttcatttttaattctcatccccattccatcacttttaattccgtttttaattccctaatttttttaacactttctattttctttatctttt

SEQ ID NO: 29472 - DNA, 590 bp, Glycine max
  Clone ID: PAT_MRT3847_126616C.1
tttaattgcagatgtgttgtttgctgatggtaccatcagtagtagattggtttcatgttatcgtttgccttttttgtagatttgtattgttggtttccaacaatgaaattttaagtttatgattttgaacaaatgactttggtctcatagatttgaattggttttgattttaaaatatatgttgacagataaaatatgtcatgatttggagaatggaatgatgattattatttccctattggtttgattgccttcatgatggcattttgtattagctctatctgaccattctccttatttgcttgtttgtttttgttttgttatttctatttgaatatggtagaccatatttttgcttttgggaagaaaattgttcagcataggttgttgttagagcatgtgttgttttttctttccgttacctaaagtgggtgaactctgtactctaagtaaggaaatccaaaattgatgatctactcttgctttagggctttgacaaatgacagccagagttggagaatgacatgatgattaatcatttccctattggtttgattgcctggatgatggcacttatgtattagctctat

SEQ ID NO: 29473 - DNA, 431 bp, Glycine max
  Clone ID: PAT_MRT3847_126617C.1
aaactataaatccaggtgctttgccctaaaagtacagatttacatttacatgtaaaaatggacctgaggactaactatactgttgtacagaagaagaaattaagatttacatgatacctatttttttcactacttataaggctaatacggtcttagagctgaagcagtgctttgaatgggcctggcaagcctcaagatctaatgctgaattgcagcaagcctttctttgtaactcgatttgtccatcctagccagagagtcagcgattctacggaagaaatccaacttgctttcatggtcgatgggaggcccaaaaacaagatgtttgaaccattgggtaccttgaagcccatcgacgtgcaagaagcctatttccgcaagcgttaggctatcattgaacgctcgcatttgcatagctatagaacgatctg

SEQ ID NO: 29474 - DNA, 2390 bp, Glycine max
  Clone ID: PAT_MRT3847_126618C.1
gattccctccagagagagagagagaaaatcagaacacgctttgaaactgaaagagagagtaagtgaaggtgtgtgtgtgagagagagaatcaagagagaggagaaaacagagacaaacgctgtctgtgcgagttagagagtgagagaaaccccagaaaatcagaaaatctaacccccattttttctctctctagtttccattttgatcggaggttctcattgtggttttccgattattcgtcgaatcagctccgttctccggttcggttcggtgcaatggagcagtacggccggtccagtgaaggttcgcggtctgatccgtcgccggaatgggccgagcccgaagcccaaaccgggctcgaagagcctgtgtggcaattgggaatgggtggtggtgctggggaggaatcgtatccgcaacgccccgatgaggttgattgcacttactatttgaggaccggcttctgtggcttcggttcccgctgtcggttcaaccatcctcgtgatcgtgccgtggttgccggagctgagaggactgcaggggagcatccggaacgagtaggccagcctgtgtgccagtatttcatgaggacaaggacatgcaaatttggttcatcttgcaagtaccaccaccccaggcaggcaggagcagggggcgctgctgctacccctgtgtcactaaattattatggatatccattgcgacagggtgagaaggagtgttcctattatgtgaaaacaggacaatgcaagtttggtgcaacttgtaaattccatcatccagttcctgctggcatccaaattccaccatcgccatttgccccagtttcacctttgcctgtaccagtaccttcgccgttatattcaaccatgcagcccccacctggtccttcgtcccagcaaattggtgtgctggttgcgaggcctcctatgctgcctggctcattagtccagagcccctatggacctgtggtactgtcccctgccatggtacctatttctggctggggtccttatcaagcttctgcatcaggtgctgttcttccttctggtactccatctaatgttggttcagcacagctttatgggataacccagctaccttcaccagcagctgcctatcctggaccttatccaccttctggttccccagttggtcctccaagcagtagtcagaaggagcaggcatttccagaaaggtctaaccaaccagaatatcagtattatctgaaaacaggggaggttaaatttggtccatcatataggtataaccctccaccggacatgagtgtgccggacatgagtacgccaaaagcaaatgtgattcttagtcctgcaggtcttcctttgcgcccgggactaaaactgaagtctgtggacgaatcaaattagggataaaccagccattgtctccttacattttctccagtagccaacatcagggggcaccagcttgcactcattatgcacaacatggagtatgtaagtttggttctgcatgtaaattcgatcatcctatgggatcaatgagttatagtccatctgcttcttccctggctgacatgccagttgcaccctatcctgtgggttcaacaattgctactcttgctccatcatcttcatcttcagagttgcggcctgaacctagctcaggatccagtaaagagtctgttccatccagaatgccttcatcaacattgactgggtcaatcggctcgactttgtcgactggtggacccatttctcaatcgagcactcaaccaccttcccaaagttcaggtcctttagccgctgtcactagcaccacaagtagcaatgtctctcacacctcaagctaagcaatgtgaatgcatacctcatcattactccttttttcaatctcaattcttccactggacataattattcaaggagatcctccaataggttttgttttcagttatcctagttccattctcaggtctagcacacttcacaccaattatctttgtgttcatataaactttttgtggccatccctttgatcttgaataaaccatggccatccttgagaattttagcaatccatacgatcaccttgcttttgaataactcagaatctgcaaggccattgtgcacatgccctttcacatctccaataggttgtgctgcttatttgtgctccaattttttttgatatgagaacattctgtccagactttcgtttatcatgtgtttatgtctcttcatctgaacccttttttaatttgggaacaattttccatttctgccttgtaagtcctgttcaacaattttcccaacttgtatctagggtttaatgtgaagagaagtaatcaggagactacaatgaggcttcacattgctatcttataatataaggtttagataaa

SEQ ID NO: 29475 - DNA, 213 bp, Glycine max
  Clone ID: PAT_MRT3847_126619C.1
cttagtaaaattggttgctctctatgatctgagattattacctatttctagccttaaagttgaaagaacattctttgtgggttcatcatataagaaattctacgggtctgaaagaacacatactagctcccaaaataaagggggaacttttttaacaacttcctctaggggaatacctaattgcgtttcagggaagggaacctcgggaaaatt

SEQ ID NO: 29476 - DNA, 342 bp, Glycine max
  Clone ID: PAT_MRT3847_12661C.1
cctttctgtttacaacggctcacttatattatggcaacaagcggccgcgaatccatacctgaaatgggggattaccccaaccaacactgactcctttcagaacgattggttcagatcaccaacacagaccacatcagttgtccattgcccgacattgactatcatcaaatttaacacactgggtggtctgacctgttaacccctactggggttcaacttttcactaacgtttatgatactccttcttacatggcgaccaaaagcttctacgagtggcttctgaggaataaaatttgacatcagctaaagagatactgcctcaacttgtcctgaaattttctt

SEQ ID NO: 29477 - DNA, 303 bp, Glycine max
  Clone ID: PAT_MRT3847_126620C.1
gctcgttaccatttataattggggtagtttttttggtatgttcattttcttcttatttttttttttcttcccccatcacagactgggggggtttgtcaaaaagggatttaccaacaaatttcaaggtccacgggagacccccacaaccgggggtccaataacagggggggctttgggaacaaaaattctaaaaagagatttggccccaaaaaatttcttcgggcggagcggggtttccttcccgaaccttcatataatgtcgagtccaaaaaagaaagagctggaatcccgccctctctgggg

SEQ ID NO: 29478 - DNA, 261 bp, Glycine max
  Clone ID: PAT_MRT3847_126621C.1
gctatacgtaataagaagaaactgcaaacgactagtttgctagatgatacacttatgctagcttatgagtgccatgactcacactaccagaagctttctatccaaacgataacaggatgcggagagcactaccgaaataacgtggacatcaacggttataggcatggcgcttaatcaatcattcctctgacagctgagtctgaacatgtcggttgcggacattacatagctcagtacggaccaagagaccaatgtcaatca

SEQ ID NO: 29479 - DNA, 318 bp, Glycine max
  Clone ID: PAT_MRT3847_126622C.1
accacacgtccggtagtgtgtgaggagtagtttacacatgagctgtgatcatctcatgagacgcacaccttagggagctacatagactgaatatgacgtaaacatctcagacactggatactattctttgaaagtcttaacactatcgtatgcaaatatctcaatacttcacagttcaaacatatctgcgaagctcacatacactgcgcgtataaaacatcaagtaatgggacattcttagatcgaagctaatatgcttgatgagcttaaatcgcctactatcatatttaagtctatacctaaaccggtccgaacaac

SEQ ID NO: 29480 - DNA, 281 bp, Glycine max
  Clone ID: PAT_MRT3847_126623C.1
aataatctttataggccataaacctgcaattatcagagaagtgcacttaagaaagtgcatgtaagtttcgtcacattcaaaattcgaagaaataataaaaataatatatagtagtatataataactattataatgggaatacctcattttgcatacacttttttagttggaggtttatggcctataaagattattgaaatgaaattggtctgagaagaactctaaaattatgttatctattggtaacactgggatgttaatttccccggcagcaacatttt

SEQ ID NO: 29481 - DNA, 328 bp, Glycine max
  Clone ID: PAT_MRT3847_126624C.1
gaactaattaattaatacaggatggaataacaagagccaaagacttgtatacactttggagccatggtacagcaattaattggtgaaaatgcgaacaaacacacatttatcgttatacatacaggaaccttttcacgggacaatgaaaaagctcaggataaaaaacaaattaagaccggaataaaaccttaaactatcaaaagcctaattatcgatcagggccaggggaaggtaaaaaactatgcataaaagggaatacatacaggggaccggggaaaacgaaagaccagtaattagggtgacctttaaagaacccaacacaaactgg

SEQ ID NO: 29482 - DNA, 469 bp, Glycine max
  Clone ID: PAT_MRT3847_126625C.1
aaaggggaaaaatcggccaaggggtaaaaaaaaaaaaaaaactgggaagaaaaatgggggggggggaccccataggcaaggggacagggaaacaacactatccaaatggggatgggtaggggcgggggggaccccccaaaaaagctaaggggggggatttggtttttagggctcccaaacccaaagggggccccccaaaaaaaaaggtccccggcggttttctttgggaagaaaacaaaaacttggaaccccggggggaggacccctgaattttgaaaaaacaaaggcttttacaaaaccccaaaaaaagaggaagccctccttaaagcccccagttacaggagcctccgtttggggaggggagcaacccaattgggaaaaattattagggggccctttatatttttgaaaaagttcaccgggggccctgcccaaaaaacccaagggaaagtttaaacaaccgggtaaa

SEQ ID NO: 29483 - DNA, 147 bp, Glycine max
  unsure (1)..(147): unsure at all n locations
  Clone ID: PAT_MRT3847_126626C.1
caaaaatgtcaatgaactagtaagtacacatggctattcccagaatcagataattgtttggagtaccccaccatgtcaaaggtacattatatctactgtgataagctgtatctctttaatttttacttgtnttaacatgttttacca

SEQ ID NO: 29484 - DNA, 564 bp, Glycine max
  Clone ID: PAT_MRT3847_126627C.1
agaagacgttcaatccttgtgtttattttttgtccattgccaagagtggaggagaagacattcattcattcattgattcattctattttatttctctgttctctcttgacggctcaatgctttcccacatcaaattcactcttttttccttcccttttccctttcccctatccccttccaaacaggtgactccttatccgtttctccctattttttaccctctctcgcatactcaccacccacgtagttatggactcatcaccagaccaaacccgcaagaggaatcagaatcagaatcccacgctggcgcaaaaatcacttttcctctgtttttctttcttcctcttcctcttcttcttttcctcctcgcaccactctttttactctcacacctccctccaaccctctactttgagtactttccccacacccactccatttcccaccaccaaattaccagtttcctccctccacgtgctcgatcgcatcctcttccccgatcacgtgcttctcacgctctccaaccctcatggtttttctcctaaacatttccactgcgtttat

SEQ ID NO: 29485 - DNA, 556 bp, Glycine max
  Clone ID: PAT_MRT3847_126628C.1
attggtaagggcctcctcgcgatggttttggccttgaaccaatcctgggaacatcaagtgtgctcaaccccaagtgccaaaccagaaaactccaaagcacctcctttaggaacatcaatttgaccaaagtcgttacttcctctgcaaaccaaatacccacttgaattcaacccacaaacatgtgactccccatccactatactcaccataaacatgttcctaaactcactctccatttttctggctatagacccaacaccccaacaccgaacccgatcactacccttcaaaactccgcaagagaagcccgacccagatgaaatggaatcaaacctgtccaacccagatggcgattcgatcgcggcgttggttctccagcacgacgccgaccacggaggcgcaaacctgggagtctttgagggcgatattctcgaatagaacagtgccattgttgtaaagcctcttgctttggaagccgttccgaccccgtcggaaagaaatatctacattacatggcccttatgtcttttcagttcactttaaaaaatttgtactc

SEQ ID NO: 29486 - DNA, 275 bp, Glycine max
  Clone ID: PAT_MRT3847_126629C.1
attaattggtgtactatataagcttattttttatatcttaaagtataccatgttgccacatttttataagcaaatttacacttatatatttgaaggaattttctagacgcaagcaaaatttggtgagaaaaaagaggggatgtaaattcttcatatacgttatctttcttttgtatccatacataatcatgatctgagttgtaaaacaggaatgtttctttgtgcttgaaaattgagacaatgcacgggttgcattaaatagaaggtaaacaagc

SEQ ID NO: 29487 - DNA, 432 bp, Glycine max
  Clone ID: PAT_MRT3847_12662C.1
ctgggtcccacccacgcggtcgttctcgcgtgcgagaggaatcgatggggggggcctttattaaggagagctgcggaaccgcctccgggggacacaaagcagtcaacgggttccaactgaaaaaaggcaaagatggcctggccgagctaacttaaacaacagcaactcggcaatgtacggcttgcaggccgatgaacttaccgaggactctgacagctggaaaacaatactccataagtatgggtgactcatgtaacctttaagagtctctgatcaaccgaagaggcctggtgatgaggaccctgcgccatattacaacatggtgcaaaaagtgctagacatggatgctcactttggggcttaaattttgcattgttgcacgctagaaagtctgcgtgggtgactaatgcggatccaagaagagggcccaat

SEQ ID NO: 29488 - DNA, 350 bp, Glycine max
  Clone ID: PAT_MRT3847_126630C.1
attcaagcatcatgaccttgtttcctttataaaactcacaaccctaactctggtcataggattcattggaacaggagcttattcacattctctttatcactggctgcgcctggcttgcacccatctcgacaaagttaatttcaccttcgacagatgccaacagatctatagataggaacacagatcctacaagtaccacacgtgcctaaaatacgaccacaacagcagaaaggacgatgattgcgaagcatgttgcatgtccatcgagacccccgggcatgtggaacaagacgtggaggcaatctttcacaagcacctgagagcctggtattgtgacacctaccaagaat

SEQ ID NO: 29489 - DNA, 478 bp, Glycine max
  unsure (1)..(478): unsure at all n locations
  Clone ID: PAT_MRT3847_126631C.1
gcggacaggaagaagctgagacgaagcattaagcagaaattccaaagggtttctgattccgacttagatgccttgcttcctcccaaggctgagattacagtagccaagcttcaaaaccgcgtccatgtatatgctgtggagggaggctttccaatgtttttcgatgttgatggccgcggctcagacatttttcctacaggttgggagtaccacaatgagcagcgctgaagcattaaaagctggattacgtggaaaggcactgagaataactcattgctatcgtgatttgctttgggaaactgccgagggccgttgcgtgcctaatgcaggttttttcgaagatgttgtctttgaggatccttcttttgtacaagcttctcatgattctgatttgactgaggttgctggtgagacatcaatngatcagcagaaaaacccaaaaagtgatgggatcgaggaatctctggatgtaaatgag

SEQ ID NO: 29490 - DNA, 367 bp, Glycine max
  Clone ID: PAT_MRT3847_126632C.1
taagatgccacttcctctatagatgcttgataaaatacaaaaagatacacacttaacatattgtaacaggtttaaacaaagaaatattaaatacatttcccttagatataatattctacctatattatataaacgttctcctattcaagcatatacaaattttataaaaaattttgaaaacacttttaaatctttacttaacattatcatcacagagatacaaattaacatagatcctaataataaactaagatatgcttcattctgttcacagaatccaaatttgactgagtctcataaacttaaagagtttcactactatgataagtatgtgcgttcttctctgggtacctgggggagaaatatt

SEQ ID NO: 29491 - DNA, 742 bp, Glycine max
  Clone ID: PAT_MRT3847_126633C.1
caccccactcgtaactcttactcgtctgcctaggttacccgttagttagaacataaaaagaaaaaaaagaaatagggaaaacttggcgtgtcctctgatacactgaacagaagagaagtgagtgagagaatgttcaagaaggcggtggaggcgaaatctcaccagaggttgtctggtgcggaccggaagaagctgaggcgaagcattaaggacaaattcccaagggtttctgattccgatttagatgccttgcttcctcccaaggtaaatcaaataattaactcctcatcgattcattcatgtttctttgtttcttttcatatatcacacacacacacacactgaagaattaaacaggcagagattacaatagccaagcttcaaaaccgtgtccatgtttatgctgtggaaggaggctttccaatgtttttcgatgttgatggccgcggctcatacattttccctacagtttatgcactgtggatggtccctgagctactgccagttttcgtgctaaagggtggtgaggtatcccggttcgctatcggaggagcagacttgatgttccctggcataactgtgccttccgaaggtctttcttactttctggctggggaaccttgggctgtcaaagtacccggaaattctgctcccattgcagatgggagtactacaatgagcaacgctgaagcattaaaagctggattacgtggaaaggcgctgagaataactcattactatc

SEQ ID NO: 29492 - DNA, 1037 bp, Glycine max
  Clone ID: PAT_MRT3847_126634C.1
ggcccgaggtcctctgatgcacagaagacagaagagaagtgagtgagagaatgtttaagaaggcggtggaggcgaaatctcaccagaggttgtctggtgcggacaggaagaagctgagacgaagcattaagcaaaaattccaaagggtttctgattccgacttagatgccttgcttcctcccaaggctgagattacagtagccaagcttcaaaaccgcgtccatgtatatgctgtggagggaggctttccaatgtttttcgatgttgatggccgcggctcagacatttttcctacagtttatgcactgtggatggtccctgagctactgccagttttcgtgctgaagggtggcgaggtatcccggttcgttatcggaggagcagacttgatgttccctggtataattgtgcctcctgatggtcttccttcctttcgggctggggaaccttgggccgccaaggtacctggaaatcctgctcccatcgcagttgggagtaccacaatgagcagcgctgaagcattaaaagctggattacgtggaaaggcactgagaataactcattgctatcgtgatttgctttgggaaactgccgagggccgttgcgtgcctaatgcaggttttttcgaagatgttgtctttgaggatccttctttgttacaagcttctcatgattctgatttgactgaggctgctggtgagacatcaattgatcagcacaacaacccaaaaggtgatggaccggaggaatctctagatgtaaatgagttccaacctgattctaaccctgcattgacgatgccaaatggtaatgaaaatgataccgctgctgaagtaactgaaggcgtggctgatttgaatttacgggatactgcctctgctaatgacccagatgaccaacagactctatcaactgcagacgttaattccctgttagataagtgccttcttcaagctttgcacacaacagtgaaggacaaagaccttcccttgcctggaagcactctatggtcaaaccatgtattgccgtgtaggcct

SEQ ID NO: 29493 - DNA, 755 bp, Glycine max
  Clone ID: PAT_MRT3847_126635C.1
gtttatcatttatgagccacaaacttgacaccgagttaaaaacgtagcagcaatagcacacaatacatcgtattcgtgtgagcatacgatgttgcctccttttgctgtcgatatcaacggtataaaagataagctcacttatcagttccgcccttggcaacgctccttccaattctgggttcgagccattgacatttacaccggttacaaggtgtttcaagtgagagtgaatttcgtcaaagatgcgcagaagcaggaagcaatgtgggagaagcagcacgagcttgccgccgataagattttcgccatgtgctacgaccttggaggtttcttcctcaagattgctcaaattattgggaagcccgatttggccccggctgcctgggtgaaaaggcttgttacgctatgtgatagggctcctccaaccccttttgatgtggtgaaactagtgctggagaatgagctgggacagggtattgatgatgtttttgaaaggttcgatgtcgaaccccttggttctgcttcaattgctcaggttcatagagcaagactgaaaggtgatacaggtgatgttgttgtcaaggttcaacatcctggaattcaggatctgatgatgacggatatccataacttgcaagtgtttgcattgtacatgcaaaaaacagatatcaaatttgatctatattcagtgactaaggaaatggaaaaacaggtggacttaatttctttgctagatttcttctttaatctatgtg

SEQ ID NO: 29494 - DNA, 366 bp, Glycine max
  Clone ID: PAT_MRT3847_126636C.1
aaacgggccccctttggtttaaaataaaattaaaaaattttaaaccaaaaggctttttttttattaattaaaaaggcccacttgtcaaaaaaaaaaaaaaaaagtcctagttaagaaacaccaggaaaaactttactcccgggaaattttttttaaaatttaaaataaagggtttttactgggccccgaaggaaacctttacggtaaaaggcaaaaaaacaatttcctccttaaaaacataaaagggtctttttttgaaaaagggattttttactttgggccggaagggccggttaccctttccaccggatatttcatcaaataaaaaaacccggccgcgtgggcgaacccgggggtcaacccgga

SEQ ID NO: 29495 - DNA, 521 bp, Glycine max
  Clone ID: PAT_MRT3847_126637C.1
ctctaatggtggctgagcttgctccctctaatttttcccaatcgcgcacacactgctacgacagttacactccttatactcggtcaagccccggcaaatcgtaacggtcatatttccccttccaacaccaattttgtttattccctcacattgaattctgttcaatacttcatggaacttgttcgttttttcatgccatttttagggttctgcgactcatcgtgatttccaatgatgaattttgagtctcgaatttgattattatggaataatattaatgttactgctggtacaattttagaattggaattttggaataagtaagaacaatggtggctgcaatttctacggcgataaaccccaagcgagcgctgacgccaactccaagaagaacacctttgttaccttctgaatcggacaatgcactcgctccaccacgcaggcccaaagcacgagaagttacttctcgctacatgtcttcttcttcgtcttcgtcttcctccgtttcgtctcctccgaga

SEQ ID NO: 29496 - DNA, 144 bp, Glycine max
  Clone ID: PAT_MRT3847_126638C.1
cattgatggtggttatttcaaagagactaggtgttggggcatggaccagagacagcaagcgcgcttcaagggtcaacacccgatgatcagcttttgatccaaacctgagattccttctctggctggctgtagatcacaataggc

SEQ ID NO: 29497 - DNA, 306 bp, Glycine max
  Clone ID: PAT_MRT3847_126639C.1
agtgcatgtaattcatattcataaagagaaaacccttagccaacacaaccatcatggccagctctgctattcaatactcaccaatcaatgcttacattgcacttcatcaccccactaaattcttccgcaagatcagttcaccgggcatcggtctcaataatattcaccgcaacgtccctagtgttcctcagattatttggtatggacctgatcgtcctatctacatctgtccaatcacggagcaggttcgatcatatctgacttgacaattctttggtaactacagatgcgacactgatgcattat

SEQ ID NO: 29498 - DNA, 726 bp, Glycine max
  unsure (1)..(726): unsure at all n locations
  Clone ID: PAT_MRT3847_12663C.1
gttctagatcgcgagcggccctttttttttttttgtaacaaaaatatataaacgcattaaagtaaaacatgttttaagtacaaaacatttgcaatacgagaaacgattacattaaaagtaaatcacgagtcactattaggggtggaaatgagctaagtcaagctaagctttactagatttgaactgaatatgtaaagcttgaacttgacacaaggcttggctcgacttacataaaagcctgacttggctcacaagcctatttaaaagcttgcttaaagacgtctttgattaattaattattttaaaacctagtgaaatactaactaaaaaaagaaacctataaaattttgtataagtaatgtacaaatccaaaaataattgataaacaaaatcatattgaattcaagtcgttaaaatacaaagtatatcagaagaaaaaaaaaaaaaaaaaaaaaaaaaaaaagtatggattaggtcctcaaccccaaagcttacaaatctattttaagttcaagcccataaacaaaataaaataaaatctggataagataagataagattggatgaaataaaatctggataaaataaaatctagatggaatanaaattgaataaaataagatttgataaaanattattattattattattattgggagntaaacaggccagcttgtcaagcttaacaaactttttttatagtttggacttgacctttttatttta

SEQ ID NO: 29499 - DNA, 1112 bp, Glycine max
  Clone ID: PAT_MRT3847_126640C.1
atttactgctcttcaccagcactcgccttctcgcgccgccgcttccgccggacatcgttgccattggagtagatattaccgcctttttcttcacgatattccaaaaatcaaaacagtaggcagcgtgattgtaaacagcgtcgaagcaatcgtgggctcgttgagctgcttaaaaaccttaaaccatactgtgtttgtgcttcacggtttctatcatatgaccctccacagaactatcatatgtcactagtctagtcatatttgtcgtacttgtttatatattaaaattgataccttgtgtagggaccacaaaatcgggaagtaaagctttgggatgaagcaagtgacaaaggtagggtgctcccaagtgacactgaatcatggaaatgcactcagacattggagttgaagagttcagctcaaccttctatggatgcattctttaatcaagttgcagcattgtctcatgaagcaggtctgcttttacttgcaaatgcccagaggaatgctatatatgctgtgcatttagaatatggttctaatccagaatcaacacgcatggattatatagccgagtttactgtgaccatgcccattctgagttttactgggaccagtgatatattgcctcatggtgaacatattgttcaggtttattgtgttcaaacacaggctattcagcagtatgctttggatctggctcagtgcttgcctccgccatatgaaaatgtgggactagagaattcagattccagtgtttcacgcgatcctagtactgttgaaggattccactctttagattcttctctcgatagtacaactgttatgtttttagccgatgtgatttttaaaacaatgttacattgatgttgtaatgaggttggacttgtgactcgataccctttaagctctggccatgttgaggcacctatttctagaggaatcagcagttcaaatactgaagctaaacctgctacattacggtcggtttccctctctcctgagcttattgctggctcatcactggtcagttctgagttgacaatggaagcgatagttaaaaaatttcagtcaaaattcaggaaagttagggaagcaatgagtcgatggga

SEQ ID NO: 29500 - DNA, 756 bp, Glycine max
  Clone ID: PAT_MRT3847_126641C.1
tccggaattcccggctcgacccacgcgtccgcccacgcgtccgcccacgcgtccgggaaatattcgtttgaagagaatgggggaacttgatactagaccattccttgaagcaatgaagcaaagatataatgaggaggatgctgaagagagagcttcagaactgtgttcattgtgggaagaatatctaaaggacccagattggcatccattcaaagttatcatggttgaaggaaaagaaaaggaaattattagagatgacgatgaaaagctgaatgggttgaaaaatgacttgggtgaaggggcatataaagcagtggtggaagctttgttggaaataaatgaacataatcctagtggacgatacttaacctcagtattatggaactataaacaaggaaggagagcaactctgaaagaaggagtacaatttctgtcaaatcaatggaaagttcttaaacgcaagaggggaatggcgtgaaggttgatgttggtttcggggagagaattatgcatggcagcctggtgcatgcgtccatattgggagagcagcaaacctagcggttttgtttaggttaagttatttttcgataatgtcaagctatttcattacttggcacttagctcctgtgggcatgtgcccagaagcaaactgcattcataatgacaaagcctttgtatcttgtgtggcagaagacattgaagttaaacttgtatgactatatcatttggcttttaatttaacatggttctttgagt

SEQ ID NO: 29501 - DNA, 1828 bp, Glycine max
  unsure (1)..(1828): unsure at all n locations
  Clone ID: PAT_MRT3847_126642C.1
cccacgttgagttttacaattataacatagaacctcaggccagtagttgagtctagttgtttcccttaaagccatggaatattctccattgtccattgttattaccttctttgtgttcttgctcttgcattggctagttaaaacttacaagcaaaaatcgagtcacaagttgccccctggcccatggaggttacccatcattggtaacctccatcagctagcattagcagcttcacttcctgatcaagctctccaaaaacttgtccgcaaatatggacctctcatgcacctccaactaggtgaaatttcaacacttgttgtgtcctcccccaagatggctatggagatgatgaaaacccatgatgttcattttgtgcagaggccccaacttctggctccacaatttatggtctatggggcaacagatattgcttttgctccatacggtgattattggaggcaaatcaggaaaatatgtaccttggagcttctaagtgccaagagggtccaatctttctctcatatcagacaagatgagaacaaaaaactcatacaatcaattcactcatccgcaggctcaccaatcgatcttagtgggaaacttttcgctttgttgggaaccactgtatgcaagggcagcgtttggaaaagaaaatgatgaccaagatgagtttatgtctttggtcagaaaagctataataatgacaggaggatttgaagaggatgacatgtgtcattcattgaaaccgttacatttactgacccgacagaagacccaagagtcgcatggagaatcaaggaaagacaaaaagggcaataacagaaggaaagagcatactgaaaaacgaagaactgtgatggtgttcatctgagattaagaggagcaagaagatcttgttgatgttcttttgagactcacagaaaagcgcatacattggacttaaatgacgatggagcggatactacatcatcaacacttgaatgggctatggcaaactgaaagataaacccaaaagtgagggagaaagcacaggcagaaggtgagacaagcatatagggaatagaaaataaaacatgaaacagatctaatgaaacttacatacttaaagttagggatcaaagagacataaaggttacgctctccttctcctttatggttacctagagaatgctgctgaaatcaccatcattgattggtttcaaaagacagtcaagaataaaatccagaaaaacatgtgggcgaaataccgataacaacctaaattcatgattgatgcatgggtcatttggaagagatccccagtatttgagtgatgcagataggtttatcccagagagattcaatgacagttctatcgatttcaaaggaaatagctttgagtatataccttttggggcaggaaggagaatgtgtccaggcatgacatttggattggctagcattacgcttccattagctttattactctatcattttaattgggaactcccaaataagatgaaacctgaggatttggatatggatgaacacttcggaatgacagttgcaagaaaaaacaagttgtttttgattcccactgtttatgaagcttcatgatacacgtattttttttataggccaaaagagatttaataagaataccagtggtactcaaaataaaaaaaagttatggagaataaagaaacttaaaacacacacaaatataatatttgtagtgtctgttgacacctccacactttggggagtctagtttgatgtaattttttgtttgttattgaatctataatctataatatttgattatcattaatgatggaaaaaaangaa

SEQ ID NO: 29502 - DNA, 827 bp, Glycine max
  Clone ID: PAT_MRT3847_126643C.1
cattaaagaacccgaaattcagaatgtacgattattttcacttcatttgattccttttctttatctgaggtctcgcacactagatccatttttgaaggaacttccacgttttctcaggtgatgagttaatcataatactaataagccttgcagcaactgtaatggcgctcatcagatttgatgaggatactgctatttgtggaaaatgcttttttagtgaacagtggaaatataatataaaatgatagaaaatagaaaagtgtgaaacgtagtatattgaaaagctatcgaaatgcacagtgagttgaaactaatgccggataaagtgaaaaatgaattggttgtacagcgagaagaagagagaaaggagagttacaatctcatgggaaatattcgtttgaagagaatgggggaaattgatactagaccattccttgaagaaatgaggcaaagatataatgaggaggaagctgaagagagagcttcagagctgtgttcattgtgggaagaatatctaaaggacccagattggcatccattcaaagttatcatggttgaaggaaaagaaaaggaaattattagagatgacgatgaaaagctgaatgggttgaaaaatgacttgggtggaggggcatataaagcagtggagttaactttggtgggcattaatgaacataatcctagtgggcaatacgtaaccaaagtgttatataactataaaagttgaagaagagcttctctgaaacttcgtgtacaatttatatcgaatcaatggaacttcgggaaacgccttaagggaatgacatgaaggtttgtttataagtata

SEQ ID NO: 29503 - DNA, 765 bp, Glycine max
  Clone ID: PAT_MRT3847_126644C.1
gcggcgcgtgcggcgacaacaacaaagattctttctagtttcttcctttcctttcctttttcgtcgccaacacggtaaacaaaaccccccaaatttcctcaattagggtttcaatccacattccaattccccaaccctcttcttcccaatcctccaaatcccgaaactttccccaactgggtcctcaagtccgccacggcgagccctcgtagctcgcgatctcagaaaccaacgatgccgaaatcctcacgattcctcgtcgtcgcgatcgccgtcgccgcgctctgcgtgatcctccccgtcgcggcggcggcggatctcgaggaccccggcgtgctgcggctgccgtcggacagcctgtgcggcaaaacgacgccgtcttcgtgcccggcaaagtgcttccgcgccgaccccgtttgcggcgcggacggcgtgacgtactggtgcggttgcgcagaggcggcgtgcgcaggcgtggaggttgcgaaattggggttctgtgaagtcgggaatggtggctcggcgccgattcctgggcaagctctgcttttggtgcacattgtttggctcattgtgttggggttctccgtgttgttcggtcttttttagataattgggtttctttatgtatctaccatgatcagagggtgttatggttttggttctttgggattctttgagggttctttttgtaaattgatcaaacggccattcttgtattgtatgtatgattattcttattattgtaatttcacaactttctta

SEQ ID NO: 29504 - DNA, 488 bp, Glycine max
  Clone ID: PAT_MRT3847_126645C.1
gtttgattccttttctttctattaggtcacacacaccagaaccagatccatttttgaaggaacttccactttttccaaaggtggtgtaataataataataataataataataataataataataataataataataataataataataataataataataagccttgcaggaactgtaatggctcacagctgctctgatgaggatactgatattagtgaatctgaaattagtgagtatgaagataaatcctatgaagaactgaaaaatggaagtcaggatgtgagaacatcgggcaagactttcacttgcccctactgccctaaaaagagaaagcaggattatttatacaaggagctccttcaacatgcttctggggtgggtcagagtagttcacaaaagagaaaagcaagagacaaggctaatcatttggctttagtgaaatatttgaaaaaggatctcatgaatgtagatgttccatcaaatgatt

SEQ ID NO: 29505 - DNA, 2424 bp, Glycine max
  unsure (1)..(2424): unsure at all n locations
  Clone ID: PAT_MRT3847_126646C.1
ccacgcgtccgggcatttgaaagtcggaattcggctcgagtatgaattagatcatcatggaaaaaaggattggtttactaattctgggctgaagtctggcctttatgcatgggttgcccgggcagatgactacaagatcaatagtatctatggagaacatctgcgaaggatgggcgatgtcaaaaccatatctgagcttatggaagaagaagctcgaaggcaagataagcttgtctcgaatttaactaacattattcaggtaaaaaataagcacttaaaagagatagaagtgagatgccacgagactacagacaaaatgaaccttgttatgaaggataaagatcaactcattcaagcttataatgaagagatacagaaaatacagttaagtgccagggatcacttccaaaggatttttactgaccatgaaaagctcaaattgcaactggaatctcacaaaaatgagcttgagttgcggaaagttgaattggaaaaacgcgaagcacataacgaaagtgaaaggaaaaagttggcagaggaaattgaggagaatgcatcgaaaaatagctctcttcagatggctgctttagagcaaatgaaagctgatgaaaatgttatgaaactggctgaagatcaaaagaggcaaaaagaacaactccatgctaaaatcattcagcttcaaaaacaacttgatatgaaacaagagctggagttggagattcagcaattaaaaggttcattaagtgtgctgaagcacatggaagatgacgaagatgcagaaattctgaataaggtagatacactacaaaaggatttaagggacaaggagcagtcacttcaagacttagatgcattgaaccaaacactaatcattaaagagcgtgagagtaatgatgagttgcaggaagctcgacaagcattggttgatgccattaaagagttgcaatctcatggaaatattcgtttgaagagaatgggggaacttgatactagaccattccttgaagcaatgaagcaaagatataatgaggaggatgctgaagagagagcttcagaactgtgttcattgtgggaagaatatctaaaggacccagattggcatccattcaaagttatcatggttgaaggaaaagaaaaggaaattattagagatgacgatgaaaagctgaatgggttgaaaaatgacttgggtgaaggggcatataaagcagtggtggaagctttgttggaaataaatgaacataatcctagtgggcgatacttaacctcggtgttatggaactataaacaaggaagaagagcaactctgaaagaaggagtacaatttatatcgaatcaatggaaagtccttaaacgcaagaagggaatgacatgaaggtttgtttataagtatattaggtattgcatttgtcttttgaacttagtggttaatttacattattcacaactcccacctttttatatgattagtgttattgtttcaattattgtcgtgtaactaaggattgtatttctgaaaggttgatgttggttttggcgagagaattatgcattgcagcctggtagcatgcatccgtattgggagagcagcaaacctagcggttgtgttttaggttaagtgatttatgataatgtcaagctatttaatttcacttggcactttgtaatcttgtgtggcagaagacattgaagttaaatcaaaaccatatctcaacttatggaagaagaagctcgaaggcaggataaacttgctagaccattcctctaatcaatgaagcaaagagataatgaggataaaactgaagggagagcttcagaacggtgctncattgtgggaagaatatctaaaggtggaagattggcatccattcaaagttatcatggttgaaggaaaagaaaaggaaattattagagatgacgatgaaaagctgaatgggttgaaaaatgacttgggtgaaggggcatataaagcagtggtggaagctttgtggaaataaatgaacataatcctagtggacgatacttaacctcagtattatggaactataaacaaggaaggagagcaactctgaaagaaggagtacaatttctgtcaaatcaatggaaagttcttaaacgcaagaggggaatggcgtgaaggttgatgttggtttcggggagagaattatgcatggcagcctggtgcatgcgtccatattgggagagcagcaaacctagcggttttgtttaggttaagttatttttcgataatgtcaagctatttcattacttggcacttagctcctgtgggcatgtgcccagaagcaaactgcattcataatgacaagcctttgtaatcttgtgtggcagaagacattgaagttaaacttgtatgactatatcatttggcttttaattttaacatgtttctttgagtaattgtcc

SEQ ID NO: 29506 - DNA, 137 bp, Glycine max
  Clone ID: PAT_MRT3847_126647C.1
gatatggatcgtcacctgacaaagcagcttatgggaaggtggggaaaatagctcttgtccccggcccttcctgaagtgtaaaaaaaatgcatttttctattgggggaaggagctcgtgccaagaaatgttattatta

SEQ ID NO: 29507 - DNA, 425 bp, Glycine max
  Clone ID: PAT_MRT3847_126648C.1
gccccatccccgcaattcccttagtcacactcatttggcctatctctgtggtcatggctggccatgaacaaacagcatttagtgtgaacctttgtcataattatagttgaataatactctaatgtatgctaaatgtggtaataaatttaaactattatcctagcagtacataattatggatttgacttctttaaagtgttgaaggtgataaagaaagcgtgcattcacctttgattttaagtgagttaagtttacaagattttaattgaaatcaacagtggatacatgataccttcttcattttacacactttctcattttagggaagccaaatccattaaatgtttttgcatatagagtagagggaataagtattcaatacaattatgtatattacagtcatttaaaacattaacgtttgtcaa

SEQ ID NO: 29508 - DNA, 1106 bp, Glycine max
  unsure (1)..(1106): unsure at all n locations
  Clone ID: PAT_MRT3847_126649C.1
ccagcttttaagtgcggtattctagctgatgctccgctcgagctatttgttcggttgtccccatggcttccccctaccgctgatcctctcttgttacagccacattttgctgggcgtgggcagtttttttgggtaaaggttttggatgtagatcctagacccaactcctcctagggcctacaccttaataaggcaaatgtataggaatgtttgaaaatgggtcaatggctttatccatctgtatgtaggtcactgattatgggcaagtagcaaacatttatccctgcttcacccagcaaactcttcggtttgatttatctttgaaagaatggatctaactaatgactaaatgaaatataactatccagagtcaaagaattgagagcttcgcgttgggtcgacggccttttccgtctgtattaggtcacttattatgagccagtagcaaaaatttatctccgcttcacccagcaaactcttcagtttaatttatctttgaaagaatggatctaaactataatgactaaaggaagtataactatccagagtcagaaagaattgagatcttcacactttattgacgagcgtttcggatctcatccatcagcgctatcaatgccactctccactcacagcactgtgcatcagagctgagtaacttatgcattgtgcttaactcatcaggacttgccctttgcagtattaatttcatctcttcaaggatgtcctctttttcctgcttaatcaaatcaataccaaaatttttggtattgataataataccactggaaccatatgtgaagttatcaacaacactgccagaaggggcaactttgtgattccagtactctacacacagatggctgggatcttgagcttcgatggcctgaataatagatggtaaaaggaagccaaacattctatgaccattaatgcttcgcaggcgctctaagagaggaagttctagttcacctngnctcctttgcctcatgatttcatgatgtaatctcttcagaactgattcccagcaattatctgctgnnnnatctnngaaagcctcacttggacattctnnnatgnnnnccttgaaaagnnnnnnnngaaaa

SEQ ID NO: 29509 - DNA, 410 bp, Glycine max
  Clone ID: PAT_MRT3847_12664C.1
cgggccggaggaatccgggtcgcgacaccacgcgcgcgcaccatacgtccgcccacgcgtccgaccacgcgtagggttgaattttatatgagtgcgggggagaatcctctctttcaaatacccctaatggcacaagaggaaattcagtcttttagtgcatgtgattgcacaactgctatggggagtgaaaatagcacgcctgactctactgaaatgcatgtgggagctatagaaaccaccattgatagattagcaagacatgactgtaacatagatagcgcaatgcttcaggttgaaacttattataccaattctgaaaatgctctggcgaaatatcaagtgcagcgctcgtgaagagcgcggaatgagcgattcggattggttacatctagcgaataccatgtgtgcag

SEQ ID NO: 29510 - DNA, 359 bp, Glycine max
  Clone ID: PAT_MRT3847_126650C.1
aaaagacaaaatatagtgaaaccttaactatcagaacctatttaagtatgcagggttggatattgacaatcttcagaacttggagagctgtctttttgttcttttcccatacttctcgtacatgcttgcagaaggtcttggactgtctggtattgtgtcaatattgttcacaggaatgggcagccaatgtgttctcttgtgcttatctagtcaacttgatcagacctgcctatcgacaaataccgccaaaacaccagaaagcactttggtatagtggacttcgaggggcaatggcctttgcccttgctctgcaatcaattcatgatctgccagaaggacatggacagaccatcttaact

SEQ ID NO: 29511 - DNA, 255 bp, Glycine max
  Clone ID: PAT_MRT3847_126651C.1
agcaacgtgcgtgtgatatcgtgtgcaaaatcaacttccacagggggatgcgtgcagccgttgctttccttttagcaaatccttaaaagggctccccgggagaagtgcaagggaccgcgccgccgccccatcctttttgggggttgtgttccgcccagggggggggaaacagctgctggatcaaggggaaaacctagctgcagaccaaagagacaggcaacacctggaggggccgcccgtgtcccttggctgggg

SEQ ID NO: 29512 - DNA, 480 bp, Glycine max
  Clone ID: PAT_MRT3847_126652C.1
ttttaataataggaagtttttcttttactcaaatttttttcaattatatgtattaaattccttatgtgttacatatgtgaaattttataaaaagaattagtaatattttttgttgttgtactcctcccccttaaattaaagttctggttctcaccttaagcaaaacaattcgggtccatagtcaagccttattgacacatcattcgaacaagaaaactcctgtcaagacaataacctttgcagtttgcacccccaacatgtcttcccatgatgacatcagtcgtaggaaatgagcatcaagctcgtcactggcaagcagagctcacaaataatatttttacgatcatccccagtttatcatccatcataaaacctacagggaaaaggcaatattaacagtatagtcagttatgccatgcaggttgcaagttagaaagcacagatacaacatgatgctgacactgaaatatggcaaattta

SEQ ID NO: 29513 - DNA, 469 bp, Glycine max
  Clone ID: PAT_MRT3847_126653C.1
tacggctgcgagaagacgacagaagggatctcccttccctgatccttaaatgttttagtcttcttttttattctaaaatatgttacgtttaacactctaatgacaacaccaaaacgtaaatatcccaaagccaattctctaattaaagagattaatttccaggattgtatatattgatcgacaatattattaagaaataagtggctaagttctgtccgaacttcatcttcatcaggcatattgtggggtactagcccactggctcctgattccatctttgtcatacaaattgcagtatctttcaggacaagattgttttctgtatcagaaacatacagcaaatagttcaactaattattgattgtttagttaggctatgtatgataaaattaactaaaaagttaattagaagttaaaaaaactaaggctgaaaattagttaaaaactaaaaaattaatatcttattgaa

SEQ ID NO: 29514 - DNA, 703 bp, Glycine max
  unsure (1)..(703): unsure at all n locations
  Clone ID: PAT_MRT3847_126654C.1
cggaattcccgggtcgacccacgcgtccgaaagaatccaagtccatttttttttttactatttttgagtagcttctagaaaagcactgaaattataataacaacctttaaaataaaagaatgcttttataattttaaccaaacgtaataatctttggcttttcataagatttataaaagacaaaatcactattttatacaatacattcttaaaatcagctttttaaaagcataaataaactacaggcccttattctcttctcttgggaatggaacaaagggggacataatttaatagcattgaaattcgaacttaccatttcatttttactcatcctttgggtcacacaaaggaagtaatggagaaggaagaatggtttaagctcaggtttctttgtgtgtatgttcagaacttcccctgcagatatttaggtgaaggaaaatgccagttttggcatacagttgcgattacaccatttcccccttccttttttccttcacatgaaaatagagtcatcctctacattacgtgtggtttcattgttgaagaggtcaactcggtgtatacctttgctcattaaagtggcatgcagcaaagagtagaaaatgtcttgaatatttttgtctcatgaatgcagcttattccccaagtacctatcaagaaatggtgtattgnncagcctgctacaagaactatttgcatt

SEQ ID NO: 29515 - DNA, 172 bp, Glycine max
  Clone ID: PAT_MRT3847_126655C.1
tatatataacctggaggggcctaatggggttgggacctattggtgtccaggtgccttttttgtgggcccccatttcctatggtccggttccctaacacaagtgccaatggttattaaggaaccggtggccttgcattttggacaattgtggggaatggcctaaaattggcat

SEQ ID NO: 29516 - DNA, 312 bp, Glycine max
  unsure (1)..(312): unsure at all n locations
  Clone ID: PAT_MRT3847_126656C.1
cccacgcgttcgggacgatgctggagatgagatcatggcaacatttaaaacatcatccatcctatacgacatggttgttgtgctgtggcacatgatgcattcgttgacccattgtatgtgtccagcgcggctcgccctagagagcatattgtnttattgtacaatatgaccactagggcgcgccgcactggatacatacaatgggtaatagatttgcatacagcgaccaaaggatgacatgaatgngctatagcgactgatagatgcttaaatgttgccaagatctcatctccagcatcgtcccggacgcgt

SEQ ID NO: 29517 - DNA, 694 bp, Glycine max
  Clone ID: PAT_MRT3847_126657C.1
tcttcctaaatattgccatctatacatgccaattgtgctttttgatattatctagtttaagtgcttaaagttcctggtgtaaagaatttgggtattcctgaaatacctgttgcaccacccaccaccaccagtgctcctcaatctcccttttctatatttccagctctaaaacaagctacatcatcaacaacaaatgggcaaagctcaattccagaagaagcttcaaaacattcaaataaaaaaatatcttcttcttctgttattagtcaaaggcttagaagtttagagaaacaagtgaaaggaagaaagaagaaccagaagtgaggaaaatttacaataatcctaaattaagccatctatacatggagcaattgtgctcagatttttgttatattttatgatcctgggatgagggagaaattagtttaaactttgtttgcttaggaagttaaaacttttgcttatcgtgttgtctacactcgattcatgggtttctcaattcttgtgtaaaacttggtccctatcagactgggaggcctcaataattttgtataacttttcttcaatttttcatattcattttaaaaaaaaaggtgatcaaaagattccgaatatgtacccttatttgacacaaattgtatagtttcaacttcatttcaagtgttatttttattaggaaaaaaaaaaaaaaaag

SEQ ID NO: 29518 - DNA, 271 bp, Glycine max
  unsure (1)..(271): unsure at all n locations
  Clone ID: PAT_MRT3847_126658C.1
tacggctgcgagaagacgacagaagggtacggctgcgagaagacgacagaagggggccgaatgtgtctctccgcagcagccacacttcttcgccgtttcagctgaagagccatccgcaggtaagcaatggttaagcataataatgttatccccaatgggcacttccggaaacactggcaaaactatgtgaagacttggtttaatcaaccagcccgaaagacncagnnaagnnacggnnttggcttcgggccagaaaagaaagggctgtcaa

SEQ ID NO: 29519 - DNA, 463 bp, Glycine max
  Clone ID: PAT_MRT3847_126659C.1
cagaaatctcagcaattgtgtcgtcgtcatcatcatcaggactttttgatgatgtgcctctgagcaaatggaaacataggacggggaagaaaagctcagggaaagaacaatgagcagtttagctattgttatttgtctgtcaagaatgcagcggagttgatgctgtggtacaagtacagttgttagcgtgaatgatgactgccaaattggagatctttagttattaacacactaataaatatgcttagcatgtcttgtagccaccctgtagagagtataaaataacagcaatcatccccacgtttataaggagaaaatgcagacacttttgggttctttaggactatattcctgttaaatgacctttcataagttcaggggataggtttagcatatgatttatgtagatgtcgttcatcctttcaacacaattgatataattgactcgggcaccaacaaaccc

SEQ ID NO: 29520 - DNA, 451 bp, Glycine max
  Clone ID: PAT_MRT3847_12665C.1
ggaacctttgggctgatttatgtgcttgcatggtcgtgagaagatgatagaagggggtgtatttagagaggaagtccagagagagagagagagagagagagagaggagagagcaccggtgtcctattaagacgggcaccctcagggaccttacgtataagaggtgcgttatcggcggtaagaaaaaggtccggagaaagaagagaaagcacgagtccgggtgctaggtagtaaatattaagccactaagtaataagataactaggaggacctgcgccagaggcggtaacgccaaacggagggtaccgaggtcggacatcggtaaccatctacggggcagcgaagtagccatctgtaagatctgcacctcagacgccgcccataacgttctaaataatgagtccgcgtgaatctagatttcggctaagagcgtcaccgcttaggccgacgtc

SEQ ID NO: 29521 - DNA, 352 bp, Glycine max
  Clone ID: PAT_MRT3847_126660C.1
ttaaaggccttattcgccatcgcgcttcatcctcttaaccgatctactatgattaatcttggcgcggttcccgcgcttttttcgttggttgccaaggacggtagggttgggattgtggaggacgccaccgccgtcatcgcgcaggtcgccggttgcgaggacgccgccgaggccttttttaaggcctccggagtaggcgtcctccctgacctcctcgaccttgccagcgccgccagcatgcgaactaaagagaacgggaggatgggggacttcattcagaggagtctcggaaatgacttggtattccatctctggctgaatggccagagggaattctcaagttttttttacc

SEQ ID NO: 29522 - DNA, 1821 bp, Glycine max
  Clone ID: PAT_MRT3847_126661C.1
ttcattttccaccactgtctaatgttattgatagtttatggtgttaatatttgattgtcatcagagtcatcattaataaacatatatgtggaataagagtcatcaacgtttctccaaaaaatcgattcaaatggaacaagaaaatacatgactaaaatataaacaatttggaggattgacaaatatgtgcacaagcctgacatccaaagttagaaaagtttcagtttttccttcttctcttcaaaaacggcatggcactaaatgctccagtggaggctccactattgttgcgagtattctcctgtttcaagaccgctatatcagaatgatcataactactagcacttgcaaggtcatttggctctatattgaatggccctccaccttgtatcccattttcaggcttttcagcgccagaaaataatatatctgaactacttttatcacgattagtttcatccaaataatcagaaccgtgtggaaagtctgcattataatcgactgtagcagtatcgacattgtcacttgtatcctgcttgacacctgtatcaccatcatctaaacagaatccacctcccattttaaggtagtcatcagaagagtcctgattgccagtaccaggatgacaagtttcaccggcatctgtgcaaaaccaaccacctgactcaagggagtctgtaggcaagttctcctctggaggaaaattcattgcactgcattctttcgccatgctgaaatctgttgcaccatcttcacaagcaccaagaatatgagataaattttcttctattggaccagtctgatttctccgatcaaatgaatcatcagaatcttcatcttcaggctctttgaaagaatagttgacaggtttccgagatcgcattgacatcatgttgctcttcttctatctgcagacttggctgtaaattctcaatctcagatgtaccaggtgctgaagagggatcatcattgactttctttttctttgactgttccttagcaacagtatcattcttccttgactgttttatttttgatttccttctaccctcaagatttccctctattccccttgaagtctccaatgtgatatcctcaggttctctcccagtcttcctactcttggagaactcttctacagaatcatctatcaaatctgaaggctgcttaccagtgattccttttaccgctttcttaattcttttactacgaatttttgcaaatctttcattaaaattgtaaaatgcttccaaccgcaattgagtctcacgcttgttatactcctttaagactggtaggatcaattcatctgctttctggccagtccacccaaatttctcccagcacaattttcgaagaacaagatgatctggctttccccatgtgaatggctcagtggatttatcaacatggggagaatagtaagcagatataacagtatcacttggaaaagaagaaggaatgtgccaattcttgctaacatttctatgcttattgaagaaagtttgttttatttcttggatgtaatctgacaactcattttgctcctgagcatggcagatgttttgcatcaccgcagactctttaacattgcaacttgaggaattcatcttttcttcaatttttgacccctttctttctggaatttgaaccactatttgcattccaaccttccaaggatggtgggatccggtgactcaacccattgccggaatttcaggaggccatcttcctcagggaatgcattcacaacctcaatagcattaacaatgccaaaaaaacatacaccttcagtataatcactcccaagaagctcgagcc

SEQ ID NO: 29523 - DNA, 1226 bp, Glycine max
  Clone ID: PAT_MRT3847_126662C.1
aattcggctcgagcttgaactatatacaagataacctaagttgggttcttggatttggaattccttgtgttgccatgattattgcattgcttgttttcatgcttggaacagtgacctacaggtttaacattcagcagcgtggcaaaagcccctttctcagaattggccgtgtatttgttgctgctataagaaatcgccgatccaccctatcaagcacagctgtcaaagcagaacaatttgagttcctcaacaaagcattgttagcgccagaggattctatagaagacgagagttgtagccttagtgaggtggaagaagcaaaagcagtactaaggctggttcctatttgggctacaactctggtttatgctgtggtgtttgctcaagttcctacgttctttaccaagcaagggattactatggagagaacaatatttcctggctttgacatacccgctgcttctcttcaaacgcttgtcactgtggccattgttctgttcagccccatctatgaccgcctatttgtgccaatggcaagagctattactggcaaaccctcaggaatcacaatgctgcaaagaattgggactggaatatctatatccatatttaccatagtatttgcagcccttgttgagatgaaaagattgaaaacagctcaagagtctggtgttgttgatgaacctaatgcaactgttccaatgagtatatggtggttgattccccaatatttcttgttcggagtctctgaagtttttaccatggttggtctgcaggaatttttctatgaccaggtcccaaatgaactaagaagcatgggtcttgctctctacttgagcatctttggtgttgggagctttataagtggctttctcatttctgtgatagagaaactgtctggcaaagatggacaagacagttggtttgccaataatctgaataaggcgcatgttgattacttttattggctacttgctggactcagtgtaatgggattggccttgttcatttgctctgctaaatcctacatttacaatcaccaaggaatcagacgagaattgtgaattgtccggttctgtcaattttagctttactgtatgggatgaaaaattatattctgtataaggtacgagtatttgtgtataaaaacctctggacctggggaattgtcaattcatttgcattctgttcaagataagggttcttttttcccatattatacatgt

SEQ ID NO: 29524 - DNA, 142 bp, Glycine max
  unsure (1)..(142): unsure at all n locations
  Clone ID: PAT_MRT3847_126663C.1
ggngaagctgggaagantgtntgacgtgaaagacaccaacnctgtntttgtcttcnagttccganctcnttttggtggtggcaagtccnctgggtttggtttgntctatgnttcngttgagantgctaagangtntgngcct

SEQ ID NO: 29525 - DNA, 240 bp, Glycine max
  unsure (1)..(240): unsure at all n locations
  Clone ID: PAT_MRT3847_126664C.1
cttaaattaatggctcctggtatttttgagtttgtttgcttcannttccctgcttctaacttccctctattttcctgggaaagcttggagtgggtggtagggggtaaaagaaaattaagagaaggtagtttaggaaagtaaagtgaagaaggtaatattatataatgtagcggggggtgttnntaaatgtaaatgttatgatggtgtgctgatatataccanatacaccgttcttcttgt

SEQ ID NO: 29526 - DNA, 291 bp, Glycine max
  unsure (1)..(291): unsure at all n locations
  Clone ID: PAT_MRT3847_126665C.1
nngantagaagtaggaangnanttagnctagangggaaattaagagagaanttnanatgagggtgagagtganatnaatntagagagagnaatagtantntaaaagtctattatattcttnaaaatanganatgaatcgagagtntngngtnttgnnttaggagttatgggcanaatnatctcatttggagtgnaccttgatncatgnnaacnttttanncaaatctanaagaagaaatccantgaaggnttcnagtacattcnttagttgttgnaatgntnagtgaangn

SEQ ID NO: 29527 - DNA, 419 bp, Glycine max
  Clone ID: PAT_MRT3847_126666C.1
ctttgtgttttgtaacatggagaatcactacgagtgatcttcatgatcaacagcagggactaagtcataattggaagagggcccgactgcattatccaagtgtcaagcgcacatgcacactctggggagaaaacttccattgggcagttgtcctacacccttgatggacttgtcggacgactgattgataagatactgaaggatgctaggaataactactactcgaccttcaggtattcctgtgagctcgtccagctcttagctccccctgatagatgaattaccatgcctgttggttagacgcaggaccttaacacccttgctacctgtccgcgcattgatgcattactgacatcagtgacatattccaagacagcatactggtacacaccaggtggggtgcgctctcctccttattg

SEQ ID NO: 29528 - DNA, 367 bp, Glycine max
  Clone ID: PAT_MRT3847_126667C.1
gacaacaagaagaaaggttcaacctttgtgcgatttttgttgtgctttttgattttgttgaagcacatgtttattttttttgccttatttttggatggatggttgctattatttcctgaacctcatatttctaatggttggctttagacattgattctgttggttgccgattatgcctttgttcgaaaaaaggccatatctttctgcaagttcgtcttctcacgactttgtgcaaccaaaaaggttcgatgtttctgtgggtgactgttgtgttcaattatgttggattgattccaaaatttgaattttcctgtgagcctttttttagcctgggcctattaagatatgcttctggatttaggtgaag

SEQ ID NO: 29529 - DNA, 391 bp, Glycine max
  Clone ID: PAT_MRT3847_126668C.1
gggaaaaaaacctcggaagaaacctaaaaaagaaggggattcctaaaactaaccccatttcgccgtgcacaacgggacaaaaaggaaggggcgcccccagaacaatttccccaaggccagggcccaaattccccacaggaccctacaacagacctctgcaaaggggcaacccaccccgggttcccaaaccccaagataacgcaactcccaaaaggggggggccccgcaccccccccgaggaccgttccttccccggaaccgggcacccctcggctaccaaacatttcgagtcgctggggccctcgcctgggaaacccccccgggggaaaacccccccgcatctccccagattgaaaaagggccaccggcccgggctatcccaggcgggccc

SEQ ID NO: 29530 - DNA, 387 bp, Glycine max
  Clone ID: PAT_MRT3847_126669C.1
ggggatctcttgggttttcttttttctttttttttttttttttgcttttttttttttttttttttgtggggaaaaaacagggtttttttttaaaaaaccccaaaacggaaacccggccggggttggggtaaacccccggcggggaaaggccaaaaaaagtttgcattttccttttctgggggtttaagggggaggggacaccccctttaagaaaaaaaattttttggtggggggggggcccccccccccaaagaacattcccaaaattctccctgtgggtgccaacaaaaacaaggcgagggccccactggggcataaaatggggggccggggccatctttttgtcaaaaaaacaccccggggcccccccccagggaaggacccccc

SEQ ID NO: 29531 - DNA, 260 bp, Glycine max
  Clone ID: PAT_MRT3847_12666C.1
cccaccccacccgcttttttcttttaaacccctttccctcccaacccggggtgcggcagccccctctaccacgaaaactggcgcatcccaatcccgccaccacctttttccgccggaaccttccatgcgctctcccccgtgggcttttacaaccggcccacctgggacacctacaaccccgggcccctcttggaccttttgggcgaatggatggcctcccaacagtggcccgacgtcaaattccttttggagtcatgggt

SEQ ID NO: 29532 - DNA, 214 bp, Glycine max
  Clone ID: PAT_MRT3847_126670C.1
cgaccggaatccggtcgcccacccccttgaaccactttttattttcaaaacagcgaaacccgccggggagcggctacatcctcaaaacaaataaatggcaggcctataaactgaacaccgacaggctaatagctagggactaacgaggccctacgctaatccatctctaaataccctctttcacgaagctagaatcacgcaggagaaaagaaca

SEQ ID NO: 29533 - DNA, 811 bp, Glycine max
  unsure (1)..(811): unsure at all n locations
  Clone ID: PAT_MRT3847_126671C.1
cccgcgtccgctgcaaagccctactagttgttctcttagttgccatttctgatttcattttctgtgaatttgatttccaattcaattgttgctgcaaactgcgatagcaatgtatcgattagctcgtagagtagcttcttccattgcttctccctctgctaagaacctcgtatatggtggagtattgtcaagcagaaattttgtgagcaaagatatcaactttggggtcggggctcgtgccgcaatcctccagggggtaactgaggttgctgatgctgtcaaagttacccatgggacccaagggtcacaatgtgataattgagagaagtcgtgggaatcccaggatcacgaaggacggtgtgactgtggccagaagtatcaaatttaaagacaaatccaaaaatgttggggcggatcttgtcaagcaggtggccaaggctaccaacactgctgctggagacggtacaacttgtgcaactgttttgactcaggcaatactcacagaaggatgtaaatcgattgctgctggcataaatgttatggacttacgtaatggaataaataaggcagttgatgctgtaattactgagttgaagagcagaacattgatgataagtacaccagaagagataacccaggttggaactatatctgcgaatggggagcgtgatattggagaattgatggctagggncatggagaaaagtggaaaggaggagtcattactgttgttgatgggaacactttggatatgaaatgaaagtggagaaggatgaagtttaccagaggtacatatctccttatttattac

SEQ ID NO: 29534 - DNA, 790 bp, Glycine max
  Clone ID: PAT_MRT3847_126672C.1
cagagaaagtgatgtaaatgctcttgcaggtgtcagatcccctccaagcaaggtgaatactccaaatgtaatcacagttacaaaaaactggaatgctatttagtatgaatgcattacacgctccaagtaatgatgcttttcgaaaccatgataattcatcatttcggacaatctgtactttagactggaaactactctcccatgcataatactttacagtgtccatagcagccaaaatttcattcatgagaccaattcttttgtctgtacgttgtaatccttccttagaaaacttctgcattctgctgatgataaatgtctgtaatggaaacatgagaactagcatcaaagcaccaagaagggaagcaacaccaagttgttggtaaagaagaaccatagcaacaacaattcgaaatggagctgaccacaaagtgtgaagtgactggcatatttgctgaagagcctcggcatcagtagtcatcaagttggttatttttccagttgcaaactgctttcgcgcttcatgagtaagccttagagatttgcgaaatacagcagccaccaatgttgatcttaaccggtaaccaacacgcatgacattctgaaaatattgagcttcacataacaccccaaagaccactccaacaaatattgagaaggcatatgcatagccagtccaggatggatcaccattttgcatagactgtaacagctgattcaatataagtgggcccaaaaattgggaaatatcattgccaatcttgcaaaagcctccccaccaaaaccttca

SEQ ID NO: 29535 - DNA, 368 bp, Glycine max
  Clone ID: PAT_MRT3847_126673C.1
aaaaggggaaatcaaaaaccccttttataatgggggggcataatttaaaagggggagggtttttataaacccgggttcaaatggaaaacaaaagacccctagaaaatttaaaattccaaattcctttttttaatgggggaaaaaaatttaaaagggggaggattttcctaaaaataaaaaggtttgccttggggggaaaatcccccccccacaaaaggggttttccaagaaaaaaaaagggtaaaacccccccccccaagaaaaaaaaaacgggggccccccctttaaaaggtttccggggtttttccaacaaaaggggggggaaaaaattgaaccccaatacaccttttccgggatttttttttggg

SEQ ID NO: 29536 - DNA, 305 bp, Glycine max
  Clone ID: PAT_MRT3847_126674C.1
cccttctgctgagggtggaggagaagatgagggagttgatgatgcagctgataaggttgatgacattgatgacacattcaaacttcatgagcaccccgcattcgataataagcaatttggaaccttcattaacaggcttatcaagagtctgactaccaatcttgatgctaacctacaagagatggttaagaagcacatcgagcgaacgactaagtaccctctctataaaattgaagatattcaactactggttggcgtgagcatgggtgatgatcctggctcgggctatgcctactacaacgaca

SEQ ID NO: 29537 - DNA, 261 bp, Glycine max
  Clone ID: PAT_MRT3847_126675C.1
cttctattgcaaaatcaatactacttatttttcctttcccgtgtaatgtgattggtgtggttggtgttagtcagaattttacgttctggaggattctgtttatttgggtgccaaaaaggttggaacttggatgagattttcgactataagttttgtgggaattcaagatctttactttataactctcagcgtttgtcatttagatcaaagatgtttggaaacggtgaagccgtgactcacagtgcatgctccaatggttct

SEQ ID NO: 29538 - DNA, 808 bp, Glycine max
  Clone ID: PAT_MRT3847_126676C.1
ctgctctcaatttcaaaagcctagtcacagcaacactgaaatatccacagatgcacactccctttagaaaaagaaaggaaaaagggagagaaaatgctatttctgctttctctctttacttttaactttttaagctctcattagagttgtcgtccctgcatttgcaccacaatgttcatcttttccacttgagaaaacatttgcatgagacaatgattggaggaatgaaggctgaaaccttgagtggtccttgtgttccgtaccatctcaacaatgcaacacaagcagtgataattaactgaataccaaagttgtttttggaatgctctgaattccatgacatatgatatcattctcatctttggaattgagtttaaggctagtttttgaggagtgagtgagttagttagtgagtgagtgagtgagtgagaaatgggttttgttggaggggaagaagccattcaagagcctacagggcatgatgagaggattcttgtttcggttcgtcttcgtctcctcaacgaaaaggtgcgtgcaagtaatgatgagtcagagagagaatgcttctgttacagtggaataatatacaggagcaaccattcagcatcttacatgtcactttacccaactgcgtcttcgtttcactccttgtagcgaccagcttcgaacggatgtttcggaatgaaaaggcatccatgtaagttccttttttcatcctcattttcatactggatacatgagactaccagatacaggagcaacctttcagtactgacaggtcactctacccaacagcatattccttgac

SEQ ID NO: 29539 - DNA, 362 bp, Glycine max
  Clone ID: PAT_MRT3847_126677C.1
ttgtttaaaaagttttttttagcagaaaaagaaaacccaaaatgtattgaattcgttttaaaatatccaagaagctacggttgacacagtaaaaaagaacacgggactccatttattcccgcgtgaagacttcttgttttgaacaagattttctcacagttatctatccatggtggcacccggtggaatttgaacaacgaatggcgccctccggacacctaaaaattttaagcgttttcaaatgacggaccaggttttctttgcccccacgcttataaatggtgtttttattaagggcgttatctgattcattagatttcccaaaagagccttggacttacattttttttgtcacttccccc

SEQ ID NO: 29540 - DNA, 465 bp, Glycine max
  unsure (1)..(465): unsure at all n locations
  Clone ID: PAT_MRT3847_126678C.1
aagtataccaaaaaagtggggaagataggatgagttcctcttactcccgatgacagtgagattaacacccatctaatcttcatgcctgaaggatgagaannngtttgaaaatgattttgaaaaggtcaaagaagaaatgaagagagtgaaacttactttgttatcannnnnntgggtaatttgtgcaaatttgtacgtaaatttttttgggttttctcatttaattggnnnnnngtaatgtttgtacctaaattgcacacagcatgtaatttgtatgggcagcaattaaaaaagtgctgatcgttaacacagtcaaaatagccttggttttaagagcaagtcaccgtgatannncattgatccatcaaattcatctaatcatcaccctttccctgtgtaaatgaaatttgatgacaatgggggaagaagatcaggggaaccgaatcacctgcaagtaccacttat

SEQ ID NO: 29541 - DNA, 347 bp, Glycine max
  Clone ID: PAT_MRT3847_126679C.1
tgaggaatggttcgattgtgttgatgaggaggatttctttgaggaagtttctttaagcgcagcacttaatggtgtcgaggatctggactatatgggaagaatatctctagccacatctgagggtgttcctaatgtgctttcacgcaaaaatggtgaaaaaggcacaaggagatttgcttttgaagatggcgaaaagatgacattgagtccggtaaccagcgttgaataggcttacaacaggctaatagttgaacttgagaaaagtgttactacattggctggcattgaatgtaccaaggatgagaatcttcctcgtcgcaagacttttgacaaacctaagacgcgct

SEQ ID NO: 29542 - DNA, 311 bp, Glycine max
  Clone ID: PAT_MRT3847_12667C.1
aagcttatggaccaagtcagtgtgatgtttgtctgctataaaatgagctttaataataaaagttaatggattgatgggttttgtggaaaatataaactcttgaaagatgggcaataggaaggagatatcttctttgattgacaagaaaacggtatattgatattgacatttgaaaaaacaatgcaacaaagttttaaaggggcgtcttttaaagtgacaagacttaaaacattggtattcaacggatagagatcttttaaggggccaatagaataaattataatgccgggctttaaaaaagctgatatagg

SEQ ID NO: 29543 - DNA, 544 bp, Glycine max
  Clone ID: PAT_MRT3847_126680C.1
ggctcgagcagagatactgtggtgccagattggctggattatagttctgttctgaaatggtttataggtctttcgtttttggctgtccctttatcttcttgcacatttggtgaaggatggtgttggaaagtattgctaatagcaaaattaaattattcggatgttgttcatgacagccatcacttgattgcttaaaacgctgagatatcaaaagaaaattccccggggtatggctggtgcaattttttatatacaccatttttattcttcttgatgagggggtttgataaaaatatgcatccccgcacagcagaattacctaccctaatttgttcaaaatactggctggtggtcaagattgttaatatctttaacatctgtccagagtaatagtttataaatgctgaaatttgcaattttgatttctgcacgctgcgggttggcttagggttttccccccaccccccccccaaatgaaagggggggggggtgtgttttttaaaaacaaaagaaacacagggcccccccccctgggctttttttt

SEQ ID NO: 29544 - DNA, 1580 bp, Glycine max
  Clone ID: PAT_MRT3847_126681C.1
aattcggcccgctcttctgaagcgtgagggcgatggaggaaagaaagccactcaaactctacttcattcatttcctagcagcgggtcacatgatccctctctgcgacatggccacactcttctccactcgcggccaccacgtcaccatcatcaccaccccctccaacgcccaaatcctccgcaaatccctcccctcccaccctctcctccgcctccacaccgttcagttcccctcccatgaggtgggtcttcccgacggcatcgaaaacatctccgccgtctccgacttggacagcctcggcaaggtgttcagtgccaccgccatgctccaaccccccatcgaggacttcgtggagcagcagccacccgattgcatcgtcgccgactttctcttcccctgggtggatgacttggccaaaaagcttcgcatccccagacttgccttcaacggcttctccctcttcaccatctgcgccatacactcctcctccgagtcttccgattctcccatcattcagagtctccctcaccccatcaccctcaacgcaacaccgccaaaggaattgaccaaattccttgaaaccgtgctggagacagagctcaaaagctatggcctcatcgtcaacagctttacggaactcgatggagaagagtacacccgctactacgagaaaaccacgggccacaaggcttggcatcttggccctgcctctctaataggcagaaccgctcaagagaaagcagagaggggacagaagagcgtggtgagtatgcacgagtgtgtggcttggcttgactcaaagagagaaaactcggtcgtctacatatgcttcggaagcctttgctatttccaggataaacaactatacgagatagcatgcgggatccaagcatcgggacatgatttcatatgggtggttccggagaagaaagggaaagagcatgagaaggaggaagagaaggagaagtggctgcccaagggttttgaagagacaaatgaagacaaggggatgattataaggggatgggccccacagatgattatacttgggcacccggccattggtgccttcctcacgcactgcggctggaactccacgggggaggcggtgagtgcggggattccgatgctgacttggcctgtgcatggagaacagttttacaacgaaaagctgataacagaggttagggggattggggtggaggttggagctgtggagtggacccccattgggattggtgatagactcaacttggtcaccagagatcatattcagaagggtgtcagacgcttgatggacgcttctgatgaagctctagaaattagacggcgagcaaaagactttgcccaaaaggccagacaagctgttctagaaggaggttcatctcacaacaatttaacggccctgattcatcatcttatacttctcaggcacgccaggcttctcgcttaatcaaatactcattaatatatgtatttttcgcatttagttgcttcttcaatggtcataaatgcatccacattgataaggaaaacctaaaaaaataaactggtatatgattaccctaaaaaaaaagaa

SEQ ID NO: 29545 - DNA, 383 bp, Glycine max
  Clone ID: PAT_MRT3847_126682C.1
ggctcgagtttgaggaagataaagttctaagagaaatcagaacaccaaacacaagagaaaacatttttatgggcaaattatgcaaagaattagaggtccagagtagaggagaaacctcttaacaaatgttcttatatcctgattcccactttcactctaaatgcttcagagggagaaaagctgtcagaactgaacaatccaagttgcgagagcagttctataaaatctatgggaagtattgccagaatgtggacaggaattcttttggtccagattctaatttcctctgccagttcctctatttctttaaggcagaaaatattgaggacttcttagttcttgtgcaaatatgcccgttgctttggtgggtctgttcaggataa

SEQ ID NO: 29546 - DNA, 332 bp, Glycine max
  Clone ID: PAT_MRT3847_126683C.1
ctcgccgaaaagaaccgacaacaatagggcaggcaccagaataaaacacaaggcccggtaagaagaacaaacaaaataaaaaaaaccaccaccaaaaagaggaaaaaacagaaaaaaaaacaaaaacacgcagtgtcgaaagagaaaagaagggggagctgcccacaacagaaaaaaacagagataaggctggcagaaacaacggagcagcggagtaaaaaaaaaagggacaacacgcatgggggtgccatgggggcacacaagggtgagccccttgctgagggcccctccaaaaactttaacaaaaaaagaagaggggggacagaagaaaa

SEQ ID NO: 29547 - DNA, 399 bp, Glycine max
  unsure (1)..(399): unsure at all n locations
  Clone ID: PAT_MRT3847_126684C.1
gtctcgagttttttttttttttttttttttataatggttaggacaaatcaccctattaccatagggattctaattattgggcaatccgtcatgattgcaaggttaacaacaataaattttaacttaagatgatttaaatatttgttatttataatttatctaggtgggattntaatgttgttttgttacattattaaaatcacattttctaatcaacccgttggaaaacttaaaaagataaactatatcttatgtgtttttattactttgtttatttttaaagaaaaaaagtttatataattcaaagctattaaaatttcacaaataattactcctttatattcaaaaaatataaatctaactttttttttcttaactatattattttttattataaca

SEQ ID NO: 29548 - DNA, 129 bp, Glycine max
  Clone ID: PAT_MRT3847_126685C.1
ggaataccaggagacaaaaagggccctcctctcgtcgccggcgcctttgtctctctgcttcactcgcacccgtagcgttttctgcaaatccagaaagaagccagcgccatgtggtggcagaggaaaccg

SEQ ID NO: 29549 - DNA, 314 bp, Glycine max
  Clone ID: PAT_MRT3847_126686C.1
gtaccggtcctttattcccttttctacccactcgtccgaaaaaaaaaaaaaaaaaaaaaaaatttataaaaaaaaaaaaaaaaaaaaaaaaaaaagaaaaatataacaaaaataaaaacacccccatccctcaaaaaaaacctaattttaattacacttactttcacttccactcctcctcttttttcctcaccttccttttatacaaccccctcatttctaaacttcttctcctcaaaaaacattcccttttcccaatttaccctctttccataatatccctcactaaccaaccttcctaatatttactcacc

SEQ ID NO: 29550 - DNA, 730 bp, Glycine max
  Clone ID: PAT_MRT3847_126687C.1
acttgactcgctgccgcgtcgtagctcggattcggcttcgagtgggactcggtccgctttcacagatcgtcaatatgtttcctggcggtctgggtggcctcggcgaattcatgaagcaagatggtgtagaggaagctggtgggaaaagcatgaagggcatgatgtgtataatggattcaatgacgcagaaagagttggacagtgaaggaccacccaaaatgttcccagaagagggtaccaggatagcaagaatagccagaggatgcgggaagaccccagaagacatcaacgatttcatcaaccaatacagaaccatgtcaaaaacacttaagaacataactggtaacaaaggcctgatgggcatgctgagcggcatgggcggtggcggtggagcaccaggcgggcagccaggtggaggcatgatgaacccacaaatgatgagtcaactttctaaagcactaggaccaatgggtcaagcattaggcggcggtggcggtctcgccaacatgatgcaaagtatgatgggcgcccttggtggcggcgctggtggtccagatggtccaggtggactcatggatgcattgcagggcggcggcgtcggcggtggctcgaatggtggcaattttgccaacctcatgaacgcatttggtcaacagaatcaagggagagggcaaccccaacgaagaggtagaaacaggtaatcaatatagacatggatgtacatttgttt

SEQ ID NO: 29551 - DNA, 550 bp, Glycine max
  Clone ID: PAT_MRT3847_126688C.1
gcactgcgcagtcattttctctctctgcggaaaacccaaagaagaaaagttcccattgtttttgcccgtgtgactgtgagcgagagtacccacagcaacactccaaatgtgccgtccatggtcggcttctcccattattccttctctctttctatcttctcctccttttctttgcatccatagtccatagaaactgaacacccgttattatgggctgtgttcaggccaagtcattggatttggaagaaagtcccgaatacaggaccctagacagattgaagttggataatggctatgtcccaagtaccgactttgttgctcatagaagatccaccggtcaaagacatcatgaacctaataaggagtatgaaagactgcatcagcatcagagaagagaacaacccagaaagcaaactaataaacttattgagtctggtgttgccaatggtgaagggcttcatcttaataagggcaaggtggttggtagagaggggaggagagtcacacgtcgtgatgataagaagttggaaaacaagtgttgctttgagga

SEQ ID NO: 29552 - DNA, 473 bp, Glycine max
  Clone ID: PAT_MRT3847_126689C.1
gacaatgtggggggaactaaaaattcatgtatacctactactagataataaataatacaagactataggacttagtggacgatacctaatactttcaaaggttatttttcctaactagaacttaacccgcccatatgaaataagtgcaatattattggggtgattttcttatgtattttagttactgcaataagatagtatcatggattaaataatagtgcctatatcagtaacatattaaaatacttttttagtagtactctgggaaatatcattttatatgccaatatttgagaaaaaaacggagataaaccgaaaacatactatgagaaagtgaaaattttcattctataaaaaggtaccaggtattcttaaaattaaatctttatggagggaaacttattatgccatatccctattggaaggaatcgcagtaaattagtaagtgcaaaatattttttttgttaccaatt

SEQ ID NO: 29553 - DNA, 380 bp, Glycine max
  Clone ID: PAT_MRT3847_12668C.1
gaacaatccagcacaacacataatggaagcctggttcatcgtcatcgtctctctctgtgtctgcgttctcatcagagccatcttctccctttttcacaacaaaaccataaccaccccaccaggccctcccaacatccctgtcatcacaagcttcctatggctccgaaaaaccttctccgaactcgagccaatcctccgaaacctccacaccaaatacggccccatcgtaactctcccaatcggttcccaccgcgtcatcttcattgccgacagaaccctggcccaccaagccctaatccaaaacggttccctcttctccgaccgccccaaggccctcgccatcggcaaaatctttatcttgcaaccagcacaacatcaac

SEQ ID NO: 29554 - DNA, 271 bp, Glycine max
  Clone ID: PAT_MRT3847_126690C.1
cacacacaaggtttgcatgtattctattctcatttttttgatcccaacattaactataagggggagggataacaagaatagaaaaaaggaacaaccaacatgttgcagagagctgcaagcaatgcatattcatggtggtgggctagccacatcagaacaaagcaatcaaaatggatggaacaaaacctccaagatatggaggaaaaggtgcacgctgttttgaagctcctagaggaagagggggattcctttgccaagagagcagaaatgt

SEQ ID NO: 29555 - DNA, 403 bp, Glycine max
  unsure (1)..(403): unsure at all n locations
  Clone ID: PAT_MRT3847_126691C.1
aaagtaacaacaccaggattacataccacacaaacaataaaacaacaatggtacactttcatcaaaataaattttttcactccacaaatctanacccctttacccatcaactacaacataattcaataaaacaccaacaacaacaaacctaanaaaaaatatgtcacaaatcacaattacaacattaaccaccctaaataacacaacaatttcttcatataaactaacactacactatcaaacccttctattataacatcattcttaccaaattaaacaaaaaaatcacaaacatatatccaccttcaatttaaaacaatcaaaccaaacaactntcaaataattcttcacacaaaccatcaaacacattttctaatttcaaaaccttaccataacccaacat

SEQ ID NO: 29556 - DNA, 143 bp, Glycine max
  unsure (1)..(143): unsure at all n locations
  Clone ID: PAT_MRT3847_126692C.1
gtaaagtagaagtcccgtttaaacaatattccanctccccaccgtgtggccaaaccttgacattattaacttgtaaaaccaaaaaaggcgtttggggggcattccctttgcaacaagagaaaagaggtccatcttctgggatt

SEQ ID NO: 29557 - DNA, 2698 bp, Glycine max
  Clone ID: PAT_MRT3847_126693C.1
ggctatcaaaatccatatattccatcacgagggagaaaaactttgcgacacaagagagtttataccacactaataaaaaaaaagagtagaatctataccacatgaaaatatcttaatatccataagcatgcataaacagaaaggcataaggacacacacaggtaactaactgagaatcattacctccaagttgattattacacatttaactctcctgcttatttttctacgttttctgtctaagaaagacatcaatgagagagaagcgaaattgagaagctcatagacacacgttcatacatacaatacaatagtgacaatgcataatcatgaaacatgcttcatgcagtgactgcttcttcattcacatactttagctcttcattgaaatgttcatcaataccacatttactatccataagatcaccaccacaacctccacagccactactctccaacctatttccacaccctcctccacagcctccacaaccacctccacaaccaccgcaaccaccactcttcaacatagatccacaccctcctccacagcctccaccacaacccgcaccacaaccgccacaaccaccactcttaatcaaatttccacaggcttcaccacaaccaccacaaccagcaccacaaccggcacagccaccactcttaatcaaatttccacagcctccaccacaaccagcaccacaacccgcgcagccaccactcttaatcaaatttccacagcctccaccacaaccagcaccacagccaccactttccactgcatttccacagcctccaatggaaatttcagatttgtatgttatcccctcatcttcattgcacatattagtagaactcaaccccgttccattcaagactgtcttttcattttcctcatttgggccattcaccttcaaatctttacttttagcaatgatgccttcatatccttcttttttcattatattggaagcaataaaagtcaaaatgattccaggaagcaccatccacttctcctttgccgtgacatgtctagatctcaagtcaagcaatgccactgctttgccatagggttcttctatggagaattcaacagctgttaggaaattcatttcatttccccgtttcccattgtgtctcagttcatagtctagctttcttccggggaaaattctcacccttttgttggcaccagtaagctcaaagagatgaccatcatttgtagatttgtttggaaggtgaaacaaccaaagattctccaaaatagaccatccattttccataaactcagcaagagtgcgagtttcaccagatttcatgaggccaacaacctcctttccaggatttcctatgttctttgcattcttcaaatccctcatttgaaggctgatgattctggtgccattttcatctgttacatgtgtccagcttttagcatgttgaggcctaacaggaaggttgaagagacatgtatttttggaacagtttatatccttgttatgatgaaaagctttgcaagccacagaactattctagggatctccataactttccgatctggtagcgaaatttcttgtgggtactcatttgatgaaacaaccttcttgcaagtaatgctagatggaaaagggttacttgtgataggagacggtgcattacccctatacattgctccagccttccaatatcttgtaccaaatgtgacttcccactgtctggtggttccagaaaaaccaagatccagtttctttcctttagttctgtctgagtctgtatcatcatgctccaatacttttccaagtgcttcattgaggtctttacaataagcaactggatgtaactggtgagaatgccagattaggtcaatatcatatgttggaacacaaaagcgttttatacccttttccttgtttctcttgatgagatgcagaaaccctttgtatctggccacagcttccttgataaagagatcatttttcatgtgcgttcttgatacctggtaaaagaatggactctgcctcttagcagctgaaatcaaatcatacttggtgtatttttcaagcttagaaatccttttagagatatcctctgggagaagattaaccaaatcagcattgtagggctcatcaggatacaatttattccagatttcttcagtttgccagccacaaattccttcaacagtagagacaacaccgaagttgtcaagtacccgtccataaagttcctcacagtcagatttgtaccttaccgggttgagcctgtgacagtgccaaacccattcacagtcaagaggaacttccaatggcccttcaaaaatgggagtctcggaatgcttggcaagcaagggaagccaacaagcattgtacctatagatagccctttcaagggcaggaccgtcatagaggtgacggttcctatcaacagctgcaaggaactgaagctgcttttttgccacaactataaggtccacgcttattggaatcttttgggcttcattccactccatttcttgttgtggttccatctctccaatttaacctgaaaaacagcaatcagttacgcagaaactgaggcagagaggcagaggctatagctgcagacagggaacttccttaaaaggaggatctgtatgaatgactgtttctgactaagcttgtaaatttctgcggacgcgtgggtcgacccgggaattccg

SEQ ID NO: 29558 - DNA, 1081 bp, Glycine max
  Clone ID: PAT_MRT3847_126694C.1
cggctgcgagaagacgacagaaggggagtacaaaaatattcatctcttctaacttctaagcattcagtaaaagaactaaacatggcagagaccattcgtttggctgttgctgttcttggcaatgcagcctcagttgccctttatgctgcaccaatggttacctttagaagagttataaggaagaaaagcacagaggagttttcatgctttccttacatcattggcctcttgaattgtctccttttcacttggtacggtttgcctgttgtgagttacaagtgggaaaatttccctctcgtcacagttaatggagttggtattgttctcgagttatcctatgttctcatttacttctggtatgcttcagccaaaggaaaggtgaaggtagccatgactgcaataccagttttgctggtgttctctataattgctgcagtgtcagcttttgcattccatgataatcatcaccggaagcttctcgtaggtagcatcggcttaggtgtttcagtaacaatgtatggatcccctttgattgtaatgaagaaagttatacaaaccaagagtgtggaattcatgccactaccgttatccatgtgctcatttttagccactgttctctggctgatttatggacttctcattcgtgatatattcgttgcgggtcctagtgcggttggaactccccttggggatcttgcaacttgtactttactgtaaataccgaaaagggagtgttgtggaggatccaagtaagggggaccttgagaagggtaacttggagaaggtggaaatggaaattgggaaagtggaaatgaatgtcacgaatcacatgaacggacactcgtgaacaatgcgtctaaggggaaagattgaagattacagaatgttctattcagattccttctttttatgttttatttcctttattttaagacaaaatgatccccccttagctttggttgtattgctcacatataaattaagttatattacttcctaataaatagtttcttttattgataaaaaaaaaaaaaaaaaaaaaaaaaaaaaaaaaaaaaaaaaaaactcgagggggggcccg

SEQ ID NO: 29559 - DNA, 1136 bp, Glycine max
  Clone ID: PAT_MRT3847_126695C.1
aattcggctcgagctaacttctaagcattcagtaaaagaactaaacatggcagagaccattcgtttggctgttgctgttcttggtacttcttcgttcattaattccttcatcttagaacttaggattataaattatttattactcattatttgagtcttcaaaaaaagtgacttcatagagtcgctgttttttttttttttttttttattgcaggcaatgcagcctcagttgccctttatgctgcaccaatggttacctttagaagagttataaggaagaaaagcacagaggagttttcatgctttccttacatcattggcctcttgaattgtctccttttcacttggtacggtttgcctgttgtgagttacaagtgggaaaatttccctctcgtcacagttaatggagttggtattgttctcgagttatcctatgttctcatttacttctggtatgcttcagccaaaggaaaggtgaaggtagccatgactgcaataccagttttgctggtgttctctataattgctgcagggtcagcttttgcatttcatgataatcatcaccggaagcttctcggaggtagcatcggtttaggtgtttcagtagcaatgtatggatcccctttgattgtaatgaagaaagttatacaaaccaagagtgtggaattcatgccactcccattatccatgtgctcattcttagcaactgttctctggctgatttatggacttctaattcgtgatatattcgttgcgggtcctagtgcggttggaactcccttggggatcttgcagcttgtactttactgtaaataccgaaaagggagtgttgtggaagaaccaagcaagggggaccttgagaagggtaacttggagaaggtggacatggaaattgggaaagtggaaatgaatgtcacaaatcacatgaacggaaactcgtgaacaatgcgtttaaggggaaaggttgaagatttcagaatgttctattcagattccttttttttttttttttatgtttatttcctttattttaagacaaaatgaccccccccccctttattttaagacaaaatgcccccccccccccccagctttggatgtattggtcacatataaattaagttatactacttcct

SEQ ID NO: 29560 - DNA, 301 bp, Glycine max
  Clone ID: PAT_MRT3847_126696C.1
tagtgcttatcctttgctcttgatttcttccattttgttgatttccacatttatgcctgccaagtacaacccacccccccagccgtgaaggcactgccatatgggtggctattccaaaacatgccccaagcttgcgtccattcgtggaggaaacatcttcattatggtgttcatggctgaccccgcccaacctcctgccttacttagaatttttttccatgattgttttgttcagggattgtgacggatcatcgttcgctaaatggaagtccaagggaaagagacctaccccccaaccgag

SEQ ID NO: 29561 - DNA, 403 bp, Glycine max
  Clone ID: PAT_MRT3847_126697C.1
actctcctccgggagaagaaccagatctctctttctgatgctcggagaacaccatgaagtgagtgctgactttcacgaagcctgccgagccggctctttgcgatcaaggagatgcgaattcctatgggggctctacacaccaccggaatgaccaccattccttaccgacccatgctagggaagctctaaccgcgctgtcccaccatcggccgtaatgctgaacctgcgcagtccaggaccattagttggactgtctgccatgctcgtggccaggaccagacacgtcctatgaggtgacactgcttgcaatatacgcacgggcttgtgcacgtggcaggtaacactgaccgacatagtgtgcgtgcagccatgcacgagctaaggcccatgttcaatgacgatg

SEQ ID NO: 29562 - DNA, 1216 bp, Glycine max
  Clone ID: PAT_MRT3847_126698C.1
cagcatatcagaggaggaattaaaacaaaaatttggaacttcaaaggagattatgaaatcagttgcttgtactttggaagggagaacttattcgtataatgatattaatatttcgaacgttgttgacgtagcaagccaagttgctggttgtgcatatgaatatggcactggatggggcaaacagatggcttggatatatggatcagtcacagaggatgtgctcaccgggctgacaatacataaaaaaggttggagatcagaattctgtatgccaagcccaattggcttcacaggttttgctccaggaggtggcccaaattcaatggcccaacaaaagagatgggccacaggattgcttgagatgttcttttgcaagcattgccctattattagcacactttttcataagcttactttaagacaatgcttagcatatatgtggattatcaaccactggggcctaatgtcagtctttgaagtatgctatgcatgtctccttgcatattgcatcatcaccaactccaatttcttgccccaggacctaggcatatgtattcccgctgcttttctagtaatttacaagatatatactgcatcagaatatttggcagaagggctatcaattcgagcatggtggaacaatcaaagaatgtcaagaataacacctatgaatgctggtttttgtgcatttcttagtgtcctacttaagctgtttagaatatctgaaactgtgtttgacataacaaagaaagatttgccctcagctaaggatgttggagatgataaggatgctggaaggtacaccttcgatgagtccgtagttttcttaccaggaactaccattttgttggtgcaattgacagcaatggttatcaagttattagggttccaacccccaatggcaactcaaagtgggaaacatgggtgtggactaggtgagattttctgtagtgtttatttgattatttgctattggccatttctaagaggattatttgagacaggaaagtatagaattcctctgtctacaatattgaaatcagctatcttaacatgtctctttgtacccctatgtcaaaggactgttcctggttgatgaggtttagaaactaggaaaagtcatgattaatgtaaggaaatatggtttgttaatatcaaaatggcccaacaaaaaagttcacccccttgtggaaaaaaaaaaaaaaaaacaaaaacc

SEQ ID NO: 29563 - DNA, 312 bp, Glycine max
  Clone ID: PAT_MRT3847_126699C.1
aattcggctcgagctcacacacactttatgtatctatctctatcagccagatcttgtagcaacggcgagcgctcccactccacgcgaagagttagtgtgcatggcgaagctggcggaacaagccaagcgctacaaggagacggtggagttcatggagaatgtctgcagctccgccgagagcgaggagctgaccgttgaggagcgtaacctcctctccgtcgactacaagaacgtgaacggcgctcgacgcgcctacaggcgcatcatctccttaattgagcagaaggaggagagccgcggaatctaggacca

SEQ ID NO: 29564 - DNA, 1417 bp, Glycine max
  unsure (1)..(1417): unsure at all n locations
  Clone ID: PAT_MRT3847_12669C.1
ctaactctctctggaaggaagaataggaacagaaatcaaaattaaagcttgtaaaatacaatcaggagcaatctcatgctcttcaaaaccaaaactcatcttcaaagcttgctttgccatttcatccacaacactgttggcttctctgaccacatgattccaaacctcattttcatattgccctgaaaatctgtgaatctcttcgacaagttgatgctgaggatgacccaaatcacatctcccatcaagaaggtttatagcctccctagaatccgaatccacacgaataagtcgaaaagccgaccatgcaaacttaagaccaagtaaaatggctcgaagctcagcataaagaacactgcctcctccacttttggcctgaaaactgcaaagcaaggaaccagcaaaatcgcggattagccctccatagcccgcaagactgccaaattgagcaacagatgcatcacaattcagaacaaagtggccagctgcaggtggtttccaccttatatctgtcaatactgcaactaggatggcacgtatgagaaaacactttgaacaatttcccaaatgactcgctaagagtttctccaaggaagcctctgtcaacaggataaagacatacgcaaaggccagatgagagataggggatccatgtctactcaaaaggatgagcctatcataagctttctccaagtctatcttgattaccatccaacctttccttccggtcttactcctcatggaatgaaaaatctcttggacaacaatgatattatctccactctcatcatcgtcgtcttctcctactctctcattgaccccgtcaacttcgatctcatcatcgtcggcacatcctccacctcgaccccaactccttctacaacggtcacttcgcttctctcgatctccttccacgatctcacttcctacctcacttccccacactccctcccctctgccgcaaccgccaccgcatcctccgactctgacaacatcgttgtcattgacctcatccaccaacccctctgcatgttctgcgcggacaagacgatcaatttgttgatgaaatcgggcgcgacgcagtatttggagttcaaagaaatcgacaagagcttcgtctacgaagtgaacgcgggtttggcgaacgtgccgaattctcgaggagcgatttttagagacaagaagctttcgctgaaggagaagaaccaattgatgaggttcttcaaactggttcagcacaaccattggatgatactcangaggagaagattcccgaggaggatttggagattgcgtttgttagtttcttggagaagatgaagttgccgcctaagataaaatcgattcttttgtatgctatagccatgctagattatgaccaagacaataacgaggtttgtatagagttacttaaaac

SEQ ID NO: 29565 - DNA, 220 bp, Glycine max
  unsure (1)..(220): unsure at all n locations
  Clone ID: PAT_MRT3847_1266C.1
atcaagccaggacagacngagnngggngcngaagaagaacccggannacaaaaaaagcgccgaacaccgcttattggggcttcttcccccctctgtgaaacaaaccgccagggctcctacaaaaaaaaaaagaacctttttccaaaggaaaagggattaatcttccctgggaggaaaaaagaatcttgctggggaattaggttcaaaaaagaattaaaag

SEQ ID NO: 29566 - DNA, 425 bp, Glycine max
  Clone ID: PAT_MRT3847_126700C.1
gaggggagaaaaaaacgggggaaatttatttggggccattcttgtttcattctcgggctttgcatgcccgtctgcactgaaaaacattccaatgggcccctcaaattcacaacatgccccactcaaggttctccttttcaccggttatctaaatattgaacaagggaaacccccaattttttaatttcaggggcccttttttttaaagagccccaattacaagggccccttttaaacaaagggggggaaatggcttgacattcagctccaagcttaacagaaatccccggggggttattattcaatccatccttcccttcaaaaacctttccttcactttattgggggggacaacatagacatgttcctccccagcccctcaaacaattacgatttacaaatgatagccgcgcttgggagaaggg

SEQ ID NO: 29567 - DNA, 354 bp, Glycine max
  Clone ID: PAT_MRT3847_126701C.1
aaacgtgacgtttttaactcaagacccatgttctcagtctaagcactggcatacattccgaaacattctacactatcaacttgtacaaaggtcactataactcaaaccacactctctatcactttgtataccctcacatcctctaatttgcaatcatactactcgaatcattctctctaacgctaatactttctaatccattcaaccctctatcttcatctctcatccaatactcataacatgctttcttggtacaatacgctcacttacatgctgctcttgtttgcctatacaacatcaccattgcaaacatcttggctaactaactaacacagattccaagagtttacagca

SEQ ID NO: 29568 - DNA, 339 bp, Glycine max
  unsure (1)..(339): unsure at all n locations
  Clone ID: PAT_MRT3847_126702C.1
gtcgcangcacgcgtacgtaagctcggaattcggctcgnnctcgagccgantcggctcgagacggctgcgagangacgacaganganggagtaataannannantnanngnnccantnantannctncgnngatatgcancnngcnnnganganacnnnnganaccnatnnangaggnaanngaagnggggnngcagantnacgcagcaggcnnctttncgatngantacncccggnttcnngcgccnccagatgtngcntccacntgcggcngnnttnaggtncnnantgntnnnttnnnnnngngntnntattntgnnngnnnntncnnnnnnnnnn

SEQ ID NO: 29569 - DNA, 147 bp, Glycine max
  Clone ID: PAT_MRT3847_126703C.1
caagattttccaatggtcaaagataagtggtggtgtgtgctatgtgaagtgggtgtttgcatcgcttgctaccacttttcatgcatcttggacatgggttgtgtttgagtagacaacttgattaagctattaaaataactgtttatc

SEQ ID NO: 29570 - DNA, 335 bp, Glycine max
  Clone ID: PAT_MRT3847_126704C.1
gtttgttttttttttttttttttttttttaccccttttagaatgttttttttgagatcttttgttattttttcccccctaaaaaaagtttttttggggaacgcacagcaaaatttttgggattcccatttttcataggggtcaggccccatttcataatttttttaaaacaagaacagtttacatccgggaatttttttaaaaaagttaagtggcttctacccttggacatgagaagaaagagccctgggaataaaaaaaaaaccgggggcagcctaagccctaattcagggtttacgaacgcgtggaaggggacttattttttttttttggggg

SEQ ID NO: 29571 - DNA, 613 bp, Glycine max
  Clone ID: PAT_MRT3847_126705C.1
cttccccccccccccccccccccccccccccccccctggaaattgtaaagcgatcacaataaatagaccgtgatattagctacggatcagtaaatacaaattaaggagttgacaggtgaaggaggatttgaaaagaatgacctgcgtctcctccatgcaccctttcgatcgtttcacagaaaaacaagaataagaagaaaagaaaaaaaaaattgaaccgattagattctccctgtctcttatcccaatctcccatgaaaccgcacttcaaatggtgaccatttgaaaagcctaaaccccaaaaaaactaaaaaagagaaaaaagaaagaaaacccaacaaaataccagagatccaaggcagaaaaatcagaagggcagtggataccatctattccaagtgaccaaagaagagtcttttctgctccatccatcatccaaatccaatagggtccctccatattaatcaattctcctccttcaaatttttcatattctccatcgtccgtggcaattgaaataaccttagctcatatatatatcagtgatgtatgtgaacagacgcgtgatgcagcagcagcagcaaccaccgaattctggaccggtacctgcttg

SEQ ID NO: 29572 - DNA, 310 bp, Glycine max
  Clone ID: PAT_MRT3847_126706C.1
tttttggttttttttttttttttaaaataacacacacttcacacatcattactacaattaaaagagggggggggatttttaaattggcaaaacgtactccacaagagggtcatgcctaattccctttattgtattaaacaatcgaacaaccgactgaaaacacaaattccaaatcctgcagaaggttccggattttcaaaatatctggcatctgcctgtggcccagaaaacactggcatctgagttttacccgctactcccaaatcttgaaagattcccaagagaatataaaaaactgtaaactgtttgg

SEQ ID NO: 29573 - DNA, 233 bp, Glycine max
  Clone ID: PAT_MRT3847_126707C.1
ctccttacatgaacattctttcaagctagctcatatcaggagcaaaagtaggaccttaggacaacatgggccaattcttaactttaaaaaactggatgtcacaaccaactacttcttacaaaggtttataacatgcataatcgctaactttcaaacaggccatctatgccgtgacgatatataataaaattcattgtgaaatatgcccccgatgaagatttagtcactctttc

SEQ ID NO: 29574 - DNA, 237 bp, Glycine max
  Clone ID: PAT_MRT3847_126708C.1
ggataggtttcgctcacgacactgcttacccatttcatttattttcgtcacacgcttagaccatagcttcttacatttgggaccccaccaagcaccaaaacaccaacagcctgttattctatggaataacagttcccaatcaaaaacaaaaaactggcactcctacctatttattttaaaataaaaaagatcccatttcctagttttgactttggtcgcgcactatcttattatttg

SEQ ID NO: 29575 - DNA, 415 bp, Glycine max
  Clone ID: PAT_MRT3847_126709C.1
cctgcccggaattgctgtgttgaacactgctctatggtgctcgactggatagctggaatacgagactgactctccgacggtgtggataggggagctcttgtggattggctgggccgagggtcgaggacgggctggcctagtgctatgtggctgagacaacactgaccacatttgtcccgggagcagggtcaccgaaagcgatgtgggatggcgtggaggtgggtggtgcgaccgcctagggtggggagccctgtggattaagatgatcctgccaccgatacctaatgagatgaggactggcatactgaccatgcttgatagattacgggcatggatgcatcacctattcactggcatcacgtgtagtgtcaaattatgtgatcatggcgcgaatccgcgccatgctacgatctat

SEQ ID NO: 29576 - DNA, 793 bp, Glycine max
  Clone ID: PAT_MRT3847_12670C.1
cggaattaccggctcgacccacgcgtccgccccacaattcctctggtgttcctttcttcaatccaaccaaagagagttgaagaggagcatgtgtttgtcagacactgacatctcttcgcgtatcaatcatgcaataacctgccgtcaattatagcttttcttctcttcactcctttttttttctcccccttaccttttcactcactttttctttcctcttccaaaattcatttctggttcattccctctatttttttttcttggcggaccaaccccaaataatctctggaatttccaccaaaactttggcgcagggtggtaatttttatgtgacacctagatggacagtacaacaaaccaaccccatctctttaattttttttttatttcattcgataatattaattatattcctggttagtgaatactgtcttattccttggtttttgttctccatttgaaaattgctacctaaaccagcctatcgaaatctgaatattttcctaaactgaatttctctgtccttttttgttaacctatgaattaggccgtatttttgttaaaaaagaaaaccaattccccggggtttattataattttgtgccaagtttgtttcgaagagggtgtgttcttgttggagaatgcatattgagggtggtgggggagaacaatggcgaatctggtaccgggggtgcttctgaagcttctgcagcacatgaacacggatgtgaaggttggtggtgagcacaggtcttcgcttttgcaagttgtgagcattgttccggcacttgca

SEQ ID NO: 29577 - DNA, 300 bp, Glycine max
  Clone ID: PAT_MRT3847_126710C.1
accactcctacgactagtcggtctagactctggaggagccttatacagatccgcatgagcgctcatacgcaaatcggggatttatctggcatttactataaccctattcaaataaccctaacctcaccgataagtcccaattgcaataattgaatgctaaatatcaagcgcatcataactatgactaccacttacgctttctcacagatactctgatactacgtactcttatacctatagggatgcagaactttatgctctaggcgttagagtgtgtaagtcagacactgatgacagttt

SEQ ID NO: 29578 - DNA, 259 bp, Glycine max
  Clone ID: PAT_MRT3847_126711C.1
ccactcgtccatctatatcgcttatcaccgccctttttttttttcaaggaaggttttcaattttaggttgcgagacttaacttttttttttatttttatacaaacaaaatcctataattattttttacctccgtaaaccctaattttccacgcttctcaaatacattttatctctaatttccatcaaatttctcccccctttactcaatttcccattttttttttccccattcattttttaaaaatttttttttaaatc

SEQ ID NO: 29579 - DNA, 360 bp, Glycine max
  Clone ID: PAT_MRT3847_126712C.1
catgttaccttgggctatgtgttaaaaatataaaggattgtccggagcaaaagtgaccatttcagttttataaaagtttacttcctaaaattatcattttttatctttgtctttacaaaaaaattattattgtatttaataaaaatgatgtaactttagtttcttggggtgaattaaaagaatatatttttctaattcttagggactgaaaatttatagtgagcgagagctaaaatatcatatttgtagggtgtaagtcattaattaatgtttagttttaagaggataaacaatccataaatacatttactgcttatgccaccgctgcgaccaaattattattgttttcgttacaaaaat

SEQ ID NO: 29580 - DNA, 399 bp, Glycine max
  Clone ID: PAT_MRT3847_126713C.1
gggggtgggtttttttttttattgggaaacaaccccctaaaaggacagaattcaaagggcccaaaaaaccaattacaaaatggataaacgtgctattttgaggcctaattcaccctcaccacattgaatgcccctttttttttcaaaaaattcacccccagttttataggaggcatattttataataaaagccttggaattggaaaggcctcataaaacagcaaaaaccacagggtcccccgggggaaagggtataacagcaaaaaaagcaaatcgggggccagggggggcaagaacaaaagcaaacggggtttacctttcgacaagaggggcaagaagaacaggggggacatcccaaactgcaaaaaagggggaaaaaaggaaaatttggaaacccaa

SEQ ID NO: 29581 - DNA, 168 bp, Glycine max
  unsure (1)..(168): unsure at all n locations
  Clone ID: PAT_MRT3847_126714C.1
gattacccctcnntgttctttttctctcacttagaagccacttnccttggaaanacaagcttgccttgnagttgtnttntgagttctggtatggtnttaagcatgtgggaatcaganagtnagtctngtgcacgcaangtanattgnagtgngatcncncttccaacg

SEQ ID NO: 29582 - DNA, 499 bp, Glycine max
  Clone ID: PAT_MRT3847_126715C.1
ggacgcgcgctcgagcagacttttcagttctataattcaccctaacatatttgttatccaaactgcgaacatgatgctgtttcattaatggagacacattttgcacactaaatgtggcttttttcatgtctgtgatctatagagaaagattcgataataatgatgaatctaaatttactaggtataaatacaactttaaacttctaacgagccaaattaaacgcgccttaagttataatataataggatagtcatctgctggaaaaataattatttaactaaattaaagaaccaatatgttaatttagtggttctacttgtcgtacaactaagtcggtttttctaagtattttttttattatttagaagatattttaacatattctttgactttcgtttgatattaatataaatatacgatgacaattcacccatgtttcccaatgatgtgttattacttattacaaaaaaattatccacataacctaaatattaattg

SEQ ID NO: 29583 - DNA, 1017 bp, Glycine max
  Clone ID: PAT_MRT3847_126716C.1
cctaaacaaaaccccttgcgtcctcgccgcacagttacactccgcagcacactgcaatcgccaccacggaccaagctagttccgccgtcgacgtcgtcggccaccgtcacgtctcgccgtcagtttctttaaataattgatatctggaactgtacaagcagaggacatggcaaatcagtctaaagaaaaccagcaagcaacaagttccacaccacctatccagaaaagtgaggaagatcaagcagccagcaccactatgggctttaaagattcattggaaaaacaatatcgaaaagtcaaagagcatgcagaaacatacccttatgtttgggcttcctatattgttgtatatggtggctttgcactctggactacttatagatggagaaagcttcgcaagacagaggacagagtaagaactcatcaagaaagactacgtaagctcattgaagctgaagaatctactagttcagccaaagtggttgaaaagggttctacatcttctgataagccttccaagtagcttacagtaagaataatccttatgatggtcaggttgtctagtttacttccatcaatgtcacttctctttaccattgtagttgctagggcatgaaatgagttttttattttgctccgctgatcaactgattcattagaggaattcctcaattatactgagccttgtagaaaattgttaaaaattgtctgatagttttctttctaaagttgtgacaatattattgttctgaatacagtttgcagatcttcagtttctatattgattagagatggaccaatgcattttttgttaatttcgtatgaaaatttaatatttactacggtggcaagttactattgtacattgcagacacatttgagctccatttcagattcaggtgttgataagacgaaaaatgttctcttttgcttagttttcacataattgtataaatttacctaataagacatttcgtatactgttatgatatcatctatgtttactatcagtgtttt

SEQ ID NO: 29584 - DNA, 193 bp, Glycine max
  Clone ID: PAT_MRT3847_126717C.1
gaaatcatttcaatttcaacataaagactaataaaaagcccttcatcacacaaaaaggaacatgcagaataatgaaaaaagatggatttacaaaacctaaaacttcaatactaagcaacaacataatagatattgagaaaagacttcctattttcacttttaatttcaaatatgccataccaatttcttattg

SEQ ID NO: 29585 - DNA, 495 bp, Glycine max
  Clone ID: PAT_MRT3847_126718C.1
gcttatagaccaccatcagatgccacagtcatttcttgtgggctcgagattaggttaagtatgtgtctcagcccatagaggatgaaaccctatgcattgaaactactctctctcaccccctttcattgcaacagtggaactcaacttctcagtttctttaaataattgatatctggaactgtacgagcagaggacatggcaaatctgccaaaagaaaaccagcaagtaacaagttccacaccatccatccagaaaagtgaggaggatcaagcagccagcactgctatgggctttaaagattcattggaaaaacaatatctaaaagtcaaagagcatgcagaaacatacccttatgtttgggcttcttatattgttgcatatggtggctttgctctctggactacctatagatggagaaagcttcccaagacagaagacagagttttaactctccaagaaagactacgtacgcacgttagagctgaaaatcttcta

SEQ ID NO: 29586 - DNA, 298 bp, Glycine max
  unsure (1)..(298): unsure at all n locations
  Clone ID: PAT_MRT3847_126719C.1
gnagaagggcaaaatatttgcaaacatgggcagtgtataaatacttcaaattaaatttgctctcactaaaatgcggatgacaacttccgaagtgtgcaaatatgatttatttacaggcgagggtcttttcttcccctggcatgatttccctgccttatgttacaatgggggtgtgtgattcgggttaacttttaaagcatgcgctgtatgatactttctacgaacaactatggccttagagtttctaactccatagacggtcctaatttgggcgtttatcggaatggccactgcatca

SEQ ID NO: 29587 - DNA, 476 bp, Glycine max
  unsure (1)..(476): unsure at all n locations
  Clone ID: PAT_MRT3847_12671C.1
aattcggctcgagacggctgcgagaacgacagaagggggttcacttaacttcatcaaaatatatagcttgggttcacttcaaaatatggctcaaaatagttgaatcctatgaaatgaaggtatttaccagctgtgttttggagctgcactcaatataagtgactgcaccaatcattttcttcaattcttcaccctgctcacaacaatcagtgttaaatccatcatacatgcaaaagaatttcagtttcaatataggctttttatttgcttaatttgatgaggacatgcctgagcagttgttattcgtgcggatcccggatgatcaatcagaaattgcttgttatctcgcaaatctgtgcatacatgagatttaaattgaaactagtattaggtttgagaaaaagttataagtattgcttgttttgtaagtaacgatcatatganattttacaagatatgtgatgatcttacacatg

SEQ ID NO: 29588 - DNA, 270 bp, Glycine max
  Clone ID: PAT_MRT3847_126720C.1
gttcaacgaatgggaccatagtgtccctcctgatcctcctcttcctcccgccttccatttctatctcaaactcaattccatcaacctacccgctccatggtgctactactattttgctcacatttttgttaatttttgttagaaatgtcattttgaagattccaacttgcaatctctcactcttcatttctcttataagttttattctcagtggtagtgttctgatttgggtgctgtcaagtgtattaaatgccatcaactacttttttc

SEQ ID NO: 29589 - DNA, 150 bp, Glycine max
  Clone ID: PAT_MRT3847_126721C.1
gccgattccgggtcgccacgcgtcgcacgcgtcggtacaccaatgttggagcgaaatctttcactagctgagaagagacctctgggatctgctgcacagtctaccaacaaatgagtgtgtcttctaacccgaggaaaaggaaaaggagtc

SEQ ID NO: 29590 - DNA, 306 bp, Glycine max
  Clone ID: PAT_MRT3847_126722C.1
aatacggctcgagcagatactactaccgacgacgtattgcaagctgcacttttggcagaacgaggaatgccagattgaaaggaaagaagcagtgagacatgcaaacatgtcgctataaacgaagccgcaacgactgttgaggctgcgaactcacctgaactaaaaaatatagagtatgccacgactgctcctatagcagatagggaattgaggtatgtgcgtatgaagatggatccagccaaatgcaatcaaggaatgctcacacgacaatcccttctcgaacaatatactgggcaactagcaccc

SEQ ID NO: 29591 - DNA, 265 bp, Glycine max
  Clone ID: PAT_MRT3847_126723C.1
gtaggtcgtggatggggggcgtgtaatggcgtatggttcgtggcttccgtgtctgccccaggctacgatgcgctgttgtggttgactgcggttcacttaagcgaaccgggggcgccggtgcgggtgatgttctgtctcctcttgccggtttgcctgcccggggggggggtgtgcgatgtggttggttggtttgggtgggttcgctgccgtgccctacggttgccgcttgcggtggtggtgcttgatgctggtgtgggcggtggtt

SEQ ID NO: 29592 - DNA, 383 bp, Glycine max
  Clone ID: PAT_MRT3847_126724C.1
ggctcgagaaaaaaaaaaaaaaaaaaaaaagatttaagaataaaaaaaaaaaaaaaggaccccggggttatgtccagaccggaacctggaagcgaacccgcgtttccctatccggagtcgccacacattttccctgtactgctgactcattgtttgcttcctgtgggcctgtggtgttcgttcacactgtcgagcacttgtactgccctctgagtctcacggtgtgggcctgcggtgcctattgagtgtcctgcctgtcgttactaggggggggccttctgccccttttctggtctggagtcccggcttgctttctgcttggatcatttggcctgctcgctgggtgaggcggtttgcttattggccgcgaggggggtttttct

SEQ ID NO: 29593 - DNA, 245 bp, Glycine max
  Clone ID: PAT_MRT3847_126725C.1
atatttcaggctttatactctttgaattgaagctggttttcctattttgcgttacgcgtttgatatcgagtccatgagacgaattcagcttccggagccgccgagcgggggaaaacggagaggcacttctgacatcttcccatcctgagaaaacaccctaaaaaaggggcgccgtcttaatcggcaactgaaaagccgcatcggagaataagagcgggggattgctccgtgctcttgttctttgg

SEQ ID NO: 29594 - DNA, 350 bp, Glycine max
  Clone ID: PAT_MRT3847_126726C.1
aaagcattgaattcaaaaactaagttcatttcttgtgctttgctttattcctcaaaaccaaacatgtcgaacacatgcagcaactgtgactgcgctgacaagactaactgcaccaagggaaacagctatggtgttatagtagagactgagaagagctacatttagactgatgacatggatgatccagcatctgagcatgtttggaagtgcatgtgtggtactaactgctcttgctactgactgcacattgctgacattattgaatagcaaactgaatggaatgaaatgggaacagcgagaacaccattgaattttgattatagcaagctgagtttatgtgaactgtctat

SEQ ID NO: 29595 - DNA, 334 bp, Glycine max
  Clone ID: PAT_MRT3847_126727C.1
ctcttttcctctgtgtaacaacacccaacagaaataaattaataaaaaaaattagggttttcaacttggggaaatatgaatagggggaaacattctatatagagtgtgttaaaaatatggttgtcgatgatatgacgctgtgcatcctccctggctatggaggttcctcttcttctcatttctccaaagcttatcccaaaaggggtttgatggatggcacatatagtggggattcatatgatgaaggtgtgttttaggttgttatgctgctaatgcggttttggaatagcactattccacgaaccagcattaaaactcatctgccaaatcagct

SEQ ID NO: 29596 - DNA, 452 bp, Glycine max
  Clone ID: PAT_MRT3847_126728C.1
cggaattcccgggtcgggcgacgcgtacggcgtctcaaaggagggtgttaagaaccgtgaggataaaattaagaaggatcctgaaagtgggggagtatctaaagaaggtgccgataaagtaaagaaggacgatggtttaggagaggaagggaggaataagggagacaaagtaaaggggaagccggtggataattcagtttcaaaggatgggtctaagagtagtgggaagggagaaagtacagtatcttcagcctcgaaaagaaatgatggctcttccggtgaggattgtgattcatcaaataaatgcactgatgaggcaaagaagttggttgcttgcttgcgagttccacgaaatgattctcctcaacttttgttgctaatccagaacaaaggaaaaggtcctcttactgcgaaaatttctgccccagattttgttcatctggagaagagtg

SEQ ID NO: 29597 - DNA, 237 bp, Glycine max
  unsure (1)..(237): unsure at all n locations
  Clone ID: PAT_MRT3847_126729C.1
cctcgtgccgaattcggcacgagggatcatagccttggggaaaaaaatgtacactattttttatattttatgccaaaatttggacaagcttgatcttatcagcttcagncnnggggnaatggccacttccttctagttacttccatggaatccttcgcggaaaagacgtggcacttgtgagatgagtaactgagaagaaagcattagtaatttgacacgtataaatcgttgactcat

SEQ ID NO: 29598 - DNA, 415 bp, Glycine max
  Clone ID: PAT_MRT3847_12672C.1
tacggctgcgagaagacgacagaaggggacaacaacatagaataacgaattaaataaacctaccactagctactttgctctattgcattgcgtggaacttcattttcccacacattctcatggcctccaagttctcttttctaacccttcttatggagagaagaaaaccttctaaagataacaacaacaacaataatgacttagcatttgtgaaggcagctgcatgggcatggtaccaacacaactcaggctctaaggggaaagctattagcgagtttgatgctacaataactcgccgtgtgccaaggccttcacgttacaagttagaagcaatgggaataatggctcaagaagctccaagtgaagggtcacccacgattcgcgccaagaaattgtcacttcttgatgaatatga

SEQ ID NO: 29599 - DNA, 909 bp, Glycine max
  Clone ID: PAT_MRT3847_126730C.1
tcggctcgagctcgagccgctcgagccgtttctgtagagaaaaaatgtatctattagcttatcgaaccatgaaggacatgcatagtaaaggccatcaacctgtggaggaactctgctcctctttaatatcccaccttggtcaggtaaatgcttattcagaggcattctctgtttacaatatgttgaaatatagcaagagaacaatgtgcaagtcacttcatgagaagattctgcacattctcttagcaggacagcttttgaaggatgcgtatgtagtagtcaaggataatgcaaaatttatttctcgtccagccaccaaaaaatttgctagtgcatttatgaagtcaggtaacctcaactatataaatgatgttctaaagaccctccatgattgtggctacaagcttgatcaggatttatttgcgatggccgtgtcacgctatttagatcagcctgaaaagaaggatttgcttctacacttactacaatggatggcaggacaaggttacgcggttgattcatcaacaaggaatttaatcctcaagaattctcacttatttggccgtcagctcattgctgaggttttgtccaagcaacaagtgaagttaaaacacaaaaatctcactagttaaagcatccaaaactctacaattgaggaggcagtgctagtcctagatgacctttcttatgccccttagtccctagctctatggtacattgcatcacttaagttttccctcttgaattttttcgattgagctgtgataaatagcttatccacacccaagttcttgtgctgtggattgatgagtgtattataatagatgtaaatatatcgcgtcgaataacttggtcaataacctgtcttgttttgcaaattgaaacctcatcaaaatgcttatggctgtt

SEQ ID NO: 29600 - DNA, 497 bp, Glycine max
  Clone ID: PAT_MRT3847_126731C.1
ttttcatttctagggatgtaaccttccatgaaaacttatttcccttccactccattcacgactcacaaatcattgatcctggtgattcttagttcccttctagtccaccaaaccaaaatcaagacaatagaaaactggatccgatcctttcttgtagttgagatattcataagtttttcctcgatttattcatttatgatctattaaatcgaataattaaagattactcttcaatttaacaaatttgtaactcccaaatacagaactgaatttattaattttttatatcgtattctatttgacaattaagacaacaaacattttcaatatgcttaattatgcactactacaatttttacatataacatcggacctttaacatcggttattcacaaaaccgatgttaacaaaagcgcggtggcatttttgtaaataagtagacttagttaacatcggtttcggaaaaaccgatgttaactagtcgatattaacatcgg

SEQ ID NO: 29601 - DNA, 416 bp, Glycine max
  Clone ID: PAT_MRT3847_126732C.1
gggacagaaaaaaggcaatttttttccaaaaggaaaaactgaaccctgaacattaaaccaggggggggggggaaaaaactttgggtttgaaaactaaaaaacccccggggggggggaaatgaaaaaaacaggggccatttttggggggaaactaaaacctcccttttccccttggaattggaccttttaaagccttacctttttaaaaatagaggggaacaaaaacccctcgggggaaaaagatgggccgaattttttgggcaaattaaaaagaaaatcttttggtcccccaacccatgcctgggatcaaaaaggggggggggagcccattccttttttttgtgtgaagggaagcacccccccaatacgatgggccgaaaaaaacccttttgttaaaaaagtttaattgttggggc

SEQ ID NO: 29602 - DNA, 964 bp, Glycine max
  Clone ID: PAT_MRT3847_126733C.1
gaagaaaccaaacaaaaacgaaacgaaacgaaacgaaacgaaacgaaaccactcactcgtgtgtgttggtgggtagtgtgcttgctactataccatggattcccattcccctgttctcacctcaacgacgtcgttgtcgtcaatgtcgaagcgtccgtgtccgtcccaaaaccctagagcggagaacctgggagaggtggagcgtcggcttgaggcgtttctctccctctcggacgtggcttctctctcccttgatctctccttcgagaggctcctccaatcggtcccctccgacgccgactccgatctcatcgatcgcgccctcaaaatggcctctctcctcctcgacgccgccaaacactcctcccgcaaacgcgcttccaaccacaattccctctcctggcccctccctcccgacctcaccatcaaggtgttctcgatgcttgatacccagagcctgtgctatgcttcggctgcttgttcactgtttagcaaatgtgctaaggatcctatgtgctatgcaaatcttgatttgacgacgctggttccgaaggttaacaatgcagtagttgccacgatgattcagcgagctggaaaggcactaaggtctcttaagcttggtgttgtccctagcgctgctacttcacttggatcttgtccaccattcgtttgtaccatcagaaatgctattgtagaagtacctaatttttcatggaatgacaagagatctcgacaagggagagagtcatccattctcacaagatgctgtttaagccctttaagtggggatggcggtgccccaggggctcttttgagaaagttgcacttgtacaatatcgagagaatggataatgcatcccttggtgcagcattgtcagcatgcccttctctccttgatttggaaaatggtgggctccatgttgagctgaggcaacattaatgtcagtaagtgcaaactgccact

SEQ ID NO: 29603 - DNA, 328 bp, Glycine max
  Clone ID: PAT_MRT3847_126734C.1
gatcgaatgtaagaaaccactaaaagtcctattgaatactcagtaatcgtatttgcacggttttcctcagtatctcatattacacaatggagtacagagtgaaaacttaacattaacacgttactcacatagttcaaatccatgttcccactatgcatgtcaaacacacctccatcatcatcttcttcacatctttcagagactcgcaattctttctcttcacactctcatgggtctctctcagctgtaccactgtctgagcagcagtttctgacaacggtagtggttagcccttgtgctgcctgcaagattctccaccatatgtgtg

SEQ ID NO: 29604 - DNA, 397 bp, Glycine max
  Clone ID: PAT_MRT3847_126735C.1
tttaaaatgataataataatccaacattgatattctcttcctatctttactatctcaaataagcaaagtttaattattttggtgtgttatatatatatatattggatttttttcgcttattctcaaaatagtgtactacatacatgaaagtgtgtacacaacttggaactttagttacagtagcaagtcactgtagtatattagtttaccccctgcatctgaattcaaaaattgattcggaaaatactttgcatactaaaacaatgcagattcgtgaaacagttttgtttaattttgctcaactataagttattattttgacagtgcttgcaatagtgatctaggagccacatagcactacatagtttccagataccgcttaatttggcttctattg

SEQ ID NO: 29605 - DNA, 260 bp, Glycine max
  Clone ID: PAT_MRT3847_126736C.1
gaaatgtgaagatgatatttttggatatattttcatatttcttattttaattctaaatttgtgtcacttttaaaattatttatttttcacatgggatatattttcattccagcattttaatagatttgtatttagaggaggaactcacacgggagacaaatcacgtcggtagtgcaatgaaagaggaggaactcacaagaatgacgttatgtgtttgatcaaatgtcaatatgatatttttgggttatgtgtttgatcaa

SEQ ID NO: 29606 - DNA, 375 bp, Glycine max
  unsure (1)..(375): unsure at all n locations
  Clone ID: PAT_MRT3847_126737C.1
ggccgaccacgcgnncgccactcgttcggaggatgtttgttaaaatatggtttaccccaaggcagcaagaccactaggagaggtatcatgaagtcatgatttctctactatccgagcgacctattgcgacctggtggatgactgtgagaaagagaaccaagaggaactgacatggctcagagccaagtgccaaatgtagttaaaggatcactatgatggacggattgggccatgctcacctaggggtaacagtgtgcacagaacagaaaatggatttgtagcaccatttgtgacaggaacctttataggaggctacaatgggactgggttgaaacccattactactaagggggattgtgaatccaggaagacacc

SEQ ID NO: 29607 - DNA, 317 bp, Glycine max
  Clone ID: PAT_MRT3847_126738C.1
gcgaaaaagctaacaagaaattcaaggccctcacggcgaataacgcggaccaaaaccaggacctactgagagacataaacatcgggaacaacaatccaaccaacactgatccaccacaccagaacataatcaaaaccacggaatacccaaaataacacgtgaacataaaagacacacacaacatcactaacgtacacctactcaacaagatggacacacacgccgtcatttcactacaccagaacactctatacaatcacacgtattccaaccacatcttaaaaaacgccggattcaccgagtactagaacaacccc

SEQ ID NO: 29608 - DNA, 1382 bp, Glycine max
  Clone ID: PAT_MRT3847_126739C.1
gaaaaggcagcctttctgcaccactccctgccttatcgccccatttccgttccaacatttgtcgcagattagtagtatatgctttcaacaatggaagattagaaagcgccagtgtgcgcacgttagcacccaaccccatggattcctctcccccaattcgtaagggaaggaaactataacggaggagggggcaataaacaataagaaaatgttgcggataacgagattctcggggtttttctccgccgcaatgttcgtgactgttcttgttattctctccccctccttccaatccgaagccattcgatcctcccaccgattttccttccggaaagcccctcctttccgcaatgccgccgaatgcgcttctgtttccggccaaaccaccaccgtctgcgacccttccttggtccacgtggccataaccctcgacgtcgactacctccgcggctcaatcgccgccgtgcactccatcctccacaactccctctgtccggagaacatcttcttccatttcctcgtctccgacaccaacctccaaaccctagttgaatccacgttccctaacttgaagttcaacgtctattacttcgatccgaacatcgtcgctcacttgatctcctcctccgtgcggcaggcgttggagcagcctctcaattacgcgagaaattacctcgttgaccttctggagagttgcgtggagagggtgatctacttggactccgatctggtggtagtggatgacgtggcgaaactgtggagcgcgagtctggactcacgcgccatcggcgcgccggagtactgccacgcgaacttcacgaagtatttcacggcggggttctggtcggagccgaggttgtcggggacgttcgcgcagcggagggcgtgctacttcaacacgggggtgatggtgatggatctggtgaagtggaggaaggaagggtacaccaagagaatcgagaggtggatggagattcagaagagtgataggatctacgagcttggttctctgccgccgtttttgctggtgtttgcgggacacgtggcgcccattgagcaccggtggaaccagcatggtttgggcggggataacgtgaagggtagttgccgtgacttgcaccctggtccggttagtttgttgcattggtctggtagtgggaagccatggatccgtttaagttccaaacgcccctgtcctctggattctctatgggctccctttgatttgtatgcacactcttcctcttaaactaattcttccctctcatttaattcaatttctctttgcttgtccttgatcgcgaaataaatgttagtattttattaagtctcgtttgtttattataataaaaaatttgtatgtcatttctattctattaaaa

SEQ ID NO: 29609 - DNA, 479 bp, Glycine max
  unsure (1)..(479): unsure at all n locations
  Clone ID: PAT_MRT3847_12673C.1
agagggagaaacatgantgagaggncacaaaccttgactggttttagccccaacactgcttgatgcacttgaccagattagtgagcccaagaggccctctgacaagcccctcaggcttccccttcaggatgtgtaccagattggaggcactgaaactgtgccagcgggacgtgttgagaccggcgccttgaagcctggaatggaggtgacttcttgcaccaactggactgacaactgaagtcaagtctgcggagatgcaccatgaatctcctacagaggcacatcctgttgacaacgcggcactcaatgccaagaatgccgctgccaaggatttgaagcgcggatatgatgcctcagactcacaggatgaccctgcaaaggaggctgctaacttcacagcccaaagcatcatcatgaaccacccgggtccccattggaaacggctatgcccctgaccccgactgaaacaatacccacat

SEQ ID NO: 29610 - DNA, 267 bp, Glycine max
  Clone ID: PAT_MRT3847_126740C.1
gacgactttacgttttcccacgcattcggaaaaaaaagaaggtcctggggtgctgtcactaacatggagggggcggaagacaatgaactaaaagaagttcggaaatactacccacaaagccctgatgggattgaccaggctggccgggctgaaaacacagaaaggttggttggagtggactctacaaaacagctgcgggtaacaaccctggcacgatattgccagtaccatgcaagagaatcagaaaggaccttagctggtaaaaag

SEQ ID NO: 29611 - DNA, 420 bp, Glycine max
  Clone ID: PAT_MRT3847_126741C.1
acgaggttggttgacttgaaactaaaatctgattctgaaaaaatagcagcacttcgtaggtgtgttgatgtaaggaatgatagtttctcaagaaccaagagtgctccaaacatgaagggaaacaagaaatctgatacgtcacaaacattggtgagctaccaagacaaattggctgctggaagtttgaggcgtgagcaggagtgtgtcatgtgcctatcagaggagatgtcagtagtttttctgccatgtgcacatcaggttgtgtgtcctgaatgcaatgagctccatgagaaacaagggatgaaggaatgcccttcatgtagggccccaatccaacgtaggattcatgctagatttgctcggcattagagagtatagactttcctgaatgaatgggaatcgtgaagaaatacattatgt

SEQ ID NO: 29612 - DNA, 213 bp, Glycine max
  Clone ID: PAT_MRT3847_126742C.1
aataaacagggtatgagtgtggcacgaatcctttgaaccccttgctccattataaagttggaagataatagagaaatcaggtgggccttgagtaatggcagtagcctctgtgtgaagaaacagggcgcggtatttcagtcgattatgccgcaataaaggcatgaaaagtcaagactcggcgagatgcttgtgaccccgctgacttgggggtta

SEQ ID NO: 29613 - DNA, 518 bp, Glycine max
  Clone ID: PAT_MRT3847_126743C.1
attctcttcatttttatttttatattttattatttactaattttacttccataaaggatacgccctggtggaattatgacagtagatacaaccgtagcacagggatcatgacggttgggaatttgaaattcgagcttaaagacttgaaagaccaatgaactacttacggggcactaaaaccttacattagcaaccatgaaacaaagacaagtaaaattacaccttttcccaccaaacctggggttatgccaccccgaaattaagtaaatttacaatgcaaattgacaaggaaagattgaaaaaaaaaaaaaaaaaggttacccaaaaaacccccttataaaaaaggtgagggtattatcataatcagggggaatttatatgggcaaagattttagctgggggaatgaaatgggccatggggagtccaggtacattaaacagaacattttcaaggggccaaatattcttcatccgggcccggttatgccgtatcaagagctccccaaaccggaacaccg

SEQ ID NO: 29614 - DNA, 368 bp, Glycine max
  unsure (1)..(368): unsure at all n locations
  Clone ID: PAT_MRT3847_126744C.1
ccagggtgcaacggtcacaaatagaatgaaggactcattaaaactctgcaccagangcgcaccctgacccacaggtctgatccttaattccctatgatgcatagctaatgataaacaccggggctactaattgacttgtgttgtacaaacaaactgacattacaaaagcaattgctgaatgaatatgatttagggctcaaacccgatcaaacagagacagcgaactacaacttgtaaagaaagtcatagagatcaaccaccatcatccgccaataaacaagacgctctctgatgttatgaccaagaaaacatgaaaacatcacatatcaccacagggatacagctgntagcgatccacacagggatac

SEQ ID NO: 29615 - DNA, 565 bp, Glycine max
  Clone ID: PAT_MRT3847_126745C.1
gaagtaagttgtatgaccttaacaggtaaactctgtatttgtacttttctgaaagaactgtttatatatgtattacattattgatcatgaagtggatgagaaacaatgggccaatgcctgctgctttatccttggtggtcaagtgagctggtgagctccctatcacactaccagcgtctcatttgaaaactttccctgatttagggttttgaggccatagatagtaggaaagtattatatgccaggaactcagctttaattcctatagaatatttttatcattttgtctagtttcatacaggtttttttgagtttttttgtagttgatagccatatgccacttatctctatatttctgaacttcctgctatactattatctcacggactgcaatatttcttttaagtagatcattttcaacatgtaccgttatttccttcgtgtctctgattatctagtttgaaaacatagaatttccaccaattcataaatatttacataatgctctctgcatttcacttctgacttcccaaagaaacgtgaaaagttatcttgaactctcgga

SEQ ID NO: 29616 - DNA, 174 bp, Glycine max
  Clone ID: PAT_MRT3847_126746C.1
atcattatgttaagaaatggtaactaaaatgataaaagacaaaataaagacagaagaccaacaaactgaaaaagaaatgtcacgatgggagcagcgtcctcggaaagtctacataatagggaatcctgatattcagcggcacagacgtacaaactcagtacctgcaatggacgc

SEQ ID NO: 29617 - DNA, 298 bp, Glycine max
  Clone ID: PAT_MRT3847_126747C.1
aagcttcccgttgccgaggacgtgagggatgatgacatggacgacgacgatgaggacgacgacgaccatgatgaagatgacaaggaagaccatgctcttagtggtgctgagggttcaaagccgaacaaaagtgaaaaaaagaatccaaaagcaatggtgaagctgggacttaaacccggcaccggtggttaggaggtcacaatccaaaaaaccaaaaatattcttttcttcattttccaacccggtggcttcaaaaagcccaattctgaaaaccatgtcatatttgggggggccaaaa

SEQ ID NO: 29618 - DNA, 2631 bp, Glycine max
  unsure (1)..(2631): unsure at all n locations
  Clone ID: PAT_MRT3847_126748C.1
gtaaaatctcgccgccttcacataaaaataatctttaatgaaagaatttcatatcaggtgaaattaatttatgatctttgaggtagacccgtattatctgacctatgaaaaaatccctgcttatccacgcacgatttggaacttctgaaaacacgctgaaatagatttttttttttgggtataatattgattgtagtagtatttattttatcttctgatattatatttccaattttgctgtcaaaacattattagcgatcaatttgaaattgatacagagctgagagcatcaaggaatcgaagaatagaagattcatttttttttctttttgatatggaagctgatgtttctattatttttgttgcgttttcaaaaccctaaattggagaaatcccaatttctccttctgtctttctgctttggatgtttttcaaccaaaaaattgtgcttttcaaatcttttgctctgatgggtacttcaaatcttctcttgtttttctctctgatgagcctgtgtgctatggcggcttccaaggtggtgcttattgggaataatatcactctctcctttgatgatattgaagctaattttgccccagcagtcaaaggttctggaaaatatggggtcttatatttggcagaaccactggatgcgtgtgcagaattgacaaataaagttgaacaacttcccaatgcgagttcaccttttgctttggtggttagagggggatgtagctttgaggaaaaagtcggattagcacaaaaggctggcttcaaagctgtaattgtctatgacaatgaagagggtggcatcttggttgcgatggcaggaaattctgctggtataagaatacacgctgtatttgtatctaaagcttcgggtgaaatactaaagaaatatgctgggttgactaatgtggaaatatggctcattccaacttttgaaaactcagcatggtctatcatggcaatttcatttatttccctgctagctatgtctgctgtcctggccacttgtttcttcgtccgcaagcatcgcataagaagagaaaggcctcgagcttctcttgttcgtgaatttcatggtatgagtagtcgcctagtgaaagcaatgccgagtttggtatttacttctgttttggaagataactgtacatcaagaacatgtgctatatgccttgaagactattgtgttggtgagaagctcaggattctgccctgctgtcacaagtttcatgctgcctgtgtggattcgtggcttacttcatggagaaccttttgtccagtttgcaagcgtgatgctagaaccggcttaactgatccaccaccttcagagtccacacccttgctctcatcaaccccagcatctatggcatcctctgtcttatcttctgcaagatcatcactagcttcatcttcagcaatacaaattgcccggacagcatctatggcatcctctgccttaccttctgcgagatcatctctagcttcatcttcagcaatacaaattgcccggacagcatctatggcatcctctgccttacattctgcgagatcatcactagcttcatcttcagcaatacaaatttcccgggcagcttcacagaccccatctgtttcccgtaaccactccatagccagtacaccttatgttcagccatctcttaggtcctcctaccatcaatccccctccctaagcatcagccgaagctccgtagatcttaggaatgcatcccaaagatctctagcttctcacttgaattcaccatgttccatgggatacccatctttgtcatctcttaactcaaggtacatgtctccacacattccaagtccaagcaatgcttcagtaagctatatgggttcatccagtcatcaacaacatcctctccgttatagtgagtcggctgcaagcttctccccatttgcatcgacacactcccttccagaatgttaaattgttcaattgattatatcatatgattgagacgtccacgcagttgaactagtaattgccaagtcttgaactaaaaggtggccatgtgatgaccggtggtctagttgaatagtcctatgtgatgcttggggcattccctacctctgtcatttgacttccgtcttggcacctggtgtacattgtagcttctctctggtgttagtttcgtttacatgtgctggttgaggttcttacatttataggttggagagcttgcatacagtaacttgtgcgtattgtttgtactttgaatgttgacgttttcatggccttgatgtccaagtatagtcaactgctaacaagagaaatgttgggctgtattgacactagacacattgaagtaagaagagttctttatgctctgtctagtggatttgtccaactgaatcatgagagatcatgtgatgtatcactctagtgttatctatacttgatcatctaattgcaactctgagtatcaataatacttgtaaaattttcgtaaaaaaaatagctaatagataatgctggtaagtgttatcaattttaaaccatgggggcaaattagatatcctatttgatccgtggaaaattcatcatctagatatgttaaataccttctgtggcatcttcgatttatagnnnnnngnatnnnt

SEQ ID NO: 29619 - DNA, 383 bp, Glycine max
  Clone ID: PAT_MRT3847_126749C.1
gtgaagccaaaggacagacgtgatggactgagcaaaatggaacctgaatgcccagctatgctgattattttgttggcaaccgtactttgggtcttagccacaaccctttctagaggtaaatatccaccccctctcccaccaccattcacaaagcatattctgtcatcggttcggtgttctccatcatcgacaactaccgccaccgtatccactggatctgcgacatgctaaacacttgcccctcctacaccttcgttctacaccgcgccttctgctcccgccaggttttcacggcaaaccccacacgtttgtacagcacattttcaagaccaacttccctgtgtaccccaagggcctgactctgaataggacccttggagact

SEQ ID NO: 29620 - DNA, 403 bp, Glycine max
  Clone ID: PAT_MRT3847_12674C.1
gccacgcgtccgaacacgtccgaaaagacttttcatgggttcttttattagaaaacaacaaaggggtccgggttcgacaacatgacaaatgggtacacctgttacacaactactgagcggagaataccttatctatcctgaggttatcccgcgcatatattatcacgctagactacatcatgctaaagtacgtgctccacgcagagacaatacttgatattctcataacatgcatgcctggaactcttcaaaagggtcatgatgcgcggacacccttaaccttatgaatccgtttcttttatgagagactttatacctgatgcttctcattgacatatattgctagtaccaaaccactcctatctatgatggatattgctttaccccttacaagcaccctcta

SEQ ID NO: 29621 - DNA, 1025 bp, Glycine max
  Clone ID: PAT_MRT3847_126750C.1
ccacgcgtccgggcagcttcacagaccccatctgtttctcgtaaccactccatagccagtacaccttatggggggccatctcttaggtcctcctaccatcaatccccctccctaagtatcagccgaagctccgtagatcttaggaatgcatcccaaagatctctagcttctcacttgaattcaccacgttccatgggaggcccgtctttgtcatctcttaactcgcggtacatgtctccacacattccaagtccaagcaatgcttcggtgagctatatgggctcatccagtcatcaacaacatcctctccgctatagtgagtcagctgcaagcttctccccatttgcatcgacacactcccttccggaatgttaaattgttcaattgattatatcatatgattgagacacgtccatgcagttgaaccagtaattgccaagtcttgaactaaaaaggtgaccatggatgactggtcgatatttgggcgtagcatttcctcctttgtctcctctggcatttgacttccttcttggcacctggtgtacattgtagcttctctgtggtgttagtttcatttttacatgtgctggttggcgagcttgcatacagtcactagtgtgtattgtttgtactttggatattgatgttttcatggccttgatgtcaaagtatagtcaactgctaacaagagaaatgttgggctgaagtaagaagagttctttaagttctttctagtcatgagagatcatgtgatgtgatactctagtgttatctatacttgatcatctaattgcaaaagtgagtaataatacttgtaaaattttcgtagcttgcattgctaatagattatcagttttaaaccatgggggcaaattaggtatcctatttgatctgtggaaaattcatcatatatagatacttgtaaattgaattttctagagagtgcgtgaaattttaggtttctatttctttttttctccatttctattgatttgaaaaaatatacggtactcagtttaatgtgt

SEQ ID NO: 29622 - DNA, 3923 bp, Glycine max
  Clone ID: PAT_MRT3847_126751C.1
ccacgcgtccgcgggcgcgtgggattctgtgtactctcccggatcctccgccaggaactcttgttttgctgcgctcctgcttccgcttcggatccatcccgaaaacctcacacagaattattcactttctgtgttcggttcaactcttttggattttgctagatccgaagcgccaaccatttccaagatcgttgaagaatggcatcagcggcgagtggggccaccggatggtacaggggaagagtgaaggcggttccttccggggactgtttggtcattgtggcgatctccagcaccaaacctggtcctttgcctgaaaagaccattactctatcttctttaattgcacctagactggcgcgtagaggtggtgtggacgagccgtttgcatgggaaagcagagagtttctgaggaagctctgctatagggaaggaggtgaccttctgagtgtgactacaacgtgccttccataagtcgggactttgggacagtttttctcggggacaagaatgttgctatgctggttgtttctctaggatgggataaggtcagagagcacatcgttttaaattgttaggtgcagcagaaacttgcagaattgggtacggttgtaagaacaggctaaacaagaagcgtgaggaagtatattcagacgtactagttcccctgatgaagcgatcagaaatttacctccatctgccattggtgactctagcaactttaatgctagggctttattagatgctaacaagggcattcccatggaaggaattgttgagcaggctcgcgatggcagtaccctacgtgtctatttgctcccagaatttcagtttgtccaagtttttgttgctggaattcaggccccacaaatgggaaggagagctgtacctgaaagtgttgctgaaccagaggttacagctgatgcgactaatggagatgttcctggggaacctcgagccccactaacatctgcccaaagacttgcagcctccacatctgcattggcatctgcatctgctgaaactgctgctgatccttttgcacatgaagctaaatttttcactgagattagagtattgaatcgagatgttcggattgtcctggaaggtgttgataagttcaacaatttgattgggtcagtgtattatcctgatggtgactcagcaaaagacctggcattggagcttgtggaaaatggctttgccaaatatgttgaatggagtgcaaatatgatggaagaagaggcaaagcggaagctgaagacttcagagcttcaggctaagaaaatacaggttaaagatttggagcaaactatgtaccaccagcaacaaattcaaaggcaatacatgaccagaattttacaggaaaggaggtggagattgttggtagaaaatgcataactgtggctgagagttcggggccaaggtggaggagaaagacagttccgggaggtaagcgaactagcagggaacggcgacaagtccttgatgcaactcgtgatgaaaaaccagctccatatgcccgtgaagcaaaggagttcttgagaagacgcctcattggtcgtcaagttaatgttcaaatggaatattctagaaaggtttctcccacagatggatctgtagttccatcagcagcttctgattcccgagtaatggattttggatcagtcttcctattgtccggtgcaaaggttgacaatgatgatgccccatcatctgctccacctgctggaagtcagcaaaatggggtgaatgttgctgagttaatagttggccgtggctttggaactgtcattagacatcgtgactttgaagagagatctaactattatgatgctcttcttgctgctgaatcacgtgcaatttctggaaggaaaggcacccactctgccaaggatcctccagtgatgcatataactgatttgaccacggcatcggctaagaaagccaaagacttcttgcctttcctgcaccgaagtagaagaattcctgctgttgtggaatatgtgctcagtggccatcgttttaaattgttaattccaaaagaaacttgcagtattgcgttctcattttctggagtcagatgtcctggtcgtgatgaaccatattctgacgaagccattgctctgatgaggagaaagataatgcagagagatgttgagattgaggttgaaactgttgatcgaactggaactttcttgggatccttatgggagtcgaggaccaatgtggcaattacactgctcgaagctggtcttgcaaaactgcaaacatcctttggcagtgatagaattcctgattttcatcttctggagcaagctgaacaatctgctaagaggcaaaagctgaaaatttgggagaattatgttgaaggggaggaagtatctaatggtgcaccagttgagaacaaacagcaagaagtgctcaaggtgacagtaacagaagtcttgggtggaggtaaattctatgtccagccagttggggatcaaaagatagcatccgttcagcaacaactttcttttttgattttgttgaaggagagctgctatctaatggtgcagcagttgagaacaaacagcaagaagtacttaaggtaattgttacggaagtcttgggtggtggttaatccaatgttcacacagatggagatcaaaagattgcatccattcagcaacagcttgcttctttgaacctaaaggatgctcctgtgcttggtgctttcaatcctaagaagggtgatatagtcctttgttattttcatgctgacaaatcttggtaccgggcaatggttgtcaacacaccccgaggaccagttgaatcccccaacgacttgttcgaagtattctacgtcgattatggaaatcaagaagtagtaccctacagtcaactacggcctgttgatccatctgtgtctgcggcacctggtcttgctcaactgtgtagccttgcatacatcaagattccaaacttggaagaggattttggccaagaagcagctgaatatttgagtgaactcactttaaacagtggaaaagagttcagggccaaggttgaggagaaagatacttcgggaggaaaagtgaaagggcagggaactggggcaatccttgctgtaactcttgttgctgtggatgctgaaatcagcgttaatgctgccatgctacaggaagggcttgctaggacagaaaaaagaaacaggtgggacagaaaagacagacagacagctctcgataatttggagaatttccaggatgaagcaaagaccagcaggcgtggaatgtggcagtatggagatattcagtcagacgacgaggacactgctcctcctcctagaaagaccggtggtggccgtaaataagtgtaacaggaggtaaattataaaatagacatcttgagagaacatgactgaagttaataggcttgaacaatttttatttttttttgagctagagagaaaaaagaaaatgccgtgcggattcctttgtaagttttgttttattttttttgtttatattttgtctttaggttggtggaacaattgttttctatagatgtcttaataaggtacatgcggcaaggttctctgttaccatgaggacaacaaagatgttttgttgtcgtttaatatttcttgcttgtttgtcttttggtcttttaagaaattgtcttccttttttttctaggtttagtttcggcttaggggaatttttaccgtaataaagttaagtataattgtttttaatatatttttttaatgtttaacataattagaatgggtattacgttggaatgtgtattactgtaagaggaattgattattagtgttacctaaaaggtcgttgattaaagaaactaggtcaaataacttagagctaacacatatcccatatcaaacttagatatgctacctgtccccaccatat

SEQ ID NO: 29623 - DNA, 1728 bp, Glycine max
  Clone ID: PAT_MRT3847_126752C.1
ccacgcgtccgcccacgcgtccgattctgtgtactctcccggatcctccgcctggaactcttgttttgccgcgctcgtgcttccgcttcggatccatctagcgtcacgaaaaaaatccagaattctgtgttcggttcagctcttttggatttgctagatccgaagcgcgaaccatttcgaagatcgttgaagaatggcatcaacggcgagtggggccaccggatggtacaggggaagagtgaaggcggttccttccggggactgtttggtcattgtggcgatctccagcaccaaacctggtcctttgcctgaaaagaccattactctttcttctttaattgcacctagactggcgcgtagaggtggtgtggacgagccttttgcatgggaaagcagagagtttctgaggaagctctgcatagggaaggaagtgactttcagagtggactacaacgtgccgtccataagtcgggactttggaaccgtttttgtcggggacaagaatgttgccatgctggttgtttctcaaggatgggttaaggtcagggaacaggggcagcagaaaggagaagcgagtccgtacctggcagaattgttacggttggaagaacaggctaaacaagaaggccttggccggtggagcaaggttcccggtgctgctgaggcatcaatcagaaatttaccaccttctgcccttggtgaccctagtaactttgatgctatgacttttttaaatgcaaacaagggattgcccatggaggcagttgttgagcaggttcgtgatggcagtacactccgaatctatttgctcccggagtttcagtttgttcaagtttttgttgctggaattcaggctccacaaatgggaaggagagctgcacctgaaagtgttgttgaaccagagttgacatctgatgacaccaatggagatgttcctggggaacctcgagccccacttacatctgcacaaagacttgcagtttcaacatctgctgaaactgcagctgatccttttgcacatgatgctaaatttttcactgagatgcgtgtattgaatcgagatgttcggcttgtcctggaaggtgtcgataagttcagcaatttaattgggtcagtgtattatcctgatggtgaatcagcaaaggacctggcattggagcttgtagaaaacggttatgcaaaatacgttgaatggagtgcaaatatgatggaagaagaggcaaagcgaaagctgaagactgcggagctgcaggctaagaaagacaggttaaggatgtggacaaactatgtaccaccgccttcaaattcaaaggcaattcataaccagaatttttctggcaaggtggttgaggttgtgagtggagattgtattgttgttgctgatgattccattccatatggtagtcctctagctgagaggcgagttaacctttcaagtattaggtgtccaaaaatgggcaatccccgtcgagacgaaaaaccagctccctatgcccgtgaagcaaaggagttcttgagaacacgcctcattggtcgtcaagttaatgttcaaatggaatattctagaaaggtttctcccacagatggatctgtagttccatcagcagcttctgattcccgagtaatggattttggatcagtcttcctattgtccggtgcaaaggttgacaatgatgatgccccatcatctgctccacctgctggaagtcagcaaaatggggttgaatg

SEQ ID NO: 29624 - DNA, 286 bp, Glycine max
  Clone ID: PAT_MRT3847_126753C.1
attccttcatggctagtagactggatttctgaggaaggtggatacttcattggcaatttgcgacctgctcatatggactggaggtttttctcacttgtaaacctttgggccattgtatcatctttaggcacaacaagacagaatcagggcattttgatattaattgaggtcaattgggatgatattgttgctcaaatgcctcttaagatttggtatccagcactggtgggtgtggtatggcgtataacctctggctgtgtccctattaccacttatgggtcattct

SEQ ID NO: 29625 - DNA, 521 bp, Glycine max
  Clone ID: PAT_MRT3847_126754C.1
attgaacattgatcattatcattttacaaagagacatcttcttacagcagttaaaaattatatattgacctatatagtcgtcgagaattacacttcaaaaaatatgcgtcagatataagagactgcgccactcaatagtatcaaatagcaattaagacattcagatcttaagccctaagaagagtatcgataaaagactcatagtccatcacccatcaagaaaaaggactatcgaagaggaagagcaaggacacaacactaagaagctgaagaagacatggcgttgcagcggctgattctcactcacgtgggcgcagctgaagctggcagggccattctgctaacccttgccaggccctaactcctaagggaccgattcggctctctagttgccgtaattattcaacccgcgcttttcattggcccgtctgcgggggtccaactacttgatatatactggaaagatgagcatcgggtgatgggtacctctcaagttagtactggtgcggaaagagatcgat

SEQ ID NO: 29626 - DNA, 228 bp, Glycine max
  Clone ID: PAT_MRT3847_126755C.1
acgcgtgagacgactcctgagggggctcgtgtattcgaccattggggatagagtataatgctaccagtctacaaatcagcttatgacctcattactcgctggtatgtggaaaacatcccttcattcacaccttgatccgctatctggtaattggtcatttgaacttctgaagctggtatatatgacatatgaccctatcacaaaccaagactttgtggcatataacta

SEQ ID NO: 29627 - DNA, 1957 bp, Glycine max
  unsure (1)..(1957): unsure at all n locations
  Clone ID: PAT_MRT3847_126756C.1
ggtccggattcccgggtcgacccacgcgtccgcttcatatctttgtctttttgttcttccatcgtcccctctcgaattccccacgacaaatccaacaaaacccacagccatcatcagcctactttccctctcattcgctttggcatttcagctcccgccgtcaaaaagcgacactggaaaaaaggggagtttcctgctacttcccaaccatccttccccaacgacactaggaggaagacccctcttaagaacctcaagaagaaattcgacaaaaagaacgatgccaaggcatgggtcaacactgtcaccgaatccttatccgaacgcatccacaacaaacactggcttcaggccctccaggtatttgatatgcttagagagcaaaccttttaccaacccaaagaagggacttgcatgaaactcattgtgttgcttggaaaatctggtcaaccccaccgtgcccatcagctttttaccacaatgattgaagaaggtttagaacctactcctgaactgtacacagcgttgctcgctgcgtattgcaggagcaacatgattgatgaggcgttttcagttcttaatgagatgaagaagcttcctctttgccagcctgatgttttcacttacagtaccttgatcaaagtttgtgtcgatgctttcaaatttgatttggttcagttgctgtatgaagaaatggctgaaaggtctatcacgccaaacacagtcactcagaacattgttttgggtggttatggcaaggcgggcatgtttgatcagatggagaaagtgctgtccagcatgctgcagagcactacatgcaagcctgatgtttggacaatgaacacaatcatcagtgtttttggtaacatgggtcagattgatatgacggaaaaatggtatgaaaaattccgttattttgggatagaaccagagacgcgcacttttaatattttgataggtgcctatgggaagaaaagatgtatgacaaaatgtcatctgntatggagtatatgcgtaagttgcaatttccgtggacgacctctacttacaacaatgtgattgaggcatttgctgatgcaggtgatgcgaagcacatggaatgtacatttgatcagatgcgtgctgagggtatgaaagcagataccaaaactttatgctgccttatcaatggttatgcaaatgctggtctcttccataaagtaattagcagtgttcgcttggcgggaaagcttgagatacctgagaatatcaccttttataatgcggtcttatctgcgtgtgcaaaggcagaggatttgatggaaatggagagagttttcaagcgtatgaaagatagccagtgtcagccagatgacacaacatacacgatcatgatcgaggcatatagaaaagagggtatgaatgacaagatatactatttggagcaggaaaagcagacgatgatgactgatgataaaaaagctagccagtttgagaatgaaatcttaatttgatttttgatttatagttcagactgctaatgcatctgtattctatacctccattttccgggagcggctgtaaatttttgttttgacatgaagtgaccagttgctgagttgtgctatcgaacttcatttttcacgatgaatgacagctagtcctgcctaacttctgtatgttgttcaagttaaatttatgttttagcatccatttgattcgcagaaaagaacttaacatctgcagcttttggtgtacagatttaatgaactgatagtagagtttattagtttatttttgtcaatttagagctcatgttatattgaagtgctgcctttcattcctgctgcttaccagccttgtctgaaggaggctatgtttgatgacaggattagaaagtgttgctagtgctccaaactatacatgggttcatgcttttgtaatgtacttaattataagatatctagatttcagtatt

SEQ ID NO: 29628 - DNA, 234 bp, Glycine max
  Clone ID: PAT_MRT3847_126757C.1
ggatcaattcaacaacaattttttttataacattttgatcaaatgaaccactgtttccttgcaaatgtgaattactaggacaacaaaactttcttatcatcatcatccacgtcgacgctctcttcccttgtttaatcaatatcaaacttgctactttccttatcattcaccacatttgactctaaatattcatgaatttcgcaatactcttcttttgtgccatcttccacttct

SEQ ID NO: 29629 - DNA, 333 bp, Glycine max
  Clone ID: PAT_MRT3847_126758C.1
ggggggggggaaaaaaacacttccaactttttatacaccccgccataattttttattggcaaggaatccaaggcaaagggggggggggaaaatttttaacaaaaaaattttagccaaaaacacaaaaaaaaaagggagatcctccctctcaaaatgccggggtaattttttccccaaattataaacatggcgggtgcaaaacaggcccaactgaaaaaataagcttttttttgagagcaacccggagatcctttttcccctgttcacaaattaccaaatttgtaataaaaaggaaaaaataaaacaagttcttttcaaaaaaagaatttccca

SEQ ID NO: 29630 - DNA, 479 bp, Glycine max
  Clone ID: PAT_MRT3847_126759C.1
tcggtttgtatgcaggccgataggaaaaggcagaggttcaatcaggtatgtatccgttccctttctcattctaccagcctgaatcgatctacctcaattcgcataattattgaattctttgtgtaaacaattcaacttccatttattatctatgaattcaattcaaattacagtactgcctagcagcttgcaagtttcatagatcgagagaaaaaaagcgaataaatgttcatctttaacttccattcaaacaagtgggttgggtttgaccagcatacacacaacatataattctggtggaacggtgaaggatgctatccaccaatccatataattgcactggttatgttggattagtttaggtttaatcgcccctctattttgggatgagttcgagatgctttcttattcatctttcaagtcgtccagattattgtgcacacgcaattctcttccgtaaccattaattcttgatggat

SEQ ID NO: 29631 - DNA, 670 bp, Glycine max
  Clone ID: PAT_MRT3847_12675C.1
gatatgatgtaatgtaacattaaaatcacagaaacaacaacgctcactgattaccaatccatcgtttttgaactccacataaggctaaactaaacacctctctctgcaaaacaaaaccactctcttccttccaacgaatctctgccacacaacaaataactctgaacatataatcaacctaagacccgcctctgattctgaacaacaaaaggtatgttctgtcctttctctaagattgatgatatgagatgagatgggtttgtgttgttggcaacaaatagcacgttgttttttctttctgttcatgttgttggactttgctcatggttttgtttgagcctttgaggaccatgtttgactatagaattaatctgggtttttgttagaatctgctgaaacatcggtttctgttttcaaaagtcaaaattttcgggtctgatttgttgtctaaaacatgtttcttgtatctcaagttttttagttccatttctttgacatggaggttgtgggtgtgcttggaccgtgtttgggttggttttgttctaacatctggcttttagagcattgttatttgtgttttggggttttactgtttttcttgccaactttgctaacaaaaaaaaaaaaaaaaaaaaaaaacgccgctctaaggatccagctcgtacgcggc

SEQ ID NO: 29632 - DNA, 519 bp, Glycine max
  Clone ID: PAT_MRT3847_126760C.1
ttttttttttttttttttttttttttttttttttttttttttttttttttttttttttttttttttaattacaccccccccattttttaacaaaaataaattaaagggttcccaacaataaaacactattaaattccccccaaattatgggttccccttttttattcccacgggaacattagggcaggacaacaacaatagtaaaaaggaaggcctaaaaccaattaaaattcctaatgggggggtcggcaaaaggatttaaatcccttatgggaaaaggaaaattgggggggggggcattgtttatctcaaaacaaaaaaaaaaaaaacctttggaaaaaaaaaattgggtaagggaggggctattaacccctagcaggcatttaaattttaaaacaccaaatcctaaccgggggaaaaaagggtttggaaaaaaccaaaacggccccggaaaattggaaaaatttatttaaaataccccaggggcccgaatcggttattttattatcagaggcttac

SEQ ID NO: 29633 - DNA, 820 bp, Glycine max
  unsure (1)..(820): unsure at all n locations
  Clone ID: PAT_MRT3847_126761C.1
gcctctcgattcccnnnccacccccaattnnacccggcttccacattcttctttttctccgtttattttcatttaattattatataagtacacataaaaaccctctaatcccctcacgtactctcggagcaacatggatgacggcggaggcccgtccatctccgtcgtctacttcgacggccacacggaggccaccgtcggcgaggtcaccgttgattcgtctttcaatttcaaaaagttcgtctcctttctcagtcagaagatcggaatctccccgcacaagctttccgtctacctcgccaccttcggcaccgaccggagaatcccaatctccggaaaagtcaacttcgccgccgtagcgcgcgacaacgccgccgcttcctcgttcttcttcgtggagagaacgaagcgtcccaggagtcggaagaacaagtcgcgcagcaaaggcaattcccgtaacaacagcaacgcgccgcgggagaacgttgtgctccttcgccgaaacgacaccgtagcgggccacgttctgggccgggccgagtacgaaaaatgggttagggatttacaaatggaaagagaacggtattggctgagtatgggaatgagaatgttatgcgaggagtgtttgacggggactgacggcggttttcactggtgcgtttacgacgccgttacggtggggtttcggtcaccggctgggccggttgcccgacccggaaagggatccggttaataacgccgttacatttctctatctcttaggtttttgggtttggtgatgcggcgttgtgccgtgccgcattcggcccgaggggctttt

SEQ ID NO: 29634 - DNA, 466 bp, Glycine max
  Clone ID: PAT_MRT3847_126762C.1
cttggggggggggggggggacaaccaccaacttttaaaattaacagaggggagataaaagcggcctgaagcaataaagcatggctgagggcccgtaaaaatgataggttaggtggtatggctataaaaaggagtaaacgaccacatagtataacacccaaaccgccccagcaagcagcgcgagcccaatagtgaggtcctgggatgccaggggtgtggtaggtcctgaaaaccgttaatgcggtcagttagaagcgatagcgaaagcagtgcctgttaacagtgcgaccatctgaaaggagtagaaaatgtgccactaagtgttggtattggcgcaactggcaggttaccaaggtggcccaaagtagcctgtcacttcaaggttcactggatcgatctcgctagctcatcgtagactgtggtgagacgcgtattgaaaggtaaggtatgccttcgtcggggataat

SEQ ID NO: 29635 - DNA, 431 bp, Glycine max
  unsure (1)..(431): unsure at all n locations
  Clone ID: PAT_MRT3847_126763C.1
ggaaagtctttcttttttgggtcaactttgtgccttgcatatcaacagaatattagactcttctattttatattttaaaacagaatattagacttttttttagaatattagactttgagtttcatccgttcgacgacatggcctttgcttttagtttattcttaagtaggcttcaagtttttgtgagctaagacccaatctcattcaacgatcataattcacaatatactcctattatttattagggtccatgagagggaatggtgctcatattttcctagaattttaaaaaataaaaataatttagagcagtgagttatccttagacttatgatcaattttattagcttttatgctactaggtaatccttgtttgagtctattataagtgcaaaggatttatntaatgaaccaagctgtattcgactttt

SEQ ID NO: 29636 - DNA, 465 bp, Glycine max
  Clone ID: PAT_MRT3847_126764C.1
aaacaacttaaagggtaaaaactttattttatgaaaaaaattggggattttctacaaggcatccaaaatgtctggggatgtaagggtcatcaaagcaaacccaaattttatcattataattattaatataaaaaagataaataaaattaattttaaaaaagggcccgctaaattatcagggggacataaattttattttgaaaaaggaaaattatacttcaaaaggggggggggcctactaggccagctaaaactttaaggcttactgccaaaactccaccacctttttttttttttaaaaccacttggggggatatcaaaaaccccaaaacttggaaaaagaggcttgaaacccccttggggaaaaagggagttgaaatgcccctttgcccaaaaactcaaaaaaatcactttttttggcttctcaaaaggaggaagtatctttatgcaacaggggtccttgaa

SEQ ID NO: 29637 - DNA, 821 bp, Glycine max
  Clone ID: PAT_MRT3847_126765C.1
ttttttttctgtcgtttcgttttttttttttttttcttaaaaagatttagaaggatttctttgtattttaatatatatatttatgtgaaacataaatatccattatatgcatcacattgagcactatatataacataatttaacacacttccaaatttattccatgcaaaacgaacgatctaggtaagcatctttctcgatcgtcaaacatcacaccgattatactgataactagacaagcactatatattctaaggccaagccaattatttcttacttattaattattttctgcataacttttggagctatggcttgagaagattgccatcaatctgtttactgccactgtgcaggtattcgatgtagccatacggaggatcaacattctcatcaatcttctcatattcaacggtccatttgataataacacccccatgatcggtgtcaatagcttgaaaaatgagcttaaagactttatacttatgaccaatatctcctccgaagagcttgtaggtgattgttttgttcggttcatcaacggattcaatactctccagacatgttgtaatcttaccatctattgtacaagtccagtgtttgatcgactcgttgtgatgccagtcatcaccatgatgcagcttggtttcatgcactctatcagtaaggttttgaacatgatggagctgcgttgcaaagaggttgaaccactttgcagcagttgcatgaaccccaatttcagtactaattttaccaacaagcgacatgatcaagaaagaaacaataaaaggaacaaacaagagcaaggatgagaggtggtc

SEQ ID NO: 29638 - DNA, 1180 bp, Glycine max
  Clone ID: PAT_MRT3847_126766C.1
atccgcccggaggggaatagaatagatatttgatatgagactactgcagatggatctaatccgtgggatgagctagggtccactaactgtgtatctttctccgtatttttctgtgttctaattttagctgcaatatttttccacctccatttatttttgcagaacctaattttaatttcctcctcaaatagtatctgtatctatccatcgctcaccactttgaattttccacttattcttattattccgaatcctaatcggggaaggaaggaaacagagcgtgtgaatatcaattgcctttgccaactaagatgaattcacttttccgtatacttttggtttttgttcttctttcgacagacttttggcagaacatgctggatagtagctaccacgagaattctcttcagatattgttccccgcgtccacccgtccgattttactgaatccgaggttagacacttttagcgctcctgactgctccttacaatggaagatgttgaagacaagataccccctgtcacctcttcaaaaattactgaagagacaacactggcagagcatgttggagacaagcttccatctgaatcctctccagaggcagaagagacacccctggcagaacttgttggagacaggcttccatctgaagcttctccaaaaattgctgaagagacaccactggcagaacatgttggagacaagctaccatctcaattctcttcagatattgttgaagacacaccactggcagaacatgctggagacaagctaccatctgaattctcttcagaaattgttgaagagacaccactggcagaacatgttggagacaaccaaccatctgcatcctcttcaaaaattgatgaagagacaccaccggcagaacatgtgacagacaactctgaatcctcttctaaaactgctgaagagtcaccactggccgaacatgttgtcgacaagctaccctctgaatccactacaaaaattgctgatgagatgccactggcagacccccctgaagaaaatactgaagtgataaacccacctggcaatcaatcttccactgaagctccaacaatcccacttagtaatggaaaaatggagcctggtactcatttgccagtggatgagttctctgaattagcagtgttgccaaatgcttctgatgatcaaact

SEQ ID NO: 29639 - DNA, 309 bp, Glycine max
  Clone ID: PAT_MRT3847_126767C.1
cggggaaaaaacccccccccccaggggattctttcaaaaacacccccctttttccaccccccccccctggagagggttccaaaaaaactacattcccggtggcccctgggggaaccattttggcagccgaaaagccctcccctaacacagggggtaacaggaatcttcggactcaatggcctaacaaagaaaaataactccctgagagcacccccccagagggccctatgggctctccagaagattgggggccaagagccccggtgaatggcccaacgccggccattccaggggggggaagagagcccc

SEQ ID NO: 29640 - DNA, 400 bp, Glycine max
  Clone ID: PAT_MRT3847_126768C.1
ccaataattcttacagatcagataaataacttctacgtgtcatagggaagcagatagcggttcactaaatacagttaaccatcttaacaagtgatgaatatcacctctgatatgtagacacacaaattacttgacttctgaaagaagctaataggctgattctattggagctcatattctgacctacaatatatgggtgcaccaaactacattactcaaaagtgctctattttttcattctgaggcatgtcttgacagaaagagtaccacatttaattgcgtggaaagcttgctctctatgagctacctgaggagtcacctgaggatgggttcaaaggggaaccaactgttagagaaccttttccagcctcacttataagaccgactggtattgtgactg

SEQ ID NO: 29641 - DNA, 194 bp, Glycine max
  Clone ID: PAT_MRT3847_126769C.1
cccactcgtgcttccacgcgtccgcccacgcgttcggacaagtgaacgtcttaagatgctctagatgagaatgagcccatggcacgttccaaatcatgggaacatgtcactctgattatgggatcgaaacatatgtactggtacctgccgcaacacagctattctacatgaataggaaggtagactgttactgt

SEQ ID NO: 29642 - DNA, 199 bp, Glycine max
  unsure (1)..(199): unsure at all n locations
  Clone ID: PAT_MRT3847_12676C.1
ttttgaacggaaangnttccatcancgncccaaaacaaccatnaacgacatggtttcctcctttncctttcttcaagacttgcccaaagggcacncnatgtttggtnggnatggaaaattgggaganctttaacggggcnntttggtaatgcgacacatggatgaacatncatctgcggagaagttcattgtacatcta

SEQ ID NO: 29643 - DNA, 334 bp, Glycine max
  Clone ID: PAT_MRT3847_126770C.1
gggtcgacattctgctagtcggaggaacggactttatttatatttttctgatgaatcatcattatcaacgatactgtacctggggctatttctgtgcgacaccagaggatagagcctacggccaagcgaaatactgcagatcgcctatcccggcgtagcagaaggtggcgctattctgggcgagtgaggtgctggcggctctggataacttggacgtgatgacgctgatgattcacattcgcggtaagactttctgtgactaaggaagggaatgcaagggcgggtcaatacactgctgttgcctcactataattgaatagttccagacctacca

SEQ ID NO: 29644 - DNA, 488 bp, Glycine max
  Clone ID: PAT_MRT3847_126771C.1
ggggaaccccaatttctgattatcattggaaaaccatgaaacctcaaccatgggggtggttgggccaataaaatccttgggtccttccaaatggaaagggttgtctaaccggccattgaatggggaattttttcttaaacctggactccaaatgttttcttgatctccaaaaaaaaaggcccttttttaaaacaagggttaactgggaaaaaaaaggcctggattttttataaacgggtccacgagtttgcaaaatatagcggatatacatttgaccatatcctcaaaaagcctatttgggggatttggaaaataaacaaattttcgggtaccaaaaagttcccccaggcttattatttttgataaaacataaacatttggggcatactccattatggaaaatggttgggaatgaccggcccaaaaaaattcatttaattcttttgccactggaacaaatgcttttgtttaaaaagcggacccctggg

SEQ ID NO: 29645 - DNA, 311 bp, Glycine max
  unsure (1)..(311): unsure at all n locations
  Clone ID: PAT_MRT3847_126772C.1
tacnncnttcgtacgnangctcggnattcgtgctcgnnangnaangcngtcnggtngncgttctagctngtcatnnaggatgtccagntgngttcttccnntnagtgcnncangtnntatcgagacttaanggacctccgnnatgnnagtctngaggnctngaangncgctangntncnntnnagnctcnantntgtcgtgttgcnactnanaagccgcnntgnaccagagntcncangangccgangnggcnacgngacgtacnntctgacngnggtgtnanttgccnacaagctcntnngggngntacn

SEQ ID NO: 29646 - DNA, 951 bp, Glycine max
  unsure (1)..(951): unsure at all n locations
  Clone ID: PAT_MRT3847_126773C.1
acgaggccaagaggaaatcagtgtagaggcagatacaaactgagcttgaacttcttgcaagccttaggaataggaacctgatgagtttgagagcctatgttcgtgagcctgatggattctcattggtttatgattatgcgtccactgggagtcttgctgatgtgttgaatagagtgagggagaatgagttgccctttggttgggaagttaggctcacgctagctggtggtgtagtgtttgccctacagcagcaggtacactgacaaaagtgacatctttagttttggcatgatactaggtgttttgttaactggtaaggatcctacagatccattctttggagaagcagccagtgggggaagtttgggatgttggctgagacacttgcagcaagcgggcgaggcgcacgaagctctagataagagcatgttaggggaagaaggtgaggaagatgagatgctaatggcggttaggattgctgctgcatgcctctctgatatgcctgcagataggccttctagtgatgagcttgttcacatgctaacgcaactgcacagtttttgaaccaaaccttgattcttcagtttctagagattttttttccccttctcttatccccttttctgtaataagatgataggggtatttgattggtggccatgattctggtgtaattgattgttttccttgatcttggttttcatggtgtggtttcaaatattcccttttcttttggctggttttgcaggttgtggttggtttagatcacactagtatattatgtttgtaaatgactagtcatgttaacaagagttttcttttcttgcccagtactatagctgtatcctagaggaacatgtcatgaatgccattaacataaaaccgtttgctgaaaaaaaaaaaaaaacaaaaaaaaaaaaaaaggggggaacnccaatnagtnnncccccc

SEQ ID NO: 29647 - DNA, 466 bp, Glycine max
  unsure (1)..(466): unsure at all n locations
  Clone ID: PAT_MRT3847_126774C.1
cgcatggcacccgcgtacgtatagtcctcgtgtatattcggcttcggagggtnnttatgaannntcgcatggnannacagataccctaacnnacaaaaatgggttattcaaaaatcaaatnnnctttcnnatctgnnctaacnccntnnagagatcangnnctagtgnnngaattgggcgcttcntnnaatgtnnacaagggggtttgccngatcacccttgattagtcattatagtcatctggtnncttgtcatttcgtgccatgatacatgttaccctttggtgtgtcaagcccttgttgctgnctactatcttgtnatattatacacatttcccatttnnactaatatntnncatgttcaccnnnttaattgataaannaatatcnntttctaattaatnnctgcaacnntataangaaatgtttnaattacaaggggtataaataccccattatanngattt

SEQ ID NO: 29648 - DNA, 809 bp, Glycine max
  Clone ID: PAT_MRT3847_126775C.1
cagcttcattagttaattatatattcgtgatggtcaataatatatattacatattacattcattacatttcatagtctaattttctggcttaattttggattcagttatctttagtattttgcctataaatagtttctctattataaccagctcttgtacaactctttaagtttcaatcattaactgcttctgtgcaggtggtttggttgaaggttgaattatgcagattgatggaggagaaaagatctgccatactcagagctgaggagctagaaacagctttaatggagatggtgaaggaagataatcgtctgcaattaagtgcaagggttgagcagttggagcaggaggtcgctgagctacaacaagtcattgctgataagaaagaacaagaagctgccatgctgcaggtcctagtgcggctagagcaggaccaaaaagttactgaagatgctcgcagaagatcagagcaagatcttgcagctcataaatttgaagttcacgtgcttcaggtttgggtactcttctatatgtttcatgtgctacttagtaggcatccttttaatgctattgcctgatacaaaagaacgcaagcacaagtagttaagaagtaaaataactgatatactccaaatctcgttatatctatcatattctttcttattcctcttctcttggtaatgctcatgggaaagaaaatattctctgctaattggttgtttttagtttacaatgggctgtggatgaaggttttattttctttggttttggctaaaatgataaagttgtttatgtctacaaattgaga

SEQ ID NO: 29649 - DNA, 167 bp, Glycine max
  Clone ID: PAT_MRT3847_126776C.1
gaccactattaatcatcgtcttcacattcatattctgaacccgatattgaaacttcatgggaaatcttttaatgtcaatctacgaagcagaaaactgataaattttgtgtaattcacttctaggcttttaagcgacacaggtatagatttttgatcttttgtcctaa

SEQ ID NO: 29650 - DNA, 532 bp, Glycine max
  Clone ID: PAT_MRT3847_126777C.1
agagagagagagagagagagagagagagagctgcagtgaggatccctatcttgctgctgagggagtgaaccatgcacaaagggcaatcagtaatgctcatggcccaaatgagcatttaaaaggtgttgctcttcggatgttgggactttgtctgggaaagcaagctaaggttgcttcctctgactttgagaggtctcaccttcagtccaaagctcttgagtcattggtggcagcaattagattggagccaaacaattctgatctgatttttgaactggctgttcagtatgcagagcaccgaaatttgcctgctgctttgcgttctgcaaggcatttctttaacaaaacaggcggttctgtatcgaaatcttggagattgcttgctctaattttgtctgcacaacacagattttcagaagctgaagtggtgacagatgctgctttagatcaaactgcaagatgggagcaggggcctctgcttaggctgaaagcaaagttgatgatctcccaatcacgacccatggatgctatt

SEQ ID NO: 29651 - DNA, 365 bp, Glycine max
  Clone ID: PAT_MRT3847_126778C.1
aaaaaaatgggactcaatcctccttaataaccctggggggggaaataaaaaaaaacccggggtttattttccctcctaaacaaaaatacttttttgttcaagagctccccaaaaagaaaaaccccaatttaactcccaaaaagcaaattccttttaaatactttgacaaactagcccccccacacacaaatcctgaaaaatttatattttggttggatacatgaatactttaacccttgcccccattgacctaggggggaaattggacttgaacttttcttgaactataccactgttaccatgaggcccggggacctttccccaaatgccgcgatagggggttccggtcttttttaccctccctt

SEQ ID NO: 29652 - DNA, 357 bp, Glycine max
  Clone ID: PAT_MRT3847_126779C.1
gtggttacattttcgaataccattgtgcatattgaaccatacatgaattcaaggtttcagcttttgagtaccactaccaatggtagattttgttcacgtggaaagatctctcaaaggttaaagtgaaagtagcatgtgccgcttttgtcttgtcatcaagttacactccaacttctttgttggtatctggtacgcaaatataccgatgtattattgccgtgtattctgatcggcacacttataatgagaacatccatacatatatatatatgtatgtatagatgtatgtatatatatatattatatatatatattggctatattactataggcgggccattttatgcaagctgaatt

SEQ ID NO: 29653 - DNA, 245 bp, Glycine max
  Clone ID: PAT_MRT3847_12677C.1
gggaaattaaatccattttaagccccccccatggggggggatacctttttcccaaaaagagaaagggccaaagggcaaagctttttaaaaatataaataggggtggggcccccaacttaaaaaaatcaaacttaccttattactggggggaaggttaaaaacacgggtttaataccatcggcaacctttttgtaaactgggggaaccctttttttttttttaagggcccccttcttaaaaacaaa

SEQ ID NO: 29654 - DNA, 260 bp, Glycine max
  Clone ID: PAT_MRT3847_126780C.1
cccacgcgtccgaaaaaaaaaaaataaaaattaaaaaataaaaaaaaaaaaaaaaaaaaagaggactggataaaaatttcctagagtccttgcaaatacatataaacaatacaatattatatataatgatacctaaattatggatcatccattttaatggatctaactttccttactgttaaaacccctacattactcactttaatagctttcaaacctaaatccctttcccctactttcaaaaatctctaacctggaaa

SEQ ID NO: 29655 - DNA, 212 bp, Glycine max
  Clone ID: PAT_MRT3847_126781C.1
ttttctgctttttactgtttgtatttatatcttgatggtgtttttctcggttcaaatttttgtcggcacggtgcacttaggatcctgaggtgatcatgatggggtacagaaacatgtacccttctttcagaagcaaggtggtgcactttcctaaccctaacagtttgggagaaaatcccttgcgattagaaaacaagggttccctgggaaaa

SEQ ID NO: 29656 - DNA, 250 bp, Glycine max
  unsure (1)..(250): unsure at all n locations
  Clone ID: PAT_MRT3847_126782C.1
atgaaggctagcggcgggctgaccatgccccgggccgtcccgttggaggccatgtgcaggccgcgtacagctatgcgtgatgttcttaagaggctctgaaaacctcatggatcgaattgctggcatcggctgaagggtgtatgactatgacgtagcttccaagttccgagcatatatattcgtattgtgggttgccttgctactanaaaagaaaaaaaccatttaaaatgtttaaaaaaaaagggggggc

SEQ ID NO: 29657 - DNA, 351 bp, Glycine max
  Clone ID: PAT_MRT3847_126783C.1
aaaaccagaagaaaaagaagaagcgccaatggccaagggtcgcaaattccccaccacgacccgaaccgaccgcttcttgggaatgggaacctactcctcccaagcctccgccgccacagacctgtcggagttccgggaagaggacgtgtggtccacgtcggaagaccgtgacagagatgtgaatgcctaccccggcgagtgggaggcactcgcgccgccgcgtcgtcggagcagcagggagctgcaggggcaccgccacgtggggggtttgtcccttgcgttcgaggatgggtccggtggtgctggtacgaggatcgtgccccaccagtaccgcgcgcagcacgacgccgt

SEQ ID NO: 29658 - DNA, 897 bp, Glycine max
  Clone ID: PAT_MRT3847_126784C.1
gacttctgttgatgaaagttcagactagtttggcacagttcagattccatcaccttggaagcctgttttggaggattcttcaacactacaaatattttttgattactatgccattacaaaaccccctctttcaaaggaggtctgtacatgcgtttgtttctatgattgtatttttaatgtttagaccttgaagttcactaattaaccactaaaatttgaatcttttttggttcttgggaaattgtctactacttacattgattatagccccctttatttaaatatatatcaagtgagagcactatcttagcatgaatgatcaaatttgattaacttaaaatgattttgtgtatatcagtgtcaaagtttagtgttaacatatcaagggcaaatattatgtatgtaatggcattttatttcatacttttctgggtttatttaattttctgcattcaaaggattttgtcaaccatcaatgttcattagtttttcttcttttgtggcctatttgtaggttttatcctgccacttgttagactttgaacttataaatgtaggctagctatttgagagttgagattggcaatgatgaaaaagcctttaaaatggaaatgtgttggccaaagaatgataaggtgctatttaaatgtttgaataagtgattacaatgttataatgaagcaaaagtgagcatgattgatgtttttaacggtgaccatatattaataagtttgaaacgaaaacatggtcttttgaaagaggatgactggcaaattctggtggcacaccttcttggttgttgcaaagatttcttatttttaaataatgcgatggttgaacatcagggagataatataagtgttttttggggggtaaaaaaaagataaacaactgaat

SEQ ID NO: 29659 - DNA, 852 bp, Glycine max
  Clone ID: PAT_MRT3847_126785C.1
atgtctgggaagggagaaatacttatttcacgtagacagtggaatgaagagcaactagaggaaaatcttgaggaatgtcatggaaccgttagagatgccgctatcactatgggaacacacgtgagcccgcttagagagtacgacaagttccaacgggagctcgagaggcgtatatggcataaagcctttaccaggcagcctgatcgtcgcattaatgtggccttgttcaaggagttttatgcaaacttgtatgacccagaggataagtcccccagagacccctggggttttggagccaggggagcactactcagcctttttaaggttctgctatacacacctagaccctcaggagcttgcttccaagctatgcattctcgaggaccctcagacgcttctgctccttcctcttctacccctgctccagcttctacatcagcacctcctccaccagcaccctccggcacctctgctcagaacatagacgtcttggtgccgatgctgcagagccttcaccatggcttatgcctggcgatgcagagtattcacgatctggctcaacatcggcccatcatcagtatggaggatttcatggcccaggtggcctggccaggagtccatccttctcctgtggggggaggtgaggctcctacagcccaagagccacaaccagagccggaggcgacacctgcggagactccagaggtcacacttgctgccacacccatggatgtcactgagtacacagattatgcagcagatatggcagcagtgcagagcacctgggatccttggcctacttcagctcgggacatacatctgccagcccaagatgctctttcctcaccttag

SEQ ID NO: 29660 - DNA, 246 bp, Glycine max
  unsure (1)..(246): unsure at all n locations
  Clone ID: PAT_MRT3847_126786C.1
cntgatattcaatctcgctctagattggcaaaccntttcctctacaanagcacaatttgttngtggaaaanccttcccatatgatatacttggtgctggttcaccttcttcagaacgattttcctggaaagggagntcangaaancacccaaaacgnttgatacccgattgaggccangaatagatcctcaatacatgaggttcnggctcagatggcnacnntttgtttaacttgtctcttgatga

SEQ ID NO: 29661 - DNA, 2361 bp, Glycine max
  Clone ID: PAT_MRT3847_126787C.1
ccacgcgtccgaaggtttacaacaaagacggcgcgtcgttttcggagtatcgaaatttcagcgcagccaggggcaaagttgtaaataagtgggtggagccgggtaagttttttagagaatctatggtaaaagaaggaaacgtgattccaatgcctgatattaaagataaaatgcctgcaaggtcgtttttacccctggcgatcgcgtcgaaattaccgttctcgtcttcaaggattaatgaaatgagggaagtgttccacacgcgggaggggtcttctacagagcgcgtgatggtaaaagcgctgaaagagtgcgagagggcgccgagtaaaggcgagacaaaacggtgcgtttcatccgcggaagaaatgatagggtttgcggtttcggttctgggtcccaatgttgcggttcggagcaccgagaatttgaacgggtctggatcgagtgtgatgattgggaaggttcactcaatcgacggtggaaaagtgaccaagtcagtgtcgtgtcatcagagcttgtacccttacttactgtattattgccacagtgtacccaaagtgagagtttacgaagctgaaattcttgacgtggacaccaaggagatgatcaatcatggggttgccatctgtcaccttgacacgtcagcttggggcccgcaacatggggccttcttggctttggggtttggccctgggaaaattgaagtgtgccattggattttcgagaacgacatgacttggaccactgccaattgaggagagaatgagaatttctactttggtttttcttcagttagttactacttactactatatcataatcaaaattcaaaatagctggataattttaatattgtcatattttggaattctatttataattcagcttgtgtcgttttgtaaaggtttggaagaatttggattattcggttgtcatgacccatgacttactttttactaaaaaaaaaaaaaaactcgcgacgattcggcgcgagattggaaatgtttgatggtgaataatatgattgtgcagatacaccatggccgtcttagtgaaaatgactctagaagatatttccagcagcttattgacggtgtagattattgccacagtaagggagtttatcacagagatttaaagcctgaaaatcttttactcgattcactaggaaatataaagatttccgattttggtttgagtgcatttcctgagcagggggtgagtatccttcggacaacttgtgggactccaaactatgtggctcctgaggtactcagtcataagggttacaacggtgctgtggcagatgtttggtcctgtggggttatcctctatgtcctactggctggatatcttccttttgatgagcttgatctaaccaccttatatagtaagattgagagagcagagttttcatgccctccttggtttccagtgggagcaaaaatgttgatacatagaattttggacccaaatcctgaaactcgtataacaattgagcagataagaaatgatgaatggtttcagaggagttatgttcctgtcagtcttcttgagtatgaagatgtaaaacttgatgatgtaaatgctgcttttgacgatgctgaggaaccgagggctgatcaacaatgtgacaacgatgacatgggtcctctaatgcttaatgcatttgacttgataattttgtctcaaggcttaaatcttgcaacaatctttgatcgtgggcaggactctgtgaagtaccaaacccgttttatctctcaaaaaccagcaaaggtggttttatcaagtatggaagttgtggcacaatcaatgggatttaagacgcatattcgcaactacaagatgagggtggagggtgtttcagcaaataaaacatcctatttctctgttatcctggaaatttttgaagtggctcctacattttatatggtggacattcagaaagcagctggagatactggtgaatacctcaagttttacaagaacttttgtagcaatcttgaggatataatctggaaaccgccccatgaagcaagcaaatcaaggatctccaagaccaaaagcaaaagacgatagtttcatcattcgtgataccttctgatttgattgaaaagaaaagagagaaaaaaaaaagtaatatggaacacatgcttttaatttaaagagggtttgacatatagacgcatgtcccaccaaatcgaggtataaatacggtttgccctggcttttttttttaacagcaatactgttttttccacttttaattctccaaataccacacttgaaacttgaaagattgtgtcccaaaatttactagtaattttttagaccccaggaaatcgatttctcccgttc

SEQ ID NO: 29662 - DNA, 411 bp, Glycine max
  Clone ID: PAT_MRT3847_126788C.1
tcatagcgtccgcccacgcatccggagagatgacttattgtttgagagcgcgggatctcgtagactgacactcctggtcattgtgtgcgtgcgcatcaaacggcatccagatgcagccatggtcactgcgagaactgtgaaggacgcgtcctgcggatgagcatgaccagctgacgcttgatacctgatgcgatctgggctgatggaagcaccagagaggactgataatgtgaaaactgcaggaagcaaggagctggatccgtagtgatccgggctggtactatgtcaaacacagctagcatgtgaagaaagatcaactagagaggcggactaggtgttgaggcctggcagaggaattatggcgggagcatgaagaatgggcgccgcacatcttgtttgtgaagagcagtg

SEQ ID NO: 29663 - DNA, 355 bp, Glycine max
  Clone ID: PAT_MRT3847_126789C.1
ggtaagagtgaggaatataagcgcgtaaaccatacccaatgtatttttaattattaactctgaaaccaatcataatggcttacctgtaataaggtcgtagaagtcttgaggcagggagctgatcacagcacacatgccgctgtcgcgtccatgcttaaatacatcctctgcattacttcaagcatgcttttcagtgaaggcctttcatatagcgtcgatgaccagactcttacggatgcaatgtctgcctttgcaaatgcgtctgaatcaagtgctatgacagatacatacctgacactgatcagggctactaagacgtcatgcttcttcgaataatcattttgcatgtcatgga

SEQ ID NO: 29664 - DNA, 268 bp, Glycine max
  Clone ID: PAT_MRT3847_12678C.1
atctcacattctgtgattcgggtaatggtgattagtggaggcgatgatgggcagaagaagcctgctctcgacccggatattggatgctccggaatgacccggatcacgagttcgactgaagttcgggtcgggttgcttgctggggtgctgagttggcctttcagcgagttgtagggtgaggtgaagactcatgttggatatactcagggtcacactccggatccgaattactgactggattgataccggagacactaaccacgttgaa

SEQ ID NO: 29665 - DNA, 454 bp, Glycine max
  unsure (1)..(454): unsure at all n locations
  Clone ID: PAT_MRT3847_126790C.1
gggtgggtgtgggggggtttttctttttttttttttttttttttttttttttttttttttttttttttttttttttttttacaaagaggggcgacttaaaaattttaaggnggatacccccctccaaaagaagtggggaaaaactaggccttattttttaaaaggggggggttttaccctttacccagggggagatggcgcaacttagccttgggagtttgccaaagggaaaaaaagggttgggccgagaccggaacaaaaaatggaaaaatataaccaggcccaaatgggtgggaaaattgggccacaaacccgtttgggggggggttacaaagtggccaaaaaaggagcagaaacaaaaaaacccggggccatttttgggccccccccggttttttcccaggggggagggggaaaatttgccttcagccaaaaagaggcggaagacccttaa

SEQ ID NO: 29666 - DNA, 1932 bp, Glycine max
  Clone ID: PAT_MRT3847_126791C.1
tgctcctcgagaagacgacagaaggggactgtttgtggcacgtgacttagaggattttgtacgctattcctattaaagaaatctcagtcatagatagatccattattcatagttaaacatagtaactttctttcttcttctccttcttgttacatctctttacaacatacttttttaagtgactcgttcgcagaaacatggcttcttcgtttctatccgcagcttcgcacgctgtctcaccctcttgttctctgtccaccacgcacaagggaaagcccatgcttggaggcaacactttgagatttcacaaaggacccaattccttctctagttcaaggtctagaggtcggatctctatggctgttgcagttaatgtatctcggtttgaaggcatacctatggctcctcctgatccaattctcggagtttccgaggcgtttaaggcagacaatagtgatgtcaagctcaatcttggagttggggcatacagaacagaagaactacagccatatgtgcttaatgttgttaagaaggcagagaatcttatgctggagagaggggataacaaagagtatctcccaattgagggtttggcagcatttaataaggcaactgcagagttgttactcggagcagacaacccagcaatcaaacagcaaagagttgccactgtccaaggtctttctggaactggttctctgcgactaggtgcagctctgatagagcgatattttcctggggcaaaagttttgatatcagctcctacctggggtaatcacaagaatattttcaatgatgctagtgtcccatggtctgagtaccgatattatgatcccaagacagttgggttggattttgagggcatgattgaagatataaagtcagctccggaaggatcttttatcttacttcatggatgtgctcataatcctactggtattgatccaacacctgaacagtgggaaaaaatagctgatttaattgaagaaaagaaccacattcccttttttgatgttgcttaccaggggtttgctagtggaagccttgatgaagatgcagcttctgtgagactgtttgtggcacgtggcatcgaggttcttgtagctcaatcttacagtaaaaatctcggtctctatgctgaaaggattggagcaatcaatgtgatttcatcgtcaccagaatctgcagcaagggtaaagagccaactgaaaaggattgcccgaccaatgtactctaatccaccggtacacggggctaggatagttgccgatgttgttggaaacccagttctctttaatgaatggaaagcagagatggaaatgatggctggaaggataaagaatgttagacagcagctatatgatagtattacttcaaaagacaaaagtggaaaggattggtcattcatacttaagcagataggcatgttctcattcactggcttgaacaagaaccagagtgacaacatgacaaacaagtggcacgtatacatgacaaaggatggaaggatttccctggcaggattgtcgttggctaaatgcgaataccttgcggatgctattattgattcatatcataatgtcagctgaaactcaattagatatttttggtgagtgttatacccaatcggagcgattggcatacatgaaaataatttagaataatttatgtatgcattatgtgtgtacatatgtacctcaaagtaccctaggaaattttttaactttgaaacaagttgactcaaagtattgatgcgtaatgagtcaggttctcagacttaaagctagttgaatcgaagtactgatgcatagtgaggatgtttatcatttcatatgggtgagattggataaatcatggtaacaatagtttcgttaaaagtcttaaaaaaaaaaaaaaaaaaaaccccaaaaaaaaaaaaaaaacccaccaaaa

SEQ ID NO: 29667 - DNA, 261 bp, Glycine max
  unsure (1)..(261): unsure at all n locations
  Clone ID: PAT_MRT3847_126792C.1
atttntgtgttgataacaaattttgcacaaattattactaactcatttttataataaaaacattgaaatatatatcaatagtgtgtttggaatagattaatgccaagaacaaaaaanttaatttttcactatgaaagtgaagtnaaaacctagttgcttatatttnttcatgcnttcatcatgatattattagatagacctaattntgtgcggtntctaacacggcaaccactttanatccattttattngaaattgtttt

SEQ ID NO: 29668 - DNA, 787 bp, Glycine max
  Clone ID: PAT_MRT3847_126793C.1
tgcagcttctgtgagactgtttgtggcacgtggcatggaggttcttgtagctcaatcttacagtaaaaatctcggtctctatgccgaaaggattggagcaatcaatgtggtttcatcatcgcccgaatctgcagcaagggtaaaaagccagttgaaaaggattgcccgaccaatgtactctaatcctccagtacacggggctaggatagttgccgatgttgttggaaacccagttctctttaatgaatggaaagcagagatggaaatgatggctggaaggataaagaatgttagacagcagctatatgatagtattacttcaaaagacaaaagtggaaaggattggtcattcatacttaagcagataggcatgttttcattcacgggcttgaacacgaaccagagtgacaacatgacaaacaagtggcacgtatacatgacaaaggatggaaggatttccctggcaggattgtcattggctaaatgtgaataccttgcagatgctattattgactcatatcataatgtcagctgaaactctatcagatatttttggtgagtattataccaatcgagagcgattggcatacatgaaaatatatgtacctcaaagtcccttaggaaattttgtaactttgaaacaaattgactcaaagtattgatgcataatgagtcagcttctcagacttaaagctagttgaatcaaagtactgatgcatagtgaggatgttcatcatttcatatgggtgagattgaataaatcatggttaacaatagtttcgttagt

SEQ ID NO: 29669 - DNA, 705 bp, Glycine max
  Clone ID: PAT_MRT3847_126794C.1
cggacgcgagaagacgacagaaggggactcggccttagtctcatcgtattctctacgctattccgattaatcaatcatagatagatccattattcatagttaaacataataactgttgtgttacatctcgtgaattgttacaactgcttaaccattttctattgcagatggcttcgtcggttctctccgcagcttcgcactctgtctcaccctcatgttctctgtccaccacgcacaagggaaagcccatgattagagacaacactttgggattccacagaggacccaattccttctctagttcaaggtctagaggtcggatctctatggctgttgcagttaacgtttctcggtttgaaggcatacctatggcgcctcctgatccaattctaggagtttctgaggcatttaaggtggacaatagtgatgtcaagctcaatcttggagttggggcatacagaacagaagaactacagccatatgtgcttaatgttgttaagaaggcagagaatcttatgctggagagaggggataacaaagagtatctcccaattgagggttcggctgcatttaataaaggcactgcagagttgttacttggagcagaacacccagcaatcaaacagcaaagagttgccactgtccaaggtctttctggaactggttctctgcgactaggtgcagctctgatagaacgatattttc

SEQ ID NO: 29670 - DNA, 363 bp, Glycine max
  Clone ID: PAT_MRT3847_126795C.1
actgagcatgcgtctagctatctcgatcgaactgtccaaggtcctgtcaccgtctaaggcagcaattttacagcttaacaaaaacgaggtgttcagggcgcgtattaggttaatgctgacagggcgtctaaggcaccccatgggccgggggaggggatggtgcagcaggccaaagcgataagccgccggcggcgaagctgggcagcagggtagggcagttgtatgcgatacggcgggagaaagggactggggggggggggtcaaaaaaaaagtagtggggggtatggtgaggaggtggtgggtggtgtggtggggaggtgtgagggagggggaagaaaaaaaaccccccctttttggtgaggg

SEQ ID NO: 29671 - DNA, 1427 bp, Glycine max
  Clone ID: PAT_MRT3847_126796C.1
cggacgcgagacgtccgcagaaagggactactacgtgatctcatcgtattctctacgctattcctattaaatgaatcatagtcatagatagatccattattcatagtttaaattaggaaccttttgtgttctgttctgttctgttacatctcgtgaatcgtttacaacttcttaaccgttttctgttgcagatggcttcttcgtttctatccgcagcttcgcacgctgtctcaccctcttgttctctgtccaccacgcacaagggaaagcccatgcttggaggcaacactttgagatttcacaaaggacccaattccttctctagttcaaggtctagaggtcggatctctatggctgttgcagttaatgtatctcggtttgaaggcatacctatggctcctcctgatccaattctcggagtttccgaggcgtttaaggcagacaatagtgatgtcaagctcaatcttggagttggggcatacagaacagaagaactacagccatatgtgcttaatgttgttaagaaggcagagaatcttatgctggagagaggggataacaaagagtatctcccaattgagggtttggcagcatttaataaggcaactgcagagttgttactctgagcagacaacccagcaatcaaacagcaaagagtaagtagttgatacagaaaatatagatgatttggaatttgaagcacattgcaatttattggttatgatttattttttttcatttcttacttacattatttagttgcatccaggttgccactgtccaaggtctttctggaactggttctctgcgactaggtgcagctctgatagagcgatattttcctggggcaaaagttttgatatcagctcctacctggggtatgcattttactgcttccctgattaacttggtcgtgatatttgttagggagttcaaacatccctggtaacattattgtcttgtaggtaatcacaagaatattttcaatgatgctagtgtcccatggtctgagtaccgatattatgatcccaagacagttgggttggattttgagggcatgattgaagatataaaggttaggttgtgatctagaatttagaaagtgaaatggtctatgaacagttttgtagttaactgctttgtttgacctagaaatcaatatacacgaatgttctatttgaatttttttcctcttgatctttcattgtaggtcccaacacttgtcatcttttctcaaaatgcatgtttccaaaaatatctttcacttgaaatacaactgatgtaattgttatgattaacatgccgttgcggtgtaatggtatttgatgcttaattgatgtagtacttaacgtcttgttatatgaaggcctacatatagaatcataaattttcatttaaatttaaagatttcttcaatctaatataaa

SEQ ID NO: 29672 - DNA, 815 bp, Glycine max
  Clone ID: PAT_MRT3847_126797C.1
aattcggctcgagatcttcttcgatgaaatgagattcgtaattacgaagaatcccattaatcttctcaactctcagggttcgcttgttcttttccgtgttccttctgttgctcgcaattttcttcacccttcgagctcgaaatggactccacgtagctccaatcccctcaggttttcgttttcttcattgagagtttcagtttcgtgcgcttcttcgtcctcgactgtgtacggaggttgggactatctcggcagttcagacgcgcccggtgaatccaacgcgctgcgcaattttctggtttctatcggaatcgatgataggaagaacgttttcgtgttcctcttgggcctcgtttgtgcgttggcgatttctagggttaaggtttcttctatcgtcattcttcctgcttccgcgttggttttcgccgttggtttctcggtagggtttttccgaactggaacgttcggggaggtgagggccggtgggagtaagaggagggaaaaggaagagaattcgaattcgaagctgtcttcggagaaattgaggagtttggtggaattttttgacgagcttgatgttgtggtcgatagcttgaagagtgatgtacaaagtgctattagggataataagattcgagtgggtgatttttatggttatgttgaagtcaccgataagattaaaatttcagctaagaatgctaggaatgttgttagggctttgattgataatgaggacaaaccatagaatggtagaagaaagaaaacagttggagaaagtgggcaccagattttacagtcttttagcagtttgtttg

SEQ ID NO: 29673 - DNA, 683 bp, Glycine max
  Clone ID: PAT_MRT3847_126798C.1
ccacgcgtccgcgataaacctagaaaaattctacccggggttgttgggagagcaaccattggatctctgatcatccttgctcgtgcagtcactttagcattaagtcacttacattcacagcagggatttcctgaagctcttcttgttcaactcctaaaagtaatgttgcattcagatgtggaggctcgcgtcggagcacaccttatattttccattcttctttttccaagttccttccatacgaatgagatttcctctctgcggtccagatatctaggtcaacacaacaaaaggcattctcatgctccatctgtgtctgcatctgcttcaattacagctttacttgaaaagctccgcagaaacagaaacaccaaggtagaaaatcatgggaatattgtcatgatcaagaaagggatattgtggcagaagactggaagcagggctgtggcttaaagaattctcctaacttttacaaactcacttctatcattgataaggctacaggatcaccaagtttgactgacacagaaccatatgttatgaaactaactgaagatcaaatggcccagctgctttctgccttttggattcaagccaatcttcctgataatttaccttcaaatattgaagctatagctcattcattcatattgacactaattggcttacgcataaagaacctg

SEQ ID NO: 29674 - DNA, 346 bp, Glycine max
  Clone ID: PAT_MRT3847_126799C.1
aagacatttttcatgcttgctgatcaaattatcagcgtggtttttttcattcattcaaaatcgcttcttcatcgctatatcaaaccggataattttctaatggtattaggaaggcttgcaaaccagttttatgctattgattttggtttggctaataaatacatatatagttcaacacatcaacacattccttacagtgaaaataataattttactgaaacttcaaggtatgccatcatgaacactcaccttgtcattgaacaaagcataatagatgatcttgattctcttgattatgttttgacgtacttcttgagaggaattctctcttggctgtttcttaaat

SEQ ID NO: 29675 - DNA, 259 bp, Glycine max
  Clone ID: PAT_MRT3847_12679C.1
caagtatacccagctctacatcaatggagatatagatgaatccatatcaggaaggacatatgtcactatagaccccagaaaagaagaagcaagtgcaagagagagagagggagagagagaaggcataaaaatagctggtcaagcaacacgcaaggcatgcgactcgggtccatggcctcgctcgccaggctctgagagggcaagaattatgacgaaatgtgcggacctagatgatgaaaatatagaagaactagcaggc

SEQ ID NO: 29676 - DNA, 538 bp, Glycine max
  Clone ID: PAT_MRT3847_1267C.1
agcattatgttttttgtaaattttgcttacgtaaacaaaaaagttttattttagatcagctactttgcttaaaaaagcaaggtggcattattatatcatgaaccgcttacacgatggataggttgagagtattattttgaaggatagaagaagctattgtggaaaaaattattatattaaactatgaattttaaacggtcactttatttatatgattaatgtaaaattaaaatctgatagtacaagatatttgaaccatttgtctaatttttaaattttaataccgaaagatcttttaaccattattactaatccatgatattataaatgaaaattatttcattagatgatcaacttttatagaacaattttacccttaaaccacttgcctaaagctaaatgttggattataaacaacacgcattaactttccatgacttaaatacaaaaagaaattctaatgccgtaggtttaagataactctattaaacttacgactgttgtattattacataaaaaattgagagaagctctttcc

SEQ ID NO: 29677 - DNA, 295 bp, Glycine max
  Clone ID: PAT_MRT3847_126800C.1
ggctgaccttcgggttccttccgctaattccttttttttgcacctccttttcccaagagggaccttaaaatcgacccgtcctggtttggttcgaggacttcgccataaaatcctttaattctttctttttaaactccttcaaatctgggggtttcaacttcaaattcaacctggaaaccaaccccaaaatggccttcaaaaaatccggccagaccctttccaacgccttaatttttttttccccaacaatggaccgtttgggaggtcccatggccccggttgcaattttggattt

SEQ ID NO: 29678 - DNA, 409 bp, Glycine max
  unsure (1)..(409): unsure at all n locations
  Clone ID: PAT_MRT3847_126801C.1
ctgatcttcaagggaaagcagagaataagcaagccttgagaaggaacctaggtctttcatctacagatgttaggaggccattggttggctgtattacaagactggttccacaaaaaggtgttcatcttattagacatgcaatatatctaacattggagttgggaggacaatttgttctacttggttcaagtccagtgccacacatncagaatgaatttgagggcattgccaaccactttcagaatcatgatcacataaggttgatattgaagtatgatgaatctctctcccatgtcatttatgctgcgtctgacatgttcatcattccatcaatctttgaaccttgtggcctaacacagatgatatcaatgagatatggtgccatacctattgtccgaaaaactggtgg

SEQ ID NO: 29679 - DNA, 645 bp, Glycine max
  Clone ID: PAT_MRT3847_126802C.1
ctcttctttttttttttttttttttttttttcatgaaaaacatgtttgtattgtattaaaccttgttgaacgtgaattcaatgtgagacaaggattcaagttcaatgtgcctcgaaaagtgtattccggctgaaacaagcgcaacataaatagttaagtaaatttctaacctactccttcaccttcacacaattttcaatgatgtagggctaacctgaaattgcatatctgaagcaaaatactgtctctgttcaacaaaaattcaataagtagacaccacaaagaatcaggatcgttggtagcatgaataaagactatgttatctggttgaatccccatgttccttccctaatgccctgaagggtctgtagcagctgtttcatggatggcctgaattccttgggacactgcacacactgaaatgctaactctgctactgctgttatcatttccattatgtttttatcagaaccaaaccgaaaacttggatccactacctcgtttaattgattgtttaagatttttctctttgcatactgtgcgagagtatcatcatctgtgccttccaatgaacttgggcgaatggatgatatgagttcgaacaagaccaccccaaaactatagacatcactttttgtcactaac

SEQ ID NO: 29680 - DNA, 1629 bp, Glycine max
  Clone ID: PAT_MRT3847_126803C.1
caggattgcacgtgattcatattgcagcagagatggcaccagtagctaaggttggtggtttgggggatgttgtcagtggtctaggtaaagcactgcaaaagaaaggacaccttgttgaaattgtgcttcccaaatatgattgtatgcaatatgaccgtgtctgtgacttacgggctttggatgtgctgatagattcatactttgatcgtcaattatacaaaaataaaatctgggaattcgctcgagcaggccttcctgtttatttcattgagccccatcatcctgataagttcttctggagaggaaaattttatggcgagcatgatgatttcagacgattttcattttttagccgtgcagctcttgagtttcttcttcaagctggcaagaagccagacatcattcattgccatgattggcagacagcattcattgctcctctgtactgggatatatatgccccaaaaggattaaattcagctaggatttgctttacatgccacaactttgagtatcaaggaactgcggcagcttcagagttagaatcatgtggtcttgaaagccaccatctaaacagaccagacagaatgcaggacaactcagcgcatgatagagttaattctgtcaagggtggaattgttttctcaaacattgtgacaacagtttcacctacttacgcccaagaagtgagaacttcagagggagggcatggtctccattcaacactctctgcccactccaaaaagttcattggtattcttaatggtattgatactgatgcatggaatcctgccaccgatgcatttcttccagtccagtacaatgcaactgatcttcaagggaaagcagagaataagcaagccttgagaaggaacctaggtctttcatctacagatgttaggaggccattggtaattatttgatagaataaatcatggttttctcttctctctctctcttgaaattgaaaccatttccttgagaaggaacccaggtctttcattagttcatcttttaattttccttatttttcggaatgataagtctagggctaactgcacttgtgtgctttatgtaacatttgaagtaaatataccaagactccttcaaatagctcaatcttgtgaaatctatccataaaagttattcagtgatttacagtcgagaggaatggttaacttgtctacagtagaaatatttctgtacctgcctttattctttatggtgtcattttatgcctgctttataggtatctttcagcatatagagaatgaatgctctttatcttgatatttcaaattatctgttactcatttaattattataaatcatgacttattgttagaattgaagatgctttattgattcaatttttctattcttttcgctaataggttggctgtataacaagactggttccacaaaaaggtgttcatcttattagacatgcaatatatctaacattggagttgggaggacaatttgttctacttggttcaagtccagtgccacacattcaggttgtattttctttccttgtggctgaaatttataggtattctactgttttaagaaaggagacagatcaaacaatgccaactcatgtgcaatataggtggaatttattct

SEQ ID NO: 29681 - DNA, 438 bp, Glycine max
  Clone ID: PAT_MRT3847_126804C.1
ggcccacaaaagcggggggggggaatttgtcctaccttccccccccattttttgtaaaaaaagctttcaaggccccgaaccactttttaaaactcattggggtgggagcaccctcaacagccaggaaacaggcaaactcaaattaaaactttaattgaaaacataaaggaccctttttataaaattttggggggaaaaaaattaaaattttccaaatccttgaaggtggtgggaacccacaataaaccattgggaaaactaaattttaagttttttttctaaaaggcaagtaaaagggaaaatggggggaaaaaaaattgaatttaaaaaacttttttaacaacccctgggtttggccaaaaaaataaatactccacagcccaaataaaataaccggggggtggaagccacgttttcttgattcacatttttttaaac

SEQ ID NO: 29682 - DNA, 157 bp, Glycine max
  Clone ID: PAT_MRT3847_126805C.1
ccgtgtacgaccccaagcaggtgagcatctgcttcctggtcggggtgaagtacgaggagcagaacatggaggtggtgccgccggacgaccagtgaaggagtcgtctcgtggagtgtcctagggcacggcacggcaggccaggccatgatgtggtggg

SEQ ID NO: 29683 - DNA, 245 bp, Glycine max
  Clone ID: PAT_MRT3847_126806C.1
aatgttcgcgcattaacctcttctatgcttctcattaactcgtgcgatgcacacgggctcactcttgccattttcctttacttagccttacttgcttacgttgacgcctaaactttgttggctacattcaactctgaacacagagtccggagaatacatcttaatgctgctcaaatcattcactgacgaggattgtggacttttggctacggttcgatatggaaaaggtcatatagcaaccgttt

SEQ ID NO: 29684 - DNA, 279 bp, Glycine max
  Clone ID: PAT_MRT3847_126807C.1
cgtccgtaaagctgcaaaaagaggggagcagggggcacatgtgaatttgtcgatcgcaataactagaatcagtgctgtcgcttatcagcgtccctgatttcttcgttgctagacttttggtagcatggcattgccatgcatacgatatgttccctctccgaatgaacactggctatggtgcccgtactccggaggtgaaatgcgcaagttggttgcatgctgtggaggcacacaacatctttggctttgacaccattcctgaagagtgccttgaatcaa

SEQ ID NO: 29685 - DNA, 328 bp, Glycine max
  Clone ID: PAT_MRT3847_126808C.1
ggcttctactcaatgactcttgcaccctcatgcgctgacctcgtctgtcagatctccatcacaacgtatgctggatagcgccatgcctaacttgctggtatgctaggcacagaagccataggatattgatgtcagcccaatgtttcgctcgttagctataaccgtgcgcattggtgctggtgctgatggctccaaaatccatcctgctgatgcatcttatagggaagctgccaatgtgttttgaaagctaaagacaaacactgattatttgccattgaatggagatggatttatacaatcgatttcctcaaagtggtactctcccaat

SEQ ID NO: 29686 - DNA, 810 bp, Glycine max
  Clone ID: PAT_MRT3847_126809C.1
ctgggacttcaggctatacaaatccaatatggcattcctcacaagagcacatggtggcggcaatttttgacaagtgaagtttcaagaatcaattatttaggatatagactttatcgtgctctgcctttcctttatgaattaagatgtgttcttgactggtcatgcacaactacgtccctcaccatgtatgactggctaaagctggaggacataaatgcaagtttgtaccttgtcaaatgtgattcagtcttaaatagagttacacacaaacagggggagaagcaaacaaaaatgaccaaatgctgcaatgggatatgccttttctttgtattaatctgtgttatatgggctccaatgttgatgtatagcagcggtaacccgacaaacattgcaaaccccataaaagatgctagctatcaggttgatatcaagacagtaagtggaaggttgaatttgtatcaaactactctatgtgaaagactccggtgggatttactaaattcaaatgccaatcccgatccttatggctatttggatgcatataataagaatgatatccagttgatatgctgtcaagctgatgctagtacattgtggcttgttccacttgttgttcggaccagagtgattcattcccttgaatggaatactgacatggaaattttttttacctggatattctcaagggacaggccaaaatggaaagaagttgtgaaatatgataaagctggtgatcctaaatatcttccaacacaagctgatgttcagagagtcttaatggctttatgaacaagcttaggatttataatg

SEQ ID NO: 29687 - DNA, 347 bp, Glycine max
  Clone ID: PAT_MRT3847_12680C.1
ccccttccgtagcctcggaatccggtccatggtctgaatctagcgatgcacatccaacattcgttagttataagtatgacttcctagtcaaattttatccactagaacctgacctgtcccaccataactgctaatgtaggcacctgcaccctatcttgcgaatccccttgaccttatgtagtacagatatatattgatgcactcaactccatagcctattaagctctatccatccaaggacctactgaattcaacttcttactatactctgtcagcttccgcaatgactagagcatactccttaatacttcattcaaatacactaccaactattaacctagccatat

SEQ ID NO: 29688 - DNA, 596 bp, Glycine max
  Clone ID: PAT_MRT3847_126810C.1
gttagtatctttctaaattaatatttatttaatttccattatacatgctaataaggtgagtactttaataatagagaaagaaagatccttctagctaatataataataataattatagaagtaaagtaaagttggagaaggagagttgtagttgtaaaagatttctagtgaagttttggtaatagaaagttaaaaagtaagtaatggatcagattattggtaatcagccaagtcgataccccaaaatggtttaaataatttaataaaccattttgggtaagggaaagggaaattatttctcaaaaaaaaaccccccctttttttttttttttacgaaaaaaaaaactcttaccaaaaaaaaatcctcgggcggggggaaaattgaagggaaaattatttattttttttaaaaaaaaattcccacaaaaaaaagtggcgccgccatcgcccaattcttttttttgtatataaaatgagggggggggcccaccccaaagaaaaaaatctgttaagaaagggtgggtaaaaaaattattttattaaaagggggggaaatttcttatacaaattttttttttaatgggccccccacaaaa

SEQ ID NO: 29689 - DNA, 262 bp, Glycine max
  Clone ID: PAT_MRT3847_126811C.1
cgatccttctagtgttaaattctgatgaagggccaatgccaacgacatgatccgacttgaagaaggcggtagagtgtggtcagtagtagaagagggtgagaaaaaatagataggtcttgacgctcgcccagaatatgttgtgaactctatttttgaactcttcattgaactacttgcaacggaggaacactgtgacttaggcgttgtatatgcactacatataaaagtgcatgcagcgcatgactcccgaaaatacggcgga

SEQ ID NO: 29690 - DNA, 1038 bp, Glycine max
  Clone ID: PAT_MRT3847_126812C.1
ggctcgttgctttgacatggtccactacccagtacctaaacaatggataacaaaaaatatattttcatgtaaagaaacatttaaaacattacagatatatctgcattttaaagtctaataaatcattgtttaaccaataaactgaaaaatatgaagttcaaaataaaacaagattcaactcataaatcaaaattacaaagaagaacaactgtacaagtttaagtggttcaacccctcaaaagaaaacatcaataaagatgacacctgtcacattacataagctaatctaatgattatctcattcatcattcccaagatcaatgtcacttaattcatccttgtcctctggtatcaaaagcattaccatagatacatttttccaaatgccttgaatcaccaactctatctttcaacattcattcttgtttcatagatgttccttcttcttcctagcaaatgactcagatgttaccttttatgtattagccccttgggtacatagttacctatttcaaaacattgttgactatttgcgtcttaccatcttcagctttttctttattttccagcaatttcagaaagatctatttctaacttcatcaggaacagtactagcactcacattctcttttgttccagcaaagtgatgcttcatccttgtaacaccaccccaacaattatgcaacaaccctttcatttttctgaaagcctatgtgtaagaacagaacacttttagagtggttccaaatgacctcaatgtcctttttctttgttctttcccattttaccccactgaaaaaaaatcatagcaatgacaaggagtaggaacctattaaaaaaatggaagaaagggacaaggggggaccaacaacctgtgcagcactgtgggaggaaaaacaaagcagaaaaagcactatgggtatggggggaacatgtccaaacatccaactggaaatggcagagttggggaccatcttttggaatcatgggagggaaagattcttcagtttccctccaatcttataaaataattacaaa

SEQ ID NO: 29691 - DNA, 1254 bp, Glycine max
  unsure (1)..(1254): unsure at all n locations
  Clone ID: PAT_MRT3847_126813C.1
aggcaagtcggtattatttgtattatgaataattaaacatttatgacaagtcttacataagtaaaatataaatattaaattgacgcatctatatttcaagtttcaagtaaacaaaatacgcaaacaaaaatcacattactcattctaaagagaacctccgccacattttacaagtccaaaagtgcataatctcaacgtgaaaattctatggctgattggcaaagaatagatattagcctgaagtccttaatcagcatattacttgactctgtaagccttgacccttttcaatagctctttagcattgctgtccttcctaaagtgttcccttacaggctgcatagtccaagaaacaataatcgagcttgtgccacatactagaaatgaagaaataaaaaggaaaaactccagagttcacataatatgctataacaccactagtcttgctttgtacaagttcacaatgattagtaagaagatgctaccagcaccagtaggatataatgtccagagcagccaaaacatgacggtcacaggagtctacttctcaattcctctcccagcttgacaaaactaaattgagacatgattatgcctaagctaataattgaagcaaatgtacgaagccacttgagtaccaataaaaacgttaaggtttgtaagatacatactccaatccattagccttctttccagttttcttcccctctctctggtcaccaggctctaacataaaacagaagcctttgtgaaaaaaaagagaagagaatgctccctccacaacagcagtcacgggttggaggactacaaacctctctatctctagtttcttcagatccccgcctttctcccgaggagcctagatcaaactctgacaatctccgtgaatctcctactgaaagtgccagttctcgagaaacttggcctactgctgatgcaattgctgcaaagaagatggaaaatggaaaagcagaaatggattgccctgatcagtcagttattcgctgtgtttctagtgcagacaaaattagtcttcaggacattgcaagagaacgagttgatataatatgtgagaaaatgcatcatctacctgacgaatttcttgaagagctgaaaaatggacttcgagttatccttgagggagggaatggctcacagcatagagaggaatttttcattttgcataagcttgttcagagtagatctgatttaacagcccagacattgantagagcacatcgtgtacagctagaa

SEQ ID NO: 29692 - DNA, 440 bp, Glycine max
  unsure (1)..(440): unsure at all n locations
  Clone ID: PAT_MRT3847_126814C.1
tattctgttcgagagcaaatcagagaacgagcttgcagtgagcaattgaagcatttgaaagaagctcgtaatgaatatagagaagaggttattgattgtgttaggcattgtgcttggtaccgcatctctctattttctcgatggaagcagagaggaatgtatgcaatgtgcatgtgggttgtccagttgctactggttcttagcaatatggattcagtgtttatctacatccctgaatattatctggaagctttggttgattgctttcatgtgttgcggaaaagtgatcctccctttgttccatccacaattttcttcaaagaggacttcttcattgtcacctttgtagttacccatttcaatgatccaaagaaatcaagtgcagatctanggatcntctcttcagtctatatcngtnctggtgcaataccaggagtatt

SEQ ID NO: 29693 - DNA, 357 bp, Glycine max
  Clone ID: PAT_MRT3847_126815C.1
aggatttggagttggaacaggccaattcaaaggtctcatgtgtcaattcgaaagatggtggagatgctgaataattaaagtttagaaaaagattaatgtatttatgttcacgtacacggtggctaatttgctttgtttgttggactctctgaatgttcaacccccgaatctcaactctcaactagtaacatatgtaattgtgagcacagagtatttctttttttgtttcaaaaagtgcttattcgtttgacattactgagggatatttgacgttctaagtaatagaattgtcttgaagttattatatttttttagatattattagtatggaatattctcaactttaaaaaaaaaaaa

SEQ ID NO: 29694 - DNA, 423 bp, Glycine max
  unsure (1)..(423): unsure at all n locations
  Clone ID: PAT_MRT3847_126816C.1
acgagcgacggctactatataatcatggccaatatgtatagcttcattgggaggtgggaagaagcagaaaatgtgagaaggacgatgaaagagaggtgttcaatgggaaagaaagctggttggagtctgctctgaactaaaacttcccttccctcaagcctgagctttaaaagaaagaaaaggttaaagaaaaccattggaagtttaccaagtgccaataggcttaatcttctcgagtttgctcctttcataagccattcacgagcttgtcattgagcaattgggctaaagaaccagacatgttattatcatgaaatacttttcacattgttctgacaccccacanaaataaccctcttgatggatgttttaattctgtaactcacaagtattcatgcagcggctagaagagaggcacgccag

SEQ ID NO: 29695 - DNA, 312 bp, Glycine max
  Clone ID: PAT_MRT3847_126817C.1
aaaatggggcaaataactgggtcaattttattaaaaagtcttccccccaatcgttaatccatacccaattttgtagcggtttaacaaacccccttcaatttgaaatttttagttcttttcattttacaaacttgggcatccctttttggcaaatctaattatttccacagtttaggtcctggggaaactgataagccatgaattatgcctgattttgatggatttggatgctaaaattcaactggtccatgcctcacgaaattgttagccggaattttgggcctgtaaattgcccaaactacctgatcagcc

SEQ ID NO: 29696 - DNA, 349 bp, Glycine max
  Clone ID: PAT_MRT3847_126818C.1
aaaaagggccaatttggcctaattttttcgggatagaaaaaaaaccccccccccctggcccacacccaaggaccatttacaacccggaaagggcccagggggcctaaaaaaaaaacaaaattacaataattgccccccgctcaatgggcgcccaaaaacccgtatgcccaaaaaaaaagcttttttgggtttccgggggaaaaacaaaaacccactctttgggtcttccacccctaaaaagtttttgttaacccccggccccccggctgcggggccccaaaaaggggggcccaaccagtagggactaaccccccaacgggctcgtgggggtcccccaatccccaacccc

SEQ ID NO: 29697 - DNA, 195 bp, Glycine max
  Clone ID: PAT_MRT3847_126819C.1
catctggcagcagacgaccgagtgggatatatggcagcaggaggaccagttggcgtgctctatgatcgattagccaactgctaccactgtgaactgttcccgagctggtatcactgttaactgtactggcgtcaacatcattgctggattcactgacctgaagaccatcgctggctttacctccattgatagcaa

SEQ ID NO: 29698 - DNA, 671 bp, Glycine max
  unsure (1)..(671): unsure at all n locations
  Clone ID: PAT_MRT3847_12681C.1
aaaattataattagtgacggattggtgatattacacacacattaatatactgcagactgcactacacatttaatgtaagattgattttgatacatattttaattatgttgattcattgaagggttttaatgtcttactgccttgatatcttttttccaaatccactctatgttttgtcctaagcaaaagacacgattcatcccaactgaaatggcggcaatagcagcagcagcatcttctcatctaatgtttgttcttcgttcacaaccattatcttcttctttcatttcttttctcaaacctcttcttctttctatcccccaacgctgtttctacgccccttcgacatatccatgttccaccgcttcgaaaacctgtcttcgctacttcctcttgcggtttctcaagatggcgaagaaacagagattgcggatgatgaattggaaactcaaagaagtgattttgaaaacctgtcttcgctactttcattttaattggtttactgtttctcaatagtagctttcttgtgttaaacatgtgtaactgccattttacatgcttttttatgttgtgatttggggactggttggacttttggaccangttgatcgcagtagtagnttgggggtagctcttgcttntgtatgttagtatttgctgattaatgatta

SEQ ID NO: 29699 - DNA, 359 bp, Glycine max
  Clone ID: PAT_MRT3847_126820C.1
attttgttggagatctcgcctttgaaggttctaagatggctcatccctacatgaaatgtacaggctgtttcttcataacattaggaaatatggctgatgacaccatcaattctgaggcttttccccacaagctggtgcaagttggcgagattcatgaaaaagttgtattggaattttcacaagaggaatttcttacagatcggtcaactcatgtgcgtcctacaacaactctcgtggctgatgggcgtacatatttgtatgctaaggtgcatgatagttcagtgtctacaataccaggtgattatgtgattggtgttaagttgacaaccatacacactatgcgtgcatatgggctcaat

SEQ ID NO: 29700 - DNA, 301 bp, Glycine max
  Clone ID: PAT_MRT3847_126821C.1
gccagaactttccctcgaaggaaagcacaacactctcaacaccagtgccttgccttacgtcaacaacgttcctcaccatgagaacattattggatgcgcgtcgagtgctgatgtataggatcgctaccgtcatcttcgccgctataacgctatctacatatgtggtactgatgagtatggaactggcactgatactaaagtcctggtagagaactgctctcccgaagagatttgtgacaaatatgatgctattcttaaagaagtgaacaattggttcaacgtcagttcgtgtgaatttgga

SEQ ID NO: 29701 - DNA, 422 bp, Glycine max
  Clone ID: PAT_MRT3847_126822C.1
aatgtagccaaatgaattttttccctttcttttcgctaccgtctgtacaacttttaaataggggcgcaaacattagcatagaaaagtccaatggcgggtggtaatcgatccgattgacaagactccaaacatacaacacctccaatcaatggaagaaactttaagatgccactagagaagaaaaaaagatgactaacccaattcactatcaaaagtttggtaatccccacctctctaagttccaagaccagctgtttgtgctgtgtaccagctcatctactccaggagctttggtaaaatatatgcaaaaaaatcattaagcatcagccacagccacaggtgacagaaaaaaatagctccaaggttgtctaggactccttttgggtgctttccttggcagtggatcgggctgcctggaactg

SEQ ID NO: 29702 - DNA, 2055 bp, Glycine max
  Clone ID: PAT_MRT3847_126823C.1
cggctcgagcgggacttcttcttcaaaaacacacaagcacactacactttgtctctgttctgtgtgtgcgagaaatggcgatggcaatggcgcttcgcaggctttcatcttcaattgacaagcctctgcgccctctcttcaatgccggttccctctactacaagtcgtctttgcctgatgaagctgtttacgacaaggagcgacccggagttacatggccgaagcagttgaatgctccacttgaggtcgtggatcctgagattgctgatattattgagcttgagaaagctaggcaatggaaggggctagaattgataccgtcagagaatttcacctctgtgtctgtgatgcaagcggttggatcggttatgaccaacaaatacagtgaggggtaccctggtgcaagatattatggtggaaatgagtatattgacatggctgaaacactgtgccaaaagcgtgccctagaagcttttagattggatcccgctaaatggggagtgaacgtgcagcctctgtcagggtctcctgcaaatttccacgtttacactgcattgcttaaacctcatgaaagaatcatggcacttgatcttcctcatggtggccatctttctcacggatatcagactgataccaaaaagatatctgcagtctcgatattttttgagacaatgccatatcgattgaatgaaagtacaggatacatcgactatgaccagatggagaaatctgctacactcttcaggccaaaattaattgttgctggagctagcgcttatgcacgtctctatgattatgaacgtgtacgcaaggtttgcgataaacagaaagctatactattggcagatatggcacacatcagtggattggttgcagctggtgtcatcccatcaccttttgattatgctgatgtagttactaccacaactcacaagtcacttcgaggaccacgtggagctatgatattctacagaaaaggggttaaagaaattaacaaacaaggaaaagaggtattgtatgactacgaagacaaaatcaaccaagctgttttccctggactgcaaggtggccctcacaaccacactattactggtttagctgttgcgttgaagcaggccactactcccgaatatagagcatatcaagagcaagttctcagcaacagctttaaatttgcacaggctctgagtgagagaagctatgagcttgtctctggtggaaccgagaatcacctggttttggtgaatctgaagaataagggtattgatggctccagagttgagaaggtgttggaagcagttcatattgcagctaataaaaacactgttcctggagatgtgtctgccatggttcctggtggcatcaggatgggaacccctgctcttacttctagaggatttgttgaggaggattttgtcaaggtagcagagttttttgatgcagcagtgaagatagctgtgaagattaagggagagagcaaaggaacaaagctgaaggacttcttggccacaattgagtcatcttctacctttcaatcggagatagcaaagctccgccttgatgttgaggagtatgcaaaacaatttccaaccattggttttgataaagcaaccatgaagcacaagaattgagaaaagaaaattttccattaggtcatcccatggtcttactggcaagcaattcaacaagatcagttttcctgatccatggtagaggacgacaacatattttaaaaacaatgtcaaaagcctttatatgtaagaatccagaaaatcttgatcgttatgttgaaatgtatagatgcatatgtaataaaggcttcaaataccaaatttcttaatcagatgattgttgaacctatcccctataatggggttacaatcgatcgtaagtggttgtatctgctataaattcaactagcctcctcaattgcatagaatcctgctggatgctgatgtgaattattttacctcaatgatatttcttaaataaaaatttcatttgccttaaaaaaaaaaaactgaattcctttatttatcctaattccccggatcc

SEQ ID NO: 29703 - DNA, 116 bp, Glycine max
  Clone ID: PAT_MRT3847_126824C.1
ataacctgccacaaatctaatcaagaaatacaaatccggaggcagagatttttaacaaacttcctctgtaatatattcttccctgttacagcagatgataatgttagtgaatattg

SEQ ID NO: 29704 - DNA, 753 bp, Glycine max
  unsure (1)..(753): unsure at all n locations
  Clone ID: PAT_MRT3847_126825C.1
cttcttttgataagcctcttcgccctctcttaatgcgggttccctctactacaagtcgtctttgcctgatgaagctgtttacgacaaggagcgacccggagttacagtaagtccattgctatgaacaatttcactttctttctaaaagtttcgttcattcatgatttggtgaagaaaatattgcgcctttgcagtggccgattttgttgaatgcttcacttgaggtcgttgatcctgagattgctgatattattgagcttgagaaagctaggcaatggaaggggctggaactgataccgtcagagaatttcacttctgtgtctgtgatgcaagcagttggatctgtgatgaccaacaaatacagtgaggggtaccctggtgcaagatattatggtggaaatgagtatattgacatggctgaaacactatgccaaaagcgtgccctggaagcgtttagattggatcccgctaaatggggagtgaacgtgcagcctctgtcagggtctcctgcaaatttccatgtctacactgcattgcttaaacctcatgaaagaatcatggcacttgatcttcctcatggtggccatctttctcatggatatcagactgataccaaaaagatatctgctgtctcaatattttttgagacaatgccatatagattgaacgaaagtacgggatacattgactatgaccagatggagaaatcagcaacactcttcaggccaaaattattnggtgctggagctagcg

SEQ ID NO: 29705 - DNA, 541 bp, Glycine max
  Clone ID: PAT_MRT3847_126826C.1
ggatattacatgctcgactgctgctacttgcgaaaaagtgatgatcaaagcaagcccggtatctcaaatttttgtagctttctctctaccacttccgcgatgccatcctcaagggccacaccgatcgcttctgcgtcttgaacgccgacgtctgctgttcattccctctggaacaaatgttgcgtctgttcgaggagaaggacggcgaggctgtcattctcggcacccgcgtggccaacgatgctgcgaccaacttcggctgcatcgtcagcgacacccatagcaagcgtgttctgcactacgtggagaagccagagtctcacatctccaatctgatcaactgcggtgtctacctcttcagcaccgaagccttcttccccagcatcaagtccgccatgaagcgccgcgcagaccgtccacgtctgctctactacccctcctcagacaccctcgactcttcatacgttgcccgttccggacaagacaacgacgacgacggcgagaagaccgggtcatccgtctcgacaggacttctttctga

SEQ ID NO: 29706 - DNA, 252 bp, Glycine max
  unsure (1)..(252): unsure at all n locations
  Clone ID: PAT_MRT3847_126827C.1
cacaaacntccctcttgatttgaaggttgttttgtgcttatagataaaagttctgcnaaatcaagaggggttttcagatcatannnnnnnnnnnnnnnnnntaaacaatggctaagntctttgctgctatgatcttggcactcattgccatttccatgcttcaaacagtggttatggctgctaatgagcnaggaggccacttgtatgacancnagagcaaatntggaagtggggagtgtcnagagataccat

SEQ ID NO: 29707 - DNA, 363 bp, Glycine max
  Clone ID: PAT_MRT3847_126828C.1
atattttggattgcagcatatacctagggggagtgagtatgtgacagtatcatctatagccacttaataccatcatccataagttcacgaacactgcaataatcaattatatcaacacgaacacgagaccttgtatcaaaggtaatgtcaactcaaccgctatgccaaaggatctatccccgcagatgaattcttcactattcctgaatttgccatacatccactttatcaaaggctgatacacatggccgactgatcgaatcttaaagactttgctgcccattaatctgtatcaagtgccaaagccagcgcgcaacataaaattgagctgtttgctcaaggtttctaagaactcaatgactt

SEQ ID NO: 29708 - DNA, 296 bp, Glycine max
  unsure (1)..(296): unsure at all n locations
  Clone ID: PAT_MRT3847_126829C.1
ccgcccccngccccagtccataattgattcccagagcggcctactcactagtcgcccttctccctttttttttttttttacatttaatcaaaggatttcatcatttaagagatcactacatataaagcatcattctgtttcccttaactcaaattataaaacatagcaacattagcccatcaaaggccactttcatattttgcaaaataaccaagcctcattttttcacatatcctttaaatgcgtctcataataaaccactcctaacccaaaacaaaaaaaagccccatttaatc

SEQ ID NO: 29709 - DNA, 229 bp, Glycine max
  Clone ID: PAT_MRT3847_12682C.1
tttgggtttttttaaatgccttatccttttttctgttttaaaaaatacatgtaaatactgtttactaagggaaatagcttggtaaaaaaatccccagaaaaagggccttcaccaaggccagttgcagatttggccaccttgatctggcaaaaaactgcctgggttgctcaaaccggtcagattctgtatgaagacagcaaccagcaagcactgtctataacctgaatgg

SEQ ID NO: 29710 - DNA, 208 bp, Glycine max
  Clone ID: PAT_MRT3847_126830C.1
caaaggcctaataaaataaaaatggcgctaaggttaatataccaaatgttctaccacaaactgagacttaaaccaaatatactcataagccccgaaaactccaactggaaattactaaaaagtctccccaaacaaaatcctagaatcccctccataaaattccgagaatcaaccatccccgcaaaaaaaaacaaaatcgggatcttgc

SEQ ID NO: 29711 - DNA, 382 bp, Glycine max
  Clone ID: PAT_MRT3847_126831C.1
gtctcgagttttttttacaactaaaagagagaaagagaaatttgagatgtaataaatgatgtgatggaaaaaagataaataaaaaaaaatgtatgaatggttgtatacttttatgtcacatctcattaaaactacaagaattttgggtgggaaaatgcgaggtaatgcatgtgttttggttaaatctgagatgtaatcccttaaaaaaaaaattccgagatgtaattggagctttctacgttgattgattgttggatattggattctttggagttaatgtggtgatataatatagttcttttgaaagtggaagttgtgtacaattgaagaacaatagaagttgtggaagtgatccttccaagttccaccaaagaaaaaaaaa

SEQ ID NO: 29712 - DNA, 238 bp, Glycine max
  Clone ID: PAT_MRT3847_126832C.1
cctccctattttggcacccttgccaattgggttcgctgtgtgcttggttcacttgacaaccatccccatcaccggaactggtatcaaccctgctcgtagtcttggcgctgctatcatcttcaacaaagaccttggttggtatgaacactggatcttatgggtgggaccattcatcggtgctactcttgcatcactctaccaccaagtcgtaatcaaggccattcccttcaagtccaag

SEQ ID NO: 29713 - DNA, 496 bp, Glycine max
  Clone ID: PAT_MRT3847_126833C.1
aaaagacaacaatcagaactgatataaatataattatacaaagagtctcaattcactccaaaattctgttatgccccttcactatttcccacacattccttattcatgtttccttcactctctcatcattgcgcagttcacatctccaatacctagctgtcatgactcgtgtacattcaattacactgtcacactacagtttcctccttattccaagcaccatttgtatttctcctcttctaatcacgtatattttcccttggcccaacacttcccaaccttcctctcttatatacaagttaaaggtctatcatcaatcatttggaaaggaaaaaaaaatgatgttttctgagacgtgggaacctatgctcataatcaaacataatggcgattataaatgaatggactaccatatctgttttaaaattctgtgtacatttctcttataccaattaaatacaattcaaataatccctatagacaacccatagaaaac

SEQ ID NO: 29714 - DNA, 261 bp, Glycine max
  Clone ID: PAT_MRT3847_126834C.1
gaaaataaaagacaaacccgctaacggctttgcactgagcgattcacgaaacccttcgatcaaaggttggaatcgaaatgcagaagtcggcattgccactgagcgacgcgaatgcgaacaagaagagggaggaattgcgccgcaaggcaacgttggtgaagcttctgagatggcattttgggtaccccgatttcagggacatgcaattggacgctattcaagctgtgctctcagggaaagattgtctttgtcttatgccaa

SEQ ID NO: 29715 - DNA, 409 bp, Glycine max
  Clone ID: PAT_MRT3847_126835C.1
tttttttgaccactcagagccaaaaacgtaaaaatcgctacacacttcaacacaaggaggaagggccaaaacacggtgcgaggacattgattctactcaaagggatacatacaacaccgatacatgagataaacaggacaacaaaaacaaaagaagctcacaaaagataaacgagacttgggaccatgaaacaccactatatggagcttccaataattttccttttcaaggactaaacggagggaactagctgctagcagctaggactaaaacagaaggaaagaacagacaaaccatgcagggaaccataaaacgaccaacttcaaaagctacagaagcaaggaaacagaatagatggcgctaacagaaaccgacgatagccaacaaggaacaaaagccccaccaccat

SEQ ID NO: 29716 - DNA, 600 bp, Glycine max
  Clone ID: PAT_MRT3847_126836C.1
aattcggctcgagcacatttccaccgcaccgagcacgttgttcagacttgtctctcacaacagagttgagagtgaacactgaacagtgcagtgttgagtgttgagtgttgagtgttgagtttctctctcactctcagcttctaaggttccatcgctattctgaacaatcgaacattgtggattcaatcagctacttgcagcaggttagggtttcgaatctgtttctctcgtagcatgaagaaccatactcagactctccctctcgatttgatagagctaattctcctgaaattgccggtgaaatctgttacgcgtttcaagtgtgtctgtaaatcatggctctctctgatttccgacccccaatttggcttttcccattttgacctagctctcgctgtaccctctcatcgactccttctcagatcaaatgaattctccgttcattccattgatatggatttcggtgcagtgcatttcactctccctcctccatctcccccacttgccgattatgcatctttgtttactcctgcttttcatcaacattggattgattttcatagaaaacattggatgttgggctcatgcagaggcctcgta

SEQ ID NO: 29717 - DNA, 680 bp, Glycine max
  Clone ID: PAT_MRT3847_126837C.1
acaggatgtgcaaaaaaatctgccaatagttgtctcaaccaactggacccaacttcgtgtttttttcctcagaatttgatcaactatgttgagactccactgtttctgctcaatgcagcttatgatgcatggcaggtccaagaaagtttggtcccacattcagcagatccccatggctcttggaatgattgtaaagcaaatcatgcacactgtaactcatctcaaattcagttcctccaagacttcagaaatcaaatgctaaatgatgtgaaaggcttctctgagacatctcaaactgggttattcataaattcttgttttgctcattgccagtctgagagacaagatacatggtttgctgatgactctccactcattaacaacgtgccagttgcaattgctgttggagactggtttttggatcggaaaactgtcaaagctatcgactgtgcttacccctgtgacaatacctgccataatctggtcttcaagtgagtgggagtttattgtcttttcatgtggtaatttgacattttatcaatatgatcattattattgccatttgtgtatttaacattcattaattgtaatggaaataaatatcactcttggctgaggttgcaattatttagatctatctgtttattaataagtcattttaataagatttctttggattg

SEQ ID NO: 29718 - DNA, 175 bp, Glycine max
  Clone ID: PAT_MRT3847_126838C.1
gttaagggggggaaaaacactggttattgtgaccctgccctgatcacaaacctttgacaaagacaggttactggggatgctgaactaccaaccttcttccttgaacactaaagacggatcagaccgaacaagacagcaatttacctccaacacacagaaggaaggggatattcct

SEQ ID NO: 29719 - DNA, 724 bp, Glycine max
  Clone ID: PAT_MRT3847_126839C.1
attcatcataaggttataattctaacattggtttacacatccagaatgttgctgtgattgcagctaatggttttaaatgtaggatgtacaagacctatataaatctgacaagaaaataaattaagacatttatgtacatcaacagaaacccaacagaaatagcctgtttccacaaaaacttaaaatcaaattccttaaacccaccatacaagtagaataaacccaacagtaagaaaacctcataaaaacatatcttcctttaaacttgttgagttgtgttgtctgacagccatcagttgataggcatccaaacacaatgtgtgagaggtgttattgtagatttctattagcattttcccatataacaagaattaaaccagcagtgctgaaataacttgttcatactcttggcaatgcatagaacataattcctcaatattaaagaacaaaattcaatgaggaaaaaattccatacaatgtcaagacattttaataggaatcttataagtatgaagatatacaaacaaggacagttcataaaaatcaactacaacacagtaatggaaactcagaatcaaattttgtttcctaaacaaatcacaagctttaaagagacacttaatcagtccaaatattcagcaacttaacagtgcacaagtggaattcatgctatgacactgaggaacttgacaattgaagaacatgtttttcaatatacttttta

SEQ ID NO: 29720 - DNA, 106 bp, Glycine max
  Clone ID: PAT_MRT3847_12683C.1
gaaagcgtacgctgacgcgatcgcgaacggcaactctcaccccatatcgacagcgtatcggaggcgtaatggataggcgtgttcgcatacgtactcgtacgcgtaa

SEQ ID NO: 29721 - DNA, 441 bp, Glycine max
  Clone ID: PAT_MRT3847_126840C.1
atggcagtgagaagacgacagaagggggagggacaaagggaaaagagacgaagccaacctccccaaaaacacaacacacgcaccaaaagcgaagaagcccaaaacgctgaccaacaacgaaagacccgcacaaaaacccgcagccgaagcggcccccgaagccgcgagagacaaccgccacgacagcgaaccccacgcgataccgctcatctcactaaccaagaatgcaacccaaccggctcacaccacaggagcagcagaatcataagaggcagacggccacctgaaaaaaccccaacataggcagacgaaaccgccctggagaaacagccaagacagaagaaaagatgcgcataaactaactaaaacacaatactgcagaacactagtccaccagaaaaggacccaaaatgagcagaaacccacacaaggagggccaca

SEQ ID NO: 29722 - DNA, 231 bp, Glycine max
  Clone ID: PAT_MRT3847_126841C.1
tccttagctttggattcgggtcgagggatttcttacttcaggacctgctgggttaatttttttgggaaaatttacagggcaaaactgaagctccgaaaaggtttaccctccgcatggatgattcctcaaagatttcaccctttcaaccaaaaggtcttattggctggggaggaaaaaaccgaattttttccgtggaggtgggccaccgacctaaagagattatcaggtaaa

SEQ ID NO: 29723 - DNA, 905 bp, Glycine max
  Clone ID: PAT_MRT3847_126842C.1
ccattctcggaggccaggtgttggagacaagttcaaacgaggttatgaaggctattgaagaaatatcaaggctcgaatcagcatccaaagcaatcaatcttgttccaaaagtcagtttctggttggaggtcgcagtaatataatttcaattgaagttccggaaggatctgcgtctacacatccttgcagtcttatgctgtagacctgaacatgtcagcaattttgtggatgccgagtccttctttggcccggactctcgccttgtctacaagcactttgcaactttatatttcatgttcatatttgatagttctgaaaacgagcttgctatgcttgacttgatacaagtgtttgttgaaacattggacaaatgcttcagaaatgtatgtgagcttgatatcgtgttcaactatagtaagatgcataccatactagatgagatcattctcggaggccaggtgttggagacaagttcaaacgaggttatgaaggctattgaagaaatatcaaggcttgaatcagcatccaatgcaatcaaccttgttccaaaatctgtttctggttggaggtcacgataatataatttcaattgacttccggaaggatctgcatctagacatacaagagggtcaaaagttgaaggagtatctatgttcagggaagtccataggatgtagttgtccaaaaccctaatgcgagtgctcctaattgaaacgacgactgacaccctgaattacagttttgagttaaccatggttgctactggtgatctaatggtgagtttgtatttgtgatcgattcttacccttgttgataaataaaaaatgttgtgtacaattttacttagcactcattgttcctagctgatcccaatttcagttaatctattgattcaatttacttgg

SEQ ID NO: 29724 - DNA, 351 bp, Glycine max
  Clone ID: PAT_MRT3847_126843C.1
cactataaaccgcttttgctgtcatttgatgcccttcaatttcaggggagctaaacacactcatcacggccgctcacaaccccaacaagagttcatccgcagagattaacactgtgacccaaaaagcgtgcgagacagagagaaagtggaatgaagaaacgcaagcggattccgctggaggtgctgaaaaagaagctcattgcggccatatgctccataaggtttgttgctctcttctctgcgcgcgtacacattgtcccttcttctatagatcacaggctcaacgacaagatctccacgactcaggatgcgcaaaactggatgcgggagctcgcgccaccttatttatcc

SEQ ID NO: 29725 - DNA, 263 bp, Glycine max
  Clone ID: PAT_MRT3847_126844C.1
cccacgcgttcgttttatgcaaccacgactacacacgcactgcaggggggagaggcatcaatggccaaggcgaccagcgtgagcatcaaggcccgccagatcttcgacagccggggcaaaacaactggcgaggtggagaggacccaggaccgatggcactgacgccagagctagaggtgccaagtggagcatccacagggacaaacgagggccgggaactgaaagacggaggacctggaaacccgggaaagggccaacaaaag

SEQ ID NO: 29726 - DNA, 964 bp, Glycine max
  Clone ID: PAT_MRT3847_126845C.1
cccacgcgtccgtacggctgcgagaaagacgacagaaggggactcactactattcccacaacacaacattagcgtactctgttttactctctatctctctctctctctgtctcagccaacaacacaacaatcaatgtacgctgcatcaaccatgaaatccatgtacaagcctccattgcccagatctccaattcgccttcgaccctctcatgctgttcattcatcaaactctatcgctcttcaaaccccaccaggttccttgaccaaatctcagaaacctgttatctctccaaacatgcgacccgaataccgcaccatttcgtgcgaattacgggctctgaccaagatggttcgtgatgaattcagcaaagccaattcagagaaagctgcgagcgcaaattcgagtgttctgttcgagagagggagattctatgacgagtattccgctagaaggaacgaaaggctcatgagaaagaaaggagtaactgctgttgatgaaggtaaggctaagcccgttcgctctcttggggttaccatggaatctggaaaaaagagtagtagtgtcagaaaaatgggaactttgaggaaatctatctctgcggcttattcatctggagtgagtgaaacaccaaggtacatgctcagaagcatgactaaggaaaataagaaaccccctcttgctgcaaaatttgacaaatctgttgttgctggagacaagaagatgggaacaagagcaagaaggatctaaacctaatagggttttaattattttttggggagggggtatattgagaactcggtttaatttgatgtttagggttgaatcttgttctcttggtttatagtttgttaattttacttttaaatatcaatggatcgttacagtttgtttgaaatcatctttgtgattcacatatgatagtaaatgcatccattatatgttagcatttattttttctctggc

SEQ ID NO: 29727 - DNA, 589 bp, Glycine max
  Clone ID: PAT_MRT3847_126846C.1
gagagagagagagagagagagagagagagagagagagagagagagagagagagagagagagagagagagagagagagagagagagagagagagagagagcctcgtgccgaattcctgccgccgagaggaaggttgtgcagagaagtcatttggtgagattgtttgcagaagtgggtcttggaacccagttgtttttttttttacccttgtgaaggattattttcctttttcattcattctccaataacagatactgcattatgtcctcttctatattctattcatattgcattttgctacctattggcatttttctaagccgtagaagcagagcattttgctctagtgatgtttacttcttttcttatgtcagctctatatcttttcctcatttccttatggtgatagtgctccatatttctacatcactataattttgaatatacatgcattcatagtttaatctccatggtctcctatgtagtttttagtctacttttggctattatatttcccgtggtttagtgttttcttcgactttcttagactccttgtttattattgttcaccctttacagatgttttatct

SEQ ID NO: 29728 - DNA, 226 bp, Glycine max
  Clone ID: PAT_MRT3847_126847C.1
ggaaagaaaatatagatttatagttccacaaccttgagcccaacatagccgaagttctccaaaagctctgattcttcacaccctatttattcataggatccaatgaaatggagcacgattttctgcgccgtgcttgtacaaacacttgagtttcagttaatcactgtacctggtagcgctggctttaggtgaaaaatcagtactggggatttgacctgtgggcaaa

SEQ ID NO: 29729 - DNA, 477 bp, Glycine max
  Clone ID: PAT_MRT3847_126848C.1
acggctgcgagaagacgacagaagggctaggccaagattattcaaattatgcttattgagagaacaaaatgccatcaaatttttgtagttaaacttaagatgaaactcttatgtcataagttcgtattgaatactacttaatgaagttgtcttgccaacaaaatatgtcttgtggagatacaattactggcaagtaatacaagttatgagagaataaattaattaatttattagggtagttgctgacagaagtactgcatgttttatatttacgtacacaatggacaagaaaatcttcacgtatacagtcaagtaaaccacatatcaaatgaataacatgatgataatttatcctctactatgttattgacaccacaccggttttggtaacttaagccattatatggatgattcaaactgataaattaatcatttctatgtaactccaagctaatttattctttgtaggaggatctt

SEQ ID NO: 29730 - DNA, 429 bp, Glycine max
  Clone ID: PAT_MRT3847_126849C.1
gtgcgcaaggggcgcaagaagaccgggctgccaaccgcagcggtggagaccgcggcgaccgatggtacggcgacaacaccggcgacggcacaacaacagcagcagcgcaactgcaactcggaacgccttcggcaactgatcatcgagaacatccattcaaagccatccgtggccaagcgccaaattcaatccaaagtggccgaggagatcaacggaaagattgacgtaatatgcgcacgacatgcgttcagttacattgtcaattcagaattgttttgtgaggccgaacataacggagtgatctggttgtgcttcaaacaacagtgatcaatgatcaatgatcagccgatgaaaaaacaaacgatcaaagaaatttgataaaattgaatgacactaaatttaatttatgatgaaatcacattggatacc

SEQ ID NO: 29731 - DNA, 192 bp, Glycine max
  Clone ID: PAT_MRT3847_12684C.1
ttgaccgccagcggacgccctgtacctcttttcccttgttctgtactgtgagctctagctgcctgcgagggaaataaaaagccttaattgtcctcctttatattcattattctttactctcatacaggtctgtgctcttagacggtgattaccgcatctttagggagttggtaaaacttccaccttgtttga

SEQ ID NO: 29732 - DNA, 1371 bp, Glycine max
  Clone ID: PAT_MRT3847_126850C.1
agcctgcaaagaatcttacaccaaaagatgctggggatttggtttgggcttggggttcagagttgtttctctttctcatggtttcaggaagctgtcaattgatcatattgtttcagcatacaagagaaccaatagaagggtcatctttcttgattatgatggtactgttgtacctcaatcttccataagtaaaacccccagccctgaagtcatctctgtcttaaatgctctgtgtaacaatcccaagaatattgtgttcattgttagtgggagggggagggattcactgagtgaatggtttacttcatgccaaatgcttggacttgcagcagaacatgggtactttttaaggtggaacaaagattcagaatgggaagcaagtcacttatctgcggaccttgattggaaaaagatggtggaacctgtgatgcagttgtatacagaagcaactgatggttctaatattgaagttaaggagagtgctttggtgtggcatcatcaagatgcagaccctgattttggttcttgccaagccaaagaattgttggatcacttggaaagtgtgcttgctaatgaaccagcagctgttacgagaggccagcatattgttgaagttaagccacagggaataagcaagggtttggtagctgaacaggttcttatgaccatggttaatggtgccaatccaccagattttgtgctgtgcattggagatgataggtccgatgaggacatgtttgagagcattttgaggacagtttcgtgcccatcattaccatcagctccagagatctttgcctgcactgtgggtaggaagcctagcaaggccaagtattttcttgatgatgcttctgatgttgtgaagttgcttcagggccttgctgcttcatccaatccaaaacccaggcatcttgctcattctcaagtctcttttgagagcacagtttgagttatagataagttaagacagcatttattggtcttctcctgtgaatcaatgaaatttttggttattaatcttaacctgacaaacaaatggtgcggatctaattcttttttgggctcctgaaccggtttgcgtggcatcgatctggggggttttttgttaaatactgcggttcattggtgcctaacaattcttctcttgtacatggtaacatcaattgttatatttgctggtgccaccgagagctttagttgtgcttagaactgttagatcttatcatcgctgtttgcactgaacaatggggcaccaaaacctgtatagttacaatatatttttgttgcaattcataatgcatttctggtttgacatctcttaaaaaaaaaaaaaaaattcctgctgccgcgaattcttcctggtgccgaatt

SEQ ID NO: 29733 - DNA, 209 bp, Glycine max
  Clone ID: PAT_MRT3847_126851C.1
tatagatacgaaacgacgacacagagggcccggcacaatatgacgacagaggctgacatttgaagaaactgagatcattgggtgtgaaatatatggcagacgttgtcttgctattcgatgatgtgaaactactttctgctattcctcgctgtctaatttctcatgaataagagtctgaaagcgtacaaaccttggaagcaccttgtgct

SEQ ID NO: 29734 - DNA, 202 bp, Glycine max
  Clone ID: PAT_MRT3847_126852C.1
tgaccagaatgctggttcagcagtctgctccttgctcaatagttcggttcttgtgagctatggcctgcacatgatgctggagtttcctctcttgaacttgtatttgagaaccaacatacatgaagttctctttcataagaagcctatgctagtcactgacaacgaatgatttatgatcctgactctggagctgtttgtatct

SEQ ID NO: 29735 - DNA, 296 bp, Glycine max
  Clone ID: PAT_MRT3847_126853C.1
gaaacggttaaggacaaaacccataagcggcttttttttaggtgcaccgaaagcctcgaaccatttctttactaatgacatccagtggcttctcgccacactgataaggcatttgttacacaaaaaaaaaaaaccggtaatttatgatatcgtaaaaacatgaaacgcgccctaaaaaatgctttataatatgcgcttgcatccgctggggatataaagagggatatccaggaccttttttgcccgcttcaaaagatttgccgtcttcagcggaaaaattcccttgaatggggggg

SEQ ID NO: 29736 - DNA, 527 bp, Glycine max
  Clone ID: PAT_MRT3847_126854C.1
tacggctgcgagaagacgacagaagggggcacctctcatatgcaaaacaccccataaaaaaaatgatgcatctaagcttatattttaccgttgttgccatagcgctcctattttcatttacatcttcttcagcagatactcatgaaaactttgttcaatgtctttataattatcccaatagcggaacctcaatctccaaagttgtttacacccagaccaactcctcatacacgtctacactagattcttccattcaaatttctaggttcttaaacgcaagctcaaaaccccttgtcattgtgacacctttggtcatttcccacgttcaagtcaccataatatgttcccaacaccatggcatgcagattacaacccgaagtggaggccacgattacgacggtctctcgtacattgccaaggatccatttgtcgtccttgacctcaaaaaccttcgagaaattaaagttgacgtagaaaaaagcaatgcatgggttcaagctggttcaactattggtgaactctactac

SEQ ID NO: 29737 - DNA, 403 bp, Glycine max
  Clone ID: PAT_MRT3847_126855C.1
gttacgcgtggggaaagctttactgccgaccataattataccattactgacggcattgacatggctactgcaactacgctgtgtcaaaagtcagcaggtggtgactacctcaggagaaacattaatcagatgagtaccgccaggtggggggcttccgccggctgggctagagaatggtcacaattgcattatgcttcgagaaaaacaatggctatgtaaggaggttctatacctggttttggaacggtgtgactggaattgtttgtgcgcaccccatatgaatgtcgccttatgtgaaggactgcatggtctggcagcgaatggctgtatgaagaggatgcgcctaccatcgtacagagcgatgagttacgtgctatgccgacgaagtggaatgctactgaca

SEQ ID NO: 29738 - DNA, 274 bp, Glycine max
  Clone ID: PAT_MRT3847_126856C.1
tggcgtggatgaagatcctgcttgaggacctgttattgatgctgtggacttgtaacagtagcactcacccaaacgagctatacactatctgttgaagaatggaaactttgaagaaggttcgtatatgtctcccaataaatcttggggggttctaattccacctgacatataggatgcctacaatcgcttgccggtatcgatggttgaatctctcattgctgtgaagaatattgatactgatgactatgctgtgcctgaaggaacaagaactatg

SEQ ID NO: 29739 - DNA, 277 bp, Glycine max
  Clone ID: PAT_MRT3847_126857C.1
aattcgagcagccgcatttataattactatttttttgtcattgtaaaagatactaagcttattcaatttcgactaagaaacataaactgtcgggtctaagggccataccccacggtcacgatggtgccgggaacgactcaattggcaaaaaaacccgttataggttggggcaaaaataaaaaaggggtcttcttggaaaaaaaagggacccaaacttcctttttcgggttgcagagatttggggggttgcttcaccaagtataggaaaaatggggaa

SEQ ID NO: 29740 - DNA, 306 bp, Glycine max
  Clone ID: PAT_MRT3847_126858C.1
ccacgcgaacaccaacgcgtgcgacgaggtatagaccactgatgggtgtcttattgtgtgacagaatcaaaccatacagacctttcctgacttaatcttactccttttaaatgcattgagccagactctaacattgagttaatgaaataaaccactctacattatatgtactgaagagcgaaatttttatcctcgatcttaaaaatgggcaactgttctcaagatgtgaaataactgctgaagactgtgataatactaacactacccaatgtacttaccccctcagcaagagaacaactaagtgac

SEQ ID NO: 29741 - DNA, 1265 bp, Glycine max
  Clone ID: PAT_MRT3847_126859C.1
aaggggtgtttacgcttttcttgagtgcgactgagagtctcaaagggggtgcgagtgcttgatgttctcttctaattgggtctttctctgagcctgtcaaactctcgattttttttgtgttttctttactacctcttgaaaccaaaagggtcactctgtgctgtggcctctgttttcaaagggaaacccttgttcttttccttgcctttctttcctagcactgtcttctaacttccaacctcatataatttcattttccctggtcttctttgttttcaccctttccttgtgaaatctgcaaaaccagctattcagtttcgttatcaaaccaagccaaagctccttatatttattttttatatataaataggcaccaaatacacatttatgatacaccaatttgaagcttgtccacacaagacaagattatcaccagcccctttccattcacaaacctgagagtaagaagcacttgtcagtgaccaacaaaccaaccaaccaaccatgatgcctgctcatggcctcatcatctctctcatttttgtgtccattttagccaatgaggcaagcttggtccatgaggcaaatgggtcatttccaatggtgcccttggtggaggctgggaagatggagatgatgatggtgatgaatgagagcagaaggaaacttggaagcttccagatatgtgccttgtgcacctgctgtggtggagcaaaagggatgtgcttgccctctccttgttgctatgccatcaattgcaacattcctcatagaccttttggcttttgctcattcacaccaaagacctgtaattgctttggatgccatctttagtcccctctccccctattatagtcttataataataattgaaaaaaaattgagggttatttttagttaattatgttgcaagtgtgaatgggaagtgaagtgaagaatatctgctcttggttagtctgtttattaattactattagttattattattatttggggattgttatttccaggaattattttttctttctgcagtgcttactgggatttgttaggggtgcctggagatatagcacattgtctgatttgtcagaatagcaatatatgatataattatatgtagtacatggggaatcaagaaaacgttgtccctttatgtggagatactggggttcatgataatttttcacttttttgaatgattatagtaatgcaagtgctcagtgagcctgtcgtttggcctggaccatgattcaactttacaaaaa

SEQ ID NO: 29742 - DNA, 430 bp, Glycine max
  unsure (1)..(430): unsure at all n locations
  Clone ID: PAT_MRT3847_12685C.1
ttctttcgcgtgggttgatatgctcttttgataagctgaaacatgccatcaagttgtatgacttttttttttatcaatgtcagaaaatcttggttttatctctaatttttgttgttcactgaaaaaagaacattcttttcatttattaaattgttatgatggatgtggcattcttgctgtgactcaattctgatttcatagagattttttctcatttagctatgagctttgcgtagatcataggttgggatttgtgaatcaataattcaaagttttatctccccattatgggtatttaatgcactcctctttgatatgccctatttagatcactgcttcagatcctttatcaaatgtagataaagaaaaagcanacatattgatgtattgcactggagggattcgctgtgatgtatattcttcattacta

SEQ ID NO: 29743 - DNA, 350 bp, Glycine max
  Clone ID: PAT_MRT3847_126860C.1
aaagtgaaggaaactacaatactaatcttacactcccctaactcgtatgaaaggaacggcactgttgggactactctattgagaggatacaattctaaccttacctctacactaccaacccaaccaaagttaatctaatcactggggagctattgtatagtcccttgacaaaatgaacatggcttggctgccaggccatgtgatggtacataacctcaccccctccaataaaagaactatgctttgtatgttgccatttcatccagtcttaacctaacacctgactggcctgcaccttgccatgtttaagctatattcaagaaccgtactctacaccttagctatagtct

SEQ ID NO: 29744 - DNA, 441 bp, Glycine max
  Clone ID: PAT_MRT3847_126861C.1
cttggtcttaccctgtgcgtactgcttcatttctattgggtcataggtgtccattgttgtatgccaaggtgcctgatagttaatgtgtcttcattaccacgagattttgtcatttacgttaagttttcttccattaaacctttatttgcatattggcttaatcctgagattttaagttctcaagttttgggcaccattactcactcttttttacattacaactgtttggaatttaatggtatctatgagaacaccatgtgaattttatattataaacaagcagagcttttgtcaattatttattgaccttctcgatgggagaattttattggactaaactgttgattggatcaaacttatacaaaattctttcaataaaaaaataaaagtgagagttgctgcttgtaagaatagctgcttatgattaataatgtgatgtct

SEQ ID NO: 29745 - DNA, 449 bp, Glycine max
  Clone ID: PAT_MRT3847_126862C.1
tagactccttgggacgcaagccttttggttttgaatgaaagaatgcatgaaaatgagagcatgttggtgaggtttcccttttactggcactaggtttgggctgcatcttgttgaatattttgcgtttagatggtgtaaaaatgtttttcacaatgtgcatgtatatatatagaggataggtagcaagagaaaataactttgtatcgaaacctacccttcacggcagagcgaagtgagactcacgggtgcacctttcaagggaggaaaacatgcggagtcgccccaaacgtttatttgaggaaaatgttagaaaaaccaaaagtgggtctacaaatgttaagagtgaaaggttcaggagtttgtttttacgcacggagaaggtattatcaccccacgcgtgcatcacatgggatggcagcctttaatcaaatatggaaaattatgacttt

SEQ ID NO: 29746 - DNA, 1227 bp, Glycine max
  Clone ID: PAT_MRT3847_126863C.1
ccacgcgtccgctcatccatagtttcctcttgtttgagtgttagcacaaattaaaaagaaaagggtcatgttggcaatggaagagctactgtgtgaacttagtgatcatgaaaagagaaacgagcaaggtctgcccccgggtttcaggtttcaccccactgatgaagaacttataaccttttacttggcttctaaggtctttaatgacactttctctaacctcaagtttgctgaggttgacctcaatagatgcgagccttgggaacttccagatgtggcaaagatgggggagagagaatggtatctgttcagcttgagggacagaaaatacccaactggactaagaacaaacagagcaaccggagctgggtactggaaagccactgggaaggacaaggaagtgtacagtgcatccagtggaaccctacttggaatgaagaagacccttgttttctacaaaggcagggcccctcgtggtgaaaagaccaaatgggtcatgcccgagtaccgtttggacgctcacttttcccttccccatacttacccctctaaggaggagtgggtgatatgcaggatttttcataaatctggggaaaagagaactccagtgctccaagtccaaggacattcagatgctttcttcgtccccaataaaaagttctttacctccattacttgcaagctcatctcattctcagctgcgagacttccaaagcccggttctgattcaccaacaagaccaaaatggcctctctcaccctcatcttttcccattggaaatctccaacgccagaaaccacccatcggacctactcttcaagcccctccagcaaaattgcaccctgaagaccaaggaacaaactattattccaaaagtgatcaaaacggaggacgctacattctatcatcaattactagatgaccataataacatgcgctgtgtgaacaagttgaatcaaaatccaagtaatttcctcaacactttccctcttgaggtggacgctggcttgatggcattctcaggagctgcaaatgctcaagctagggaaatatccacagcttcaacaccctttaatagggtagccttgcagcagatgcttgattcttggcctctgacctagcatgtttaaaatatgtgtgtatgtatatatataattactgttcgatatacagaccccctagtaattaaggtgtttgaaccatgcataatatactacatgattaatt

SEQ ID NO: 29747 - DNA, 613 bp, Glycine max
  Clone ID: PAT_MRT3847_126864C.1
tacggctgcgagaaacgacagaagggaataattgatggcgtggaactatcattattgtatcgtataatttaagatattctcttgtatatgttattagtgttgtctaccattcatttcacatttttcactttgcactccgaagagaggatgagagttcccaattgttcatcattcttcactctacccctacgtcatttcattaccttagcaaacacattgggtttcattctcttgatcttgttcatatctgggatcattgagttcccctctttttctttattatcacaattctcaacccaaccaatcaaagaccaatcaaaggctttcaccgacgtggttggtgcattcaaaaagtgggactccgaagtggggtgtgcccgattcaagaaagagataaaccaacaaagaaatggttcaaattatggtttttctacttctttgcaagatcaatttggtggccaattggaatgtggggtgctgaaaatgaaacatgtgagcatcttggtgaaagggtggacatggattcctgacaatttaaataacatgtacatttgcccatgtggattgagttgcttgtggacaaaatcactggttcttgctgacaaccctgatg

SEQ ID NO: 29748 - DNA, 215 bp, Glycine max
  Clone ID: PAT_MRT3847_126865C.1
atcgcatgtacgattacctggaggtcccttatatcacagtgctaggggcttcagccttcgtgcgccataagcagaggaatgcaatcaactattataacgatgattacattcctggtgccctttactctgacgtagatggaatatcaactcacgctacaaaatcaccacatatgctggcatcatacgaagcttaaactgctattgattctgctctt

SEQ ID NO: 29749 - DNA, 108 bp, Glycine max
  Clone ID: PAT_MRT3847_126866C.1
gactttcattacattatgaagatgtcccaagtcttgaggattatccactcatcttgaaactgacacagaggtcatcagcctagtgattgctggcctcgtcaggcacat

SEQ ID NO: 29750 - DNA, 648 bp, Glycine max
  Clone ID: PAT_MRT3847_126867C.1
ggtctaaaagaaagtgggtcattctaccctttcactgcaaagaaacatgttatttacacagtataaacactttagaatttagaccattggcttaatgtgcttcaagttcaagcacagacattaaaataaaagaaaaaaaagattgtattacaaggcattataaagcaaccatccttagccattatgtgcacaagtactggaaaggaagtatcataaataacaatgactcttcaagaattatctctcaggaagaagaactctcctcaaaataataattaatgaataccatcaatcaacaaatctctagctctgggcttgttccacatctacagaacttggactacaaggacttaactttttttccctgctcaaaagcctcttgaatgacctcaatgggacagccattggtgatttcacctcatcttcagcacacctactcccagaaggtgacaaagaggaggaagggcactcatttggaatatcaatcaccaacattccatgacaccttccattaacattacctctggcagaagaagaagaagaagatggcgtaggtgatggagaacaaggggggggttgctgacactgaaaaatgccttggtcttgtttttcttctaggaatcttttaggaaaccccaaggaactaac

SEQ ID NO: 29751 - DNA, 537 bp, Glycine max
  Clone ID: PAT_MRT3847_126868C.1
tgtaattcccgactgcaacatagttggtgcaatgcttaaggttgatacttatgataccaatcctgaaaatgcagtttggagtttttttgatgcgccttttataggcggaaggcccattcaggtggttacattaacaaataccatggtgcatattgaaccatacatgaattcaagggttcagcttttgagtaccactaccaatggagattttgttcaaggaaaagatctctcaatggtcaaagacaatgtagcatgtgctgctgttggcttgacatcaagatacactccaacttcattgatggaatctgagttgcaaaaagacagagggttaattgtggaatatttaggaaggatgtcttacgttgctcattacgttaatcagcctcaatagaaagaattgtttgagggaaatttttccttagatattaaatctcgctctacattggaaaaagttttctctactcaagcacaatctgttagtggcaaaaccttcaaatttgatttaaatggtgctgggtaaattttttagaagatttt

SEQ ID NO: 29752 - DNA, 2882 bp, Glycine max
  Clone ID: PAT_MRT3847_126869C.1
acacccaccaccctctccatcacacctgcccgcctccatcacaggcgctcgttccacatcaccggcgcctttcctgccgtctcgcacgcctgtcgcctcgccggccgacagcattccaaactcgcccgtcggacttcggtgactgacatagcaacaacgagcgagacaccgctcatcacacaacaccgcaatcatgtctgcagagccagaccactccgccagcaagggtaaggtcaagctcgataatgacccatcgggcgccgagaagcgcgatgagaatgaggtcgccacagcaatcctcaagaagaagaagaagcccaacagcttgatcgtcacagacgccaccactgatgacaactcgattctcgccctctccaacaacaccatggagacgctacagctgttccgtggtgacacagtgctcgtcaagggcaagaagcgaaaggacaccgtcctcatcgtgctggccgatgacgacctcgatgacgggtcagtgcgcatgaaccgcgtcgtgagacacaacctccgcgtcaagctcggcgacgttgtcacagtcaatccatgccccgatatcaagtacgccaagcgcatcgctgtcttgcccatggccgacaccatcgagggcctcacaggctctctcttcgatgtgttcctcgcaccatacttccgtgaggcctaccgaccgcttcgacaaggcgatctcttcacagctcgcgcggctatgcgcacagtggagttcaaggtcgtcgagattgacccacccgagtacggtatcgtggcacaagacacagtcatccattgtgaaggcgagccgatccagcgagaagacgaggagggtaatctcaatgaggttggatacgacgatattggtggctgccgcaagcagatggcgcaggtgcgagagctggttgagctgccccttaggcatccacaactgttcaagtccatcggtatcaagcctccgcgtggtatcctgatgtacggacctccgggtactggtaagactctgatggcgcgagccgtcgctaacgagactggtgcattcttctttctgatcaacgggcctgagatcatgtcgaagatggctggtgagtccgagtcgaatctgcggaaggctttcgaggaggccgagaagaacagcccggccatcattttcatcgacgaaatcgactcgatcgcacccaagcgtgagaagaccaacggcgaagtcgagcgtcgtgtcgtttctcagctgctcaccctcatggacggcatgaaggctcgctcaaatgtggtcgtcatggccgccactaaccgccctaactcgatcgatcctgcccttcgccgcttcggccgcttcgatcgcgaggtcgacatcggcattcctgacccaactggtcgtctcgagattctgcaaatccacaccaagaacatgaagctcgccgacgaggtcgacctcgaaacgatcgccgccgagacgcacggttacgtgggttctgatatcgcctcgctctgctcagaagcagccatgcagcagattcgtgagaagatggacttgatcgatcttgatgaggacacaattgatgctgaggttcttgacagccttggtgtcacacaagagaacttccgcttcgccctgggcgtcagcaacccaagcgctcttcgcgaggtcgctgttgtcgaggtgccaaacgtgcggtgggaggacattggtggcctggaggacgtcaagcgcgagctcgtcgagagcgtgcaatacccagtcgaccacccagagaagttcctcaagttcggtctcagcccgtctcgcggtgtgctattctatggtccaccaggtactggtaaaacgcttcttgctaaggcggttgccaacgagtgcgccgccaacttcatctctgtcaagggtccagagctgctctccatgtggttcggagagtctgagtccaacattcgagacatcttcgacaaggctcgcgctgccgcaccatgcgtggtcttcctcgatgagctggattccattgccaaatctcgaggcggctctcagggcgatgctggcggtgccagcgatcgtgtcgtcaaccagcttctcactgagatggacggtatgaccagcaagaagaacgtgttcgttattggtgccaccaaccgacccgagcaactcgacaacgctctgtgccgtcctggtcgtctcgatactcttgtgtacgtgccacttcctgaccagccgggtcgtgagagcattctcaaggctcagctacgcaagaccccagtcgccaaggatgtcgatctctcgtacattgcctccaagacacatggcttctccggtgccgatctcggcttcatcacccagcgtgctgtcaagctggccatcaaggagagcatctcgctggccattgagaagcagaaggagcgtgaggccgcagagggcgatgacaccaagatggacgaggatgtcgatgaggaggacccagtgccagagctcacgaagcgtcacttcgaggaggccatgagcatggctcgtcgctcagtcacagacactgagattaggcggtacgaggccttcgcgcagagcatgaagaacagcgctggcggcagtgctttcttccgcttccctgaaggtggtgccgagggtgctgcggccgaggctcagcagaatggtgctggcgaagaggatctctacgattaagtacgacaagttgtggtatacaggcatggggacggaaactggttggccgcggcggattctagttttgcgtcgatgtatgcttatgatacagatgatgcggatggctcggtcagtcgttgcatgaatgaggcgatgcgcctcaccaggagctggccgttatgatagagtgtctcaatagttcgcgccctccgctggcgaaatgaagcatttgcacgat

SEQ ID NO: 29753 - DNA, 466 bp, Glycine max
  Clone ID: PAT_MRT3847_12686C.1
gagaagtattatgtgccttataatgcatgcggtgggtatcgttagatgtaaggtggtccaagggacttgcgagccatgccggataacaattcgacgacgagcagcagcacaccacctcctggcgccagacgcagcactttgggagcaaagcccttgtacatgccgctgataccttcatccctggccaacctcagcagagccggatacgtccattcgccagcaccgttcaattggatccgggttttgaccacgtcgaagggggtgtttatggcggtaccgacaaagccgccggcagtacccgcgatcaggttgttggatagctctgtcttcttgctggtgggtttgggcaaagcacccttgatggcgtagattgtaccaaagtatccgccagaccaccaccaatgtctccagaatgtcgcttccatccccttgtacaagctaaagataccgtcattcttgatggcat

SEQ ID NO: 29754 - DNA, 134 bp, Glycine max
  Clone ID: PAT_MRT3847_126870C.1
gtcaggcggggctaccgctgagtttaagcatatcaataagccgaggatgtgcaaataagccgaaggtctcccaggacgatcccggtggaaagcccaaggcaccccaaccagaaccagaacctgaacctgaacac

SEQ ID NO: 29755 - DNA, 543 bp, Glycine max
  Clone ID: PAT_MRT3847_126871C.1
ctaatttgtgtggctaacagtgggtttataacttcttgggctgtttgactagcttccttcctatcatccctcttcccgtctgcaaacaccttgccctcttcttgggctgttggatgatgggctagtcaggctgcccaataagctgaacatgctgaggctaatgttgacaatcaagtcctggatcagatcaaatgcctcagaatggagtcaaatgaaataggttcaaaccttaatggatgaaggattatgaatatgaagtactttagcctgttttagtggtgaatttggaataaaagatatggtctgcgaggagttgttggagtgagtcctgaaaggagtttgttagggtggttattttgtattgttgtattgtgttgtttgcttgcctgtaagttgtatttatcattagaggggttattcttatgtaggtgatgcaatatatggagaagctagtgaatgaaaatattcattttctcccattattgtttcacttttgttgtgaggagtctcctcccctcagagagttagttccctttttttcct

SEQ ID NO: 29756 - DNA, 391 bp, Glycine max
  Clone ID: PAT_MRT3847_126872C.1
ccaacaccggcacacccccgaacacttgttcgacacttgtttgacacttcttattaggtgtttggctcaaatattactttttgttggcttaaacacttaagccgtcacatttacacaactaatatactcgtaaaaacatagaaagttggttttaaaagatgaatataccatcaatttagattattttggtatatgttattcctatttcatttaactataatctctttgtttgtgtgtgtatgtggtgttcccatgtcgtatattttagacattataactgtgttgaaaggtctgtgcttcatagtcgcccacatctatctagtatttagacaaatgtgaggaggacgcatgctcatataacactacatttaggtgctaagtggctctagct

SEQ ID NO: 29757 - DNA, 250 bp, Glycine max
  Clone ID: PAT_MRT3847_126873C.1
aattcggctcgagattaaattaatatacacagttgttgtagattgttgctttttattttgggtatgacaagggagaaatccgtgaaatgggtcgacaaataggttgtttttaacagtacaaggctgattataatcatcaaattgctagtgttaacttacaatagtgaattaacgtattagggtcggtctagtggtaggatattagaataaaaacacaaaggcttttgatacttgtcattatacattaaaa

SEQ ID NO: 29758 - DNA, 565 bp, Glycine max
  Clone ID: PAT_MRT3847_126874C.1
gttcaggtgtttctggtgtcttgacggtgatgtctttgggaatgttctattctgcatttgcaagaacagcttttaagggtgaaagtcaacaaagcttacatcacttttgggaaatgatcgcttatattgctaataccttaattttcattttgagtggagttgttatagctgaaggaatacttggtgacgaaaatgttttctatcatggaacatcatggacccacctcttgcttctctatgcatatgttcaagtgtcccggtgcattgtagtcggagcattatttccctttctaagatattttggatatggtttggattggaaagaagctattattctcatctggtcaggactgcgaggcgcagttgccttggcactttccttatcagttaagcgttcgggtggcaaatcatctgaattgactccagagacaggaacactgtttgttttcttcactggtggaactgtgtttttaacacttataataaatggttcaaccacacaattcattttacactaccttggcatggataaattgtcagctgctaagaaacggatccttaactt

SEQ ID NO: 29759 - DNA, 2543 bp, Glycine max
  Clone ID: PAT_MRT3847_126875C.1
gtttctgacaccgaaattgagccaaaaagttgaccctctttggatgaatgagaatatcatgttcctcacattaatacaacatggagattccaacaattgaaaactcctaaacacccttctcttccaaccccgtttcatgcttccttccaatcctttggtgtgatttcaatcgtttcataagaaaacagcactcagttcttcttcttcttcttgttctttcatcaatcatcatctttttcattcaatttctctgattgacaaaattgccacacagatcagtgattgacccaattgagaaaaaccttaaaagttccttttttatattttatttttggaaggaccagagtctctgtcaccgaaatttagcaaatgagttgaccctcttgggatgaatgagaatatcatagtactcaggtgagtactgaactggatcttacaacaatgtaatgcagcaaagagggaaaggtaacaaccgtagatccaggagtttctcaaggtcccgtctcgctgttgaaggcacttagccacacacacacacccaccgctttcagctatggatgagcgtcacattcagaaatcttactggcttcagcattccgccgatctctccgtcgaggcaatgatgctcgattccaaagccgctcatctcgacaaagaagagagacccgaggtgctttccctattacctccattcgaaggcaagtccgttattgagcttggtgctggtattggtcgatttactggtgaattggctctgaaagctggtcaattgcttgctgtggacttcattgacactgctatcaagaagaatgaaaccatcaatggacaccacaaccatgtcaaattcttgtgtgctgatgtcacatctccaaatatgtcaaataacgtttctgaaggatccgttgacgtcgttttctcaaattgattaattatgtatctctcagatattgatgttgaaaaatttactgacaggatgatcagattgctgatagatggtggatatgtattctttaaaggaacttgttttcgcccaatctggaaattcaaagagaaaatacaactctactcactacaaggtacccagatttaataccaaggtaattaaagagtgccatatgagtgataatactgggaaattcctttgagctttctcttgtgggatgtaaatgcattggagcttatgttcgaaataagaagaatcaaaaccagatttgctggatatcgctgaaagttaggtcacaagatgataggggtttccagcgcttcttggatagagttgaatacagccacaagagtattttacgatatgaacggatgtatggcccaggctttgtgagcactggtggacttgaaacgacaaaggagtttgtggcaaagctgggactaaagcctggtcagaaagttctggatgttggttgtggtgttgggggaggtgatttctacatggctgagaattttgatgttgaggttattggcattgacctctccataaacatgatttctcttgctattgaacgtgctattggactgaactacgctgttgaatttgattgtgcggattgctatagaaaaacatatcctgagaatacatttgatgtaatatacactcgggacaccatgctgcacgtcaaagataaaccaacattattcagatcattttacaagtggttgaagcctggaggaaaaattctaatcacagattactgcaaaagtgctggaagtccatctttagaatttgctgagtacataaaaaaaggaggatattatctccatgacattaaagcgtataggcagatgcttgaggatgcgggatttgatgatgtcattgccgaggatcgaactgatcagtttgtgaacacgctacagcaggagttaaatgcccttgagaacaagaaggacgattttattggtgacttcagcgaggaagactacaatgagattgtcgaaagatggaaggcaaagcagaccaggggtgcatctagagagcagatgtggggcttgttcattgccaagaaaaattgacatgctttattgctatcatatgccttgttctagctatatttaattcctgtgtggccggaatagttatctgtgtcttttatgttggtttaaaattcatagctgctttcgaattagaatgacgatctgctgagaggagaatgctcttcgatttgaataacaatggtcacttgccattggcttccttgctaaaaaataatttcaacgtcttggtttttggtttgaatatttgccataacaattgttcccccccaagaaaactaagggtacccaaaaacttggcaacggcacgggatttgtcggattttataccccctcttctctccgttagaattctttttcattttcagtgtgggtggtgtcactggcaacggcacgggatttgtcggaaacggcgaaagtttgcacttgattcatctattggtcatagtcattttagaaataccaaaatttactcattttttttaactctgtttgtttctattgtcaaatgtaatgacatgttcttccaagttgctgatttt

SEQ ID NO: 29760 - DNA, 222 bp, Glycine max
  Clone ID: PAT_MRT3847_126876C.1
cattcctagtctttcgcttgcttacttaagaccagacatgtctaacacatgcggcagctgctactgcactgacaagactagctgcaccaagggaaacagctatagagctatagtatagactgagaagaggaacatcgagactgttcacatggatgtaccagcagctgagcatgatcataagtgcatatatgcccctaactgcacatgcactgactgaacatg

SEQ ID NO: 29761 - DNA, 209 bp, Glycine max
  unsure (1)..(209): unsure at all n locations
  Clone ID: PAT_MRT3847_126877C.1
agtaacgccgtactatcncgcncaggcaagaggagggccagaggcggagttccaggaaacaaacgcgaccgcaaccagaaaccaagaaccnaagaangccgaccgaccnggaagagaacgacaaancaagggaaagaaaaccacccgcagcgcaggacacagacgacgagaaccagaggcaccaccagacgaagcagaagggccgaaca

SEQ ID NO: 29762 - DNA, 471 bp, Glycine max
  Clone ID: PAT_MRT3847_126878C.1
cttgacgaataaacgtgcggccagcgctggcgagaccaaaccactgcgacgctcggcacggattgcggcacagaaagcggcgaaggaaaaggcagccaaacagaaagctcgtgacggctccaccgcgtcaacgaagtctgctggtcgtggtcgtcctagtcgctcgccgaagaagtcaggcccgaaaagtcgtcgctcgcccgccggtcgtggaggaggacgttctcagacgccgcgcaagaagaaacaaccgctgaagaagaaggcgccgggcccgcgcagtcgcactcctggtcgacgcgtgaagaaaccgtcaacgaagaagtcgcctgctcctcgccgtgcataaacctccaccaagaagcgcggacgtcctgccaagatagctgaacatgccgaaccatctgacagcgggacagtcgccgacagtgaccgcgatgacagcgaacattccgaagagagtgccactga

SEQ ID NO: 29763 - DNA, 438 bp, Glycine max
  Clone ID: PAT_MRT3847_126879C.1
cgtaattttcatatatcatattcacaacaactccatcgagaaagtactatgtacacactctcttccaatacctgaatattattattctttcttgtagccaccaccactcttctaatgtctaggttatggttttccacaccattctttgttatcattctccccgtggcggtggctgcgcttttcttccggctcgaaccgttcgatccgggttttttgccggttcagctgggccggtccaccgtggcggttccggcaagtaacggccacgtgcgagttggatcggaagctatgggcgagggacacttggagggccccgaagacttggcctacgacgccgcggcacgtgtcgtctatactgggtgtgaggatgggttggatcaagcgagtcacggtgaatgactcggtgcttgactcggcggttgaagattgggtcaacac

SEQ ID NO: 29764 - DNA, 730 bp, Glycine max
  Clone ID: PAT_MRT3847_12687C.1
gtgatattgatgatgattccaatgtctatgaacatttagagaaaaagggggtcatggtaaaggtcctagaatcgattctagttccagtgggagaagatctaatgggaaaccttttctgaggagacacttctcatttggctcaaggagttccaaatccatgctggataatcagccaacccggaagaagggcttcttttgggcaaaatctagcaaggaataagctgctttggggttgttgagaggttccgttgttgaatttctctgtaacctcgcataaaatgactgaggaaagggcaagatgtcttcaagctttgatttatgatctgtataaactagttcatgatttctaaaggtttagaagctggaattactctgtaaagaagagaagtgaaaagatacagaagatgaatataggaagacaaagatagtctttagagaccaagggttttgttattttgtacagattgatttagtttattgcatttggatataattcattcatatatccaaaagatgttctgttgtcccttgttctacagatatgtaatgtagtataagtgccataagccctagggagtttctggtgttgggctatggtcttcacagattgttaggcaataccaatagtttgattgacacaaatttgttgataagcaatgataaatgaacatctatcactttgtcacttaaaacattttactaatgtctatcgtgtctatcatttcgttct

SEQ ID NO: 29765 - DNA, 638 bp, Glycine max
  Clone ID: PAT_MRT3847_126880C.1
cgttcttattatttatggaataaaaatccgaagcaaaaacccgaaaaaccgtcacaaatcacaattactggtacaacaacttccagttccatccatctgtcgtttctcgatctccacagttctccactgttccaactccaaccaaaccagcttctgactaatttccctctctccgcgtttacgacaccgcgtttcgtcagatctgaaattgcaatggtcgcatgagcgggaccggcgtcgtttcgatggatcacgtgcttgtggcgctgggggagacgaaggaggagagggaggttcgtattcggagcctgttcaacttcttcgacgccgcgaacaacggttacttggactacgcccagatagaggctgggctgtcggcgctgcagattccgccggagtacaagtacgcgagggaactctgcgaggtttgcgacgccaacagcgacggcagagtcgagtaccacgagtttcgccgctacatggacgacaaggagttggagctttaccgcatcttccaatccattgatgttgaacacgacggcaccattcttcctgaagagctctacgaagctcttcttaaagccggtattgaaatgaatgatgaggagcttgctcactttgtggagcatgttgataaa

SEQ ID NO: 29766 - DNA, 244 bp, Glycine max
  Clone ID: PAT_MRT3847_126881C.1
accacgcgtccgatgaaaggtccaagctattatacgttagcacaataatctgggatgacgcgcggcctttgggcgtgacacgggtcaaagcgatactacgcgattttgggaccgtggctccagcgacgtagcgtccaatcacgcgttcagtatataggtccgccttaactcggaaactgtggcatggaagtgcatatactcgacgaatttttaaactgatcagtctgggtagaacatgacgaaa

SEQ ID NO: 29767 - DNA, 287 bp, Glycine max
  unsure (1)..(287): unsure at all n locations
  Clone ID: PAT_MRT3847_126882C.1
tggccttaaaaatggcagangagtgggtagagctagcttatgcacgagnntgttnataacgagacagctntgcanctcttgggctgtaaatcaaaacccttaaggattcgngttgnnattgtccanagatggnaggnaccttccggatcaaccctgacacgaaacatgtgntgnntcanttggtcatttgcactggnaanaaattctncaacgcanagaccatcgggnggcatgaanaaacatagtgagccttctcaactatataacgangtgcataagngggantt

SEQ ID NO: 29768 - DNA, 2805 bp, Glycine max
  Clone ID: PAT_MRT3847_126883C.1
gctcttacattaatccattattatctatatgttccaacatgcctaatctttttcccttttctcttctctttcttttcttctttccatggctactcacttcaatctgcaacaccaactgttcagcaactccagatccgtgggattagatatcagaaaaagaacaactgcttatgcccttcaacatgccaattcaaatgcattagatgagagaaacaataattctttgaatagtggcctgttagttggatctctgtctgtatgttacacatccttaaagaagtgctcatcattggcagcatcagctaaggctcatttttcctgtagtgatgatcaaagcaaagaagcagatgaggttaccaatgttatatccactagtcagggaatggaaattagtagggtggattgtgttgtgtggttattgcatgaatcttccaggagcttttccaaagcaatcaactcgcttggagtagcaatgagtggtccagctcttgcaatggcttggattgggaaggatgtgcatgaatggcatagacgtattgcttatcaggttgcagtttatgctttaatgaaagctgcaattgatttggagatattgctttcacatgaacggctaaatgaattttcccctgttaaaaagattttgagcccattaatgaatcaaatgggagagcgcattgaaattcgactgaaaatgaagcatccatatttggtgcagtggtttagagagactgaaatgccacgaatagcaggatattttattccacttctaaaaaagtggtctgtggaatatgcaggaaggtttgcttgaaacaaccttgttttcagaaacatatatttgaaccttggatgaaaatcctttttcatagtcaacaaatgtccttgcattggcttgaatttcaaagttattcttcaagttgatgattttatgttcatttctgttagattcgccaaatattcagaagaaggaatttagcctgacagaaaactattcagcggtattgcaggaattattgtggctataacctgttgtagtgcagtggtgaaattgggcgccaggcgcatctgctgccccttatttgtattgtctctcgaagatgctttggtcaagctcatggatttctcactcaatcttgcacctgtggacaaattacactggttagcaactgaggcgggatttgaactgaatttcttgtcccattttggtgggaaggtttttcccagtgagaaaactgaggacctagagttttggatcggtttagcccataagaaactattgaaagctttctgtaaagaaagcatcacttcaaagaagcaaaattttcagcaaaagatacaagcagataatttggccacattgggactttttacatatcttggaaaaaggacaagaatatttttgtcggcaatgggcattaaggatcttgatggagtagttaagaacttcctcagttacttggaatgtggaattcttttcatatatccagaattttcctccattcgagtgtatcagtgtttcatggaggtggtaactgatgagataggatggcttgatttttatggttcatatgttcaaataaattgcaaggagaaaaggtctaaacataatgctcgccaggcagagaaagagataatttcttctgtagtttttactgtgtgctatgatgttttctctgggtttgcacacttcaatcgcacaactcaacaatcattggacacagcttcacgctcatacttgcttcgttgtcagggtttgctaagtatttgtctgcaatatcactgggctgcttatgacaattcaggtgaatcactaaatactgtggatcatgcttcatttgacaaccatacatcatatatgggaagtataaatggacccaagttacctctggtgtttgaagtgcaacagatgtcacatcgcccacgcgtccgatttaactacagaaggatgtccaaagaacaatttccgaaacagttgtatattcaataaggctccaatttcagcaatcacgaataagaaaacatacgaggaagatacctgtgtcgacaagtcaaatcctcagcatgaaagttttatcaagagatacagcatcaagttggcatccacaagtgcagacctctggatgggtattgtgttgctcttcatagacattatggttgctttagaactacttgtaaggcaagtgcatggctgcaaggcttccgagagtcaaagaaagaaactacacagaaccatgactgacataattgtgctaattccagtgacaattttgatgctaattcctgtaacagctgtaggccatgcagctattctagcagctatcaagaagtatatgccattcttgatcccctcctctttttcttcagagcggttggatgttgtaaagctaataaagcaaactagaaagatgggttatcagttacattcggctcagtttgaccttgaagatcaaccagcaaccatttcttgagtatgaccgactctcggttacatttgggtcgggcttaatcattcgaatcaaacttcatagtgattagttcaagccttagagtggataataattgcaatgaccttccaagttgcatcagtacccaaaaagtttaggtatatttggatagccgttataaacatatttttgggtgctgcacattctcttcgaaaaggatactctttgtttgtatcttttattctgaacaggctttcggaaggtgtaaaagttatccaaaatcatgcacctattcttgctgcaatgtgagtgagaataccatgattatgacaaaaagaacactcttaataatcaatattcatct

SEQ ID NO: 29769 - DNA, 802 bp, Glycine max
  Clone ID: PAT_MRT3847_126884C.1
caggcgcatgcctgtggaagaaaggaaaaatgcattcgtacggttacagagtcaatgctttgttaaccttcgccataaccattctggccgttatgtccgccatggcttctctctccgataacctcaattcccccactccctttgtgcatgctcaggtcaccaacattaactggtttcagaaacagcccaacggcgacgacgaggtcagcatgacgatgaatatatcagcaaatttgcagtctcttttcacatggaacacaaaacaggtttttgtatttttagctgctgagtatgaaacccagaagaaacccttgaatcagatatcgctgtgggatggtataattccttcaaaagatcatgctaagttttggattcatacatccaataagtaccgcttcattgatcagggaagcaatttgcgcggtaaagaatttaatttgacaatgcactggcatgttatgcccaagactggcaaaatgttcgctgacaaaatagttatgccaggatataaattgccagaggaatacagatgaagcttgcatttgttaatgtattgaagtaactttaacctttcctataacggatctgaaggttagcaaaaaaactacaatttgggaaaggataagttgtttgccaaaagttaaaatgaaaatagttggagtattatgaaacatttccgcgtgttcttgtgttctattccgttggaccgaacattttctttatttttttgaggaatactgacactctatgatagttggaattcattagaaattattaatttcgatggatcttacttctcttc

SEQ ID NO: 29770 - DNA, 1331 bp, Glycine max
  Clone ID: PAT_MRT3847_126885C.1
caaccagactgattagctcaggccggttacattctgaaaagaaaacgggctattctgaaattggtggttagaactttgaactcggaaagtcatttgaagtaataatagttgaatagctataagaaattgagtttaatttatatgcattgttagtgtaaatttttttatattgtcaacctataagaaatcatcattaatatgatttttaaggtagttattgtaaaagttaacaaatcacaaattttcacacaagattgatttgtgattgaacgaacgtgaaaaaaccaatcacaaaccagtgcatagactatttactttataatttttgtgaccttagttttttgcaggaattgagtggtctccaaggatggatgttgcagaatcagaaggcaaatatgttatcacagtggaagttccaggtgtcagtatcagtgacataagagtggaggttgatgaactaaagtaagaagaatctctaatatacaccctcatattaattgtaatactctttgcaatttgtggcattaagcatttagttctccctaatcagtagaaaagggagtggtgaaggaaacgataaggcataacaaaatattgttggatactctacttttgtctatgtcattattgtgtttgagcttttctttcgtttgtgtaccgggggagggtcttgtctattaatacaagctttatacatcatttctgcagtgtaatataaatcataaattctggaagtgaaacgctgaagggaaattttaatgttggacattcgtggtcatagatctttcgtagtataggacctcctttctttgtgataaaagagccaatgtgtgaactgtgacaggttgtgtgttaaaggtagacgctctactagctcttggacagttgcaggttgtccaaatgcttctttttcttcatatcatcggagggaaatactatatggaccatatgggggtggtctggccactccctgctggtgtgaacaaggacagaataatactatatgcatatggggtgctgcactcccggacacagctgaaatatcagctgaatttttggatggatttctacaaattatagttcctaaagtttgagtatgactgagcaatattgatttgtagcacatatatgtatacgtatacctataccccgtgtatatagatgcagaataaatgggcattgttttgcatgttccaatttaccctatgcttctctagagcgtgaatcctaatccgtttaaggaatggttgcccttgggatttatttcatagctgcccctaagttttttagtcattctaatggaaaaatagaggtgttttcgagtcattcgg

SEQ ID NO: 29771 - DNA, 253 bp, Glycine max
  Clone ID: PAT_MRT3847_126886C.1
gatggaaagatctagaacaacgatgcatctggcgtggcagtaaacaatccacagtggtaacattaatactattaacattttggtgtacaagaacccgaaggtggacaaaaaacgggattactctaacctgtattcatattcggcagcctttgacttgctgttcactccgtttttcccccatctggagttcatcttcgtaatcacattgttttccacatgacctcaattctcaaagctgtggtccactgaactg

SEQ ID NO: 29772 - DNA, 465 bp, Glycine max
  Clone ID: PAT_MRT3847_126887C.1
aatattaatggatactctctataatttggggtgattacgtatttctagcataaaacttgagagaacatttttttttgttccatcatataaaaaatatatggactgaaagaacacattcatcttctcaaaaaaaagggggacattcataaaaactttcagaaaaaaaaaaaacagaattgcttacgagggaaggaaacatagagaacatttcacctatttgataatcagaagcctgtagtagtgcaaaaacccctttccaagagtgcagaaaccccttttaattaaccacgaaccttctcccccttgagtgacttcaccacttcccatgtgaagtcagggacatctctgtcaaaaagtccatatgccaaactctttaagaacctgccgattccacccctctcgaaacaaggttgacggaaagcatgcccagcctgaaaaaaaactttcttcacaatgcttagattt

SEQ ID NO: 29773 - DNA, 222 bp, Glycine max
  Clone ID: PAT_MRT3847_126888C.1
gtgttttttgtatattttttggggaaaaaaagaatacttccccattgaatgtaatttaaatctacaaaatgtggggttgcacgtaaaaaattatgttttccccaacttaaaacagagttcattattaataataaggatgggacccccgccgaacttacaagactgtccccccaccatgtgaaagggtggcaccaggaccctttctgggtctttttggcttaa

SEQ ID NO: 29774 - DNA, 686 bp, Glycine max
  Clone ID: PAT_MRT3847_126889C.1
ggatgaatccaaatcttgattcaatttcagaatatcgaaagaaggtatcttcatacaatgagcgagttgaagaacttaacgcagtcacgcaggagcgggatgacacaaagaagcagtatgatgaatggagaaagaagagattggacgagtttatggaaggatttaatgcaatatctttaaagttaaaggaaatgtatcagatgattactcttggaggtgatgcagaacttgagcttgtggattctttggatcctttctctgaaggtgttgtgttcagtgtcagaccaccaaagaaaagctggaaaaatattgcaaatttatcgggtggtgaaaagactcttagctcgctggctcttgtatttgctcttcatcattacaagcctaccccactctatgtaatggatgaaattgatgctgccctggacttcaagaatgtatctatcgtcgggcattatgtgaaagacaggaccaaggatgctcaattcataatcattagtcttaggaacaatatgtttgaattggctgatcgacttgttgggatatataaaactgataattgcacaaagagcattactatcaatccggggagttttgtggcatgcgaaaaggctgtttgatggagttgtcaacgttttgttgatgttaatgtgaagaatacttttaacaattattattctcttgtacta

SEQ ID NO: 29775 - DNA, 199 bp, Glycine max
  unsure (1)..(199): unsure at all n locations
  Clone ID: PAT_MRT3847_12688C.1
gatctcaaagaaaataaaatcctcaattttctgagcagccatacgctctctctctggctctcgaaaattctcattttgcatagaaaatctgaatcatgttttggcaagcgtatgtctacnatcaccttctgtgtgacatcnaaggtaaccacctttctctttctgctatcatcggccaagacggcatcttttgtgctca

SEQ ID NO: 29776 - DNA, 336 bp, Glycine max
  Clone ID: PAT_MRT3847_126890C.1
tgaaaatcgccatcatgataaagcttgacactgtccacattgctgtcattaggggtaatgtcgtagacgttatctggctcagagggggaaatgatcctctctcagttggtaaaatactgacccgcatccatcacgccagaggtagtcacatttgccatgactatcggtacatatagatgctagacaattattgtgtcttctaagaggacatatacgggtgtcatcagtagtactcactcaacgaagatgtttgctcggtatgacatgaatactgaaagactgtattgatggcagctatgttccaattagcattattattggtctcctggatggtgt

SEQ ID NO: 29777 - DNA, 399 bp, Glycine max
  Clone ID: PAT_MRT3847_126891C.1
ggatcaaacagactcgatgtgatcggttagactggctaaaatggcaccagaagggttgtccatccagttctcaaagggggtgtacagcctccaataaaacgagaagtatgggatccttataactaccataccttcccagtttcttacgaccagaccttcacagacaattaggctgacttccccaaagacacttattttgacttccaagcctacacgttttttcacctagtaacctttaggcctaaacaccatgcaaacttactaacaatgcatctttccgagcccccaacaaaccatcttaagaaacttcaacccgaataatttttgcacgctgaacatcaatggtcattgcccgctgactcttcttgggcatagtattcacactcttggcctgaaagg

SEQ ID NO: 29778 - DNA, 266 bp, Glycine max
  Clone ID: PAT_MRT3847_126892C.1
gttcagttatatcaccgcgttgaatcgttgtagacgtcatggttagtgctagacggtatatgtgtctgatacatgaagtaaccgtacgaagtacgacaggctccgtagcttacggtatgccagcatcgtacggtgggattgttacgattcgctcctaagaatctggtccaatggaacatcgcttctgggttgggggtggtcccgctgtattctagctccctctaaaatactgtcacataagactactatggatgaacctttggtct

SEQ ID NO: 29779 - DNA, 484 bp, Glycine max
  Clone ID: PAT_MRT3847_126893C.1
acagtatccactgcatatatattttgctcaataatcacaatcatatacacctttgtacgagtgcaatgaaatgaagtaacaaagaagcagcatcgtttctgacattaaactcgagaggatacaatgcagcatcgatatttctctcattaagctcgagacaaggaaaataaaataacaaaaacgcatttctcttcctactagcatctaatcacctaactggcgtttacattttttccacaactagaaggaaaatgtcaacatccaatataatagccattattcatatagctgaagtgagaaagcgcttacaatttttttttctccaatgttctattcatagctaaatgtgacgggggaacaagataaaacatcatatgaaaattctatgctgaccaaatagatatatggaagcttgtaaatctttacattacataaaaaagctgtctttgctacaccatattgcagcctacttagattacacttt

SEQ ID NO: 29780 - DNA, 499 bp, Glycine max
  Clone ID: PAT_MRT3847_126894C.1
ggaagccaaaaaattaagggaaaaaaatggaaaagtttaaaagggaaccggaaccccaaaaaaaacggaaacccaaagcctaaacccaagggccattcaaccccccaataaccacggggggacatgaaaaccccagaagccagggaaaaaaaaggggtttccacatttcttaaaaaaaccccctttggaacccgggcccaaaaaaaaggccccccaaaaacaaaaaaacccccccccaaaaaacccggttaaggaccatggaattaaaaaacccctctctaaacgttcttggaaacaaccgggggggcctaacccccgggggggagcttcgttaaagggaacatcccccccaggggggctccccccccaacagtttcccaggcttcggggggaaacccggaaaacccaaagttgtaccccacaggggaaggggcggcccccacgggggcccccctaatgggaaagaaacgggggggggagcggggggctttcaattggg

SEQ ID NO: 29781 - DNA, 231 bp, Glycine max
  Clone ID: PAT_MRT3847_126895C.1
tgagaatggccttgccagtcgtcgtcgacgcagagtagctcaaagaggtcgacaatgctcgtcgcgatctagcggcaattcatcgcttaacagaaattgggctcctctcatgcttcgattcgccttgacacgatgccggaacttacggtgctaggaccaagaactggttggacctcagcggttccgatccgttaacgggggaagagtattctcacggcgccaacaatggct

SEQ ID NO: 29782 - DNA, 538 bp, Glycine max
  unsure (1)..(538): unsure at all n locations
  Clone ID: PAT_MRT3847_126896C.1
gccagagtgccgtgcacgatacgtttgtagaaagaataactatacagtaaatgttgttagaggttatctttaaagtggggaaagaaaggggtgttaaagattaggtatataataatagtcagggcgaagattagcaacgggggggtactaagacacgggtgaacggtagggtggcgctgcagcggtggtgatttgggggcttatgtatgtcataatattagaattagaaattattttaggacacatcctcatcggggccgtgttaatccgggaccaaatgggctctgtccgggtggtactttctcaaatgttataaattcggatcggcccagggccgataataaaagtgtccaataaatccggcgcgcccggcttaatacacatatgttgtggaatcatatggttccgcggtgtaaaagaactaataatccaaattggcgatgttatcataatactatttcaacttgtaatttccgggccgttgttaatcgggttaggcaagttatanagaatagggtacttaactggggccagatac

SEQ ID NO: 29783 - DNA, 218 bp, Glycine max
  Clone ID: PAT_MRT3847_126897C.1
aagcaaatcgtacttttgttaattccatcaatttttaggcgtgttgggctcattctgtaacaggggggatagacccaagaaaaattttttttgaaattttcacatgaggtattttttacaatttggttatctaatgtacatcctgcaacatccttattcacattatgttagccatatatccatgcaataggacatagatagttgatagttctacaata

SEQ ID NO: 29784 - DNA, 336 bp, Glycine max
  Clone ID: PAT_MRT3847_126898C.1
cggacacattcccggtttcaaccagagcaaccttaggtatttaaatgtgtccaacaaccggatcttcggggagattggggtgagctacgcattgatccggttcaatgcatcttcgttttgctgtaacccgtgtctctgccgggatcagatagaaaaagcatgcaataacggatcattgccgccatcaacaagccctagttatccgttgataccaaggaccatgggaaaatcctcttcctcatcattaaaccgtacaaggtggatataaataatcggagggagcctcgcaggacttgatttagctttagttatcacgactgcacacggggttgtgat

SEQ ID NO: 29785 - DNA, 1052 bp, Glycine max
  Clone ID: PAT_MRT3847_126899C.1
cttgttgtctctgaacacttttttgttttctgtgccatgttccccactcgggtctcgccgtaccctggacctcccatctcttggggagatcttctgctagttttccatattccatccctgggtcgtaaatggacgagaaaatgctgtggtacagttgagatttgccacttaacgcctattgtgcctctgaccataacactggtcccattgtagtattgcttggtgcaacattattgtcttatacaaagtcgaccaagatagggctccttacagtgtgtttggcagagacccattgtaaaaatccttgagcatattcggcagtttcattaccagactctatgcggctgaaggacactgaatatgtctctttctggtttgcttctgaaaaggtaaggttatttggtcggaccttcacttcaaccccttctggtgccataaccatgacaacataagatgagttggcctcacccacatttgtcacagtccttgtgaatgtctgtggggaaccaagcacaacagaaaatgagggatagttgagctctccttcgggaatgcttgaagtctcagagcacgtaattgttttgtgtgcaatgatcccaacttcagtatcaccatagcctagaccacacagataaggtatataatcatcaggttgaatatcataaactaatccgggatcatttgctcttgatggattcacatgaccagaacctgtggcaaagatatctgcagggtaaagtgtttcatcaacaatgagtttgtgttcaaaattgattatgtctgcagaagtcattatggcagattttatggcagctggtgaccagtgaggatgagagcttttgagcaaagcagctacgccactaagatgtgggcatgacattgatgtgccagacataatgttgaaagtggattttgaatcagtatcgttattcagggggaatggccaggcagctaggatgttcacgcctggtcctatgatgtctggtttcaaaataccaggacttggcaagttgggacctcttgaagagaaggatgtaacagcaggagctaag

SEQ ID NO: 29786 - DNA, 494 bp, Glycine max
  Clone ID: PAT_MRT3847_12689C.1
gagattttgagcgctaagttgattgacctcttactattaatttttatttctgaatatagatttcgataaatctgaatttatgtgtgacttattgtacacataacctgtgcctatgtcttgttttgctacaataggagaacatagtacctaggctagcccgacgagcagcctctatgtcactttgttacccattcaatacgtgtctcctccttctgcgttctcatatcttaaggttcgaaaaccccacaatttcgacactcctcccattcttctttctttgttgatcgattatttgcattcagtgccttaggatgcgaccctggaagaatgtggaacctgtgttaattttcggtcaacttttttgggtattaatggtaattacttattaatgagaccctaatcattaaccaatacagatcaacacattcaatttaacggaggaactaaaattctgaatcctgaaaacaaggagatcaaatggctaaattagaaac

SEQ ID NO: 29787 - DNA, 462 bp, Glycine max
  Clone ID: PAT_MRT3847_1268C.1
ttttatactcaatcttcgccgcctttcttccccgcaccggctcacagactcaccaaacacagattttccccttctctggtagtactgttcaaccgtgtactgtctgttaaggatagcaataaactacttgttgcttcactgaagatacagtcatctattgatctccagcgtcaccgcaaacacaccaacacacatttcgttatttgcatctttcgagcgctgcacagactcatcaaactcgttgtgactgcagctgcacagattttcctcttctttgtgcctttgcgagaacgcgcgtttggtttcaattcaatggcaggaggtaaagcgaagaaggaaaaggggaagccccatcagcagcagaagcacatgccctaccagggcggaatatcgttccacaaatcaaagggtcagcacattctcaagaaccccttgctcgtcgattccattgtggagaaggcc

SEQ ID NO: 29788 - DNA, 151 bp, Glycine max
  Clone ID: PAT_MRT3847_126900C.1
ttccattccatcacaatgttcaaaacataaaggagacgattttttttattcagaacaatctcttagatatcaacaccatcaccatttcttacgctatcttctgcacccacttaaacttcttatgcattacactctattcaattactttttt

SEQ ID NO: 29789 - DNA, 391 bp, Glycine max
  Clone ID: PAT_MRT3847_126901C.1
tcgttccaaggaaggtttcccgtcatcactgtatgacgtcctccttctttggggggggggggggggggggggggggggggggggggggggaaggaaatatgtggtaactgtctataaaagggaggtaaacctatatgaaaaagcccaacagaggagacacagatatacctagccccagatgggccattgcgaagaggaaggagagacagggacgattacagcccccccttggtgggttagcaatggttgtagtggtgggtggaatggttgggggtgtacccccggtaggtaacataaaattattactattaatacgcttggagcttctaagtgttgtggtgattgcgcgttgcgtaatacatgtgcccctgggtgcccttgtacgtggtgt

SEQ ID NO: 29790 - DNA, 298 bp, Glycine max
  Clone ID: PAT_MRT3847_126902C.1
ctttgcatgctatacactcccgggttcgggccttctttcagaccagttaggaaatacataaaaaaaaaacgcgttttgtcgtccctttctgagcgtaacttctttgtttcgacttgacccctaattcgcgcccattcccccacatcacatccctctttttataaattccaatccctttcccagtttcaccaaaacctaaacctaaacctaaacctaaacctaaacataaactgaatttcccaaatcccctttcccatttttcaccaaaacctaatactcccaaaccaatcttcgatca

SEQ ID NO: 29791 - DNA, 237 bp, Glycine max
  Clone ID: PAT_MRT3847_126903C.1
atagcattcgagcttctattaccactattactgctacacccataaccatgaccatggcataggccgcacaatcatggactacaatctgccggcatctcttactatcactatgcacatattgcgctatcaacagaccaaactcatgacatggtcaccattgtctcaccgatgagaatctacattgcacttaccatcatttgatcaccttacactgcatctttaaccactgactccgat

SEQ ID NO: 29792 - DNA, 1587 bp, Glycine max
  Clone ID: PAT_MRT3847_126904C.1
cccacgcgtccgtacggctgcgagaagacgacagaaggggggatttagacgccattgtcaaacccttttcacttctctctagggttttggctctctctctctctctcccttccttattcctttctacctctcacacccttctcaatgaccaacgacaacatcgccgtgacagatctcacttccgccctcaatgaagagaatcgcgccgacctagtcaatgctctcaagagcaagattcagagtctggctggggctcattctgatgttctggagactctatcccccaatgtcaggaagcgtgttgaatctcttagagagattcagggtaaacatgatgaaatagaggcagacttcttgaaggagaaagaagctcttgaagccaagtaccaaaaattgtatcagccattgtacacaaagcgctatgaaatcgtaaacggtgttattgaagtggaaggggcagcaaatgaaacaacagatgaatcagaagaggataaagagaaaggagtgccttctttttggctcaatgcaatgaaaaataatgacgtgttagctgaagagatttcagagcgtgatgaaggtgctctcaagtttcttaaagatatcaagtggagcaggatagaaaatcctaaagggttcaagcttgatttcttctttgataccaatccttacttttcaaataccatcttgacaaaaacatatcatatgattgatgaggatgaacctatattggagaaagcaattgggacggaaattgaatggtacccgggaaaatgcttgactcagaaggttttgaagaagaagcctaagaagggttcaaagaatgctaaaccaattaccaaaactgaaagctgtgaaagcttcttcaattttttcaaaccaccagaagtccctgaagatgatgctgacattgatgaagatttggctgaagaacttcagaatcagatggaacaagattatgacattgggtcaacattaagagataaaattatccctcatgctgtatcatggtttactggggaggccgctcagggagatgagtttgaagacctggaggatgatgaggacgaagaggaagatgaggacgaagatgaggacgaagaggatgacgaggacgaagacgatgaagaggaggatgacactaagactaaaaagaagaagagtggtaaggcacaggctggtgatggtgatggtgagcgacctccagagtgcaagcagcagtaattgtttgtttcttcggagtatcatgtggctgatgggtgtttttgaggtcctatggtgcctgacgggaaagtgggtttcaatttcatgcaatttttcatagtccttgattcattttcctccctagatccgatagtctgaatttattgagtcaatttctcctttttcccatattttgggagaatgtggttatatatttgtagtcagggatgctgtgatttgttactgttggaatttgtacgtcattccagacacttcacatatattataggttgtgctttgttactattatttttcttattaatttatttattcacaattttgttaacttgtatttatattgaggcaagaagttcattttttccccct

SEQ ID NO: 29793 - DNA, 507 bp, Glycine max
  Clone ID: PAT_MRT3847_126905C.1
atcactggatgctcattgataggttacatggttggtaccgcaactttatctcacagattaggtggcctttactgcctctactgtctttatgagactcaaccatttaatccttcttttaaggtctatctatcccttggagaattaaagaaacttagaatccttgttgctgatgcaaaagcaaatgatattaaagtagcacttgctttagtaaaaagaatgcttgaaagaaacacattcctttttggctctgttgacttgatggaaggttgtgtcacagagacagtaaatgaactccaacaattacagaatgcccgtattcaagttgcatatgaaaagttatttgatagcacttcaattgacaactacatccagatggaccttggcttggaagttgaccttgatttgctgaagaaaaagtcatctggatatgccacggccaagaatgtggctattcaagaggcgagcaatattttagacgttgaaaacataaagcacttacaaaaagat

SEQ ID NO: 29794 - DNA, 490 bp, Glycine max
  Clone ID: PAT_MRT3847_126906C.1
gagagaactagtctcgagttttttttttttttttttgtaagtgatgaattaacctttgaaatgtgaacttggttagttggatgcatgctgatgatttcggagactattttgtataattgaaaggttttaatgaatatgagtactgaatactttgagaattcgaaggaattgatgcttattaggaagtgggttttatttgtagtttgtgtgattattatttgggtttaattaccatgttcagcatcaataaatcagaattcatggtagatattatgaattttaaggtaataattaattacaatgaaagtcaacaaacttatcgcatatactaactgtgatcagatgacactgtaaaatcctttacattgcccgtacatgcactatttcctcttattaatttagtttttgattttactttttcaattgagattgagattgaagttaatcaaagaatgtgtaacattgaaagtgcatttgaagcatctatata

SEQ ID NO: 29795 - DNA, 2162 bp, Glycine max
  Clone ID: PAT_MRT3847_126907C.1
accggtccggattcccgggtcgacccacgcgtccgctctctctctctttagggttttggctctctctctctctctccctccttattcctttctacctctcacacccttctcaatgaccaacaacaacgacaacatcgccgtgacagatctcacttccgccctcaatgaagagaatcgcgccgacctagtcaatgctctcaagagcaagattcagagtctggctggggctcattctgatgttctggagactctatcccccaatgtcaggaagcgtgttgaatctcttagagagattcagggtaaacatgatgaaatagaggcagacttcttgaaggagaaagaagctcttgaagccaagtaccaaaaattgtatcagccattgtacacaaagcgctatgaaatcgtaaacggtgttattgaagtggaaggggcagcaaatgaaacaacagatgaatcagaagaggataaagagaaaggagtgccttctttttggctcaatgcaatgaaaaataatgacgtgttagctgaagagatttcagagcgtgatgaaggtgctctcaagtttcttaaagatatcaagtggagcaggatagaaaatcctaaaggattcaagcttgagttcttctttgataccaatccttacttttcaaataccatcttgacaaaaacatatcatatgattgatgaggacgaacctatattggagaaagccattgggacggaaattgaatggtacccgggaaaatgtttgactcagaaggttttgaagaaaaagcctaagaagggttcaaagaatgctaaaccaattaccaaaaccgagagctgtgaaagtttcttcaattttttcaaaccaccagaagtccctgaggatgatgttgacattgatgaagatttggtatgacagtctgtcccaataaacctaaggctaaaaatatgaagcttttgtctattgctataataacttaattttttcaacaggctgaggaacttcagaatcagatggaacaagattatgacattgggtatgcctaattgctaccttttgcttgtatgagctaccttatatatgagctaccttatatttttcttgtccaagctgttgcttgctcttagcataatttttcttgtccaagttgttgcttgctcttagcataatttttcttgtccaagttgttgcttgctcttagcataatttttcttgtccaagttgttgcttgctcttagcataactgttgttgctacttgcacctgtattcttgaatctgttcttagttaatcttgattcctgtgtaggtcaacaataagagacaaaattatccctcatgctgtatcatggtttactggggaggctgttgagggagacgagtttgaagacctggaagatgatgaggatggagatgacgatgaggatgatgaagaggaggatgaggacgaagatgatgatgacggcgatgaagaggaggaagacagtaagactaaaaagaaggtatactgttaattgatatggagtgttgaaaccttggtttattctttattttatttgaggtttgaacgtgagttaatgcatttgtttttcacctgcactgtgttgtcaatttcctctggaatgttgctgcagtcatctgctgttaaggtgagatattttgattttgtgatctgaatgaaattatatggacacatgattttgcccaagatatgtcatgtgttttctgttataaatttgttttgcttgatgttgtatactttacattctttatttttcattgctctggtcattgcattcctgatttccattttgggttataaattttcagaagagtggaagggcacaggctggtgatggtgagcgacctccagagtgcaagcagcagtaattgtttatttcttcggagtgtcatgtggctgatgggtgtttttgaggtcctatggtgcgcctgatggaaaagtgggtttcagtttcatgcaatttttcatggtccttgattcattttcctccttagatcctatagtctgaatttattgagagtccatttcttctttttcccatccattttgagagaatgtggggttatattatagtcagggatgctgtgatttgttactgttggaatttcattccagatacttaaaatatatcataggttgtgctttgttactaaaaa

SEQ ID NO: 29796 - DNA, 533 bp, Glycine max
  Clone ID: PAT_MRT3847_126908C.1
tcccgatcatcactgtatgacgtcctccatctttggcgtcggtggggggaagacggtacatggtacatgggagatatgatgaaaaagagggtgaaccaatacgctaatatgtggaatataaggtggtgagggtgaagagtgggctatagctctaaaatacttggtagtaacaatagcacatacggagcgtaacgcattaggggtaaccaacgtctataatgggtggcggggaagtggggtaggcttgaaaagtgacaccataaaaggtatggggtaaagaaaaggaagggttgtccgacaggtgcgtgcgcaagataccagccacaacgtgtgaaccgttagtaacgcggcttaaccatgtcggaaccacttggcccttggtggtgtgttgtggtgggagcgtggttatgcatggcgggatcacgtgcgagtgcaacggttaaaagagcaagtaagcggctgtgtcttgcacaccatctaagcaagggaaaacgcagcgaacgggggcaagataccgcaaagggtggtgatgt

SEQ ID NO: 29797 - DNA, 232 bp, Glycine max
  Clone ID: PAT_MRT3847_126909C.1
atgggctgctcttgccacatgggttcaagaatatgtgcccttgcactgtgcgggatcatgttgatgatcaacatgtatacctgcacgtcaacatcggtggaacgaagctgttgacaaaaggcgtggcgatttgacagacattctatggcggcctaagtcggggacacttctagaccatcttgaaacacgcctcattgtcatatgggtcggttctggtcttgctgcactggtt

SEQ ID NO: 29798 - DNA, 221 bp, Glycine max
  Clone ID: PAT_MRT3847_12690C.1
gagagctataagtcaccagcttctagtttcactactcgattggagaatctctacctcacgatccctatgttctcttagagccatcatgtcacaatctgatcatacctctgcttttaccagacgcagtgcgatcctctataaagtcgaagctccctttgatcatgcagattatggagcagacgttggaggaggcgaaggaaggagagcgtagaaggtgttgg

SEQ ID NO: 29799 - DNA, 269 bp, Glycine max
  Clone ID: PAT_MRT3847_126910C.1
gtttacctatatacgttgattcaatgctcctggcatatgaatgttcacgtgtatataacacttagattgtccttgtagtattggaatcagcttcgcgtaaatatggagatttgacctgtcctaattgtgggaacttcaacttttcttttagaactgtttgcaaccagggacactgtcgtgccccaagaccatccctagctgtaactccaccagcccccgttataggcccatatagaggcagtcatcccgtctaccatggtggttttggc

SEQ ID NO: 29800 - DNA, 447 bp, Glycine max
  Clone ID: PAT_MRT3847_126911C.1
aaggtctaattgtattaaactgtttttccttgaatgcgctacacattatcacaacaaatacttgttttctacttatgaaattctccaccaggacaaggccctacaccgaatgaaaaggacttcgaactgcccaacatactttgtcaaatttaggtgagactttatttttttgtatgttgtcaaatctaaatgattggaggtagtaggagtaaccgattgcagaattcgtcctaaacagtatttgtcaaaaaattgtcaccatctattgcaaaagaggacgcttcctacagcaaaaataatcatttcaaaatggaagctaggcaaaatgacgaacagttaactctctcacttctaccaactcaacctgttagtgaaaaacagatattcgcaattcccaacttctgaacttagaaaaacgccgctgattcaaaaactatctaaagcaac

SEQ ID NO: 29801 - DNA, 270 bp, Glycine max
  Clone ID: PAT_MRT3847_126912C.1
ctcttgccttattcggctcgaggatgatgaagaggagggaatttataatggcaggaggggaacacatagagatcatcaagatgatagaatggattacggcagaacaggaagagataaatatgacaggcatagagatagatatgagaggcgcaggagagatgaacatgaataagagcattggcgtggaacggagaatggggatagacatggcaataggaagggtttacatcacgtgtcttttgaacttgaattatatccagtttataaagg

SEQ ID NO: 29802 - DNA, 521 bp, Glycine max
  Clone ID: PAT_MRT3847_126913C.1
aaaaaaaaaatattttatataaaaaatttttaaaaaaattttaaaaaaaaaaattaaaaataaaaaaaaaaaaaaaaaaaattaaaaattctatttttaaaaattaaagttttattaagtgatcaataggtttttatatgacattttttgtgatttaattgggttttatttattgaatgggttttttggatatcccagtttgtaaaactttttaaattgctaatttgttttctttttttaatttccctttatttcctagggtgcttttccaatgggtctttcccatgtaattgttcattaattttggccattttgaattttatttgcgacgtgatttttaccggtgactttccctttaaccccgaagatttccctttctttttttccgttctattatacctccccgttttgctttttccttttttttttttgcttttttttttagtttttcgatttagtttttcaatgtggggcttcttttagggttttgctttaggtttttgattaccttttttttctta

SEQ ID NO: 29803 - DNA, 155 bp, Glycine max
  Clone ID: PAT_MRT3847_126914C.1
ttatgtctgtgccagtgtcacctggggtgtgtatcatagatgcgagggacatactctcgtggaccccaccaatgacactcctgactccacttgacgtcgtcatagccgtggcgaatacgttacattattacctatgtttgcttgtctgacagatt

SEQ ID NO: 29804 - DNA, 528 bp, Glycine max
  Clone ID: PAT_MRT3847_126915C.1
accagaaaacaaaagggcaagaaaagcattggaagaaaggaacagaggagaaccggccgagacggggtaggtggcaacgccggagcaaaacttagcaccaaaaaacccgaagctggggtgaggaaccaggaaaaacagaagaagcattgaaagacattgaaaaggcccccccttctgcagcagagggccgggcttagaagaatttcagggcccgctcagaaaacaccaggaatcaaaagaatatgaagggaaggattgaagaaacacttttcaagaggcaggggggaaacggaaaggcaccctaaagaggcccggagagaagagaaagggggaggaaaaggccaagaaagatgaaagaaggaataaggaaaaaacgaccctggacataaaaaattaaatggaaggaggtctggaccaaaaggggggaaaagtccgtttgagggccgggggggaaccccaaacccgagaccggcaaaaggggacagggggccacaagccgcggggccaagaaggggggaagggagggcg

SEQ ID NO: 29805 - DNA, 249 bp, Glycine max
  unsure (1)..(249): unsure at all n locations
  Clone ID: PAT_MRT3847_126916C.1
ggcaaaaaggcancanncaccgggcggcnccanccnnggcagcccagccgcaccaaccggncggcagnagcaacgcaaggagancacncnagngaacgggccaaagccgngaagagaaaaggcagnnangcaangacaggangnagcaacggaaggaggaacccgangnncgccgggcggcggnggggggcggccggcgggggacggagnggcagangagccaaaccaggaaccccagaagccaagaaa

SEQ ID NO: 29806 - DNA, 430 bp, Glycine max
  Clone ID: PAT_MRT3847_126917C.1
cggacgcgtgggcgaacgcgtgggggcttaaagtgtctgaagcttcttgatgggttttccttcttgccccctgacaaagcatcactgctaagtggtaacattcaattggcagagataggtcttatctcaaaagataatgcttgaggtagctcaaaattgtgatagagttcagtagttccttttttattatcaggcagccatttgttatctatgttctttttgcatgaaaattttccatttcatatctagatgatcaagaaatcgaattgggcatgataatgctacagaaattcctcctaaaacagatatcacacttctctgctatacattagatgaagaaaaatactgttcctttttattttgcagttgcttaatcttgagacatggatgtccaataaagaagtttgtaataaagttttgattggtttgg

SEQ ID NO: 29807 - DNA, 1807 bp, Glycine max
  Clone ID: PAT_MRT3847_126918C.1
gaccgagacattagaatatcgtatctttgcttttccttctctttctcttttttcctccaacttggagtttttctctcttcaaaggcaatgttccctgcagttatgtccaattccaattcctggtccgaagaggccactgtctcctgtggtacaagaatcactggactcaatcacgttgtcacaacaaccatttctccacaacaacctcaaaagatcaagaaaaagagaaacctccctggaaaccctgacccagatgctgaagtgattgctttgtcaccgaagactcttctagctaccaatagatttgtgtgtgagatctgcaacaagggtttccagagagatcagaaccttcagcttcataggagagggcataacctcccatggaagctgaagcaaaggagcaacaaagacgtgaaaaagaaggcatatgtttgccctgagccttcatgcgttcaccacaacccttcaagggctttgggggacctcacaggaattaagaaacactattgcagaaaacatggagagaagaagtggaaatgtgaaaagtgctcaaagatctatgctgttcagtcagattggaaagctcactccaaaacctgtggtactagagaatatagatgtgattgtggaacacttttttccaggaaggacagtttcataactcacagagcattctgtgatgcattggctgaagaaagtgcaagactatcagcaaataatttagccgctgcagccggcgccaccgtcaccaccacaacaacaaacccattccaatctctatatcttttccaaacccaacaacagaacttccaaaaccaccaaatgaccagtttcaaccaatgggactcatctcaagaaaaccctaaccctagcaacaacattgccaccacttccctccacatcgagccagagtctcaaagcttccacaaccccaccctctcttcatttctccaacagcaacaacaagggcaacagcccaacaacaacaacaggggcatgatagcctcaccatttgggaacctccacgtggcagcagcagcacctgccacgtcatcatacatgtcagccactgcgctgctttcagaaggctgcaaccgttggagccgctgccataacaggcccagtacctgttgggccacaacagcgcgtgaggggtcacgtggctcaccacctcggcgcaggcgagttcggaatcggtacagtgagtcaactcgacccggtggtgttggtgccagataacaacaactacacgagaacaatgttcaagagtagtgaccgtctcacaagggactttctgggtctcacggcagatgctaacggcggcgcggttgacgttagcaccaacgtcaaggatatgctagcgttcactggggccgtagagtaccaccaagtccaaccgcaccgtcaacatcatcaccaccacgcgcttctgaagccccaacaaggcttcggtttccttgggacaaccactgcccccgagacgtggtggaattgttagacacagacaggagaataattccaagtcacgagggtaaaataggcaacacaactttgccattacactgacccttgactcttgaatcgtcaatcatcaaatctgttttggttttaacacctcgttatagatttttttttttcaatccactttagacttcacatcttagttttgattgttgttctctcaatttaaatcaagtacaatgctttagttcagtttttttttatttgactgaatattaatatatttggtgctttgttgtcaaaaaaaaaagaaagcccctctctctatatatgatctgttatcatt

SEQ ID NO: 29808 - DNA, 533 bp, Glycine max
  Clone ID: PAT_MRT3847_126919C.1
aagcataagcgcgaacagcaagagcatgcgctcgttcattcagcaggcggatcattcctcgcactagaccaaccttacctcgaccatggagatgtacatgatcgtcggcaaggaccatacgcagccatcgatgacggaccgccggagatgcagcatgcagcgtctacaggactattcgtcaatgttccaagtccaacaagaggtcttcgaaatggccttgccactcgtccatactcataccaccaagcaccccgatatgacgaggtacgcgtcagtaaagggagcggcaacattcatcccatccttgagcgtcaagacgaagacgatcttgagcgagggggtaatgtgcgcaacccattctcggatccagctcatggacccgagcctagcccgtcacacgacagatttagcaacgctgaggcgaagcttcatgagttcaaacgcgtgctcaattctggactggatatgctccatcaacgatccattcaaggacccgcacccaatccgtgggcagtacccaactaccgggatct

SEQ ID NO: 29809 - DNA, 1218 bp, Glycine max
  Clone ID: PAT_MRT3847_12691C.1
ggctcgaggatcaaggtgaagtgctatgctacatggtgcggctggcgattcagcggttccgttccctcttcagacaccaccactgaggagtttctcaatgagaaccaagttgaccaccccgtgtggctcattgccactgtggggttgcaagaatcgatcatcaactccatcacggtttgcaagtacaagaagaatgaagggttggttgaaggaaccgagtgttcggtgtgtttgaacgagtttcaagaagaggagacattacgactcttgccaaagtgcaaccatgcttttcacgttccttgtattgacacttggttgagatcacacacaaattgccctctttgtcgtgccggtattgtttctaatagtgtcaattctgaagcaccagcacccgtgtcgaattcggagcaagaaaatgcaaatttggggaggaatcaagatacccttttggacaattcacggattaatgaaggtgggttaagcagcaacatggttgctggggaatcaagtgaagcaatagatgaatcaaattctaaggatcgggtaaatgatgaaactcagaacaatggggttctgatgaatattgagattcaaacagagatggggtctgtttcaactacagaatgtgaaagtcatcgtgttgttgatgatcataaacatgatgatgacacaatgttgcacacggataatctagggaagcaagatcaagatggtgattactactactcaaaaacgtgtaaaacagtgcgtcgttcctctattgaagagtgtttgcatttaagcccagtatctatgaaaaggtcattctcctcttgcaatggaaggactctaacttcgagaggttacatgagtctaaactctaaactcaattcatccctactagagttctcattttatgaaagatgaacatattgatgagtaacatgatgatttgatgtccattttactctcagaattttgagggcaccctaggttggagtttgaacattgacaatggtataaacagcaaattgtgaaagagaaaagaggtcaattttaatgaagaataaaatgtaaaattgtaattgaagttttaccaagtgctcgggcattgaaaataactctggtgtatcatgtatgcaattgtatcacacatcacaatgcccagtgttgcactgcagaacaggtttgctcccacaaaagggaataaggtacattaaatgctctattttttgcttc

SEQ ID NO: 29810 - DNA, 294 bp, Glycine max
  Clone ID: PAT_MRT3847_126920C.1
gattcacacaactaactaagaaagtcttccatagccccccatgaaatgaagagcaccatcttctttgctctctttcacttttgtgccttcagcatctcatacctaccttcagccagcgctgatttcgtgctccataatgagcgtagccctcttgataatggtggtacatattatatcttgtcagacacaatacgatttggcggactaagagcagctccatgggtaaatgaaagatgccctcgcactgtggtgcactcgcgcactgacctcgatcaacggattggattaatcatt

SEQ ID NO: 29811 - DNA, 392 bp, Glycine max
  Clone ID: PAT_MRT3847_126921C.1
catcgatgccgtcctcaacccctccaacaccaccattgctggatcaggtgccaccgctggtgccgtcgccttctctggcgcttcatctgcttccaacgctcctttcacctctggccaacccaacccaacccggtctggtgcaccccctggatcgacttcccgtggtgctggtggggcccgtgccttcaacctcaaccaggcttgtgcttggcaagccatgccaaccggttccgtcggcgttggcgccattcttggaaccgctggtggtttcttcttggaagatgcctgatggggaaaacatttgtggataatgggaaaaagagatgagaaggaggcggaagtgtgttcatagtttcaaatttctttgtgatattagtcacgtatagtcacga

SEQ ID NO: 29812 - DNA, 579 bp, Glycine max
  Clone ID: PAT_MRT3847_126922C.1
ggaattcgctctatgcacccttgaggtcctttttgttgcttcgcacatcttcatcttcatcttcattcttctaccattagtgatctcactttctttgagtgaagcaagttttttccaatcggttgtgccgtaatctcattgtatcattgtaaagcacgtctcgaccaagcggttgagtcgcaagctcattttattattggaaaataaagtttcaaccgaccatttacttcacaggtcatctttcaatgagattgaaggtaactaagggaaccccaagttaaaatcaacgcatagccaagcttttatccataaaaatcacttaactccattaaaggtccaacgccttaccggtctcttttaattgtatcggttaaaatgaacctttccaaagtttaaaatcagctctacgcataactttcttgctttggaagaattacgtaggcactgagttccttatcgcgcttgaggatccgtaggagcaagggtcacactcttgctgacccaacatgtaagaatcgtataaaagggatcgtctaataaatcttggagtcattattttgcgcacttgattgaaggatg

SEQ ID NO: 29813 - DNA, 265 bp, Glycine max
  Clone ID: PAT_MRT3847_126923C.1
ctcgacacggccgccctttttagacagaagaggacttacacgcatttgctttcaagggaagcggtgcatcactatgggactggccatcaagactcttacccctgagaacgacaccatagctgagggggcttatactacactctgacgaagacactgatccatgagcgctccagattaatctatgcacacattcatgagggtggcccgccgaagccgaacgtgcctgccctaatatggtacgccctggaccttgtgtctccacaac

SEQ ID NO: 29814 - DNA, 1060 bp, Glycine max
  Clone ID: PAT_MRT3847_126924C.1
gatttgttttatcaagcataaccgcatcttaaaatttgaagtgataaagttgttgtcattttttattttatcttgactaattcgtatgtatgttaaattatgtctgtcacaataatgatatatattttaaattctagcttaaggttatttatattgaattatgaacaaatatgttacattttcaaaattttaaacaaatgcatagctatacatgcttataaatatgttgaattttattaaattttaaatcttaaatgtacaaaattacatgatattaaataatttaaattttttttagtataaacccgttcatgcggatcaactgatgattcactaggttgacttttgtcccaatgacctagtactccgaccaagttgataattggtcccaatttgataagattgcctttagcttttcaactctttctttttccttgtgcatatattattaaattctgtggcattggctcatgcggttgatctttgttctgaaacaaattggaatgtatcattgcttaatgtactttatttgggaaacctgtacctcaacattactcatgattaagcagcatctccacttatttttgagaatataggtacatatgcaggtttggttggaccagtaaaaccactggttataagaactactatgtttgtgagcagaaggaaaggtcccctacagaacatgcataaatatctgattctgaacataacacctttttatcaaattttttaatgtaagatgcatagcatcaatccctgtgtgatatctacagtgctgtgtggttccttttggcagttctcctccatctttgattcccactaaagctggaattgattctaatatctaaatgcttttttggaaacgttaggatgctaatggataaatgagttgtattaattaaaaatttagatatggaaaacatgctagggtaaaggttgatacagggacagtatctgattattgtggaatgtattcatttaatttgctgggcaaaattaaaatggaaaattttttaggatgttgttagtgggtaaaaaaaaaaaaaaaaaaaaaaaa

SEQ ID NO: 29815 - DNA, 264 bp, Glycine max
  Clone ID: PAT_MRT3847_126925C.1
tctctctatcacgcttacatgcagctgccactgtcactaaaaacgtaaattttaaacatctacgagcctctatttttgctctcaatctattgtatgcttagggccaatcgttaatgataacttgatgtctagatgatgcttcctgattggttgtatacatattgaaattcagaatgtaaaacttttacatctaaatgcattgctagaactgtagcactgaaaaaagattcatagcctactcattctgctaactaatgttcagat

SEQ ID NO: 29816 - DNA, 301 bp, Glycine max
  Clone ID: PAT_MRT3847_126926C.1
ctagcatgtaggactttattcacttaaatacagcgcattactatgtgcaatgagtgtgtttagatatcaaaaacactgataatactctcatgccagctttttctgttccacaagctactcgccagaacttctgaaaatgcggaatcctctgcatgatctggaatttgtgttcactttcgcttgatcgatctgtaaaactcaatgggggcgccccccccatgaccgtcttgttcccccgggatttaattctgtgccggtccccacaggcttcccaaattttccataatgaggtgcgaataag

SEQ ID NO: 29817 - DNA, 1223 bp, Glycine max
  Clone ID: PAT_MRT3847_126927C.1
ggtgaatgcaacacttggatggaataccgaactactacagcaagcatttccagcgttttctagaaacaacttcattcttctctttctctctatctattcattcacgtttgggagatagaaaaggtaagggaaaatccaaagaaagaaaggaaacggaataattcgatacccctctcgtctcgtaactaaccatggcagcgttccgatggaagagcttcgaggagaatgaggatcgcccagccaagcctcgtcattttggcgtcaccgagattcaaagcccccactgcactctcttctcccacaaccttcttcaggatatttttgaatctatgggagactatgtagatgggttaaagttttctggaggttctcacagcatgatgccaaaggctactatcaagcaaatcattgacatggcccatcagcatgacgtgtatgttagcacgggtgattgggctgagcacatgattagcaaaagtccatcaggtttcaaggaatatgtagaggaatgcaagcagttggggtttgacacaattgagctcaatgtgggatcgcttgagattcctgaagaaacctttttgagatttgtccgcttggtcaaaagtggtggtctcaaagctaagcctcattttcaagtgaagtttaatgagtctgatattcccaaaggtggtgacagggcttatggggcttatattccccctgtacctagatcatttgaattggtagaagatgtgaatctcttgatcagaagggctgagagatgtctggaagcaggtgcagacatgataatgattgatgctgatgatgtcagcaaacatgctgataacatgcgtgcagacatcattgccaaaatcatagggcgccttggtattgagaagactatgtttgaagcatcaaatcagagaatatcggagtggttcatcaaacaatatggtccaaaggtgaacctctttattgatcattcgaacgtggtggatgtggagtgcctcagggggcgcaacttgggtagaaatcttgcttctttccttggtgcttcagatttcctgttctgaagtgagggaattttcgtatagcaccaagtggggttgatttgtttgtgcataatgcaaagacttgaggtttgccatgtgtgttacagttagtgtgttacatatttcctttagtgattgaagattggaaaattttaaatggagagactgaaataaatgaaacatatttcatga

SEQ ID NO: 29818 - DNA, 1490 bp, Glycine max
  Clone ID: PAT_MRT3847_126928C.1
gttgtgttgtgttgtgttgtgtaacaatggctcagttgaaagcatcccctgttactgctccttcccttcatacaacaggtgttgccctacgtggaaaattgagtaaggttgtgctggcttacagtggtggcttagacacatcagtcattgttccatggctcagagagaattatggttgtgaagtcgtttgcttcactgctgatgttggccaaggtatacaagaattggaaggtttagaagcgaaagctaaagccagtggggctagtcaattagtggtaaaagacttgaaggaggaatttgttagtgactatgtatttccttgcctacgtgctggtgcagtttatgagaggaagtatttgcttgggacctcaatggcccgccctgtaattgcaaaggccatggttgatgttgccaaagaagttggagctgatgccgtttcccatgggtgtacagggaaagggaatgatcaggttcgttttgagctcactttctttgctctgaaccccaagctcaacgttgtggctccgtggagggagtgggatattacagggagggaagacgctattgagtatgctaaaaagcataatattcctgttcctgtgacaaagacatccatggatagcagggataggaatctttggcaccttagccatgagggagatattttggaagacccagctaatgagcctaaaaaggacatgtacataatgtctgtagaccctgaggatgctcctgatcaaccagaatatgtggaaattgggatagagtcagggcttcctgtttcagtgaatgggaggaggctttcaccagcatctttacttgctgagctcaatgagattggtggaaagcatggaattggcagggtcgacatggttgagaatcggcttgtaggtatgaagagccgtggagtgtacgaaactccaggaggaaccattctgtttgctgcagcacgcgagttggagtctttgacacttgatcgtgaaacaatacaagtcaaagattcattagcccttaaatatgcagagttagtgtatgctggcagatggtttgatccgcttcgggagtccatggatgcctttatgcagaagatcacggagaccacaacaggttctgtgactttgaaactttacaaaggttctgttactgcaaccagccgaacgagtccctttagcctgtataggcaagacatttcatcgtttgaaagtgggcagatatatgatcaagctgatgctgctgggttcatcaggctttatggtcttccaatgcgggtccgagcaatgcttgaacatggcatctaagtgttcgtttcatttccacatgtacttcatttcattgtccatttgcttgtttagacttgaagctagagagtactatggattgatagtcgatccgatcatccgaaccttaataaaatgaatcgtatttaatattcatcctgaaattcaagttcagatattaggttcgagcaatgcttgagcagggcatctaag

SEQ ID NO: 29819 - DNA, 263 bp, Glycine max
  Clone ID: PAT_MRT3847_126929C.1
gctatctcgatgaactgtccaaggtcctgtcactggggccccaacaccgtcacggggatagtactaagccgcgatcgtaagctgtacaaagtaaaagttgatggtaacagagagtaacgtaacggtaagagaacaacacacccaaaaattgaggattgcgttccgaggtccagcaggaagtacgatactgctaaagagaatatgttgaacgattcaggggtgcagtctgggactaatgaccataggcggctataaagaagagt

SEQ ID NO: 29820 - DNA, 969 bp, Glycine max
  Clone ID: PAT_MRT3847_12692C.1
tttttaatagccttacaaagtacaatggtgacaaaatggttcctgttccagcatcacaggttaaacaaattgcaggaagagctggtcggagaggatgcctttaccctgatggactcgccacaaccttgcatttagatgatttggactacttgattgagtgtttgaaacaaccttttgatgatgtaaaaaaggtaggcctttttccatcttatgagcaggttgaattgttttctgggcaacttccagatttgacattcacccagattttagaaaaatttggtgaaaattgccgtttggatgggtcatacttcttgtgtcaacataatcacatcaagaagattgctaatatgttagagaaggtccagggattatctctagaagatcgttttaacttctgttttgctcctgttaatgttagagatccaaaagctatgtaccatttgcttagatatgccacatcatttggtcagaagctccctgtaaatgtagctatggggatgccgagaagttctgctcgaaatgatgcagaactcctggaccttgagactaggcatcaggtattatccatgtatttgtggttgtcaaaccactttgatgaggagacgtttccatatgtgaagaaagttgaggcaatggcttcatgcattgctgacttactgggtcaatctcttgtcaaagctaattggaaacctgaatcaaggattaaagggagaccaaaaaccgaaaaaagtgaagggcaactagaaacaaggagtgcagttgaattacaaactgaaaaaacggaaatgggctattcaaggacacgatcgcttttaaaattatatgagaagtaagtgtccctagatgtatctaccttctttatccaagtgttcatttaatttcactaaatgttgagtgcaaacatctctcctttgctagcaaacttctgcactttttaccatctaagtgtatggcttctttatctaaaaa

SEQ ID NO: 29821 - DNA, 165 bp, Glycine max
  Clone ID: PAT_MRT3847_126930C.1
ctggaattcggctggaggtgtggcggcgttaaaatcaaccgctttcactgaggcgggaagagtactaccatcgacattctcgcgtctagggcataaagagacactatgtctgtgcacaccattcagacttagggagacatacgatttgctggcttattacacaaa

SEQ ID NO: 29822 - DNA, 469 bp, Glycine max
  unsure (1)..(469): unsure at all n locations
  Clone ID: PAT_MRT3847_126931C.1
ctttgatttcaaacagagagtaacaatgactcagttgaaagcatctcctgcgtctgcgtgttcgttccttgccattgctccttcctttcatcatgcatcaataacaacagggcaccttctgcgccatcaattctccaaggcaaagcctttgtcactcaaagagctggggctaaaaacaagcgttggtgccaataaacttcaagttattaaagcagctgcacgcattgatacagaggtagtttctgaaaccacgaagggtggtggcctacgtggaaaattgaataaggtggtgctggcttatagtggtggcttagacacatcagtcattgttccatggctgagagagaattatggttgtgaagttgtttgcttcactgctgatgttggccaaggcataaaagaattggatggtttagaagcaaaagccaaagccagtggggcttggcaattggtggggnnggacttgggg

SEQ ID NO: 29823 - DNA, 1285 bp, Glycine max
  Clone ID: PAT_MRT3847_126932C.1
gcaagacgccgctcaaatacacttttaatagaactctctcacagtttcactcactgactgaacttgtgttgtttttgcaacaatggctcagttgaaagcttcccctgcgtgttcaacccgtgccactgctccctcatttcatacaacagggcacctgtatcatcatttctggaaggcaaaaccttcgtcattcaaagagttggggctaagaacaagcgttggtgccaataaacttcaagttattaaagcagctgcacgcagtgatacagaggtagtttctgaaaccacaaaggctggtggcctacgtggaaaattgaataaggtggtgttggcttacagtggtggcctagacacatcagtcatttttccatggctgagagagaattatgggcaccttagccatgagggagatattttggaagacccagctaatgagcctacaaaggacatgtacatgatgtctgtagacccagaggatgctcctgatcaagcagaatatgtggaaattggattagagtcggggcttcctgtttcagtcaatgggaagaggctttcaccagcatctttacttgctgagctcaatgagattggtggaaagcatggaattggcaggattgacatggttgagaatcggcttgtaggtatgaagagccgaggagtgtacgaaactcctggtggaaccatactgtttgctgcagcacgagagttggagtctttgacacttgatcgtgaaacaatacaagtcaaagattcattagcccttaaatatgcagagttagtgtatgctggcagatggtttgatcctcttcgggagtccatggattcctttatgcagaagatcacagagaccacaacaggttctgtgactttgaaattgtacaaaggttctgttattgtaactagtcgaatgagtccctttagcctgtatagggaagacatttcatcatttgagagtgggcagatatatgatcaagctgatgctgctgggttcattcggctttatggtcttccaatgaaggttcgagcaatgcttgagcagggcatctaagatttcatttctcaacatgtacttgatataattgtccatagaaaatgtggattgacacagttcgttgtttgtcgtgactactattgtcattattggtgttactgagttaatttggataggataatgcaaataagtggtaaatgtaacgaaattacatgatccttgcagtgaaggttccaaattatgtacacttttcttacagaaaagaaaataaaaaaaaggaggaagcttcatagt

SEQ ID NO: 29824 - DNA, 3101 bp, Glycine max
  Clone ID: PAT_MRT3847_126933C.1
gagacatgtattgggaatatcctacggtgacgggagaagtggttggcgtttaccagccgagccacgaactcacagtcactgcacttgttgtgatgaagaaactctcactcttaccctcggatttggacactaaatgttccactccctcgttgatgagcatgatgggcttttttgtcgcttccttcgtcctctgctctgtggttttctcagtctccattgttcttcgagaccctccctcagatgccgccctgcacgaaccctcgtcactcgcacccctcttgcaaatcacacaaactctacgagatttggtcaatgaaacctctgattctgttgagctgcaacaagataaactgcttggtggccttctagctgatggatttgatgaaaaatcttgtctcagcaggtatcactttcacaaagggctatcagaaaagccttcttcttacctcatttctaggttaagaaaatatgaagctcagcacaaacaatgtggaccttacactgattcctataacaaaacagttgaacaacttaggtctggtggtcaatttactgagtcctcagagtgtaaatatgttgtatggatttcgtttagtggcttagggaataggattttgaccctagcttctgcttttctctatgctctcctcactaaccgtgttctactggttgaccctggagcggatatggttgatctcttttgtgagccatttccagattcttcctggcttcttcctagtgactttcctcttaatgctcagtttaataatttcagtcagaattctgatcattgttatgggaaaatgctgaaaagtaaagcagttacagattccactgttgcatcttttgtctaccttcatatagcccatgattatgatgatcatgataagcttttcttctgcgatgaacaacgttttctccagatcgtgccatggttaataatgaaaacagataactactttgtcccttctttcttttttgaccatacgcttcagttctgttgtgttctgtagtgttgtgtaacaatgtctcagttgaaagcatcccctgttactgctccttcccttcatacaacaggtgttgccctacgtggaaaattgagtaaggttgtgctggcttacagtggtggcttagacacatcagtcattgttccatggctcagagagaattatggttgtgaagtcgttttgcttcactgctgatgttggccaaggtatacaagaattggaaggtttagaagcgaaagctaaagccagtggggctagtcaattagtggtaaaagacttgaaggaggaatttgttagtgactatgtatttccttgcctacgtgctggtgcagtttatgaggaggaagtatttgcttgggacctcaatggcccaccctgtaattgcaaaggccatggttgatgttgccaaagaagttggagctgatgccggtttcacatgggtgtacagggaaaggaaatgatcagggttcgatttgagctcactttctttgctctgaaccccaagctcaacgttgtggctccatggagggagtgggatattacaggtagggaagacgctatcgagtatgctaaaaagcataatattcctgttcctgtgacaaagaaatccatttatagcagggataggaatctttggcaccttagccatgagggagatattttggaagacccagctaatgagcctaaaaaggacatgtacataatgtctgtagaccctgaggatgctcctgatcaagcagaatatgtggaaattgggatagagtcagggcttcctgtttcagtgaatgggaagaggctttcaccagcatctttacttgctgagctcaatgagattggtggaaggcatggaattggcaggatcgacatggttgagaatcggcttgtaggtatgaagagccgtggagtgtacgaaactccagggggaaccattctgtttgctgcagcacgcgagttggagtttttgacacttgatcgagaaacaatacaagtcaaagattcattagcccttaaatatgcagagttagtatatgctggcagatggtttgatccacttcgggagtcaatggatgcctttatgcagaagatcacagagacaacaacaggttctgtgactttgaaattgtacaaaggttctgttactgtaaccagtcgaaagagtccctttagcttgtatagggaagacatttcttcatttgagagtgggcagatatatgatcaagctgatgctgctgggttcatccggctttatggtcttccaatgagggtccgagcaatgcttgagcagggcatctaagtgttaatttcatttcaaaatgtccttgatttcattgtcatttgcttgtttagaaaaaagttggattgaagctggagtgtactgtggattgttagtagatccctggaatcctaataaaatgaataatatttaatattcatcttgaattcatatcagatataaggatatcaacaaacacagaagcagatgcacaaccaaaaagcttgggcagaaatgtatctcttaagcttaactgatgtgttggttactagctcatggtctacttttgggtatgtggctcaggggcttggaggtttaaaaccgtggattctgtacaaacctgagaatcgaacagccccagatcctccctgtcgacgtgccatgtcaatggagccgtgtttccatgctcctcccttctatgactgcaaggccaagagaggaactgacacaggtgaacttgttccatatgtaaggcactgtgaagatatgagctggggccttaagcttgtggacagtgatagttatcgctagctagttatgaccaatgctatgtatgctagtattatgaaaactcagctatgaagtattacacattttgttgtaaaatagaatgagttatttcttttagatgtgtaattagttttctcccagagaaccatggtattagctttttctactttagggcttttctagttatgacttcgataaccaggtttaagaatttagcattgctgttggggtggacctctatattagacctcgagattatatgagttgggtatttttaattttaagacctttttggtgcaaaacaatggtgg

SEQ ID NO: 29825 - DNA, 1415 bp, Glycine max
  unsure (1)..(1415): unsure at all n locations
  Clone ID: PAT_MRT3847_126934C.1
cccacgcgtccggagcagcagcacattcctcgtgactcgtgaggttcgttactagcgtgtgtggattttaaatcaggtgcgacgcggtgtagagagtggcggtggtgtcgccgtggcggaagtgagaatgacttcggacggagcaacgtcggcggcgactaaccggaggaagccgtcttggagggagagggagaacaaccggaggagagagagaagaaggagagccatttcggcgaagatatactccggtcttagggcgcaagggaactacaatttgcccaaacactgcgacaacaacgaagtcttgaaggctctctgcgctgaagctggttgggccgtcgaagaagacggcaccacctatcgcaagggatgcagggcaccatatccaggtgatggtgtaggcacctccaccagaaacactcctttctcatcacaaaatccaagtcctctttcgtcgtcatttccgagtccaattccttcatatcaagtgagcccttcctcctcctctttcccgagcccttctcgtttggatgcaaacaacccttcaaacctgattccatatattcggcatgcgtttcctgcgtctgtccctcctttaaggatatcaaacagcgcccctgtgaccccacccctgtcctcgccaacttccagaaaccccaaaccaattcccacatggggattccattgccaaagcctccatggcatcatccttcaaccacagccaccatcctttctttgcggcttcagcaccggctagccccacacaccgccacctttatgccccacccactattccggagtgtgatgagtctgatacctccactgttgagtctggtcagtggctgaacttccaagcatttgccccttctgtttctcctgtgcctatctctcccaccatgaattttatcaaacctgttgtgagtcagcagcacaagcacaacctcaatctccctggtaatggaatccaagagatgagaatttcggagcccgaatttgcgatgcaggtgaagccttgggttggggagaggattcatgaagtgggattggatgatttggaactcacacttggaagtgggaagacgcctgcttaggcttatgtctgagaccccacaaaacacaattgttgactcgatttgggatgtcgaaattcaagtaactgttatagtaaatggtccagctctcttgccgcaagtagcagctcgtatgtaaccacctcaaacttgttattggaatcgggaagtatcagatgtcatgggcattttatgtttacagttatgtccaaaaccaaaactcttcttttattcactctttttaacatattattttaaagganttttaaacatataaacaaatagaattaagaattggttattttttgtttttacttcctttcatcaactgtgttttttttagat

SEQ ID NO: 29826 - DNA, 710 bp, Glycine max
  Clone ID: PAT_MRT3847_126935C.1
atcattcaggatcaggagtactcctcgatccgcccgctgatcgactggctggactacaacggctacaccgtcgtcaccaaggcgaccaaggagttcatcgacgcctccggccgccgcaaggtcaagggcaacatggacatcgagctcgccgtggacgcgatggagctcgccgagcacatcgaccagatggtgctgttctccggtgacggcgacttccgctccctggtcgaggccgtccagcgccgcggcgtgcgggtcacggtggtctcgaccatcgccagccagccgccgatgatcgccgacgagctgcgccgccaggccgacgtcttcaccgacctcgtcgagctgcaatccaagctcggccgcgacccgtccgaacgccccgcgccgcgcgatcgtggcgagcgcgaggcccgccaccacgccccgcaattcctccagcgcgcgaccacgatggccccgaggggcgatgacgactttgaggaagtgaggcggcccggtcaggccgccagctcttgaatatgatatatcatagatgcaacgctctcaaagcgacagaaccattcgaacaatttccctatggggcatctatgatatggacaagtcaatgtctactaatgtgaatgcatctcatgatgcatactttaactattgtttaggagaattctcttatcgtgaatagtacgagtagtttaaaactttctatgccg

SEQ ID NO: 29827 - DNA, 223 bp, Glycine max
  Clone ID: PAT_MRT3847_126936C.1
atactggcgggggtacaacaagctcatcataaatgcctgctactataccactgccgatgtgatatacatgtgtctgatgagtttataggacagtcctcagcagggatactagatgctgacagacagcgggaatggctcactcatgatcgaacagattcgctcactgcacacacgagccatatgtagcacagggataaccatcacttctggagatactaccttt

SEQ ID NO: 29828 - DNA, 345 bp, Glycine max
  Clone ID: PAT_MRT3847_126937C.1
ccatagcggagaaaatgcaacgagttgaacacaacaaagcaagtaccttacataattaaagtgccttctacatatttatttgcccatccatgggccctaaaaatggaaaattgaaaggccactttgaaacacactagttcaccactattggattgcaagttgaccctccttaacaatatattttttgtctggaaagccttcaccctcaaaggacctatgaagcatgtttttgaccccagcatcataacgtcactgtgcatctatgggggtgccagaaatataaagaaccatggcatgcgttggcctgcaaccccatggatgaacctttggtgctggctgtgggaa

SEQ ID NO: 29829 - DNA, 411 bp, Glycine max
  Clone ID: PAT_MRT3847_126938C.1
ccgccaaaaaatcacaagctaaatcaaattagactttgttcactaggttacaagagagcaaaagaattagacccattgaaaggaggttcctcgtattctaacactatcattggcacacactaggagccgcctgaaatctttcactcaccaaacaactgcaattagcaggtaactctaatttaaaaggaagtgcaaaaagttggaagaactcagggcaatcttcaagacttccaggttgagacattaactcttgaatctagttattgcaaaacatgtctgtttggacatcagctacatgttgcttccctcatatacttggaggtgcccacttcccagctttgaacttgccataaaagctgggttgctttgaaacaacatagaagactgggatcccaggaatgatgaaattag

SEQ ID NO: 29830 - DNA, 440 bp, Glycine max
  Clone ID: PAT_MRT3847_126939C.1
ggccaacaaaaaacaaactctaactaggttcattaaaaaattatgaatatttatacaacacagtaaattgactaggcccatcccaaaaatctccatgttagatttgttcaaattcaattgtagtttgatctcagcctgttaaaatagtatgtgcacctcacgagctctataattaggatcgttgccaggagggagactaaatttgcttgtggtgaacattgatttgtgaatattctcaccccagaatcgtatggataaaggaatacaagtcattgtaacaagcataaaacctaaatgctttgggtgaacgaccttaccttttgccacgaagtccaggtccagatctgggaccaggataccgagaaaactgaagccgcaagtgactagactcgggattcagttattaactttataccttgcaagcacttaaagcagtagcg

SEQ ID NO: 29831 - DNA, 388 bp, Glycine max
  Clone ID: PAT_MRT3847_12693C.1
ctttcatataaaaaaaaaaaaaaaaaaaaatttaaaaaaaaaaaaaaaaaaaaaaaaaaaaaggaaaaaggaaaaaaaaaaaaaaaaaaaaaaaaaccccacgcttcccccaacccttccccttgagggaaagaacctttttttccttcccttaaaaaaactttttcgaacccccccggcctttgtggcccttattttctttattcgaccaaaagggggaaacccctggaaccgggtttaatatttccatattccggaattaccgttccaaaattctttccaacttttcaaacttttgaaacgttttcttaaagctcctaaattttcgcctaattcaatcggttttttcgggtatttccaaggttttttcctttaaattaaaggggtt

SEQ ID NO: 29832 - DNA, 463 bp, Glycine max
  Clone ID: PAT_MRT3847_126940C.1
gagttgataaaggggtactaattctatcgctacgctacagtctattaaacgccattacttccgaaacattgggcgaccccatctaatacgctctctgaaatactatccagagcagataagtcatgaccagagccaggatcacctgaacagattgccatactacactggtctgttgcacatccagcgggcttacattacgggcaccctttttctcgtcagggaagaacttcgggatctgggggggcaagccgagatgcttgaggacttgatcggggaccagtttcgcgccagcgagaacgattggtacacctgttcctggatgcgtacttgcgcccacgaagtacaggtccttaatgcttgggtgctgcgtctttggcctgaagctaagcacgttgaagaacgaatggctgagaccgagaatcgcgccgcggtcaaggttgaagctgtcgcgccaggttggtgg

SEQ ID NO: 29833 - DNA, 376 bp, Glycine max
  Clone ID: PAT_MRT3847_126941C.1
ggaaccaccaagggttggggggggggggggtagtggtggaaaccacccaaaaccccaggggggggggccaaacagaaaaaaatggaatccccaatcaaaaatggggggggcccccctccccctgggggggaaaaagggggcccaaacccacaccccttggggggggcccccccttttgggaaacccaagaaatcccctaaaccatggttttccccaagcccaggggaaaagaggagcaaagggggggggacccataagggccccggaagcaaaaaaacccagggggctcatcacaaaaaaaaaggatccccgggagccaatggggggccctctctcggaaggggggattcacttttttagaaaagggttttttgga

SEQ ID NO: 29834 - DNA, 297 bp, Glycine max
  Clone ID: PAT_MRT3847_126942C.1
gcttggagaatctttattaagcaagggccaccagagggccaaatgggtgcttgggacagggccacctggctggccatggatgatgcggaagcgcgtaagtgagggatgatcattgatcctccagggtctctgaggtggaggcaatggagttggtagccacagatgcctgtatctttcccattaggtttgcccactggagctgaatgtgttacacctagcggctcaaaccagcccttgatgcccgcctggaacatctcggactgcaagcgcatcagatggagctgctgcctccatatt

SEQ ID NO: 29835 - DNA, 1126 bp, Glycine max
  unsure (1)..(1126): unsure at all n locations
  Clone ID: PAT_MRT3847_126943C.1
gttgccacagtgatttggacttgaaagcgcccatcttttcatgtctattgatattgattgttgatacatcacttggcttgttgatgtcctctttgaatcaatctctctttccatacgactcttcgtccttgactgtttcttcatctgtgttcaacccttatgcttttttaagcaaccgtcatcacactctcacactcacacttcacacttcacaacgtagaagacagatgagttctttgctacctcaagttgccaagaacaaagcaatgtggctgaatcccaaggttttgggttttaatcctcctgaaagatggggccactctgcttgcttctccaaggggcttatgtatgtctttgggggttgctgtggtggactgcatttttgcgatgttctgactttggaccttaacaaaatggtttggagcaagcttactaccacaggtgaaaagccggggcctagagatagccatagtgctgttcttgtggggcataaaatgatagtgtttggtggcacaaatggcttcaagaagatgaatcacattcatatacttgatcttgttaccaaagagtgggttcgacctgagtgtaaagggaatcctccttctcctcgtgaaagccatactgccacacttgttggtgatgaaaggatagtgatatttggtggaagtggagaaggtcatgctaactatttaaacgatttgcatattcttgatcttcgaaccatgagttggacttcccctgagttgaaagggtgatttgcctgtccctagggacagtcatagtacccttgcaattgggaacaagcttattgtgtatggtggagactccggtgatcagtatcatggcaacgttcatatgcttgatatgacaacaatgacttggtctaaattgtctattcaaggttctccaccaggagtcagggcaggtcatgctgcagtgaacattggaacaaaggtctatatcattggaggagttggagataaacgttactataatgacgtttggatctttgatatctgcaattttacatggactcaacttgatatagattntcaccagccacaagggcgattttctcatacaactgttgctgctagcattggttttgcaatatatggcgggtgtg

SEQ ID NO: 29836 - DNA, 703 bp, Glycine max
  unsure (1)..(703): unsure at all n locations
  Clone ID: PAT_MRT3847_126944C.1
ctgcaatacaaaaatttcagtttttttttctttctccgtgatcatcattttgtcatcaacttctcggtacaggccacagacaaaccatggtttcagagaatgatgagatgcctattggatggccattcggtcttggcttcttgaatatgagatttagagatgcagagtccctcccagctgccccagtagagccacactcaatgcacattccatccaccagtttttcctcattctcatcctccaaccttgacactgagtccacagcatctttctttcaagacaacagtgtatcccttggccatctaattggattaagaccaggtgagaagggactgcttgtacttcccaaacacactaagattagaagaaacggagaagaagaaaacattagcaaattgttcatgttctgatgatgcctctaaagtaaaagaagtggatatgtctcgtggcatttgcatacctatactacttgaagccctgctcaagattagcaaatgtaagaaaagttcaagtaactagcatatatgatggtgtgacacatcaaatatttcggtgcaaacttgtcgcttgcctctagtcaaaattaacaaattatttttctctcatttcagactgattttcttannnnatgatccattttaactttcataagtttgtttgttgtaactttgttttatttgggactatgaaanaaaataaaaaa

SEQ ID NO: 29837 - DNA, 461 bp, Glycine max
  unsure (1)..(461): unsure at all n locations
  Clone ID: PAT_MRT3847_126945C.1
ctcttcttctctttctagacgtcccacacataaccttcaagatgaccaagcgaacaaagaaggtcggtgttaccggtaaatacggtacccgttacggtgcttccctgcgaaagcaggtcaagaagatggaaatcacccagcacgccaagtacacttgcaccttctgcggaaagaccaccgtcaagcgccaggctaccggtatctgggactgcaagtcttgcaagcgcaccgttgctggtggtgcttacgtcgttgccacccccgccgccgccgctatgcgatcgactctgcgacgactccgagagattgctgaggtttaaggttggactttagcgaaaggggaaaatggctttgcttttcggnatggtgtacggggggatatgatttcgtgcctacattacgaggtgacgatctggacgacgacacccgaacttcggtcccttagaagccgttctaatact

SEQ ID NO: 29838 - DNA, 330 bp, Glycine max
  Clone ID: PAT_MRT3847_126946C.1
agaaaacactccttcaggtgtacacatagactatctctgttgagcaaaaccagatagacttggcagcgttctcagatgccacggtggtctaaggtccagcctgataaacaagcatgcaacataaggcgcgttagcactcgtctagcaagcgcatgcaacgtcttatacttatctgacggcccagaggatggttatcaaccaaagtgagcattataatggaaatggatattccacattatggcgttcgaaatcaacttatgtgaaaacgtgtcataaatctgagcaattacccgttgatattatttacaaaaaatgtgccactgaaacttc

SEQ ID NO: 29839 - DNA, 218 bp, Glycine max
  unsure (1)..(218): unsure at all n locations
  Clone ID: PAT_MRT3847_126947C.1
gtaaaagaaatgttttccaaaaacttgaataatcttaaccggtttttaaagtgccctttccaatgaaatgcaatctaagataaatttgacccttgcttccttccttgggaaaaagaaagatgngtttgtggctactaacattgcttgagctttttttaacattgatgggaattttatgtgaatgatccttgaattgctagcaaaatgttataatccga

SEQ ID NO: 29840 - DNA, 394 bp, Glycine max
  unsure (1)..(394): unsure at all n locations
  Clone ID: PAT_MRT3847_126948C.1
acccacgcgtccgcccacgcgnacgggcttcgagaagaggggagacggggaaacaganagcnagagcgancacacacgctaccgccaacgnncatcaagggccaccctcaaccgcgcngcgcagcaagctctctcctcccatcgatgatgctcttcttttccccaaaatacccctaccccttccttttctttccaggggggacccgcaannaacccgcgcccaangacaaagaaacccgacgnnagggagaagccgcgcgcgcgcgaggnggcanaggccgcgaagagccgcggcgacacggaggcgccggcggggacgccagaaaaagacggccccgccggagaaccgccgacgggcgccggcgncaacgccgngnacgacacgaacggcgac

SEQ ID NO: 29841 - DNA, 401 bp, Glycine max
  Clone ID: PAT_MRT3847_126949C.1
atcaaaactggtcccaaggagccagaaacaccaaagccaaaaacacttcctttgttacacaagatgaaaacagtttctcttgtccacaaaacagaagaactggctaataaaacagtggtttttgattttgagggtaccttgttaagatcagcttcactgtttccttacttcatgctggttgcttttgaagctggtgggttgctaaggtctctcgtgttgtttgtctcataccctttggtgtggctggttggtgaagatcaacttggcttgaagatcatggttttcttgaccctttttggcataaaaaaggacacgttcagaatagggtcagctgttctgccaaagttcttcttagaaaacatggggtgggaaggctttgaagctattatgcgttgtaacaa

SEQ ID NO: 29842 - DNA, 442 bp, Glycine max
  Clone ID: PAT_MRT3847_12694C.1
ttttacatattttttagtttcgaacggaacccccagtgaacagcttaaaggtgccgtcatatcttatgggaacatgaagttcgtcgttcataaacaatagtgtttattgagccactctgctggccactgcataatacttctgagcgctggggttatctgtcggtaatcttgataaaaaaagaagtgatatacggggtgccatgcttgctatggccgaatacagttagcctaagaaaatgggggtgtgccataaaaaggtgcaaaactttgccgttttggacttgtggtgggggggggaaaatcttgtccaggtttttgttccaattcaggattcattaattgcatagtttgcccttaagctatttggagtgctgtaccaaatcgacttcccagactgttgcctgtggcagtataagttgatctggctgtaccccttaccagg

SEQ ID NO: 29843 - DNA, 827 bp, Glycine max
  Clone ID: PAT_MRT3847_126950C.1
tcgcgaggttacatatagagctccttcttcttccttccagcaccgccactccacctccctctcccgcgacgccaacgtccactaaagaccttcaaattgagtaatgcagcaagtgatttgcgtttggaagcagcccagaatgccataaactcaattgggttgggttttgacataacgcaagatataagcttttgacaactgtaagaagggttcgaggttgatatttgtcaatgaggaacagtgccgtcatcttgagattcctggaggggtttcaattccaaatgtccctaactccatcaaatgtgtcagaggagaatcaattagattcgaatcggatgttctcacccgggatcagatgatggagcacttcaaccagcaaatgctcctttcaggaaatcttgcaagtggtcatttatgtgcttcatttgggttatctgattcgaaccttaaaacattggcttctatcaagcctcttgcttatgatggttggtttatcaaacgctataccattgaattagaaaggcgtcagggtgaactccttgatcatgtcaaagaagcagtgccatcatcatgggatcctgaggccttggcaaggtttgttccccgggccggttctcttgtcgtaggtggggtcagcttgcgacgccaggttgcgctatatcttggcctcgggcttacatcttatctgcgtccctcgcgcattccgtaccttttcaacggcgctgctccttcgtggttcgtggtgtctgctgcctatcgttccctgttattcattctgtcaaataataacaaatcgtccaattaatgcaagttcaaaccttttttgt

SEQ ID NO: 29844 - DNA, 239 bp, Glycine max
  Clone ID: PAT_MRT3847_126951C.1
ggctcgagcctcacgcattagctcgatttcttgttctgcccttcactctcttgtgtctctttctgcggcgaccatctgagatcccggtcactcctctcgccggcgatcccttagtcctccctcatccgacgagtgctttcccgatgcgaatcatgcccagccttgggccagcatgagtcccgtatccgagtatttggccaagcttttgctgattggagattctggtgtacgcaagtcat

SEQ ID NO: 29845 - DNA, 395 bp, Glycine max
  Clone ID: PAT_MRT3847_126952C.1
attttgaggacatggcgagctattggccacaacttcattatgtggcgcgaaatagtttggaaatgctagacgcttatgttgaccatttcgtaaatgatttacgagaatacgttttgcacattccagaggacgctggccaatcgagaaggaaaggtctctctcgtatcgaatggctgcaaaaagttgattggcctaccataccacagattgatgagttccattagatgcaaaggatgatgaatgctcctgatttaaatgattatattgatctactgatgagcattgatgttgtagggtttacataagagcatgaaaaggttttgcaaacaagattgtttttgattgataagctgtgtgttgccttacacacacaaattttttgatggaaattttcc

SEQ ID NO: 29846 - DNA, 277 bp, Glycine max
  Clone ID: PAT_MRT3847_126953C.1
aaagaaagtggctagtgcctaaaaatgcttgatttgatgacttgatgagtctgtaggtttggctagactatttttatttgattggaaatgtgttacttggtgataatggttatccatcagtttttaagtgaaatcaatggggtaaagtgtaatttttctttataattaaataacaataatagtggtaatggtaatacaatattgatggcactctgctctaccttccaaacattttatagagaagacatggtttctgattttcaagttttgttccccc

SEQ ID NO: 29847 - DNA, 142 bp, Glycine max
  Clone ID: PAT_MRT3847_126954C.1
caggtcccgacccgaccgacgctttcgtgctttcgtttagttctctcttctatccatatcaaacgtgaacccaggtgggtgatttatcagggctgagctataaaacacgaaaaaaagggtggtaatcccttgacaaactaac

SEQ ID NO: 29848 - DNA, 266 bp, Glycine max
  Clone ID: PAT_MRT3847_126955C.1
tactcgagccgattcggctcgagtacggctgcgagaagacgacagattggggaagctggaaacgttagaagtagtgaagaaactgaaagtcattgttttcttcgttgctataataattttaggtgcagaatggcaatgcaatgggtcagagcatgagcttgagcagggcaacagctaccaaatttcccctggggaaatgaaaacggcccccggtggcaaatacatccgggaggtatcgtgcaaaagttggaggcttggtgtggaag

SEQ ID NO: 29849 - DNA, 294 bp, Glycine max
  Clone ID: PAT_MRT3847_126956C.1
catgtggcagctctacaaattattattgatcgaaccccaagtcctgactgcaacataattaatgcaatgctataggaggatacttaccataccagtccttaaaatgcaggtgaaaaggtttttgttgcgcctttcacaggccgaaggcccatacgactggctacatatcacaataccatcttgcagatggaaccatacatgaatacaagagttcagctcttgagtaccactaccaatggtgattttgatcaaggaaaaaatctcacaatgtgtaacagcaatgtaccatgtgct

SEQ ID NO: 29850 - DNA, 425 bp, Glycine max
  Clone ID: PAT_MRT3847_126957C.1
ggctcgagcggttcttgtggacagagggcttatgatttatcacgattggccagggatgaggatgccatgtcgcttgaatgggtgaaagaacttgtgaaagacatgaagttggagacactgtaggatccaaattggctcggcaatggatctatagcggaagttgtggagttaatacaagtgggcttcttatgcacacaaaagtcggcttatgatgagaccaaagatgactgctgtggctagagtgctgcaagctgtaggttcgtaagactagtgggatgaatgggaggatatcacagaggatctactaaatgtcaccttcagcctctgtactactactcctaatgactcagatcgaaatattcaaccatgatggtgctggaaggactatatgatcgttggacactaacttatcacatactgtgacg

SEQ ID NO: 29851 - DNA, 2835 bp, Glycine max
  Clone ID: PAT_MRT3847_126958C.1
tagagatagagatagcgcgaattgaaactctctaatgtgagcaattcaaccttccagaccaccagtctcgtcgttcgctccaaaatgggttcttcccctgagcccatcaatttcaggtaacattgtccaaccaaaatggggtcacctcaatgaacttcacagtgctttgaaggcaatggaggaagctcttacaagtaggaacgtaaccgagactgatgtaggcaactctgttaagacttgatgtcaagcacgatgatccagtttggggtgaaaatgtgactcttaggattaacaatggcaaccatgtaattcatgcattcgtcaatggagaacatattgattcccattgggccacatatggtattcacaacgataaatttgactcgaagattaagttgaagcatggaacgaatactataagcttgcttagtgtcactgttggacttcagacacctatgacctctctctatcttctcttcacttacttactgcctttgctgcaaacactgttaataatgatgtcgtgtggctagaagttatgctatcaatcgctgctataccaaggtgaaagttataaatttcatttgccttgttatcccttttggaaattttatttaccaaggtgaaagttataaattttattatgcttaagaatcttaattaatttttcacatatttttcaattgaataataatcttttgttaatttcatgagatctataaaaggcatgttaacgtggtttgtatatatcctcttctttggtttgtatctatcttctgtatataattttattttaacgattatgatgtgtttattactgctaccaccaaacccttgcttaacaacgttatctcaattcaatttttttaacattttctaattttttttaaaaaatattctaagacggttctatcatagaatcatcttagaatgtcaacattctaagacggttttttttataaaatccttagaatctttaatatatttttttaaaaaagaaaaacattctaagatgattatctgaaaaactgtcttagaatgattctaagatgattcttcaaaaaatcgtcttaaaatcctaaatttattttatttttaaaaaaaaattatattctaagatggtttttgaaaaactgtcttagaatatgtaacttttctaagacaattttttaagaaccattgtagaaagttttaactttccacggatgatttaaaatcgtctttaaaagtgtcatagaaccgatgtagaatcatctttttacagtagtgagtaaagacttaaatttaaatcttatatataaaaaaattaattgaaaataaatagctcacaattaagttataagtttcatcgaagatgaatcattagttaaaatagtagatattttgcaattatgattacaaaataaaaacattttacgtatgagaacatagaattttactatccaattaagttacgagttttcacccaatcctaattaagatctcaatttaaaaaaccttgtgaacaacaattgtaggagatccaaatcatcatatctatatattatctataaaagagaagtgtttggaaaattctaaaatgcccttacccaagattgtgacacctatccattttctcggttttttggtcattttgcccctttatttttttgcaccttttttctgttgcccctgccacgtgtcgcgttgcatgtggagtttcaaacatatgtcactccctgattggcggatttcaactcttcatttaatttcacttaataatcgaaactctcctctctccctgaatcttctccacgttactctctcttcctcaatcttctccacgttactctctattcctcaatcttctttttctccctctttctctttctcaatcttctcctctttttcttttatcttttatctttctatttctgaatcttttccttcacaccttctctctccgtttctctttcttttcctcccttgcatgcacctctgccacaagaaaatggatttgtgggtgagtgagagattagatgggaccaaaaggagaaaaaaaaaacacgagaagaggggttttgttatacgattttttcctcttctacattattcttctttcattgtttggttttgttttttgtttttactaccgtttggtttttcccctttgtcagaaggatgttgagaaggcgaagaagctcagaggcttcatcgctgagaagagatgtgctcctttaatgctctgtttggtgtgcgttcttttttatttttttttatttaacattagatcactgttatttacaattgagtttatggattatcgttttgacgcgttttggtgtgtttcgtgtgcatatggcactctgctggaacctttgacaagggcacaaacaccggtggacccttccgacatcgctattaggcttttggagccactcaaggcggagttccctattttgagctacgccgatttctacccagtgatgtttttttgtctttggtgtttgtgcgcttaatgttgtgtttgtgctgacgcagttggctggcgttgttgccgttgagatcatgggtggacctgaagttccattccaccctggaagagagtcaacccaaataggaaaccaactcaacataacaacaatgggagaagttacatgtttcctttttcaaatactagcactttggaggattaacaacagctatgctctcgactttgcagttgatagataaacatgcaacagttgttaatgcaaataccattcaactacctgtgtatatgaacatacttgatactacggagaaattgtttcttttggataggcaataatggttgttatgactgccattaagagt

SEQ ID NO: 29852 - DNA, 1746 bp, Glycine max
  Clone ID: PAT_MRT3847_126959C.1
caaaactcactattaaaattatgtgttatacatgcatgatctttttaatatatttttatgactttcataataagtatttttttcttttagtttcttaattagtgatatcctaaaatactgttatcatcaagatccaaaaaaatatatcccatatcatacatgcacgttgcaatcaaagatcatagtgtgatatatatagctttggcattcagtgcattattaactttaaattcttctacataattttaatagtgagttttgtgcttttgtggccgtgacattaacgacacataggctatgcagggtgaggacgacagaaaggggaagcactccagcaagaatcaacttagatatcagatatatagttgagtaaaggaagaaagaagaaagaagaaaattgcaaactttgaaattgtggaaattgacaaagatgaagagagaagagagacctgcggccataaagatattacaatatgactgtgggtatttgtgtttctttgagttagtgaacatcggtatagccattgagcacagggaagaggcggaagaaagagcacaaaaaaaagattaaggatcactagtagagcaaaggttcgaaagaaatgggtgaccagctaaggtcttgagtcagttcagtcagaaatcaatgacttggactgggaaagcacctttttcctgcgccatcttccactctccaacgcttcagacaacgcagatcttgatcaagattacaggaagacaatgaagaaatttgctctggaactggagaaacttgcagagcagcttctagacttgctatgcgagaatctgggcctggagaaagggtacctgaagaaggtgttctacggatccaagggtccaaattttgggacaaaagtgagcaactaccctccttgtcccacccctgatctgatcaagggactaagagctcacactgatgctggtggcataattctactcttccaagatgacaaggtgagtggcttgcagctcctcaaggatgaccagtggatcgatgtcccaccaatgcgtcactccattgtaatcaaccttggtgaccaacttgaggtcataaccaatggcaagtacaagagtgtgatgcaccgagtgattgctcaaaccgatggtaccagaatgtccatagcttctttctacaaaccctggtgatgatgctgtcatttctcctgcaccagccttggtgaaggaattagatgagacaagccaagtgtacccaaaatttgtgtttgatgattacatgaagctctatgctggtctcaagtttcaggctaaagagccaaggtttgaagctatgaaggccaatgcaagcgtagttgatgtgggggccatagccacagtttgagtctcagggctctcagcatgtggaatcggttatgtgtgtttctgttaataataaacaaaggctactcacaacatattactagtgtttggtgtccttggataattggcatggaagcttgtgcttgtgcagtataatcaaaccttatatagttcaaaaaataaaagttattaggttgatcttaattagtttgtgcgtgtgatccatgatatgatgtcgcctgtgatatgatggttaagatagtgtgatatgtagtgatacactgttttagaaagtagtctcatcttgcccatattacaaggaactgtctctcataattcctctttggcttatgattatatgaacaatatagagtgaacgatatattcttacttttattttttctttct

SEQ ID NO: 29853 - DNA, 423 bp, Glycine max
  Clone ID: PAT_MRT3847_12695C.1
tttacgttttcgctgatcatgctttctttttttttttctaatttcattttttattagccttttttttccttctaaatgagaaccctgtccaccttactgagtacaccaaacccatattccgttaccacgataacctgaccctcctctttcatattctgcatgtagctccacatataaaagtgcttgttcataagcagaatgaacaaattaccttccaaccccttagccataagaacaaaccccaactcacttaagaaaccatcgactatttttttttcccatgtaactgcttttaaatgaaaaagccactttgacgcataacatcacattttaccacttccatcataatactcttttggagggtcggagtgataatacctagttataactcattaagtgttaacttattttgtcagcgtgttt

SEQ ID NO: 29854 - DNA, 503 bp, Glycine max
  Clone ID: PAT_MRT3847_126960C.1
gacaagttggaatcttacaagtcacaaaaatattgttacatatgccattctactggtatcatgtaaataattttgctttacatgttagttacaaaattatgagggttcaaagatctgtcattccttttccatcttggcccctaaaaaatgaaataatgatgtcgacactataacatttttatcttatcctactagctccaaatataaatatttacaaagaataataagagatgggaaacaggaacaaaaacggggtatgtacacaaaaacgcaattatgccttctgttgacctccttctgccctgcaataagtgataatatcttgaactcaaatcagcatctatcactaaacaagaccatagctgagatccatgatgctgaattgataactttgatgctggcaagcagtctcaattaggaacacatcatctggggcatgtccaaccattacaatatccggacataatttagccaaaattaatccatccgctagctcttttaat

SEQ ID NO: 29855 - DNA, 1831 bp, Glycine max
  Clone ID: PAT_MRT3847_126961C.1
tgcatgcttttgtgtggatatgagtctagttgacctcatgggaggagaaattggatttgtaagtgagcctggaattggaagcactttttcctttaccggaaccttcagaaaaggagaaagcacgtctctggatgcaatgcagcagaataatcattttggttcagagttccaaggattgagaacattagtggtagatagcagaaaaatccgagctgaggtcacaagatatcatctgcagagattgggaatgtccgtggatgtaacttacagtctgaattctgcatgctcttgtttatctaatgtgtgtaacaagagtatgtcgacccaattggccatgattcttatagacaaggatgcttgggataaagaatgtcatatcttatacacaatcaagaaacgtagacagaatggcatcaaaggggatccaatgaatttaccaaagatttttctcctggccacccaccttagctccaatgaacaggatgggctcaagtcagttggtataatagatgatatactgatgaagcctctttggcttagttctttgattcagtgctacagagtatcccttggcactgaaaacaagcgagtaaatagggaaaaagtatccaaacttgggaatttattaattgacaaacaaattttggtggttgatgataatgcagtgaacagaagagttgcgcaccgggttctacagaaatatggggctaaagtgactgctgtggagagtggcagggctgctctaaagatgcttgagctgccgcataattttgatgcttgtttcatggatctccaaatgccagagatggatcgttttgaagcgacgaggaaaatccgttgtctggagagtgaggtaatggagaaaattgcatgtgggcaagcatctgcagagatgtttggtaacatctcttattggcacattccgatactagcaatgacagcagattcaactcagtcttccaatgaagagtgcataaagtgtggaatgaatgactatgtgtcaaagccgtttgaagaagagcagctctacatggcaatggcacgtttcttcaagtcagattcatagtgtggaagtttgaaatctttgattattagtgcagacaccctgctcacaagtgtggactgaccggccgcgtggggtgtagtatgatatcaattatcatcgaatgccatttgttggttttccattaaaagagctagcggatggattaattttggctaaattatttccagatattgtaatggttggacatgccccagctgatgtgttcctaattgagactgcttgccagcatcaaagctatcaattcagcatcatggatctcacctatggtcttgtttagtgatagtaagtaccatgtttacatcccaggattttcatattattttttttgttctaggccagagaccatgagtgtcttccaacccattgagtcaaagactaatcccgctcacgatacatgactgtcgctgacttatgggaattttgcatacggatattgattttgagttcaagatattatcacttattgcaggacaggaggaggtcaacagaaggcataattttatttttgtgtacataacccgtttttgttcctgcttcccgtcgcttattattttttgtaaatatttatatttggagctagtaggataagagaaaaatgttatagtgtcgacatcattatttcatattttgggggccaagatggaaaggaatgacagatctttgaaccctcataattttgtaagtagcatgtaaagcaaaattattacatgataccagtagaatgacatcaaaaaaaaaaatattttgtgaaaaaaaaataaaaac

SEQ ID NO: 29856 - DNA, 1480 bp, Glycine max
  Clone ID: PAT_MRT3847_126962C.1
cggctcgagcggctcgagctcgagccgaatcggctcgaggcggggataagattaaagattcaacaatggcctctgcttctgctactcttctcaagtcatctcctgttcttgacaagtgcgagtgggtcaaaggccagacccttcgccaacctctcgtgagatgtaacccttcctcagcatcagctctcaccatcaaagctgcttcctatgctgacgagctcgtcaaaaccgccaaaacagtggcctcaccggggcgtggtattttggcgatggatgagtcaaatgcaacctgcgggaagcgtttggcatctattgggttagagaacacagaagctaatcggcaggcataccgtaccctacttgtgacagtacctggtcttggtgaatacatctctggtgccattctctttgaggaaactctctaccaatccactgtcgatggaaggaagatcgtcgacgtacttgttgaccaaaacattgttcccggtatcaaggtcgacaagggtttggtgcccctagctggttcgaacgatgagtcatggtgccaaggtcttgatggtcttgcgtctcgctcagctgcatactaccagcaaggtgcccgtttcgccaaatggcgtactgttgtgagcatccccaacggtccctctgctctggcagtgaaggaagctgcctggggtctagctcgctatgctgcaatttcacaggagaacgggttggtcccaattgtggagccagagatcttgcttgatggtgagcatgggattgacaggacattcgaagtagcccaaaaggtgtggtcagaggtattcttctacctggctgagaacaatgtcctgttggaaggtattctcctcaagcctagcatggttactccaggagccgagtccaaggacaaggccactcctctgcaagttgctgattacaccctcaagctccttcacaggagaatcccacctgctgtccctggaatcatgtttctgtctggcggacaatctgaggttgaagcaaccttgaacttgaatgctatgaaccagtctccaaacccatggcacgtgtccttctcctacgccagagctctccaaaacacctgcttgaagacatggggtggactccctgagaacgtgaaggctgctcaagatgcactccttttccgtgccaagtccaactcactcgctcagcttggaaagtacactgccgagggtgaatctgaggaagccactcggggaatgttcgtcaaaggttactcctactaagatcatcttgccacacatgctacagtaacccaaggatccaacattaatttgtctaaattgtgtttgtggtttatatagtcttggacactatttttaatgatgattattacttgtaccttttctacttaatgaacttctagccaatcaattacgaatcttggacttcaacgtgcaccatcatgttcgaaactcttggaactttgataaaaagaaaattttgattactc

SEQ ID NO: 29857 - DNA, 336 bp, Glycine max
  Clone ID: PAT_MRT3847_126963C.1
gttcgaacgatgagtcatggtgccaaggtcttgatggtcttgcgtctcgctcagctgcatactaccagcaaggtgcccgtttcgccaaatggcgtactgttgtgagcatccccaacggtccctctgctctggcagtgaaggaagctgcctggggtctagctcgctatgctgcaatttcacaggtaagaaatattatgcaagtaactatgagtgattttgtttattgcatctaatgggattaatgaattaggagaacgggttggtcccaattgtggagccagagatcttgcttgatggtgagcatgggattgacaggacattcgaagtagcccaaaa

SEQ ID NO: 29858 - DNA, 633 bp, Glycine max
  Clone ID: PAT_MRT3847_126964C.1
tacggctgcgagaagacgacagaagggggatgaggtgtgaacagataagcgatctctttcttcgtttatctgtaaagtaaccctctaagcttcaattctgcctttatataagctcagtgtataaggttggttgctccaaccacaacacaacacaacacaacacaattacacacacgaatttccttagttaggcattgctttgcgatggaaaaaatggaactggcagagacacctctacctttgctttcactaaaccacgtttcttttgtatgtaagagtgtgagtgagtcagtgaaattctatgaggatgtccttggatttttgctcatcaagaggccatcttctttcaaatttgaaggggcctggtaagttctcattctcaactactacttgctagatctttcattttctagctactactaccttacatgttttcaaaagttcttttagatggtggatcctatgaatatgatatgtatattcaccaagaaaagctacatgaaacaaattatctgccatttgcttaacttctccagtcgcttggcactttccttaagatgctttcatataagtgaaaatgcaaggactacaagaataatgagtggaaatattacactgttaatttgacacatc

SEQ ID NO: 29859 - DNA, 442 bp, Glycine max
  Clone ID: PAT_MRT3847_126965C.1
ggaatccagttctgcttgatggtctgtggcgcctccggcacgggcaggaccacctttgtcaacactttgtgcggcaaacaggtcttgcagccaatggacgccgatgacccgaccaccgcacacattgaggagggtgtcaagatcaagcctgtcactgtggaactggagcttgacgaaggaagcactcgcgtgtcgctgacaattgtcgacacccctggctttggcgatagcatcgacaacgaagctgccttccacgagatagtagacttcttggagaggcagtacgatgacatcctggctgaggagagcagaatcaagcgtaacccaaggttccgcgacaatagaatccacgtgctgctctacttcatccagccaactggtcacggtctccgcgagctcgacatcgagcttatgcgccgcttgagtcttcgtgtcaacgtca

SEQ ID NO: 29860 - DNA, 298 bp, Glycine max
  Clone ID: PAT_MRT3847_126966C.1
gggaaaaacaaagggacccaattgaattcacaaaaattgtttactttccacattacaaataaaatcactgggggtgcccacccccccccaagaccaagatggaaagaaacccttttaatcaagcccaaacctaagttttagttttggataaaagtaaaacttctttttaactaaacataatgttaactgaagccctttggaagcatcaccctggatatatatggccctggatcttcttcatttgggttttcccacttgcagaaattttgatccccttaaatgattcctaaaattgggg

SEQ ID NO: 29861 - DNA, 344 bp, Glycine max
  Clone ID: PAT_MRT3847_126967C.1
cacgcgcacgcgtccgttcacgctgtcgaaaaaaaaaaggaagcaagaaaaacaaacaggggcaaaaaaaaaaaaaggcaaaaagaaaaaaccaaccaaaaaaaaaaagaaaagaaaagggggggcccaccgaaaggaccgaggaaaaccaacgcgggaagcgaacgaaagagcctggcaaaacagcccccaaaggcaacttgacgagacgccgaataaaaccggcgcgacgggaaaacccacgggggcccaaccaaaaggcgaagggaaccacccccggtcgccacatgacgaaagagggaagggggcggccccgaccgccgtgccaaaaaaaaggccagccg

SEQ ID NO: 29862 - DNA, 867 bp, Glycine max
  Clone ID: PAT_MRT3847_126968C.1
attccaaaaaacgggaacaacccaaagtaagtgttacttcttattgcaccacccacgatgatcatgggaatcggtgataagaagaagaagacgaatacgagggagtgtgaaacgacgtcgtcgttggagttgcagcttaagaagcggaacgaggagttggaggaggagctgagccagagcaaggagagggaggagcacgtgaggcgccaactccgcgccgcactggatcgcctcaccgtggcggaggaagcggaggagcgcctctgcgcccagctcggtgacctcgaagccgaggcgctgcagcaggcgcgtgagtaccacgctcgcatcgtttcgctcgtcgaccagctttctcaagcgcactctctcctcctcaacacccccattccccttcattctcgctcttaaatcaatcttcttctcttttcttctctcatgtgcttgttgctttcacgtctacgacggtacgtcgtgtgtaaaatttgatcatgtatagggtttttttttttcttccttcaagtgtgtttcttgggagataatctttgtttggggtatgattgaacactaaatatcaacacttctcccatggggaatttgaactttgattctctatgttgtgggagactaatccttctgcgctagattcgacctgttcctggtggagtttgacttctctgctgtatctttcctttatcagctgtgttgcttggtgcatctttgaaacgatatcgtttttatgatttttaaaatttaattataatcataaatattaatataactgttacgcagaaagagaaaacttgaaaaaagacatcagaaaaagtcacatcctccatgataatagggtttgatttgtttgcaggtttc

SEQ ID NO: 29863 - DNA, 624 bp, Glycine max
  unsure (1)..(624): unsure at all n locations
  Clone ID: PAT_MRT3847_126969C.1
aatacgcagcgtgggtgcagcaagtccatcgcgaagcatngaagtcaaaacgcccatggcatcaacgttgccaccgcgtttggcgtggtagcgccctttgttgtgaaactccagcagcgtgtctttgcactcgtcggcgtagagcacgacgtcacctccgtggccacccatggggagaatgagggatccgtcgaagtccctcttcaacgagcctttccctttcttcaacttcgtttttccttgctgctgctgctgctgctgctgctgctgctgattcagcaccgcgccgtggccgccgtcaccggcgcgaacggtgatgatgacgtggtcgaagtatttgtgaggttccttggccaacgacgttgacggcggaggagatgcgtcggcgctggtgacggcgcaccgtaccgttttccgtttgtaatttacgcagttgtgtctgaattggacgccccttttatacgtagcggacagtgttaattaataaagagagagaagaagaatgcagttgtgagtgagtgagtagtaccttggagagcggacgcgtggaatgttgaaagatgaagaaggtggagatgttgaaattagagcacaccattatccgaatttcgggtacaagctcgc

SEQ ID NO: 29864 - DNA, 1631 bp, Glycine max
  Clone ID: PAT_MRT3847_12696C.1
cccacgcgtccggacggttcaaaactactagttaatcaggagtaatgatacaacattgcatatgcaacagaagtcaacaaaacaacaattaaatcacaccttgagagagagagatagatggattgagaggcaccctttaacgcttgcttttactactgagcaacagaaggtggccctccatctatatttcttattttttgtacctttccttctttcattaccatttgctctttcttcctttcaaacataagtgaggtgattctgtgtttttttttttaataggatcattgaggccaaaccccatctcaatcaaccctttatttctctcttagtgccttgaattttctatagcctttctgtgcaaaatttgcatcccttaattcttgtagaattgatgtctggtttgtacaatcagatttcctcaccttcaacagcaagggccaattcaccaaacataaacatgagaagcaattttgaggctgaaagtcagtacttaacggagctgctagcagaacaccagaagcttgggcctttcatgcaagtcctacccttgtgtaccaggctcttaaatcaagagattttaagggtttctggaaagaatggaatgatgcagaaccaagggtttagtgactatgacagagtgcagttcggaagccccaaacccaatcttatgccttctttagacatacaaccaaattttacaggctggaacagcttgtcacatgaagggttagctggagtacaaggactaaacgtggattggcaaacatcgccaggtgtcccaagctctcacattgtgaagaggatattgcgcttggatattgctaatgatagctatccaaatttcaatttggttggaaggcttcttggccttaggggtaattcactatattgttagccaaatttcaagagacttccacaggttgctcgcctaatgatcaatggactaagggttcagtaggagaacacaggttggggtgtatttatcaaggggaagggttcaataaaagaactaaataaggaagagttgttaaggggaaggccaggctatgagcacttgaatgaaccactgcacgttttgattgaggccgaattacctgtcaatgttgttgatataaggctgaggcaagcacaagagatcatagaagagctactcaaacccatggatgagtcacaggatctccacaaaaggcaacaactaagagaacttgctatgctgaattccaattttagagaagatagccctcaactcagtggtagtccctctacattcaactccaattaaatgaagcgggccaaaactgaccaatagtatgtgtctacattgagaatcatagcacatttgatgtcagttcctgcatgttaattctgcaaagcagcaacaagaaaactttcacaaaaagatggaagaaaaacgggagggggtacagatattcattgccacaatcaattcaattgtatcaatagacttgtaaaattaggagaatttcgttattattatattttgaccgattgattagtatatatatctgtaatgtctataaatataaccctgctgggactaaactgattattgttattattgtaagtttatgattgaatggaaagaacagttagtttgatgtgagagt

SEQ ID NO: 29865 - DNA, 352 bp, Glycine max
  Clone ID: PAT_MRT3847_126970C.1
tttgaggataaatttgagtttattttaggaaaaaaaatgcttaaagcacaaattacagagaggaggagctgaaatccttcaaaggcctgagcttctactcctttcccttaagattcctccaaagcaccagctccataaaatccttcagctccccagacccacaccaagaaccccacatgttaattggatcagccaaatctacaagcagataagtcctaaggagaatgcccaagcgtttttcttcttcctcaagcctagcatgagtaagcccccaaattgttagtctggcagaaaggcagactctgcctccagatccaaatgatcacctagacaccccctcaggctcctgggc

SEQ ID NO: 29866 - DNA, 358 bp, Glycine max
  Clone ID: PAT_MRT3847_126971C.1
agtcgtcagacgacaacacaacggggtgtgatcgcccacactggcttctacgacctcaggatctacggtgtcagagcaaacacgcatattaaaggcccagttcctaaaggatgtccaaacgtatcacacgcacactgctctcaagtttggttcaaccctacattttctccaccagagacttccccagtacaaggtatgacagttgaaactccgtgctgagcatagggatcctcaggatctaacaccacatattgataagtacataaacgatgtttctatattgaaaacgaagaaaggtactgcagaggaacttattgctgattttgaagcatcagagtgcaacaatgcaacatcacgc

SEQ ID NO: 29867 - DNA, 286 bp, Glycine max
  Clone ID: PAT_MRT3847_126972C.1
tgacgcaaagagatgttggtgatggttctggggttgtggccgttgactcttcatccgtttttccagtcagtggaaatgtttatccagatgggttgtatttcactattttacgtgttggaaatcctccaaaaagttattttcttgatgtggacacagggagtgatttaacttggatgcagtgtgatgctccatgcagaagctgtgggaagggagcacatgttcaatacaagccaacaagatccaatgtagtatcatctgtggactctctctgtttggatgttcagaa

SEQ ID NO: 29868 - DNA, 631 bp, Glycine max
  Clone ID: PAT_MRT3847_126973C.1
aaaccatgatacatacactaactattatataataacactagaaaagactaaatgtacagcgaaggattattacagtactaaaaacaaatggtggcacgaatcttatgaaagtgacacagatagtacaatctaacagcatcattttatatctgccacatctcttaaataaattcctgccaattgaaaaaatcctttgagctggaagggttatcagtgtcactaatgggattgtcaacatctggacctatagggattggaatatccgctacaatggcgctttcattaacggcaacatcatgatcaataacatgttcctcctctttctccttaaacactggagtttttctgtccatgttgagagcaagtaagacggcttgtgcttcaaggagtccatccctaagtccactcaagtatattgcacttatcagatcctgaaactcctgtgagttctggaagccttcaatcccagcattgtatagcttccctaattcttcagctcttcctttcaaaaacagcacacaccttctaatactttgtgtaacatttgcacgcaataatgtcatgcttcttttgaataaactaattatcggattgagtggttaattttctgaataaattcttcatattgatt

SEQ ID NO: 29869 - DNA, 224 bp, Glycine max
  Clone ID: PAT_MRT3847_126974C.1
ctcgagccgattcggctcgagatgcactctagtttattccgtggtcatcactcatcagtggtgctacaaattacttttggcttttatgtaatcacccttaccaaggtgaaactctaattcagatagtagatcaacacccaaagcacctaagaaacagtatccaagttttgtccttagtttatctcttttcaatcataatatattagggtaatatcttggtctta

SEQ ID NO: 29870 - DNA, 584 bp, Glycine max
  unsure (1)..(584): unsure at all n locations
  Clone ID: PAT_MRT3847_126975C.1
cgcgtacgtatgcttggatcctctagtgcggccgcttttttttttttttttttttttttttttggggtcgacatgagtgttgcccttgctcctacgtatcctcaggtgcaatgaggaattcagacctacgtagttctttaaagtgagaaagttgtgtgttgagttgatgttaggcttttaaaagattcatttttaactaataagaacaaaaagaggccatcaaggcattggaccttgaacgatctcaagtgacttcaatggaggtaaattcagttatatgttgattttaatcttggttttgttcattaactttcaatctctttaaaaatatgatttacggcaccaatgatcgattgaaatttactttacaagtagaaaaaagattacgatgatagaagaaggagatgaagatgcacaaaacaactaagaggacccctaagggtgcatagatcgtatccaaatccttaaaacacaaactaaccggatgacgaacgaagaacaccgaacgaagaacgatgtagaagttgattatagtcgcaattcggtagcgcctcggcctcgnttctctcttctttattcttttt

SEQ ID NO: 29871 - DNA, 451 bp, Glycine max
  Clone ID: PAT_MRT3847_126976C.1
ctggttgttgtttaaattccatgattacaattattagcttaaaattaaagggtgcattgacaaagactctggggaccttgcaggtctcagaggatcccggaaatctatcattctgggcacacaacacagaagggatgaacatgtgaacaacccatcaaacacgccggctctctgcacaatcggacactagaccctgagggagctcagaggcgggaatgggggccgagccagtcgtgaggctgacctgattgtgactgaggagctggtcatgatcactttcgagacctatgtgtatgagccatgactcaggatagacctctatacgaattggttggagttgtggtgatgtacagcaatgtacatgctgtatgctgcggtgcgtctggtggacgacatgctgaccagcaggccagatatgcagaatttttaccgacccgcctgggaacctgtg

SEQ ID NO: 29872 - DNA, 161 bp, Glycine max
  unsure (1)..(161): unsure at all n locations
  Clone ID: PAT_MRT3847_126977C.1
cacttccataacttctaacccatcttatataatttgtaattcatataacataatcaatctattctgcattactatcaatcatacttcaatactatcacactaccaaaaatctataattatctaatnnnnnnnnccgcgcgtcgtactgagacagctatgac

SEQ ID NO: 29873 - DNA, 582 bp, Glycine max
  unsure (1)..(582): unsure at all n locations
  Clone ID: PAT_MRT3847_126978C.1
ggctcgagctcactccaaccccttccccatcaaccgtcatggctttctctgcattaaaagaagaagatcttaagcttatgttggctgcccgtgttcatatcggcaccaaaaacattgatcctcaacaacatcgttatgtatggcgtcgtcgtcaagatggtgtatacatcatcaacttgggtaaaacctgggaaaaacttcaattagctgcacgtgttattgttgctattgaaaatcctgaagatgttacagtcatctctgcacgtcaatatggtcaacgttcagtattcaaatttgctcaacatactggtgcacaatatattggtggacgttatactccaggtaccttcaccaatcaaatccaaaagaaatttttggaaccacgtttgttggttgtcactgatcctattactgatcatcaacccgtaaaagaatcatcttatgtgaacatccccgttattgcatttacttcatacgatgcaccattaacacatatngatcttgccatcccctgtaacaaccagggtaagcaatcaattgctttgatgtattggttattagcacgtgaagtacaacgtatgc

SEQ ID NO: 29874 - DNA, 437 bp, Glycine max
  Clone ID: PAT_MRT3847_126979C.1
aacaaagggctgcactggaagcggccaaagtccaatttctattgtatcagggggggcggaaataatcactccatatttaaaatttcccctcgggaaaaacacacaaccagtgccttttattactccataaataaccaagggcttttccctgtattactaacaatgccgaacacactttgatggatctccaaataaaaagaacccgccttattttgcagaaaacccctgaggctacaaaattttttcttaaacaagaccactcctaaaagggaaggcggggaaccctctatttggcgggggggacccaatttccggagagcggtggatagaccctcctcttcacaagcctgagaatatattgtcctgtattccgggccaagatcaataaatgctcacagggcttgactttgactcaaacaaaccacactggtttcttt

SEQ ID NO: 29875 - DNA, 402 bp, Glycine max
  Clone ID: PAT_MRT3847_12697C.1
atgattcaagggactaaccgcctaagaattctttgtcttaacacattggagggtacatcctttgtggtacaagtagagtgtacaactactttttttaacactgagaacaagagagggtacatctcttgtggatcagttcaagtggagggtaaatccacttgggttgttcaaagagaacaagggagggtacatcccttgtgcatctttgcttgtaaaggattttacaaggcaaagggtcactttggggcagttgcagctcgcccaggcgagctggaacttagtgttgaagcaatgagctcgctcaggctagttggttacttcaccatgaagctatttggtggcccatgcgagccaaaggctatgatgaggacaaggcaaggaataagggcaaggaacctttag

SEQ ID NO: 29876 - DNA, 1984 bp, Glycine max
  Clone ID: PAT_MRT3847_126980C.1
ggcccacgcgtccgcccacgcgtccgaacttttgttaccaaaaaacaacctcaaagtttgaggcattgaggcttgtgtgtgccactagttgctcatcacaccagccatgggcttcacccattcccacactcaccacactcccaaaatgcacaaccgcagaacacgtgaaccagctccacgcacgcatgatcacaaccgggttcctcaaaaacccttccctcaccgcaaaactcgttctttcttgcatttcctcaccccgtgagcctcttgtcgagttcgctcgctacgttttcttcaagcaccacgcttttcgcgatttccgtgatgacccttttctctggaacgctctgctcaggtcccactctcacgggtgtgaccccagaggggccctagttctgctctgcttgatgatcgaaaatggggtgcgtgtggatgggtactcgttttcgttggttctgaaggcttgtgctagagtgggtttggttagggagggaatgcaggtttatgggttgttgtggaagatgaattttgggtctgatgtgtttttgcagaattgtttgattgggttgtttgtgagatgcgggtgtgttgagcttgcgcgccagttgtttgacagaatggctgaccgggatgttgtttcgtataactctatgattgatgggtatgtgaagtgtggggcggtggagagggcgcgtgagttgtttgatagtatggaggagaggaatttgattacttggaattcaatgattggagggtatgtgaggtgggaagagggggtggagtttgcttggagtttgtttgttaaaatgccggagaaggacttggtttcgtggaacacgatgattgacggttgtgtgaaaaatgggaggatggaggatgctcgggtgttgtttgatgagatgccggagagggattcggtcagctgggttaccatgatagatggttatgtgaaattgggtgatgttcttgctgcgaggcgattgtttgatgaaatgccgagcagagatgttatttcttgtaattcgatgatggcaggctatgttcaaaatggttgttgcattgaggctttgaaaatattttatgatatgaaaagggcaacaaatgtggtgcctgatgatactacgttgttgattgtaatcacagcgtttgcccaattaggacacgttgaagatggagttgtgatacatcattatttgatggacaaggggtactctctgaatggtaagcttggtgttgctctaattgacatgtattcgaagtgcggtagcattgataacgctatctcagtgtttgagaatgtcgaacaaaaatgtgttgatcattggaatgctatgatcggtggtttagctattcatggaatgggtttaatggctttcgattttctcatggagatgggaaggctttctgttattcctgatgatatcacattcattggagtgttgagtgcttgtaggcatgctggcatgttgaaggaaggactgatatgttttgagctcatgcaaaaagtatacaatctggaacctaaagtgcagcactatggatgcatggtggacatgcttagtcgcgcagggcacattgaagaagccaagaaactcattgaggagatgcctgttgaacccaatgatgtgatttggaagaccttactcagtgcttgccaaaattatgaaaacttctctataggagagcctatagctcagcaattgactcagctatattcatgcagtccaagttcctatgtgctcctgtctaatatttatgccagtttgggcatgtgggacaatgtaaagagggttaggacagaaatgaaagaaaggcaattaaagaaaattccaggttgtagttggattgaactggggggaattgttcaccagttctctgtacaagataggacacaccctcaggttactgagatttattctttgttaagtagcttgtaaattcctatttcgaagctgatctattatgtgatattgtttgagttggg

SEQ ID NO: 29877 - DNA, 399 bp, Glycine max
  Clone ID: PAT_MRT3847_126981C.1
aaccaaaacaacaaaaagcatatttttaggctttctaaaaaaaaggggggggcaacaaacccctatttaaaaaccgggcccctaatagaaaacccccgttttttttggtgaaaaaaagaaggaaaaaaaaaaaacaagacggggaaccccgctttcaaaaaaaaaataataattttttaactttccacttcctaaaaaaaaaaaaaacaccccccctgctggagggaaaaaaaagggaaaccccattggtttgttaacacagggggaccactggtggcgtggagaaacacaaaattatttcaaaaagcttcacccccgttgaaggggcccacagctccccggaaggccccatggttaaaaaaaaccggtgatctccccccccccccgggatccccaaaa

SEQ ID NO: 29878 - DNA, 428 bp, Glycine max
  Clone ID: PAT_MRT3847_126982C.1
cccacgcgtccgcggacgcgtggggttttctctctctctctctagctttcggttttctctctcctcagatctctttcccgtttctctggcggttttcggaacacccctctttctcaatcatctatcttcaatcatgtcttacattttataaccgtaaagtttcatttttttctttcaaaatttgtgtaattagttgaatcctttattatttcatttgttaatagagaataataaaaacaaaaataattgatcgtggtttggaacaaaacccaattttttttttttttatttggggtggttgcgatttctggcgggtgtgattgcaaatttgaaggttgtttttttgtgtgaggttgcgggttggatggtggaaagaaggttaaaaaagtggtggtggtggattgaaaaggggggggagttgggggggt

SEQ ID NO: 29879 - DNA, 495 bp, Glycine max
  unsure (1)..(495): unsure at all n locations
  Clone ID: PAT_MRT3847_126983C.1
gtaagctcggaattcggctcgtgcaagagatcaaggactgtttgagttatgtttacagatattggactgaaaagggtatttgttgggcaagaaattcaaatgttcaagacattgatgacacggcaatgggtttcagactattaagattacacggttaccaagtttcagccgatgtgttcaagaactttgagagaaatggtgaatttttctgctttacggggcagaccacacaagcagtgacaggaatgtttaatctgtatagggccacacaaatcatgttcccgggagagagaattcttgagcacgggaagcacttctctgccaaatttttgaaggagaagagagcagcaaatgagcttgtagataaatggatcataatgaagaacctggcagaagaggttgcgtatgctttggacgtaccatggtatgcaagcctacctcgagtggagacaagattctacattgatcaatacngcggtgagagtgacntgtgga

SEQ ID NO: 29880 - DNA, 529 bp, Glycine max
  Clone ID: PAT_MRT3847_126984C.1
ccaaggcaaaatttcggccttttatttatttcccccaaaggcccaaacccccccccttggggttaaaaattttttttttaaaccaattttgggggggaaagggcccccccaaatttaaacaaattattttttaccaggaaagaccgggcttgggggtttccacccgggaatttggggggggggggaccccccgggggggttttggattgggggggggggccccccccctccccccccaaaggggggggggcctttttagggggggggggaaaaaaagggggggggccccccttcggggggggaaaatggggccaaaccccaccctttttttaagaagagggggcggcctaaacccttttttggggcaaaaaaaacccgggcaggggggttttggggggttaaaagccccctcccccgggtttagttttttaaacacaaaaaaaaacagggtggacttggggggcacagcctaaaagggccttttggttttccagggccccaggggggactggttttttttttttttttt

SEQ ID NO: 29881 - DNA, 420 bp, Glycine max
  Clone ID: PAT_MRT3847_126985C.1
tacggctgcgagaagacgacagaaggggtcattccacgatcaatttactcgttgttatctcttgtccttcttcgtgtttacatcaaatgagctgtggagtatcaattcacaataaatttcaatcctttctaccatggacgccttgctcttaaacccaagccttatttcaaaaaccatccacacttttttttcatcaagcccaatactctatctcatggcaccttaaattttatcgtctaccattgcactatctctgtcaacaccaatactaatccccaagctctatatttaccactatctatacacttcaataatcatcaccctaccatgcctccaaagtgctaaatctctaaacattcctttaaacctattaactatccatctccaactgaaatcttgcttatacaacatcaatatcat

SEQ ID NO: 29882 - DNA, 1564 bp, Glycine max
  Clone ID: PAT_MRT3847_126986C.1
gaattcttcacccggctgagaaggtgattattgagccagcctcatcccgcagtgggactaatgtcaatcctgtgaatccatccattagaagttcagttcctcctcccacttttgcaaaatttttcgccattgcatcccttcaacagtatacaaatagcttttctcaagaaaatcttataggaggaggcatgttgggtaatgtgtatagagcagagcttcctaatggaaagttgcttgctgtaaagaaactggacaagagagcctctgcacaccagaaggatgatgaatttattgaattgataaataatattgacaaaatacggcatgcaaatgttgttgagcttgttggatactgttcagagcatgatcaaaggcttctaatctatgagtactgcagtaatggatcactgtatgatgcactccactcagatgatgacttcaaaacaagactctcatggaattctcgtattcggatctcacttggggcagctagagccttagaatatctgcatgagcaatgtcagccacctgtagtacatagaaatttgaagtctgcccatattctccttgatgatgatctatccgtgcgggcctctgactgtgggctagctccattaatagcttcgggatcagtcagtcagctctcggggaacctgttaactgcctatggctatggagcgccagaatttgagtctggaatttacacataccaaagtgatgtgtacagctttggagtgatcatgttagaacttttgactggccgtcaatcgcacgatagggcacgagcacgaggggagcaatttctggtcagatgggcagttccccaacttcatgatatcgatgcattatcaaggatggttgatccttcattaaatggaaattacccagcaaaatcattgtcaaattttgcagacattatctctagatgccttcagtctgagccagaatttaggccagcaatgtccgaggtcgtcctatacttactaaatatgatgaggaaggagtctcagcaaagtgaatcaaatgaaaaatgagaaaggtagtgatatttgtatgtgaatttatcataatgtgcagagatgagagatccacttgctgaatatcaacttgtagagatatcatgttatctgaggggagcccaattagttgtctccatgcttcattatttcctactaacctattcaacattcacatgccaagttctaccaagagttttgtgcaatcaaacttaagagaatggtagtgaccaaccatcatatttgtagtcttatgatatctgataatttcatagtggactaaaatatgccatattagtattgtagcggcgtgctaactaacccatttgtttggtaatagtttccaaattcttgatagcaatgtaattccgtattggcatccttgtgctttttaggttcatccttcgtaataaaagtttgttgatcatttgtattctatcacagacaagcattgtaatttattgattgttctttgtacactggaaaaagatgtcagggtacaatcattgtatttaggtctttgattgatcaggacttattcattttag

SEQ ID NO: 29883 - DNA, 104 bp, Glycine max
  Clone ID: PAT_MRT3847_126987C.1
gcttgttgctcaattatagcaatttgtaataaagatcttggacgggttctacgtatactaggacggctactactaatcctttacactcttaatctcataatcaa

SEQ ID NO: 29884 - DNA, 248 bp, Glycine max
  unsure (1)..(248): unsure at all n locations
  Clone ID: PAT_MRT3847_126988C.1
ctcgccttcgtcgtcgccgccgccggcgtcctcctctccacgctacgtgagcgggganngnngnggatgnggntctggctctgcggctacgccttcgagtgcgtgcttcacatggcgttcgtgtgcntcgaattccgaaccagaattggcgattcttctctcacactacctatagcgttntgangaggctagagcctatgagcactctggcaacatcggtttggtgggtgtttggattttattggatt

SEQ ID NO: 29885 - DNA, 1617 bp, Glycine max
  Clone ID: PAT_MRT3847_126989C.1
cccaactctccacttctttcttacctgttctttcccataattaaacatgaatacccaccatctctatgtgtctctctcccccatttactcttccttgctttttattccttttcagttaaacttcttaattaaaaaaaatatctaagtaaggtcacaccttaccctctattagtgtttcagaaacatagaaaactcaatgaccagttttgtcttctcataaacagttataagctaggaaagctacactaggaacagatgtctccaattccaaaacagtttttagggtgatttcagaagcaagccactttcacttgatcttgaagtttgaggaggcatgcaacacttcttgcactgtcatctgtgtacttaagatgaaataaacatctcagtgcaagctcagaaatagatcttattctgaatactcagtggttaatttccatttctattttgtaaataatttctaacataagcatagctaaatcatgaaaccaaactttgatcttgaagtggaggcatgtgcagaatatgaatctgaggttagcagccaggttgcttccaatgtatctattcaagaaacctctataggtccgtgtagtgatagcctcaccaacatttccaacatcacaaatccaatagggattcatcctaattctgatgctatttcacttgacttaagtctcaacttcaagaatagtgagccagggggaagagattcaataggattctcattctcaagcactagtgagagcagcaatgaacctgcctctcaaactacagcagcaaccattccacgagtcttctcttgcaattactgccagcgcaagtttttcagttctcaggctcttggtggacaccagaatgcacacaagagagaaaggacattagcaaaaagggccatgagaatggggtttttctctgaaaggtatgccaatttagcatctctccctctgcatggttctttcaggtccttgggaataaaggcgcactcctcactgcaccatggtttcttaccaacaatgaggcctcctgagataaagagcaatgcaagatatgatcaagggtatcttggccacccgatattcttggaggatgacgagtcagatttgttgtggcctggtagttttcgtcaagttgctgaggcaggtgatagtcatcagaatttcatactgactggaagttcaaatttgagttttactgaggtgaatccacctgtagacatagataactcaacaccagatttgactttgaaactttgaaggaggttatttggtatggttctgaccttgagttgtcttctttattgctatgttataacacagtaagacatgcatgcaaggggccatgattgccagattgattcctatactcagttgggtttccttttacttttactctcattttcagttttctgttaggaatcttgctttggtattttgctttttatgtttctcattgtataagagctccgggaggacaattttggagcttctgtgcttgttatataaatcatgttatcccttcactgtaattattgagcttctatgctttctgtctttgtttctattctgggattatattgaccatttaaacttcatccttgttcgccctacacccaac

SEQ ID NO: 29886 - DNA, 472 bp, Glycine max
  Clone ID: PAT_MRT3847_12698C.1
attcggctcgaggtaagttcttatttggaaggcgaagttgccaaggaattcattgcttggctggtgaaatgccgaggaaggcgtgatttcccagaagaggtcgccattgttgaagaacttggccgcagacatgctgatggttctttcactgatgagatgaacaccattcttgataatcttgccgccagggactttataaactggttgattcagaccaaaatcactgacaggaaataactatatcactattcaagatcatcttcacaacatcacctgctagccacgtgggatgtttgaaatgttaagtcctgtaaatttaagaggtgtattctgaggccacattgctttgcatgccaataaataaattttctcgtagtgttgtgtagccaaaaattacaaatggaataaagttttatcaaaatattgctaaaatttcagctttaaaatatgacagtgctagattctgttattt

SEQ ID NO: 29887 - DNA, 280 bp, Glycine max
  Clone ID: PAT_MRT3847_126990C.1
ccgggccggccgacgcgtacgcccacgcttcctctttgctgaaactgtatttttatgggctgcatattatttgctggtgttggtgcttttcaaacatatagttgctccctattcgtactagttatctattgaacgcaatgactcatcctggcagaaggctttcagtgacattaggtgcaataaaaattacctatattgaaggaaccaccacatgcaatgttataatccttggaataaaacaaatttaatatattcagtccaggttgctcttcaaatacta

SEQ ID NO: 29888 - DNA, 458 bp, Glycine max
  Clone ID: PAT_MRT3847_126991C.1
ccacccgatattcttggaggatgacgagtcagatttgttgtggcctggtagttttcgtcaagttgccgaggcaggtgatagtcatcagaatttcatactgactggaagttctaatatgagttttactgaggtgaacccacctgtagacatagagaactcaacaccagatttgactttgaaactttgaaggacgttatttggtatagttctggcctcgagttgtctgctttattgttatgttattgtacagtaagacatgcatgcaaggggccatgattaccagattgattcctatactcagttgggtttccttttactttcattttcagttttctctcttaggaatcttgctttgttattttgttttctatgtttctcgttgtataagagctccgggaggacaattttggagcttctgtgcttgttatataaatcatgttttcccttcactataaaaa

SEQ ID NO: 29889 - DNA, 1764 bp, Glycine max
  Clone ID: PAT_MRT3847_126992C.1
gcacccctacgtaagcttttaattcggctcgagcaatttcaacgccacactaataattccactgcaccaccaccctccccatggggacttttctactcattctcttttcactcccacgcattctgcacacaatcgcggacgcgttggttctgggcaaccgcataaggttaaactgttaagcatatcattgaaatccttttgggattggaacttgatatgatcatttgtattggggagtaagaccttgttacttttgcaaatgctaaattttaataggatcagaagtcagcccaggacaaccagatctatgtctttgggaggcatggattacgtggatccaaaaaggaaaggcaatttacccggggatcctctagagtcgacctgcagtatatttattctacttctgttatgtgtcagatcttgaaagttctgtttcccggcttatccttgagacactatctaatatgttgggaaataatttttacagacaataaagacaaatgtgattggtacactgaacatgcttgggcttgccaagcgagttggggcaaggttggtaaattgtctttggaaaatgataatttcagcttctatcatcagttggtctttattctttttcttcttgttagtcttagttcttattttattggcaggattttactcacatcaacatctgaggtatatggggatcctcttgtgcatccccaacctgaaagctattggggcaatgtgaaccctattggtatatgcttttctctttgtctcaatctgtttcttgggcttcttaaatgaaattatatcttctgttatgattgtgaaagatatctgtgcagtataaaccatagagagctactattatttaatttttgtattataaggtggctaaaagcattgaagtatgcatgcgcgtgtcgaacctttcttttgtctcataagtacgcgctccttaatgcaagggggacttttttaaaactcagacattttttttatgctattgattatgttcccacgcgtccgatcagatcctgagggaagattgggtgaggctcctaggcctgaactgcgagagcaaggtcgaatatcaggtgcctgctttgatgctgctcgtggtattgtacctggtttgaaggtaagaggaacagactataagacggctgatggaacttgtgtacgagattatattgatgtaactgacctggttgatgctcatgtaaaagctctggaaaaggcacaacctagtaatgttgggatctacaatgttggcactggaaagggtagttcagtgaaggagtttgtggaagcttgtaaaaaggccacaggggtggacattaaagtggactaccttccgcgtcgtccaggcgattatgctgaggtgtacagtgacccatcaaagatcaaacgtgaattgaattgggttgctaagcacactgatcttcaacagagtttgaaggttgcatggagatggcagaaatctcatcgtgatggttacggggtttcaaatgcattattttgaattacatagaattctaacataacagcagaagactagaagaaaccccggcagcatccatttcagctgcacttctatgatatcttagaataggggttgatattatttttttcttcttttactccattggggaatttgttcttagggagcatgttgtccattcgatacatgtattgaccgcataatatgattcaataatataatgcagaggctctattatactttttctctacgatgatatttatatcaccatt

SEQ ID NO: 29890 - DNA, 884 bp, Glycine max
  Clone ID: PAT_MRT3847_126993C.1
cccaactctccacttctttcttacctgttctttcccataattaaacatcaatacccaccatctctatgtctctctctcccccatttactcttccttgctttttattccttttcagttaaacttcttaattaaaaaaaatatctaagtaaggtcacaccttaccctctattagtgtttcagaaacatagaaaaactcaatgaccagttttatgttctcataaacagtcatatagctaggaaagctacactgggaacagatgtctccaattccaaagcagtttttaggttgatttcagaagcaagccactttcacttgatcttgaaatttgagaaggatagagtaaatatcccagtgcaagctcagaaatagatcttattctgaatactctggtggtcaatagccacagcccacttctattttgtaaattagcttctagcttaagtacatctagatcatgaaaccaaactttgatcttgaagtggaggcatgtgcagcatatgaatctgaagttagcagccaggttgcttccaatgtatctattcaagaaacctctataggtccttgtagtgacagtctcactaacatttccaacatcacaaatccaatagggattcatcctaattcagatgctatttcacttgacttaagtctcaacttcaagaatagtgcgccagggggaagagattcaataggattctccttctcaagcactagcgagagcagcaatgaacctgcctcacaaactacagcagcaaccattccacgagtcttctcttgcaattactgccagcgcaaggttttcagttctcaggctcttggtggacaccagaatgcacacaagagagaaaggacattagcacaaagggctatgagaatgggattt

SEQ ID NO: 29891 - DNA, 740 bp, Glycine max
  Clone ID: PAT_MRT3847_126994C.1
aggcccgaactgcgagagcaaggtcgaatatcgggtgcctgctttgatgctgctcgtggtattgtacctggtataaaggtaagaggaacagactataagacggctgatggaacttgtgtacgagattatattgatgtaactgacctggttgatgctcatgtgaaagctctggaaaaggcgcaacctagtaaagtcaggttctacaatgttggcactggaaagggtagttcagtgaaggagtttgtggaagcttgtaaaaaggccacaggggtggacattaaagtagactaccttccacgtcgtcctggcgattatgctgaggtgtacagtgaccccacaaagatcaaacatgaattgaattggactgctaagcaaactgatcttcaacagagtttgaaggttgcatggagatggcagaaatctcatcgtgatggttacggggtttcaaatgcagtgctttgaattacttagaattctaacatagcagaagactagaagaaaccccagcagcatccatttcagctgcatttctatgatatcttagaataggggttgatattatttttttcttcttttactccacagtgatttggcattggggaatttgttcttagggagcatgtagtccattcgttacatgttacatgtattgaccgtaaaatatggttcaataatataatgcagaggctctattatagcttttctctacaatgatatttatatcacatttcatttctctc

SEQ ID NO: 29892 - DNA, 428 bp, Glycine max
  Clone ID: PAT_MRT3847_126995C.1
acgaggaaattcaaattttcatttttaaatatttatttaaaaattaaaatttcaatattgaatgaaaataaatatgagtcattttttaaatagtttaatattcaaaataaatttaatgttataaaatatatttaatacttaataattaaataatcaaaataattttaatgctaaacaatttttaatcttatacaatatttttgtagtaacacaaaaaaacttggattaaacaatattgcaaaattaaaagatgaatgatatgtaattctttattcttgtttaaaaaattaattacctagtcttgcaataattttaaaatacatattaaaattaaataattatgtaatttaaagacaattatctcgtacaagattcaaatgatattaatttcattgttcgcacgggaagaaaattcaaattgttaataa

SEQ ID NO: 29893 - DNA, 425 bp, Glycine max
  Clone ID: PAT_MRT3847_126996C.1
tatttattttgagctttccatttttctctctttttcaactttcaattcaggcagtttggaaaaacccacccagccacggggttttttttttttcacctcctgaaatttgtaagtggctttgaatagaattttccacaacacatacactgcggttttttttctttttcttcttttttttttttggggggggttatttttctttgtggtgttggggtgtcactttctggggaggacagctgagtttatgagttttttgttgggctgaaaacaaaaaccgaatacaaatttttatctttggaagaagcttgctcaacgtggggtcacaaaaacaggtgtgggtttggtaatataagccttggagggaaaaaaaaatattttttttggaagccaaacaaaggattagttttggggttgcagtgataggg

SEQ ID NO: 29894 - DNA, 655 bp, Glycine max
  Clone ID: PAT_MRT3847_126997C.1
cattcacttactctccactccacacttccttcctatttcctacaacctcaatccaaaatcaatcctatacttgagatattttccaacttcttccaactttcaacctcttatttgttttaaagttttttttattcttttggttcaccaccaccagctcaggactcagaagtaaaacacaaacctttttttgcctcttccttttccaccacaatctcttctttttttacttaacacatggagttacgcaccgcaattcttcaatcctcttcttcgcttcctccgaggtttcacactctcaaacccactccagatttcgccttccccttctcattattcgtttcaaacccacttcgactttcgtgtttcacttttgtttccaaagaccagcagcattcctttccagtcactgcacgcgacacaagagcagtgctgaattgtatcagtgaagggttgtcatgtaccggtgcctccagtggtgattgttcttgtgatgataaaagggatgatgatgaagatgccatgggggttcttgaataactatgaaatgatcattagagattgtgacaagctaattgaggctttcatggttgacgagagaaattggaggaggctggtagttttaaaaaaaagtgggatatattaggccccatttttt

SEQ ID NO: 29895 - DNA, 255 bp, Glycine max
  Clone ID: PAT_MRT3847_126998C.1
ataaggaagtgttgatttgcctaaattgaggatggacatggacaggaggagttggctatggcgcaggaagtcgtctgagaaaaatccgggtgaaattgagagttcaggctcaatgtcgtctcattctgaaagattttccgatgatctggtgccatctttttagctgcatacattgttaattccagttttgcatgctatcatggtttaattatatctgtttccatcattttgcattactgaacaagggggagtggg

SEQ ID NO: 29896 - DNA, 280 bp, Glycine max
  unsure (1)..(280): unsure at all n locations
  Clone ID: PAT_MRT3847_126999C.1
cgcaaaactaaccccctaatggaattaattaaccactcactcatcgacctccccaccccatccaacatctccgcatgatgagacttcggctcactccttggcgcctgcctgactcctccaaatcaccacaggactattcctagccatgcactactcaccagacgcctcaaccgccttttcatcaatcgcccacatcactcgagacgtaaattatggctgaatcatccgctaccttcacgccaatggcgcctcaatattctttatctgccctctnaccana

SEQ ID NO: 29897 - DNA, 1330 bp, Glycine max
  Clone ID: PAT_MRT3847_12699C.1
tgtggagtggcttgagacaacatccactttggtgcttagcatgtctactagtaagtgtgcatttaggaggggctgccctaacaagtggagggcatttgaagaagttgcgctgcttacttgtccctctggcctggattttgccatgggtgctgctgaccccacggttggtagggaagcgctggctgctgcagctgccatgcacagggtgccgcctgccgcaacacctgccgtttcggctacttattgcaatgggagaaagctagctagtagaaacgttaaggatgcctgtgataccacgcgtccgtataactgaacctaatagaaaaaggcttggttgttggtgtcattgatgttgcttcatgccattcttatgattcttatgtacactgttcatattcagattgagcgacgcatatattatgatgaagttcaaggtttgactgtggagtggcttgagacaacatccactttggtgcttagcatgtctactagtaagtgtgcatttaggaggggctgccctaacaagtggagggcatttgaagaagttgcattgcttacttgtccatataacctggattttaccatggataattctaaccagagtgaagtaatgaaagtggatgatagtataactgccatggacagggaggagcccatttcaagatcagacttatcggaaactgtaattgaccctgcatttttcccactcacagtgtgtcttctttcaacaattccagtagcacttcatgctgttggtggtgatgatgggccccttgatattggagtgaggctgtacatgagctcctatattgggtgagttggtagttttgaggtggcggatccagtttgcaatcataagatttttatgtgatgaatctgttgattcttttaatggaatgcactcggctccattgtggaaaatagtgtatagttcgacataggtgggaaaattacattgtctaaatttgttaatgttctatcaacctgtttaaaactgagatttgggagtaggtgtgtagataaaaaaaaaaagcaggttctgttatagatttggcctcactgccttcttctaacagaaccttcttactggaattggtgcttgtttttgttggcccgttccatctacttagtatgtgcacgtatttggttctctaatagaggctgaggccaattcatacttcgtttctattttggtttgactgcagcccgataaattttttgatattgggtggtcacttgtactagtaatttggtttctgaaacatttttgtatgttaccttctgactttggtaaacgttgaaatggaatagtcatttgttttataccgtt

SEQ ID NO: 29898 - DNA, 271 bp, Glycine max
  Clone ID: PAT_MRT3847_1269C.1
atacgacagaagggcgaaggagataattttgggggccccggctttttaatcccctgattgagggtccaaccgaatggccatttcatttctttgactcgctttcaagtcaacatttcattgccagcaagctttttggtgtactcgggtatctcatcatatacacacgacatcttccatatatcaacctattgcctgtgcatatgcggtggagtattgactgatgctggcggccgcatatcaaagagctttcttctctagtgtgcctaaatat

SEQ ID NO: 29899 - DNA, 297 bp, Glycine max
  Clone ID: PAT_MRT3847_126C.1
ctttcgcgtgggcttagaagcatctgaaaaaccatccatttgggttatcagggagagaaatccaacagaagtgttgaacaggtggattaactaactaagtttcgaagagaggacacagggagagggtcttttgattcggtgttgggctcctgaggtactaatactattacaccctgcaattggagggttcttaacacactgtggctggaactcttccatataagcaatatgcgctggaatgccaatgcttacgttgccggtgtttgttgatcaattgttcaatgtgaagttcattgt

SEQ ID NO: 29900 - DNA, 1481 bp, Glycine max
  unsure (1)..(1481): unsure at all n locations
  Clone ID: PAT_MRT3847_127000C.1
ccacgcgtccgaaaaatcatcctcggtcacctgcaatatccttggtacagggttggtatacgttcgcagggttcagatcacgccttgcaaagtatacttttgtggtccagagatgaatgtctcaaatcgtgttctccgtcatttccgtgaacatattgataactttctacgtgtttcatttgttgatgaagaattggataaactgttttcaactgatttatcatcacgttcacagaacaagaaaactgagatatacaccagaattctttccatccttaagaatggcatagttgttggtgataagaagtttgaatttctagcattctcatcaagtcagttgcgggaaaactctctctggatgtttgctcctacagaaactggatgtactgctgcttacataaggaaatggatgggaaattttagccagattaggaatgttgctaaatatgctgctaggctggggcaatcttttggttcatctactgaaactctaagtgtccatagggatgaagttgaaattattcctgatgtgaagaagcttacatatgatggaaacgaatatgtcttctctgatggaattgggaaaatatctcttgaatttgcccagaaagtggctaaaaaatgtggttatgattgcactccatctgcctttcagattcgatatggtgggtacaaaggagttgtggctgttgaccctaaatcatgctacaagttatcactgaggaagagcatgcggaagtatgattcagataacacaaagttagatgttttggcccgtagtaagtttcagccatgttatctgaatcggcagttaatttctctcttatccactcttggtatcaaggatgatgtttttgagaaaaaacaaagagaaactgttaatcaactgaacactatactaacagattcattaaaggctcaggaagttctggacttaatgtctgctggagagatcactaatgttctgaaggagatgctcatttgtggatacaagcctaatgaagaaccattcctttcaatgatgcttcaaacatttagggcatcaaaacttttggaattgcgacttaaatctaggatctttattccaaaaggaagagcaatgatgggatgtctagatgaaactagaaccctagaatatggtcaagtatttgttcagttctctaacaataggctgcagaatctatctgatgattttttttcatatgatttgccaaagaattatatggttaaaggtaaggtagttgtagcaaaaaacccctgcttgcacccaggtgatgtgcgtgttttacaagctgtggatgtgccagatttgtaccacatggtggactgtgttgttttccctcaaaaaggaccaagacctcatccaaatgagtgttcgggaagcggatctggatggagatatctancctttgttgntgngaccatgaattttgatccttnctcgcccaattgatccaatggactatactgctccctgcact

SEQ ID NO: 29901 - DNA, 506 bp, Glycine max
  Clone ID: PAT_MRT3847_127001C.1
agcagatgcatactctctccctctctctttagtctttaccaccacctggcctgcttttaaaacttgttcttccgcgctcacatgaagacactagtcgtggacacaacctcatcaacccctcaagactcatcatcctccaagaggcacttccactggacgaacaaggttggaaatgaagacccccaactcgccacctcagaaacgatgtcaaaaatcatagaagaagaagacacaaacacataggaaaaagaacaagaagaagatgacaaggctgttccacttacaggccctgccacaaagagaaagattcaggcagtggcaatctcaaggctccgatctgttctgactgtgttcagcaaaaaccaccgttccaacctccccttcggcctcggctccagagtcgttggcaccctcttcggctaccgccgcggccacgtgcatttcgccttccagagggaccccacttcgcaacccgccttcctcatcgagctcgcgaccccaatcag

SEQ ID NO: 29902 - DNA, 290 bp, Glycine max
  Clone ID: PAT_MRT3847_127002C.1
agacaaatccttatcatctataccggtacttgcaactatttcctaatttatgatatcaacaggctaacggggacaagttaatgctatcatatcataaacaaaactatatgtaacgagtcagctgcacagtaccattacagaactctactccaactatacatcgttcaattctaatctattatacatcatccattacgcctactggatgcattatatgtatcatatgaaaaattatcgatacttgccatactccctctactagatacatacatacttaatggatagaatca

SEQ ID NO: 29903 - DNA, 191 bp, Glycine max
  Clone ID: PAT_MRT3847_127003C.1
attgggggggggaaataattcataatacccattaattgttttcgatttcacccagccaatttgaatttgggttttaaacaaacccctttttattttttcccacccaaaaatgtcttcttgttggtttaaaaaaattgtctcttttttttcacaaaaacttttgacagaaccagagggttggaactcaaatt

SEQ ID NO: 29904 - DNA, 647 bp, Glycine max
  Clone ID: PAT_MRT3847_127004C.1
aagcacaaatcagaaaagtttcaattatatattaatactcaatgtcattggactttaacctatgatacctttgcctaaactaataaatactagctaacactatttctttccccttcagttaatcaacaaaacgcattttgcagttctttcagactaaatacgatgacataagattccaactaattctcatatgtgaaggcattgttgccacaaagcgaagaacatcaggctgctctctaagtgaagtacgtagttcttctgaactattgttcaaaacatgcataaacttaacaatgttggggagtacaagttctctgcagtgaagatgcaatagaggaacctttgataaaacacttcccttctgaacatctaggccttccggcctccgcaacttgtatggttttccggtggttggctcgatatccactcgcggcatttgtttccatcggctgtgcacaaaccagccatacttatagtcacccactatcggtgtgccaagtgcttcagcacaatggacacgcaactgatgctttcggtaagtaagtggacgcagctcaacccacgagcatccatttatctgtggaccaagcaccctatactcagttacagcctcttggcgaggttctacacttgaatggtgctcgtgc

SEQ ID NO: 29905 - DNA, 913 bp, Glycine max
  Clone ID: PAT_MRT3847_127005C.1
gaacacccggctgcatcccatatatttcccacgatacatgctttaagcactaataggctcaaaaaaaactaaacacataggaacacaaatctaaatagaataaatatacaaaatacacaacagaactctgcagctggtaaaatccatagctgatacaaacaatattcaatacccattcaaagcttaaaacaagtttttttaaaaaatggtgtgcgaccttgatttaggccacaatgtcaatgtttgtacaacaaaatcgcaacaaccataatttagaacctcgaactgaagctctaccagtggaagaaaccaaaccatatcaaataaaaaaaatgcagtcatagtaggggcaaaggatgtttatcaggctcaatcatatagattcacatcacattgaaataacgtggtttattaaaaaaaaaaaacataaatccaataagaacatcaatggatctcagcaatatatggttatcttcaattcctttgggaagattcggatagataacgcagtttaaaataaacatcaccgatccataaatccaaccaactaaaatgcaaaaaaaaaaaaatcaaaattttcgggtgcgaataggtcaaaaagctgaaatttttagaaaaagaataaagagagagattgcaaaaagagcatctcagagtaaccattccccattagcttcttcactggtaatcaaagtgcaaggataacattggaattgctcatcactgatgctcgcaaaaacagagacgtgttgtgcaaaggaatttgggccagagcctgggcaattgcccagggtagccgggccttgaaaccgcctgtggaaattagacagactaatagaaaagtgaagagagaggagacgaagaaacaaggttgagggcttgaggctgcctttactcaaatcccactcgagcc

SEQ ID NO: 29906 - DNA, 761 bp, Glycine max
  Clone ID: PAT_MRT3847_127006C.1
ttattattcatctttcttcattatcgccctctgttttttgtttttgttgattttctttttgttttaattatcgcaattttatttttattttactttacctgttccgagcttttcaggatctgagtacaatcgtgaattaattagtccactcgattgttaaatgggactgatatgatctttgcagtttgttgttgttttcgatttgaaggaatttgatgcactctttgatttttggaattaaaatgagatagtgttgatttgggtgttggaagaaagtgaattgtcacaattatctaatttgaaattgattagattagtttttgatgtgatgtgatagataggcaatgttgttccctatggaagccccgttttttttcttgtgctgcctttatcggcggaagtgtttgatttcataaggaacaaacttaggttaattaaacatttctagaatgccatggtctgtcttgtgaatttggtatttatgcatttgaagtcaaatgtttctgattataaatggaggggaggggtatgataaaattgaattttaaggataattttgtcaacacattccattattataaataatttttctttcgctcttaattccccctaatatcgaaagggagttaaaaacggttgtaaggggattttagccctctttttttccttcactctctaaattttttaaccaaaccatgtaaaatgtaaaaattcttcccttccccacccttcctttccacttcactcttaccaaattcact

SEQ ID NO: 29907 - DNA, 794 bp, Glycine max
  Clone ID: PAT_MRT3847_127007C.1
gtcctttatagcagcaacatacccaaagttgacgcgccaatgtctttaaatgcaatggcatttacaaaacttagagtttcatcgtttacaagctcacttgctagtaacaattcaaggccatccatttatcaaccatggaacttatcgttgcaatcatcaaaaataggaatggtgccaaataaattatccatcaagtccgttgcttttagtgacaaggtgcctagtcaaacttatcttggtacgaaagatttggatcaagttataagaaaaggccaagaggcattgttaaactcaagtgatccattgagaacattgaagataattgacaccatccaaaagttaggaattgagcaccatttcgaaaaggaaatcaacttacagcttggaagggtaggggattgggacactgccgaagacctttttgccacagctcttcaattccgcttgcttaggcataatggttggcctacatgttctgatgttttcaacaaatttttggacaagagtgggaatttcaaggaatctgtcaccagagacatttggggcatgttaagtttgtatgaggcatcatatttaggtgcaaaaggcgaagaagtactacaacaagcaatggactactcaagggctcatctgtgtcaatcactcccacacctaagccctaaagtaagaagtatagtcgctgaagccttaaagcttccaagcaaccaaagaatggttgggttggaagccaaaaactacatggtagaatatagccaagcaagcaaccaaataccagctcttctagaattggcaag

SEQ ID NO: 29908 - DNA, 421 bp, Glycine max
  Clone ID: PAT_MRT3847_127008C.1
ctgtggcactagaagcattattagttgatgttgtccttgacccgtgtctttcagctttggtttcctgaaaatcaaaattaaaaaaattagaatcacataggtgaaagcgccaaattaatacaatattattagctttaaacaaaactaattaactctctctcgatctctttcttttcctgaataaaatccactaatctaattccttgcaactaaactttgaaaatctaatatttccttggttcatgtaaattttcttaattatatacaagtctaagccattagagagtaaacggatcaagaaaatgaaaattatgaagcatcaagttcccaaacaaaactatgtaaagccttgattagtgactagaactagaaatacatctaaatcaatttgcaaaaccaagccttctaagaaatactccaa

SEQ ID NO: 29909 - DNA, 244 bp, Glycine max
  unsure (1)..(244): unsure at all n locations
  Clone ID: PAT_MRT3847_127009C.1
gaatntgaagttgtttggtttctttggtgctgcngncgctttggtngcctggccctgccttggcgccggctnccaanggttccgctggcgaatgaaaactggctatggcgcgcgcncttcggnggcnnactgcgccngccctcggctcgctggggncgcccacagcctccgngcctcncaacccctccccgncgagggccnncgcccccccccgggctccattcnnggcgccccgcgccgcgcg

SEQ ID NO: 29910 - DNA, 366 bp, Glycine max
  Clone ID: PAT_MRT3847_12700C.1
ctcaaatcaaacaactctggcggaggatactgctattgctcggcctgaatctgcatggctgatccacagccgctggttgtgaacgattccccgccaactcagtttcaaaacacacggatcgcctaccttgacgtcttgcgcggcctatctgtttttgtaattaactaactctgttagttcgttctttctttgcatactacgcaatcaatactatttctttctctctagaaatggtctcaacttatgatatgggtggatatatgctgattgcatcttccacatcattgatcatgccccctggaatgggattcactcggctgatttccgcatgcacttatacttttagtagctgaattgctcttgccc

SEQ ID NO: 29911 - DNA, 486 bp, Glycine max
  Clone ID: PAT_MRT3847_127010C.1
tggagcttgctcgagcgtcgctactgaaaggatatattgcggggctttacttgttttattacctcagcgtgggccaacagggtgaccatggccatggccacgatcctgatcctgttcactgtcttcggggtttcatcggtcctaggcatgtggataatctggtacgattaacaacaacgccgtcacgtaagtcgttgacgaggtgctgatgagcatgtacgatcggcggttagtattgctcggctaggagtcatcgcgctgagagacaatgagatgaggttccagatctacaaggacggcctgcgattcatcgacggccacaactaccattaggaccgcacctacatgctaggactgaaccgggtatcggatctcaccaacgaggagtgcagggccatgtgctggggaaccaagatcgatcccaggctgaggctcggctagatcgcgagcaatcgacacgcgccacgtgtcggcgacatactacct

SEQ ID NO: 29912 - DNA, 410 bp, Glycine max
  Clone ID: PAT_MRT3847_127011C.1
tcctctagagcggccgcccttggttattctttttatttaattactgtcttaataaccattaaaccttggtggattttgtaacacttaaaaaccaatgaatacaggaaacttttacgagccaaaaatatacatagggaatatgaccacaccaggttagatctccctccctgagggaggggagaccacaaaacagagggagggggcaaaagagcccatgacccaaggagcgcagggaagccacattatatcccctgtcacagggaaaaaacagctgaaaaatgccccatccagaaaaacattagtgaccatggagcccgatgagaatccccagagaaacagaacagccagcggggcaaaggacatgataggagatgagccctgcccctagatgcctctagcaccgctggggg

SEQ ID NO: 29913 - DNA, 611 bp, Glycine max
  Clone ID: PAT_MRT3847_127012C.1
cccacgcgtcctgttaatgcataggtacactcagttctgaaatttaatttaataaaaaattataaatattgagagttgcatgcatatctggtcactctaacctggtcagactctttgatatcatgtaaggatcaattgttcaattcaacctaagtgcttaacctgttggattgaggctcaattctggtttatctctctaacaatgatatttattgaaataaagcagcaatatacaaccatggatgtctctatcaaaacaacagtagagagtatacttaaaatatgctaatttttgtagttatgctcgttttttatggcagtgaaaatgaatttaatatgctgtgctttgtataagtagttatgttttgtgatgaataattattggtgagtttgatgataattaaaatttatttatcatacactttaggtggttacttctcgggttatcaaggtgttccatacacatacgtgctttcatctgttgcaccaccggcatacaatgcagggaattacaaacccaatggtactgctggaggaaagctcccaaacagcaaggttcttgtgtttccattgatttaatcttgtttgaaggttttcatattgaaagttgc

SEQ ID NO: 29914 - DNA, 946 bp, Glycine max
  Clone ID: PAT_MRT3847_127013C.1
ctcactttcacatcatcccattattcctcttccttgtaagcacttcctagctcactatctatccttaattcttaatgatcttgtgcaatgcttttcatgacaaactgcaagtagttgcagtggcactttagtttgacaagatcacatatatatacactgcttgtggttcactgttgttatcacaatcaccagtgaatgggtttatcttctttgcacgtctgcatggattcatcagatcattggttgcagggcacaattcacgaggagtctgggatggattcttcttcttcaccctctggggatatgcttacatgctcaaggcccatgatagagaggaggctaagacccccacatgaccaagctcttaagtgccccaggtgtgactcaacccacaccaagttctgctactacaacaactacagtctttctcagccaaggtacttctgcaagacctgcagaaggtactggacaaaaggaggcactcttcggaacattcctgttggtggtggctgcagaaagaacaaaaaggtctctgccaaaaaatccaatgaccaccaattagttaacaacaataatattaaccaaacacggcccccacaccaccaccaccccaaagaccttcaactctcctccttcccagatgtgcaattttctcacctcagcaacttgcttgggaccaatgcaaaccctagtttcatggagggcaaatatggaattggcatgattgagaaccctaggcctattgacttcatgatggagagcaagctggagggcataattgggagcggtagtagttctaggaataattttgatttttttggaaatagtgacatgtctatgggtatgactagtgttgggctgggagatatgaatagtactcaaaatgggttgccaccaaattttcatcatcatggtctttcagcatttggtggcatgtctatgtcta

SEQ ID NO: 29915 - DNA, 561 bp, Glycine max
  unsure (1)..(561): unsure at all n locations
  Clone ID: PAT_MRT3847_127014C.1
gttgaccattgtattggtacgaaataatccctgtcagagcagtaactaatctttgttaggaattgtgaacatacacaatgtaattattccccttctaacacaatttatttcatttccaatggtcaattaggattcaaactcaggaccatttggttaagagacacaagctgctatcacgtgtgtcaactgttgttggtatttttcttttcttttaacattgtctgcacacaacattaaattgtaaatatgataatgagtttgtggccagatttggtaccaccgaatcaaagctttaagaccctgctgcaatattttgttgctaaattcaatccttcgccacatttcctcctttactaacggtcataaatgtgacaacaaagcatctaaaaagcagaacattatcagaatcaactagcaaactaatttatagtaggtttttccttttgctttttaagtccagtaatttccgtctccgataaatgaaaaccaagaggacaacatctatggcagaaaacattaatggacacacaacttgtaatttgatcgatggacanataatca

SEQ ID NO: 29916 - DNA, 263 bp, Glycine max
  Clone ID: PAT_MRT3847_127015C.1
atctctttcagatcatgttggccatggaaacaagaaaaagatagcaggaatcactgttggtgtgactatcgttggattaatcatcacaagtatatgcatattgatgattaagaatccaagggttgcaaggaaattttcaaacaagcattacaaaaataaacagggaatagaagacatcgagttgccaacttttgatttgtcagttttagcaaatgccactgaaaactattcaaccaaaaacaagcttggagaaggtggctttg

SEQ ID NO: 29917 - DNA, 679 bp, Glycine max
  Clone ID: PAT_MRT3847_127016C.1
agtcctagtcgtggcccatctcattctagaggaaggagctatagccgcagtcgtagccgtagccgtagttacagtcgggaccggagccaaagcaaatctccaaagggtaagtcttcacagcgttcacctgctaaatctccatcaagatctccctctcgttcaagatcaaggtcccgatcgttatcaggatcacggtccaggtccaggtccccattgcctccgcgtaataaaagccccaaaaagcgcagtgctagcaggagtccgagtaggagtaggagcaggagcaagagtttgtcccggtaacctctgattgttacaattgatgaagttgtggatgatggtgagggagggctaccaagttttttctagtaaaattgacattagccaaaaaaaacatttgggttttatgtttgatctccttttattgaacttgagactttcgacttaattttaatattgaggatttgacggaccgtagatttctgtaatagactattgaatgtcaaaaacatgcgctatttgggtaattgtgccggtttatttgattaccaattagttttactctttaaatttggatcttgtgtattattgaatggtttgaatttacaaacgtgtgatgaatgtatgatttaaattttatatatatagtatcaagttagaggagtgtttgtagatcaac

SEQ ID NO: 29918 - DNA, 381 bp, Glycine max
  Clone ID: PAT_MRT3847_127017C.1
cccactccatagtgttgctactccaaagaagaacccgaagcttttttaaacgagccatttttacaggaaaacatcttcgcatgcgctcagatattggccaagggtccggccaaaacaatgattctgctaacgaaacatctctacttccttaagcgaggacgcttcctgaaagaagcctaatctagtgcttccagggcttgaagcctagggttaatccatacatttgcacgattttctagagcgctgactggtttattctctgaaggttgaaccttcaacggccttataaaactcgcaattcttgagttttacctggactttggggagcgcagatgacctcctggggaatttaagcttaagacatttgctcggaagggcatg

SEQ ID NO: 29919 - DNA, 428 bp, Glycine max
  Clone ID: PAT_MRT3847_127018C.1
aaaaccggcaagcttttaaaagttttttcatcacatgataaaaagaagtgggcctggacccatagttgattaaactacaagtcaatttgcttttcaattggggcaaagatgaattttcccaataaaactttgaaaaatttcccaataataactaaaatcgggtggcaaacaagtcatggaaacccaaacccataacaggggggggaaaaataaaaactttcatgccgcacgggattttaatttcttcaggcgtttggcaggagcaacacccttaattgccttcctggcccttttaaattttggctttttgggaggaaaaggcatttccctgataggacctggaggccccccctttttgggggcccttcccttggggggtgcaaaggggggcaaccctaaactctggggggggaaaggattggggggct

SEQ ID NO: 29920 - DNA, 1274 bp, Glycine max
  Clone ID: PAT_MRT3847_127019C.1
tgtacggctgcgagaagacgacagaaggggacaacacatcctaaataagcatcataaattcatagtctttcggtccttccttccttcctccgctctagtgtatgccactctggttaattatcatacccccttctaggcatagttcttctccctctgttctctattctacactgtgaaaccaagatgaaggtagcatttgtagctgttctacttatttgccttgtcctaagctcctccttgttcgaggtgtcaatggccggttctgctttctgctcctccaagtgcgcgaagaggtgttctagggctgggatgaaggacaggtgcacgaggttctgcgggatttgctgcagcaagtgtaggtgtgtgccatctgggacttatgggaacaagcacgagtgcccttgctacagagacatgaagaactccaagggcaagcccaaatgccctggaaacgcatcctaaataagcatcttaattcatagtctcttggtccttccttccttcttctgctcaataagtgtgtgccactctaattaattaccacccccttctagacatagttcttctccctctgttctctattctctacactgtgaaaccaagatgaaggtagcatttgcagctgttctacttatatgccttgtcctcagctcctccttgttcgaggtgtcaatggctggttctgctttctgttcctccaagtgctcgaagaggtgttctagagctgggatgaaggacaggtgcatgaagttctgcgggatttgctgcagcaagtgcaactgtgtgccatctgggacttatgggaacaagcatgagtgcccttgctacagagacatgaagaactccaagggcaaggccaaatgcccttgattatttttttttttcaccatccacacatcaacttcaagcctttgattcagtcactaccgtgcatgtatatctccaccttagagatattccaccatggacccttgctagctgattatgtttactacctttattgttgtgtttgtgtattacataaagagaaaaatttggtcactttagttggatcggatatgcatgatacatgagagtgagaataaatcggggtcttctttgtcctcgtgtgaatttggtctgtcttaattaggctctatggatagttaataaaaatgaattctccttttgtaaattgtgaaaattcaccttttaatttctgaggaataactttttgttctttcatcaaaaaaaaaaaaaaaaaaaaactcgagactagttctctctctctctcc

SEQ ID NO: 29921 - DNA, 2355 bp, Glycine max
  Clone ID: PAT_MRT3847_12701C.1
tagcgcccgagcaatagcaagcgaacaggaggctactggtatgcctcaattggatttctcctgcagaatacttgttcttggtaaaacaggggttggtaaaagtgctaccataaattctatatttggtcaagcaaaaaccaccaccggtgcttttcaacctgctactaattgcatccaagaagttgtgggaaatgtcaatgggcttaacatagcatttattgatacccctggtttcctgccttcctccaccaacaatatgaaaagaaataagagggtcatgctttctataaagagattcattagaaagtcctctccagatattgttttgttctttgaacggcttgattttatcaatgctggttatgttgacttcccacttttgaaacttgtaactgaagtgtttggctcggcaatttggttcaacaccatcatagtcatgactcattcttcctctgccattccagaaggacctgatggttatacttttaattatgagtcatatatttcttattgtactaatatagtacagcaccatatacaacaggcagtgtttgattctaaggttgaaaaccctgtacttttggtggagaaccattctcgatgcccacaaaatattatgggagagaaaattctcccaaatggacaagtttggagatctcaactcttgttattttgcatttgtaccaaagttctgggtgatgtaaattctcttctaaagtttcagaacagtgtagagctagggccattaaacagtccccgcattccttctatgccccatctcctttcgtctctcttacgccatcgacttgtatccaatctaagtgggactgatgatgaaattgaggaaatattactctctgataagaaagaagaagatgaatatgatcaacttccatccatacgagtgttgacaaaatctcagtttgaaaagttgcctgagccactaaaaaaagattatctggatgaaatggattacagggagactctttacttaaagaagcagttgaaagaagactatcggaggcgcaaagagaaactactctcaacagataaaaagtttttgaatagtgataaccctgatgatcaacaggcacctactgaacctgttttgttaccggagtatgctgtcgttcctaagttttgactcagattgccatagccatagatatcgttggcttgtttctgatgaccgattgcttgtgagacctgttcttgatccccaaggatgggatcatgatgtgggctttgatggtataaacttggagactactacagaaataaagaagaatgtatatgcctcagttgtgggacagatgaataagaacaaacaggatttcagtattcaatctgagtgtgttgcagcttatgttgatccatcgggccctacttattctatgggtgttgatgttcaatcctctggtaaagatttcatttgtaccattcatagcaacacaaagttgaaaaacataaagcacaatattgctgactgtggtgtttctttaacatcttttgctaagaagtactacgtgggtgcaaaacttgaggatactgtgtttgttgggaagagattaaaatttgttttgaatgctggccgcatggaaggtgcaggacaaatggcatatggtgggagttttgaagctaatttacgaggggatgattatcctgtaagaaatgacaatgtaagcttgacgatgacagtcctctctttcaataaagaaatggtgttgagtggaagtttacaatccgagttcaggttatctagaagctcgaaagcatctgtaagtgctaatctaaatagtcgtaaaatggggcaaatatgtataaagataagtagctcggagcatttacaaattgcctcggttgcaattctctcgatttggaaattcctatcacgtagaaaggaaactaagaacttggtgaaggaagtaatggactgaagtctgctcttgttaggtttacatactggtactgatactttttgttcaaggaagatgcgaaaacagtgaagcattctacaagtcctacgtagatatagacctttttcccctgtaaaaggaagacagaaagttagaaatggactgtattttattttttgaagaggctagctggaattttcttttctgtgatacttcagatgccagtttttgtaagtctttttaggtaaggctggcttgcatcttgaacttatttctatctgtagattattgattaattatcagtatgagagaattaatattcatttctagtaaatgaagtcataattgtacaggaaagcacagaaaatgtcaggactttcttttctttttaaaaaaaaaaaaaataaaaaaaaaaaaaaaaaaaaaaaaaaaaaaaaaa

SEQ ID NO: 29922 - DNA, 479 bp, Glycine max
  Clone ID: PAT_MRT3847_127020C.1
aattcggctcgaggagaagacgacagaagggggggaaatctagaaaatactccaaaggttatgctactggcttcgttcctgattttcggcatgctgttgagactattgatgaatcagaagggctgggtagcttgggaagggttgatatggaactgacggctttggcagattcttgtgcaccaaaaaggaaacgccctggcttgaatacctgtggtggtgattatgctggtagtttcaatgtaccatttcgacatttctcattatccgcgatgtcaggttttgagcgaaaggatttgaaagtgaggttaacttgggaacttgaacaagtaagggaatttcagaagaaaattgatggtatgaactcaagtgttgttggaggattgtctctcttcagtgacataaggggctgcagtgcagggcagaagaggcctaagctggagagccagcatagtacaatggaagtatcagtgccacctggt

SEQ ID NO: 29923 - DNA, 496 bp, Glycine max
  unsure (1)..(496): unsure at all n locations
  Clone ID: PAT_MRT3847_127021C.1
gccgcgagggtcactacactgaactagtctgaaccaccatcaaaaccccattctcctcttcgcaatcaacctccaaatccaaattttctctctctgccttcacattccaatttcaaacaccatccgaatccaatccaatcaaaacaaactcgtctcttccagcgtttttgaaaaccctctcgatgccccgacccagacccattaattcatgagtcacgagatggaggcactggcagaaaacccaggtaggtcaagggacttaaaacacccatcgaaaaaccctacaaaaccgccccaaccgaaccaatttccctcccacctcgacgcgcccaacgtctcctccacggcgcgtgccctgtgcgacatcctcacccgaagctcccctcangacatcgaatcggcgctctcctcctcgggaattgtccccgaggaagagtgcacgaacgaggtcctgagactctcgtacaattacccctcctcggccgtcaagttcttt

SEQ ID NO: 29924 - DNA, 288 bp, Glycine max
  Clone ID: PAT_MRT3847_127022C.1
atttatcgggaaaaagctaacagttcccgcgaaactcaatcgccgaagcatcattacccaacagaagatgcatcacagactcatggctctcacgctttcatcacattattacaaaaactgatcaaagcgacgaacaaatggcatttgcgatgatgcagagtggtagcagtgatgatagtagcagaagcgtaaagagaggggacatagtgtgggtcagagtccacttccctcacaaatggcaccccgcactcgttctctcttcccgcgacaacctcggcgtccaagtca

SEQ ID NO: 29925 - DNA, 875 bp, Glycine max
  Clone ID: PAT_MRT3847_127023C.1
ggcttgctcttgtctttgttcttttcgacaaggacagttactccatgctcacttaatcaaaacgccattccaagtaaatgtttatgttgggactgctcttgtagacttctattccaaatgtggtcacttggccgaagctcaaaggtcatttattagcattttttcgcccaatgtagcagcatggacagctcttataaatgggtatgcgtatcatggactgggatctgaggcaattttactctttcgctcaatgttacatcaaggcattgttccgaatgcagctacttttgttggtgttctctctgcctgtaaccacgccggtctagtttgtgaaggtttgagaattttccactcaatgcaaagatgctatggggtaaccccaacaatagaacattacacatgtgtggtggatcttcttggtcggtcaggccatctaaaagaagctgaagagtttatcataaaaatgcctattgaagcagatgggataatatggggagctttgcttaatgcttcttggttctggaaggacatggaagtgggggagagagctgctgagaagttgttcagcttggatcccaatccaatttttgcttttgttgttctgtccaacatgtatgccatactaggtagatgggggcagaagacaaaacttaggaagagattgcagagtttggaattaagaaaagatccagggtgcagctggatagaattgaacaacaagattcatctgttctctgtagaagataaaacccatctttattctgatgttatttatgcaactgtagagcatataacagctaccattaactctattataccctccaattatctctatagcagccatggagaataacatttctgatgcaacctacgct

SEQ ID NO: 29926 - DNA, 1571 bp, Glycine max
  Clone ID: PAT_MRT3847_127024C.1
ccgccagaagacgacagaagggggcgtgtgagcaaacacacaacactgaagaaacaagcttcacttccaccccttaatggcccgaggcaaggcgaagaagaaggaagaaggtgaagacaccgatgtcgcaaacccagaaacgttagagcggaagaggctgaaatccttggccatttccaacaagattctctcggagacccctgcacggagctccgttcacctcaacccttcctccgttgtggccaagcaccacggcaaagatatcatcaagaagtctcagaggaagagcagcaggtacctcttctcgttccccgggctaattgctcccatcgccggtggcaagatcggtgacctcaaggacttgggcaccaaaaaccccgttctctacctcgatttcccacagggtcaaatgaagttattcgggaccattgtatatccaaagaacagatacttgactctacagttccctaaaggtggaaagagtgtaatgtgtgaggattattttgataacatgattgtattttcggatgcatggtggatcgggaggaaagatgaaaacccagaagaatccaagctggaatttcctaatgaattgtatgagggacaccaagctgagtatgactttaaagggggtgcaggtgcaggtgcagcttctgtagttaatcaaggtgttcccagaaccaacattcaacgtgtagagcaagagtcaccaaagacacccaccgaagatgatttgtcagacaatgaaatcaatttaaaagatacaaaggaattggttccggtccgacattcaacaagaactgcaaaaaaatcatacaaatttgctgaaatttcttccggtgatgattctggtgaaaacggccctgagctttctgatgatgaagagaaagtggtagaagttgatactgctatacagaaaaaaactgtagtttttgacctcgatgatgaggatgatgcaccagtagatcaacctgccaagaaaaataatgagtctgcttctcgatcaaaaggtaaggaagtgtctcaatcattattcaagaatgcagaaaaaaagaatactccaagaagtccgaggaaatctccatcttcaaaaccttctggccagaagtcacagcctgctggttcaaaaagaaagactgatctggttgaattttcttatgatgatggtgatgacattgaagaattttcaaatgcttcagaggatgctaatgaaagtgatgaagactggattgcttgagtgtgtaaaaagttggggctgctagtcacaagaaatgacaaggcagggtcatgcaagtgatgtgattataccccttatctctctctacactaagatagaacgtaacgacttggttttgcataccatgtggttatgatgggaatatgagaatagagataataccatgtggttatgatggagaaagaatgaggaagttgtccaatgtttaccaatccaatcttcatctccaagttgggagtcattaaatgtatacttttaatttcgattatctttttaagagttcctccatgtcggaataaaaaaaaaaaaaaactcgagactagttctctctctc

SEQ ID NO: 29927 - DNA, 336 bp, Glycine max
  Clone ID: PAT_MRT3847_127025C.1
gaagaatatcgtgaatgcgtataaaaggaatattaagaaattagcgtcaaaatgttgggtgtgtttagctgcatccatagtgtcgccgacggactagctcgtggccgccggctgccgtactccgtctctgaaatatgactagtgttgcgctgcggatagcggttctgtgtaaacaactcctttgccgtgatcgtggaggccgttgagcatgttcagttcgtttatacccaccacaacgagtcgccgtttcagtcctgatcctttgctgtttatgatgatgtgctctgcttgtttgagggatcccttgacattatgggaaacttgagacaacatata

SEQ ID NO: 29928 - DNA, 481 bp, Glycine max
  Clone ID: PAT_MRT3847_127026C.1
tacggctgcgagaagacgacagaagggggaaggaagaaggggaagaagaggccaatctcacaaacccagaaacgatagagcggaagaggttgaaatccttggccatttcccacaacattctctctgagacacctgcacggagctccgttcagctgaacccttcctccgtcgtggccaagcaccacggcaaagacatcatcaagaagtctcagaggaagagcagcaggtacctcttctccttccccggcttaattgctcccatcgccggtggcaagatcggtgacctcaaggacttgggcaccaaaaaccccgttctctacctcgatttcccccagggtcaaatgaagttattcgggaccattgtatatccaaagaacagatacttgactctacagttccctaaaggtggaaagagtgtaatgtgtgaggattattttgataacatgatagtattttcggatgcatggtggatcgggaggaa

SEQ ID NO: 29929 - DNA, 1049 bp, Glycine max
  Clone ID: PAT_MRT3847_127027C.1
caggtgctggtgcagcttctgtagttaaccaaggtgttcccagaaccaagattcaacgtgtagagcaagagtcaccgaagacacccactgaagatgatttgtcagacagtgaaatcatttagaagatacaaaggaattggtccgggtcgggcattcaacagaaactgcaaaaaaatcatataaatttgctgaaatttcttccggtgatgattctggtgaaaacagccctgacctttctgatcatgaagagaaagtggcggaagttgatactgctgtaaatgatcataatagctcaaagaaaaaaactgtagtttttgacctcgatgatgaggatgatgcaccagtagatcaacctgccaagaaaaataatgagtctgcttctcgatcaaaatgtaaggaagtgtctcaatctgcttcagcgagtgcatctactgaagttaagtccagtaatcgtggttcacttgttcaggctactatatccacattattcaagaaagtggaagaaaagaaaactccaagaagttcgaggaaatctccatcttcaaaaccttctggccagaagtcacagcctgctggttcaaaaagaaagactgatctggatgaaggatccaaaaaaagggcaagaaagaccaaggacaaagatcctggtaaaaaaatcaaggcgaaaagcaaggaagacgatgttgaagatggtgatgatgatggtgatgacattgaagaattttcaaatgcttcagaggatgctaatgaaagtgatgaagactggattgcttgagtgtgtaataagttgtggctgctagtcacaagaaatgacaaggcagggtcatgcaagtgatgtgattataccctttatctctctttacactaagatagaacgtaacgacttggttttgcataccatgtggttatgatgggaatatgagaatagagataataccatgtggttatgatggagaaagaatgaggaagttgtccaatgtttaccaatccaattttcatctccaagttgggagtcattaaatgtatacttttaatttcgattatttttt

SEQ ID NO: 29930 - DNA, 266 bp, Glycine max
  Clone ID: PAT_MRT3847_127028C.1
tcctctagagcggccgcttttttttttttttttttttttttttttttgggtaggaaaataagcttcccttttttagggaaatccaaagcccctcccactacagtatatacatattaattagggaaacatatttgggacttttaaccccgagggttccttcaattttgctctctcacgcaggaacaaaaccttttaactttgcccggggagggatgagagcacacactcctcaaaggggcacctgattgcccgagggtccccccccc

SEQ ID NO: 29931 - DNA, 1165 bp, Glycine max
  Clone ID: PAT_MRT3847_127029C.1
tcgagcggagagagaagagggcgagcaacgatggaggaggaggaggaaaagaagaaagaagaagaagaagaattgcagagagaggttcagatcgcatggccttaataacgggtcgaatcaatgcgcttcctccgacaccaccctcttcggcgtcgtccccaacccacccccacatccctcgccacgcgcaatccttgtcggtcgcagctttcgattctaactcagatgatcagcagcagcatcttccccctcgccaccagcgccctcagtcgttgtctgcattcgccgattaccacgaagatctcactggcggtgctgaaaataaacgtagtgcctctctttcttcagcaagactaagacatcagggtggatttaagtactcaaacatggaaaatttcgacttcaaccccgaagaggaacctcttatacaggattctgatactattacagaagccagcaatcaagtgtctgagggaaatgcttccaaaatgaaaccaccttctgtcacgtcaaacacaaaaaattcagcacatgacacacaacagcttaagcaacctcgcaggcataacgccacttttttctcttcaagagagctgaatatctgcattttagcttctgagcccacacgtgctctcagttctctgataatagcattgctggtagttttttattacatgatttcagagagagttttggcttcaaggcctctttacatactcttgttaactgatgttacacttgtgcttgctcgcctatatggtggaaaggcaagtctcttggaagaaactgagggagaaaaagttaaagctactggagatggacacaattggggtgatgcagtgaagcttatggagaggggtttggtgacctaccaggccattagaggagttttcatagattgcagtatttatctagtggttgttgtatgtggtacctccttgatgtagttctggctgcttgagacttgagtttgagtacttgcaatatcctcaattccccttttgggcaagtgtctgctcccaaataattttgttgtaaattcttacttgcttttatacctttgaggactatgatttaatttgaattcagagttgcgttaggcatttcatctttctgtcgaattgtttgcattgtagatgccattatatatttgatacattttatg

SEQ ID NO: 29932 - DNA, 385 bp, Glycine max
  Clone ID: PAT_MRT3847_12702C.1
ggggagaacacaaaccccttcccattttcaatttatttaccctaaagccccttggattcaaaccccgggaaatcattttatttttccccccccggggaaaaccctatggggggcaaatttagcaaaaggggggggccgatttttcaaaggggcccctttggccccaaaattccctggaaagccttttcaaaccaaaaccggtagcccctacccccggccctgaaaaaaggccccccccccctttatttaaatgaaagggcccccttttatgggggccctctcaaaaaagacggggaatcccgacccaatggaaaaacccccctcggggcaaattggtttttgaaccccccctttggtcaaaaagaagacccctttcccgaacttt

SEQ ID NO: 29933 - DNA, 891 bp, Glycine max
  Clone ID: PAT_MRT3847_127030C.1
cggctcgagctgagttagttctatttattctccatcagagttttttctccaaggccctgcaatcttttgttcatatatacattgctacataaaccatgcaggccagggagatcacaggactcaattatttactcccttcagacccttgtccttaccctggtcactacagcatggttcagaacaccatccccacatttcaactccacaaactctcaaaccaattctatggtttgcagaaacctcctcctaaagtgcttgcagacttcagcccccctcagtcctcatgcatcagcagcaactcaacctctgatgaagcagatgagcagcagcaaagcctcatcaatgagaggaagcacaggaggatgatatcgaaccgcgaatcggcacgccggtcacgcatgaggaagcagaagcaccttgatgagctgtggtcacaggtggtttggctcaggaatgaaaatcacccagctcatggacaagctgaaccatgtgtctgagtcacatgataaagttgctcaagagaatgttcagctgagagaagaagcctcagaacttcgccaaatgatatgtgacatgcagctacacagtccataccaccctcctcccttgagtcccattgatgatgatgtttctccctatgtcaaatctgattcctcaatcacagactctttggacctgcttggttgaatttgaagacaaggccaaagtttttatcattatatctcttcaatttttcttctttttaagttcttcttctgtgtgtgtgtgaattgttgtgggaagtacaaaatagtagtagtctttgcctcccttttgagatgtatgaggtgaaaccataacataaacggcaatgacatgtttttttgagtttctaattttaaaaaaaaaaaa

SEQ ID NO: 29934 - DNA, 287 bp, Glycine max
  unsure (1)..(287): unsure at all n locations
  Clone ID: PAT_MRT3847_127031C.1
ctagatcgcgagcggcccccttttttttttttttntaaatcataatgcataatagagggcatttcataaataaggtttcaacaagccatttatggattccaaaggccggttccattaaaattaatggtattaaaccaaccaggggaaaaaaggaaaagagattccaaatccggttttcacagagaccagaagagacacgccacttgataagtgtcacacaagatttcacaagagaaagggacatttcttttcaactatatactaaagtgactgatgagcatatgagg

SEQ ID NO: 29935 - DNA, 332 bp, Glycine max
  Clone ID: PAT_MRT3847_127032C.1
cagtgttagcgcttttattctccatcggacgttcccccgaacaccccgcacctataatccagcaccaatcccgcccgcccccccccggttctccggccccaggccatcccggtggcgctcggcccgaccacctcagggtctgcctgggtcgcgtgcggcttggcgccggcgccggcggcggcccgggtggcggcggcgggcctcgaggaccaccccgccagcggcatggccatggtcgcgagcttcatccccccggagatggaggtcgcgattgtgaaggcgacgagccacgatgacgaccctgccagcgacaagtacataaggagatcttg

SEQ ID NO: 29936 - DNA, 226 bp, Glycine max
  unsure (1)..(226): unsure at all n locations
  Clone ID: PAT_MRT3847_127033C.1
ccacgcgtccggttttgtttgttaatctcgcaagtttttagtttgagtgagtgacgaatttcctcacctatatgctgaaattcttggctgtgttccattattaaggattcaccttagcaatatcatcctgaaaggttattatttcacttgtgcaggttttttcaaccctttggatatggtgcataaaaatactactttcgagaagacagcangatttcaggcactg

SEQ ID NO: 29937 - DNA, 732 bp, Glycine max
  Clone ID: PAT_MRT3847_127034C.1
gcacaacggctgcgagaagacgacagaaggggacagcaaagtgagaaagtgttgctgtgttgcagagcacaagaggtggcggtggctgcaaggaaaaccattcaaatagcttccgctgccaccagaaccctcctctctcgtcgatcttcatgtcccactaagctcaatggacttgccttttcttattcttctcctcagaaacgtgccctctctttttcccggcttccggtgctgttggttggtgcgcaagtgtctttgacgccgttgcatagtgctactgcctctgccatgttcacttctctgctttctctgcataacactaactggggttgtctttcagaaggttttgcaacaactctataacatgcaaatgatacttccagataccattaggtgcaggttttgtttcagtacttgtttctagtaggttctgccattaattaataatgtaaattgattaatttttctctatcttttgagagttgagactgtcacaatgtgttgttgtcctgctgacatttacgaggtgattgtgctgttcaagcttttggaaagatcagtctattcaagatagtatatagttaacccttcaatttgggaaaaatttccttgtaaaatgtatgccagattttgaagtggttttattttgcatgaatcttcaattgaattttttattatgtcatgtgatctccttttgtcattctgtgacaattatgaatttctttttgtccc

SEQ ID NO: 29938 - DNA, 2112 bp, Glycine max
  Clone ID: PAT_MRT3847_127035C.1
cagcgaatcacgttttgttcgagcttcctccattctcaattttcagaatcgatttcgaagcgtccgatcgtcttctgcagaaatttgcgccatcgtcgagagaagcgtgagagacttctcgtttatgatgagagctaagatagtttagttgtcaagtcataaatcagtatcatcactttaaatttcattagaagctgtcaaaatgtcacggaagggtttgatggagcaagacctgagtaagttggatgtaacaaagttgcatccactttctccagaagtcatatctcggcaggctactattaatatcggcactataggtcacgtggcccatggcaagtcaacagttgtgaaagcaatatcaggtgtccagactgtgcgtttcaaaaatgagttggagcgtaacattacaatcaagcttggctatgcaaatgcaaaaatatacaagtgtgaagatgaacgatgtccaaggcctatgtgctacaaggcttatggaagtggaaaggaagatagtcctatgtgtgacgtgccagggtttgaaaacagcaagatgaaattgctaaggcatgtttcatttgtggattgtccgggacatgatattcttatggctacaatgcttaatggagcagcaatcatggatggagcgttgctactcatagctgctaatgaaagctgcccacaaccacaaacatctgagcatttagctgctgtagaaatcatgcgtctacagcacataataatccttcagaacaaggtagacttgattcaagaaaatgtcgcaatcaatcagcatgaggcaatttcaaagtttatacaaggaactgttgctgatggtgcaccagtagtacctatttcagcacagttgaagtataatattgatgttgtgtgcgagtatattgtgaagaagatcccaatccctgaaaggaactttgtttctccacctaacatgattgttattcggtcatttgatgtcaataaacctggttatgaggttgatgaaattaaaggaggtgtagctggtggaagcattctgaggggtgttttgaaggtcaatcaattcattgaagttcgtcctggcattgttgttaaagatgagagtggaaatatcagatgcacacccatatactcaagaatagtttcattgtacgctgaacaaaatgagcttcaatttgctgtgcctggaggcctaattggtgttgggacaacaatggatcccactttgacacgcgctgataggttggtaggtcaagttttaggagaggttggatcactacctgaggtttttgttgaactggaggtaaactttttcctgcttcgacgacttcttggtgtccgaacaaaagggtctgagagacaggggaaggtatccaagctggccaaaggagagatgctaatgttgaacattggatcaatgtcgacgggggctagagtagttgctgtgaagaatgacttggcgaagttgcaacttacttcccctgtgtgcactagcaagggtgagaagattgcacttagtcgacgtgttgagaagcattggcgtcttatcgggtggggacaaatccaagctggaatcactcttgatgtccctcccgccccccatctgagttgaacactgatcacaagaaacaccagcagctataaaaaactgagatgaatttagatatgtgggaagggaggcaattgttgggaaccatttttgtgaggtggagaagaaaacgttttttgattgttgtcttctattttgttttcacatcgttattggtttattttcccaactgtacctcttattgaagttgtatcctatgctgtgattgaattcaggctgggagtgagaatctcagcaagcacttgtttcaatctatggtatcttatcaatatgcaattatgcactattggttctacatgttatatacgtgaagcattttattttgttttgtttccgtgttgccttgccttctgaagctacgtctgatccacgcatgggttgcgaacacttgactctggtctgcgcttccccgctagaaaagggtacttgcttgctcctctcgcgccctcctcctgcttcaggtcactcgggggtaaataaataaactttcttttgaggaggggggggagggg

SEQ ID NO: 29939 - DNA, 283 bp, Glycine max
  Clone ID: PAT_MRT3847_127036C.1
acgtatacttgtaccttttgaaggctaaaagtgcttcaatacaaacactggctaactgctcaggatgatgtgaatctcttgagtattgcagtaagcccctatgtatgcaatgtccaaatggcccatatgttgaagggacgtgaatccagatatgtggaagaaaatgtgagcaagcagagtgatttgcttctcaaatacaacgctgttcacaagactgtttcagagtttgaacacaatgagcatgacataacatagtctgttgtaattgctgaatacatatatg

SEQ ID NO: 29940 - DNA, 449 bp, Glycine max
  Clone ID: PAT_MRT3847_127037C.1
tcgcgatctagaactagctttgacacgtgctgataggttggtaggtcaagttttgggagaggttggatcactacctgaggtttttgttgaacttgaggtaaactttttcctgcttcggcggctccttggtgtccgaacaaaagggtctgagagacagggaaaggtatccaagctggctaaaggagagatgttaatgttgaacattggatcaatgtcgacgggggctagagtagttgctgtgaagaatgacttggcgaagttgcaactcacttcccctgtgtgcactagcaagggcgagaagattgcacttagtcgtcgtgttgagaagcattggcgtcttattgggtggggacaaatccaagctggaatcactcttgatgtccctcccttcccacatctaaattcgtctcaggtttttatagctgctggtgtttcttgtgatctgtcca

SEQ ID NO: 29941 - DNA, 255 bp, Glycine max
  Clone ID: PAT_MRT3847_127038C.1
ttcttcaaaataattttaggcctcgtctccctctcacacgcctccgtggtggatttctgcgtatcagactatacaagccccaatggccccgcacggtactcatataagagcccagcaaaggtcacagtggacgacatcgtctataccggcctttgcacccccggcaacacctcaaacatcatcaaaaccgcggtgatccccgcgttctaaacgcaattcaccggcgtcaactggctttgaatctccattgcacgc

SEQ ID NO: 29942 - DNA, 171 bp, Glycine max
  unsure (1)..(171): unsure at all n locations
  Clone ID: PAT_MRT3847_127039C.1
cncnganantatacgctcncatcatncggnatncgctgancgctaatnnccctcatancctgncatgtcgtcntgatccctccgngatgactnaacgacccctgctcctcttccggaatcttgcgacagcattntgggccaattttcccgcgcnttctcgaanntcagaag

SEQ ID NO: 29943 - DNA, 334 bp, Glycine max
  Clone ID: PAT_MRT3847_12703C.1
tcgctcacgcgtgcgcccactcgttcgataaaaaaaaaaaaaaaaaaaaataaaagaaaaaataaaaaaataaaaaaaagggcagctcgatttcgtaggaaaaaatcttacgtacacatcatatacagggcgggcgttttctataatcaaacctaaaaaacagttacttgccagggattatatatccttttgaggggcgaaaataaaatcaactgccagctcattatccacgcatggactggaagaaccttccggtggcttaattaaatagacttcctgcctgtccgcttttccctacaggggggaaatcttaataggcatcgacacaccccct

SEQ ID NO: 29944 - DNA, 697 bp, Glycine max
  Clone ID: PAT_MRT3847_127040C.1
cagaaattgcgccatcgtcgagagaagcgtgagagacttctcgtttatgatgagagctaaggatctgattataattttgaattgatagtttagttgtcaagtcataaatcagtatcatcactttaaatttcattagaagctgtcaaaatgtcacggaagggtttgatggagcaagacctgagtaagttggatgtaacaaagttgcatccactttctccagaagtcatatctcggcaggctactattaatatcggcactataggtcacgtggcccatggcaagtcaacagttgtgaaagcaatatcaggtgtccagactgtgcgtttcaaaaatgagttggagcgtaacattacaatcaagcttggctatgcaaatgcaaaaatatacaagtgtgaagatgaacgatgtccaaggcctatgtgctacaaggcttatggaagtggaaaggaagatagtcctatgtgtgacgtgccagggtttgaaaacagcaagatgaaattgctaaggcatgtttcatttgtgggattgtccggacatgatattcttatgggtacaatgcttaatggagcagcaatcatggatgggagcgttgctactcatagctgctaatgaaagctgcccacaaccacaaacttctgagcatttaactgctgtaaatatcatgccgtctacagcacaatataatccttcaaacaag

SEQ ID NO: 29945 - DNA, 341 bp, Glycine max
  Clone ID: PAT_MRT3847_127041C.1
cggtcgcgtgggctgcctcttctttgtactcattttgatttctttcattgggtccatattctttgggattgcaacaaatgatgaccctgcaaatgggaaaaatgaaaagatggtactttagaccagatgatccggaatttaatttgaacccaatggaccagttgctggagcaaattttgctttctttactggacttatggtggataggtacttgattccaatttacctattttgattccttggaaatggaaaggttcttcaaagcgtgttcatcaaccaagaaggcgcacgttgtttttaagaaactgtcacggcgggacatgctcgtacattaaatttga

SEQ ID NO: 29946 - DNA, 669 bp, Glycine max
  unsure (1)..(669): unsure at all n locations
  Clone ID: PAT_MRT3847_127042C.1
gaaaattagcaaaatgtaaataaatcagcatcaaccaaattagaacaatgtttcccctcctccgcagcaaccaccccatgtgcgctttctccgccgccgtcaccaccatcctcctcctattcccggcagcgacatcccaagcccagattctaaaaaaggaaacttactttttcggtcccttcaaccagtcctacttcaccacgttcgcggtgttgcccagcgccgccatcaacctcggcgccctccaagtaactccggacagcaccggcaacgtgtccctcgccaaccagtccggcagaatcttcttcagcacccccttcaccctctgggacgatgaaaacttaaacggaaaactcgtttccttcaacacctcctttctcatcaacgttttccgtccccaaaacaaccctcccggcgaaggcatcgcgttcctcatcgcgccgtcttcctccaccgtccctaacaacagccatggccagttcctcggcctcaccaacgccgccaccgacggcaacgccaccaacaagttcatcgccgtcgaacttgacaccgtgaagcangacttcgaccccgacgacaaccacatcgggttagacattaacagcgtcaggtccaacgtttagtgtctcacttacccctttgggtttcgagatcgcgcccaacgtcacg

SEQ ID NO: 29947 - DNA, 520 bp, Glycine max
  Clone ID: PAT_MRT3847_127043C.1
agagggggagaaggaatattttatatatatatatatataacggatctcacatattatcttacaaatattttatttgcaccaccaaaaaaatctagcactttttaattataaaaactggttacttacataaaagttcgtacaattaagaatcttatcaacctcttttaattataatactaagtaaaaactaattctttaacttttttttcactgctcttttttttttttaaggatactgctctatttctcaaacataataactaatatccttttttttatgcaaccttataatttaaaaccttttacaggccaagaagcccaagtgcaacaaggccaagaaaaccaagcccacaactcagagaagcttcgatcccttctcaagcttccacaaacctgtgaatggtgtaacagcaaaacaaagaggaacgaacgaagaaaaagaagggaaaaaaaaaagtaaaccggaaattaatgaaaaaatgttaggtgtagaaaaaatttgcctggaagaagcaaagcc

SEQ ID NO: 29948 - DNA, 409 bp, Glycine max
  Clone ID: PAT_MRT3847_127044C.1
atgatatctcaccctagatgtctggttcaccagtaagattgcaggtaagctatggattccatattttgaatataagctgggcaaagcagaagattgctcaagtgctacatgttgtacttgaggaaacatggaactaagaatctcaactcccttgtagaattttatgagagaaacacaggattagaagccaaggacaatgctgttgttggtcaaccgagcaactttttgagtgatgaacattcaactatgaagggcttctccctcaaagaaatatttaacagggaaccttacttggcattatctatattgtttctctgtttaaggattattctctttgtatttcccacgattatgccacgcctcaaagcattctggacttcctatgcttctcatttgaacttgcaaatat

SEQ ID NO: 29949 - DNA, 352 bp, Glycine max
  Clone ID: PAT_MRT3847_127045C.1
cttcttcactgtggttaattccacatatgttccatgcaacccaccccccaaaactcccaaacacccacctgtcccaaagtcaccttccccaaagcaagtttcttgccccatttattctgttaagattggagagtgagctgatgtgataggtttcattatcccgcaactaggtaatccaccaaaaaccccatgctgcagcctcattcatggtcttgctgatcttgaagctgcactgtgcctttgcactgctctcaaggctaatgtgtcgggcatcaacctcaatgttccattgaacttgagcttgcttcacaactactgtggaacagatgttcccaagggattcctctgctac

SEQ ID NO: 29950 - DNA, 166 bp, Glycine max
  Clone ID: PAT_MRT3847_127046C.1
aattcatcaaagaatcctaatctcaattcatattaatatcatgcttcccaaatttcaacacgcaaaatgttaaacaatgttatatagctcacggacaagcaagccggaagggaaataatcaagatacaactgtgctctcaacgcttaaaattgaaaaattaaaaat

SEQ ID NO: 29951 - DNA, 3107 bp, Glycine max
  Clone ID: PAT_MRT3847_127047C.1
ggctcgagcatgaaatggcaatatctgatacagctttgaagtgtctacctcctgaagaggtaggaacaaagggtgctccagagggtctacggtggaaaagtgatggatcaactaaatttgacccttcatatttggagcttgcattgcgtcctgcccgtgatagcacatcatctctctcttcatctcagaaaacagtccatgagtctaaacgcaggagagttctgccaatgatggaccaatttccggttgagatccatccatttattgaagacattattgatgtgaaaggagattcaaattgtggttatcgtgctgttgcagctcaacttggtatgggtgaggagtcatgggctctagtccgtcaggatttaattagagagcttcaacagtggcaagataattatgcgaaactctttggtagcacttcccgtccggcttgattgggctcaagatattgcaaaggagaatggatttgtccttactattttgaggtcggaaacacatacaggaagtaataaaaagaatattagagggaagacatatgtaattctgagttgtgaaaggagtggaaaatatagaccatacaagaatccattatttaaggtgaataggttctaattatgtgagtgcccctttaagctaaaggtaaaagcatagagtatggaagaagtgtggaatgttaaggtattgtgtgctatttataacgacgaattaggggatacattggtggttggacaatcatatgatgtttgggctacgtaattagatcaggcaatgacgtgggatatgacaaataatactgaggagccggcatgactttttttcctattgaaggacgaccaccattacatcagtcaagttactgtttaatttgctttgggtttgtgcataaatgtcactttgtacaggttgttttgaaggctgactcagtgttacctcccaccgctttgcagtggtcaagatattggaatgctgaatctcgtgctggggctgcttcatatgttagtcgtatgcaacaaatttggtcattgtttccaacttaagaaataggttatgtagagttttttgagtagtaattagttctgaactctacaggttagatttcctgcccttccacttgtttggtgaaacatggttcgtgccaatattgtctaacttttttcatttacttaagtgtgatcaatgcaataagatcacttgggaactactgatgctaagagaactgaatttctaaaacaacgagatgcctccagtaattataactgttagagacattgctctgatggatgcagtgcaggtggtctttcctagctcttctaatttgttatgtcgttttcatataagcaagaatgtgaaggctaaatgcaagttgatagttcatccgaaggagagatatgacttggtgatggatgcatgggatagtgtgatgaattctcccaacgagggtgagtatatgcaacggttgacattacttgaaaaggtttgctcagattttcctacttttggcgattatgtgaaaaatacatgtctgataatgaacaaccaaaaattggttgagaccatgcattttcgagtgatgcatttgggtaacactacaatcgacaggtttgaaacagcacattggaggctggagaacttgcttcaagatagtgggggggatatgtgtagttgttgggatgctgtgaacaacatgattaaattgcagcacgcaaagattacgaaatcctttggtaacaatgaccgcatggctgaactgaggaaacctttctatagtggcaagcaggcatttgtcgctagttggacgacgagttatatagctgaccattatgaccgctcaaggaccgttggtattgatattgatggttctttatgtggatgcacaattagaactacacatggtctaccttgtgcgtgtgaacttgctaagtatagtaggacgtggcacccaattcccttgcaagcaattcatgttcattggaggacattaaacttcagtgaccaagaaatgaacaatgaggggctcgagttagcgttgcaacgtgaagtggatgctttgcacaatcaatttcaggaacttgattatgctggaaaaattactttgaaggccaaattgcgtgaactagcatttcctgatgcaattttaatgtgtccgtctcctgaaaattactttgatgctccaaaggctctgggcttccgcgagagacaaatcaattgaatgtgatcctttatgtccggagcatgctgatgcataacattctgaccatgatagcatgttagctcacccttcatcttagaaatcagcccatgagagttttgcccaaattccggttgagattcatccttttattgaagacattgtagatgtgaaacagacgagaaatgtggttaattgtcttagatatattgtggtcttagtttctttatcttcacatggaagcattacgtttttccttcttggaggttaaccaacgttatgtcagtcaagtcacctacttaggtttgtgcataaatgtcactctgtacaactatgatatgtagtttgtttaaaatcaggtctttaatttaatctacactgtttggatggggaattttaatttgagtgaggaatgtactgtaaaatactttgttcgggttatttgtttaatgcctaagactaacaacccatggaaacctttttgaacctgacgtgcaggtcacagactacttaatattataaggagggttgctaggatatctttagaaatccaagggttttggtacaactgttttttgaaccaatggttaaatgagtttgagcacaccatggaagagtgtctcaatgtagaagaaaacccttaaatttccgaggatatcatagaatttcgcacaatacagtgcgtgtattgaatactaaagcatcaagtgctgactgttaggcacaagcaaaaactcctgcagaagtacaatatagaagaaaaacaggataattgatatagctcggtgatacttttcaagtcttttaatttatttttggatcagtaatcttttaatttgtttgtactctggtgatggattacactattactaatattttttctatggcatatctgcagtgaacacacttgcac

SEQ ID NO: 29952 - DNA, 291 bp, Glycine max
  Clone ID: PAT_MRT3847_127048C.1
aattccgacccacgcgtccgcgcacgcacccgtacacttcagatacgacttcagatttagacatacttcgagcaagaagggccacggtgtgaatctataatagttacaggcgttcccacactcaccaacatccacaccatactgaccctttattaacatcactctactatcaatgtatcacactaaatttacatggacgattactaattcacccataacgacttccctcatctaggactctctcattctatagtttccttgcatatctttaagctactccttaatcacttt

SEQ ID NO: 29953 - DNA, 356 bp, Glycine max
  Clone ID: PAT_MRT3847_127049C.1
acaccaccccttcttcctttacatcaagtttataacttttcttttcattcaattttcctgacataaaatccaggaatctgcaaataattaaatcggctagggtgtgtactcctatttcttaacccaaaaagatctcttaatccattgacttctttaaaaaatgcaaaatcaaaaggagctctttatttttatttaatccccccaacataccacttttacaacaaatttgaataacggattaataactggaccctacacattcccctttgacccttttacaacaatatataaagctctctttaccttcactataatcacttaggttcatctaatcaaaatgtagatctttacttttc

SEQ ID NO: 29954 - DNA, 548 bp, Glycine max
  Clone ID: PAT_MRT3847_12704C.1
ttttccacgcgttctgtcacgcgtccgtccactcttgcgttgacgcgtgggtgatgccatatgatggaaaattgcatgggataccgaaggtctgtaaaatccatggatgtataacactgagagaaccttatagggtgattgagacttgccctgacattgatattcttgatgatggctattggaggaaataagtcggtcagaaagtaacgaagggcaatcctaatccaaggagttactacgtttgcacacacccaagatgtgcagggaataagcacgtggaaagagcgtctcatgacttaagggctgtgatcacaccttatgagggagctcacacccataatgttcctgcaccccgtttcagtgacggccattttgttaacagagcattgctcaataatgtttcagaccacaccaactctgcatacactctcgtattggtattgccagtgattcaccaatgtgacaattctcttcacatccaaagatcacaagcagcaccaaaagggccttgtcgcttgaccctagacatgctagaaagtccatgaagt

SEQ ID NO: 29955 - DNA, 474 bp, Glycine max
  Clone ID: PAT_MRT3847_127050C.1
gcaggctcctgaagatgagagcattaaaactatatatgttggcggacttggtgctagggtcactgagcatgattcgcgggatcacttctatgcacatggacaaatttaatcaatcaagatggttcttcagcgtacttgtgcttttgctacatatgcaaccacgactatgtgcattaaaaggcatcactaagaactctacaacacactggttattaaggtcctaaggctaaagctggtgtggtgcacgtcttatacatcaaaaccggagtcagatggctcttatcaagcatagcagctggcttctgaggctcatagcggattgctgcctggtgcattcatatcacagtagcagaaccaggaccaaacacaggggatgctttattattacaatccaccacctgttgaaaggaaagaagctctacacgtaatggatccatacgtatgggtgcttttgttgatgtgaagatatttctc

SEQ ID NO: 29956 - DNA, 468 bp, Glycine max
  Clone ID: PAT_MRT3847_127051C.1
aattcggctcgagtgcaattgcagcattgtgtccactttactactactcctagaagcatcccgtcaattacttgctcctagcagttttcaccgtgtctcttggttttggcgttggattgagttgcgcctttactagcggtaagattcatcgtctgtgtcctctttttttctttgtggtaatttagaatttgtttgttagtgtttttttttttaaagaaaaaatagaactgaaataaattatggtttatgttgttttagttgttcaacttgcaacacctttgtgtttggtcctagaggagggagaattgtttttaaattttaccttgtttgatttaaaaatctacacttcattgttccacaattttatttttcattactttccttaccatttatagaggtatataatagttcaggtttttcctcccatcggctaaagctcccatcctttccttttctcctttgaattaa

SEQ ID NO: 29957 - DNA, 544 bp, Glycine max
  unsure (1)..(544): unsure at all n locations
  Clone ID: PAT_MRT3847_127052C.1
atgcattgttccgaaatttcattaaattcaacaaaataatgttaaccttaacgtatgaatcttccataaaaatatgactctttccaaactgtccaaacggataattcaagattcaatacaacgattaatgcaaactatttgcaagaatcagtatattcaatctcaaacgggaatttaaggtttactcatgatgaacaaaacttgtatataaagcactagtcattaatcacatacaacaacatacaaaaccattgctagaatgtcatgatcacgacgcnnncaagaagacaaatagtgcctacaaattaaatatttgaatgctaagtgagatataagacaaacttggatatatcaagtaagactttacatgaaatgaacaatgacccttgactttatatttgaatgcttccatgtaactaacttcaagtttatatattatatttgctactaaaatagattaaaaacaaaacacaaccacacacaaaaagagatataacaaatgaataatacttcaactcatacagnnatatttgtattaagtctc

SEQ ID NO: 29958 - DNA, 375 bp, Glycine max
  Clone ID: PAT_MRT3847_127053C.1
gccgacaagattggaaaaagatttgggcatattgcgattgaaattaaaaaggtctgcagtgatccaacaattgcatgaatggcagaccgtggttatagccaggattcaaacggccactttcgcagggggattctcccttcttgtagataacagctactagccaaatccgagatgatgcaaagggaacataaaatgtattctgtgggacacacgctctcggtctctctctgggaaatccacaatgggaccatgagctggggttatttagggttgcaacctacatattcatcatcccgctggagcctagcataatagaaaaaaaccgaagccctctactatggaatttgaaggagatcagctcgctagtttgcggat

SEQ ID NO: 29959 - DNA, 534 bp, Glycine max
  Clone ID: PAT_MRT3847_127054C.1
gagagaactagtctcgagttttttttttttttttttgaaacaaaaaatgaacagaaataatttctttcagattgccaagaattcgagcaaacattaagaaaaacaactgaagaactatctaatttaggaactcaaaatttttaacttccaattaaaaggcatcaaaattcccctgagctcggacactttgtcccgaggcttcattggagatgctactgagcagacaaggacaatattccaaagccacatatcattcatctaaaattggactagcctcattgatctctatttcaccagtgtaattgaattgtgtcctcttgatccttcccttgcatctccattggcacaattattctttagaaccattgaaatatcagcctcagaagctcctgcaagcactcaatagcagcatccaggatttttcttctaatcatccattcctgattttcattcaactaggtatcgttgaaatagcatattagcccagaaaaggtgaatctgcaatctaatgatagcttcttctgcagagacatc

SEQ ID NO: 29960 - DNA, 548 bp, Glycine max
  Clone ID: PAT_MRT3847_127055C.1
ggggggaaaaaaaaacttttgaaggggaccttgggctttttaacaaaaccccccggtcatggggggcccttttttaaaaaataaaatttggcccccaaatcataagctaaaccccggggggggggggaattaacccgttcccaaacccttttgcaattttttgggttttttaaaactggggccttctttcccgggcccgtttagaagatttccccaaatttcccgggttttttgggtgcccctagggggggcccaaaacccccccacctgggttttgggaaccctcccaaatgtttttaaaaaagttggtgtcccccaacaaaattttattcccccggccattttagggttttaaaccaaaacaaaaccctacttggggggttaacccaaaatttttgggggggctttttcccccaaccgggtttttagggaatttggcctcccctcccgttgggattggaagggaatttttccctttgtcctggacccgggtttttcaaccggttttggattttttgtccgggggccccccaataaaaatttttttt

SEQ ID NO: 29961 - DNA, 947 bp, Glycine max
  unsure (1)..(947): unsure at all n locations
  Clone ID: PAT_MRT3847_127056C.1
ggctcgagccgcgatatcccatcacgcagcagcctagtcaatagtcaaaccccactctcatctctgcaaccaaaaaataaagcgaggccgaaaaccatttgaacccaatttatttatttatttaaaaaagagaaaaacccactctctggactacccactggaataacgacatctccgctcgaaatcacggttcttcgattcgactcagctatggcgagcttgactcggagatcactgtctcaactcggaactatattatcgatgaagaaaattccgggtttggatccacctttcttttcagctattacttgctcctagtgttgcttcagccatctctcgccgttgatttcgtccaaatcccctagatctgagccgttagggggcaatcaacggcgtctgtcatgtcaattggtatattgaaaaaggttcaaggcttggtgcagaaatggatgcttatattatcttgcttggtatttgtgattgaggctggtgaaaatgataaaacaatggagcccccttctttatatgattctggatcacctttgccctttgttgttgttcatgatctacctctaccagcaaatctccatgtgtcgaagcatgtgctttctcatggtgcaccaattgctgcactgtcaccagtcaagcctccttcatatggtcctttcacaactgcaggcccttccgctttggcccagccaccattgtctccttatgcttctaattggttgtaaacaagacatnggtgctgaaaaggggcagtaaggattgccaatgtgcatatcccataaagctagacctttttctttcaaatgtctctcaaatcctattggaatgattttcttgatgaattagctacccactttgggttgcgaaatacccagattgagctgataacctttttatgtactcagcttatcaacatttaatatatcgatgaatattac

SEQ ID NO: 29962 - DNA, 391 bp, Glycine max
  Clone ID: PAT_MRT3847_127057C.1
gatacacaacacacatacaattactattaaactctctataatatttgctgaatccggtataattttctaataatggcgacagacgttcagcacgtcatagtttacagttaacattccacgaacgacaattataaccctccgctggcaccgttgatggagccatatgatctcagtaagtggtccatgtacagaaccgccatatctcactttatagcattactcccttctctttatatcaccgatgttgaccattagtggggataagagacattatgacactaaggtcttgtgtaatacagaatatgacggcgttggaatttagtgcatcatcttggaccttcagtcatatgatcgtcatccttgtttactggactgcctgaatcacgggatg

SEQ ID NO: 29963 - DNA, 406 bp, Glycine max
  Clone ID: PAT_MRT3847_127058C.1
aagacgacagaaggggtgtatctccattgtctatcgaatgtacgatgatcttggccagcatgggcttgtcgagggtttatcaccaagaatgggccttcaatgacagggttattggcacaactcttttttgtgcacgatgaatgcaaacaatgtgcatgcgagttttgaagtttataatgcccaaactgatctgatgaagtgtgtgttccaatgcaatataattctaaataactctggaggctttttttttgattagtttgatagctactgggataagagattgtcatggaatattccaaaaacaccatctttttaaaagttttatatgcttatcttatgctaagaataattaaataataaagaattattataatttccctttatttaatcacaattaatttacttt

SEQ ID NO: 29964 - DNA, 431 bp, Glycine max
  Clone ID: PAT_MRT3847_127059C.1
ccacacccgtccggataactggaaccagggtgtttataaaggaaggccctggtttttttcgtggttccaattttggaggcatggcattgccatccttccaatttgttccttttccgaatgaacactggttatggggcccgtcctccggaggtgaaatgcccaggttggaggctggctgtggaagcacacaccatttttggttttgagcccatccttgaggagtgcgttgaagcaccaaaggatttcatctttggcgaccattatagatcagcctccaaaccagttaaccaacaggcttatttttttgccggagacctcgaattccatccaaaggccccatttggtttaagatattttggccaccttccttttaatttttccaacctccaaaaacattgtttatgggggggtgaatttttccccgccctggt

SEQ ID NO: 29965 - DNA, 519 bp, Glycine max
  Clone ID: PAT_MRT3847_12705C.1
cggctcgagggacttctccagcctagtcccgcccagacaacggccgatgaagagccgggtgagcctgcagctgggtcaaacgatgcggcccccacgtcgtatggacaagtcgaacctgcagttgccggccctgcctcgtttccaccctgccaagtacccatccgcgtgctcgtcgctgtccggcacgccgagatcagaacagaacatgccttgcgggccggtgtcgccgggcttgcaacagcgggtctacaccgaagcacagcggagccggtatcagtaccagagagaggtaatgcatggattcattggacgcggtaccgagcccgcgagtgtgaggctcgcgccagttggttcgcccggtctgcctatgacgcccttgacgctagacgaaccggaggacgggtacatcggtgcgtctcacggatcatcacagctcgcgacgaatgagtcaaagggcgcagcagagtcggacaaccaggcatgactggccatgtacggatagcattagcgaccgaacat

SEQ ID NO: 29966 - DNA, 372 bp, Glycine max
  Clone ID: PAT_MRT3847_127060C.1
tttccggtttagaccaagaataatttcttctgctactttagagaccttgatgatggagaaatcaaatgaaatgtggacaatgggatcaaaagcactatttgcttgctgcataatcatggttggagtttgcacagttgtcactaagaggaacagggaggcgttacaagtttatagggaagtgcatcaacagaaagcctagaaagcttgtaacatatgcgtcacggtcatcaactgtcagtttccaggtccaactattagggctgaagctggggcatccttgcattgattaacaacaagctcttcaacgtggaaactgatatgaactgacatgaaaccagggaggttgtaacttcgtgggcagatggcaatgat

SEQ ID NO: 29967 - DNA, 272 bp, Glycine max
  Clone ID: PAT_MRT3847_127061C.1
ggcttgcttaatctcctaattagagcctccatggggaggcctctgtaaaaagcttgatgcccaggctgactatgctaagcctataatgaacaatccacatgcttacgcagtttcagctaataatgccgccgatgaggagccaaccacataccttccttctgaatacaaggctaggggataccaaccaactgattatatgcgaacaggtataaagacagcaatgaatcaaacgttcgcgtgacgcacatgggataaaccactatttgacaaaa

SEQ ID NO: 29968 - DNA, 243 bp, Glycine max
  Clone ID: PAT_MRT3847_127062C.1
ccgtctatactttcttttgggtttttacttgttgctacagcatatttacatgaggtgtcccgattggtcccgaaggaggacatacaaagcccgccgcaagcaaaggagcactgcaccgccacaaacgcagaagagtcctcaaaccactcgagctggatgaggaagacaaaggcaacgccgcggctaccggagaggcttattgagtggaacatgccgagagcaggaccccataccccgcacccc

SEQ ID NO: 29969 - DNA, 276 bp, Glycine max
  Clone ID: PAT_MRT3847_127063C.1
gatctctccactaacacagattttgattcgattcgagtcgattcagtcgaggttttaagcatcagcaagatatctggacgtggaaagggaggaaagggattgataaaaggaggagcagaacgacatcgctaggtgctccgatacaacattcaaggaattactaatccagccattgctcgctaggctcacatgtgttgcatgaatcgtatcatcggtttgatctaccaggagactcgcggtgttctgaagatcatgctggagaatgtcattcgtgac

SEQ ID NO: 29970 - DNA, 335 bp, Glycine max
  Clone ID: PAT_MRT3847_127064C.1
aaacaaaacaggagttttttttagttttgcaccaaaacatgtttaaggggatattttttttccctaaaattaaaaaacagtaagttggccccatgcccatgtaaaagttaatttttaaacattttgaaaaaggcaaaaccaagggggggtaccgaattttttatcctttccaaaaaaggaaaagtttttctgagtccagggggggggttccttcaaaccaaagggatttgttttttaaaaaaagagaacttttttttgacatttaggacggggggggtttttttcgccaaggccttcctttgaagggcgaaaaaggcaacctccaagctttattg

SEQ ID NO: 29971 - DNA, 738 bp, Glycine max
  Clone ID: PAT_MRT3847_127065C.1
ccacgcgcctgctccacctggtcgcgccggagaaggagaagccgccgcaggcgaagaagagagagggaacgaatgtggagtgttccggacgcaaatgccttcactgcggcgcggagaagacgccgcagtggcgaacgggaccgatgggaccgaaaactctatgcaacgcgtgcggcgtgaggttcaagtccgggaggctggtgccggaataccggccggcggcgagtccaacgttcatgtcaacgaagcattcgaattcgcatcggaaggttttggagctcaggcggcagaaggagatgcaacgacagcagcatcatcagcagttgatgagtcaaagttcaattttcggcgtatccaacggtggagatgaattctcgatccatcatcatcatcataatcatcacctccattgtgggccagactttagacacgttatttagactacctagtttttaaattttaattttaattttaatttagggtgcaggtctaagtttaaactatcgtcagcttcagcacttcttttttcttatctgaaaaattttgtcttatgaatttgaattcttagctttttttttcttctaattttctcttttttcctttatggcagaaagtcagaaaagaaaaaaaaaagggcaatagaatcatggggaagggttaaaaatagggagggagagcttcattcggctgtagaatctactcttgattgttttctctttttttatatatatatatatt

SEQ ID NO: 29972 - DNA, 948 bp, Glycine max
  Clone ID: PAT_MRT3847_127066C.1
ggatcaaataatttttctatcttgatttgttgagaatatacactattgtaacgtttccagcttataaaagtagtacaagcataatgcgaccataatggatcaaagtacaaaaaaacaaaagttaacatatttacatcaagagtgagcccccattactcaatccatcaattttcgatcgatcaccttggccaaagatataagtgggtatcagcaatctacacttctgccccaacagtttctttgcaaatctgtaaattttcttgtataggtaagggtcataacaagagcatacaatagaggtgcattaggagggaccatgctggtctgtgacataactaaaaggccatcagtccattgtgatcatgtaagctgggaacaaagctgaccttgtggacctgacgatggtgcactgaagatgcagtggagtttgttaactcaagatttatataaagtatgatccttcattacgtcccataaagctcatcatcatatttgaattctcaattatgatctttcttacttttcttcagcaacattgtcatgtgattgatatcctcattccctgtttctcttctacccataagccactgaagtgcctcagccgcagcatctttttctgcattcttcttgttgatatagggttggcccattatctgcactccattaaactcaacggtagcctgaaactgattattcttcaattgcttagtgctgtagaagggtgcaccatatccagctcgtgtgagcaacgtttgaagctgacttttagaattatcacccccgggtccactgtctgttcttgaaaccgatgcttgttgcaatgccatcattgatggtttaaggagctggcaactaaatacaaatcttccttcacatttatcattgcaaatcagcaaccgtatagcaaataagagctcatggaatgagtatatgctcatcagcggaaac

SEQ ID NO: 29973 - DNA, 173 bp, Glycine max
  Clone ID: PAT_MRT3847_127067C.1
gattaaataagagccattggatgcacacagatcatgaatctccaaaccagatgttaggataacagactgcagcaaaaatacttccagttaaactagtcaaaaacaaatgtcatgaaaacataattcagcaattaatttacctggtggctcagcaagagaagcagaaagatgtg

SEQ ID NO: 29974 - DNA, 317 bp, Glycine max
  Clone ID: PAT_MRT3847_127068C.1
acgcggacgcatcaggtatactaagccttgagagacaggaagagcacacacgcattatcggttccggggcacgtaattcgcatgctcaccaagacatggcagtggcagaggtaccaaacctagagaaagaggctccagtaaagggcatatgtcaagcaggtcatgcaacgacctcgattacccactagagcttcagcaccatcactggtggtgacataccagcggatgaataccgaatgaccaaacaattgaaccttaaatggtcgtgaacaggtatatgatcgtgccctacaacccagctttacatgtggatcata

SEQ ID NO: 29975 - DNA, 299 bp, Glycine max
  Clone ID: PAT_MRT3847_127069C.1
ttttacaccactaaaggatcaccgattaggggctgggacagaggactataaagatatgttctaacgaatacactttgggactgttgggaaagactacattccaatagctgagcacgtaccgatccatattgcgtgcctcaaacctctggtgaaggcccatgttcactggcaacaggttggactctacatagggcaaaatttgccattggctaaccaacatggtggacgacacataacacacacagattgacggctcgcctacaagacgccttgttacgctcagttgcagacccatgatg

SEQ ID NO: 29976 - DNA, 261 bp, Glycine max
  Clone ID: PAT_MRT3847_12706C.1
cgcactcatcgtattataggaaagattaagatggtggccacagccggtattagcgtgaatacaggtatatcataggcctagcctaagaatagatctcaagggggcacgccaagtctgatatttacaccatctgctatgcatgactgtgaattgtggaattctgcttgcgcaaaagctatgactatgtgatgaaatccacacccgcgatatggtgcatggcgtggggcatttctgaagcggactgaatatcattgcgatatc

SEQ ID NO: 29977 - DNA, 482 bp, Glycine max
  unsure (1)..(482): unsure at all n locations
  Clone ID: PAT_MRT3847_127070C.1
ttttatcttctcctgcgacccgaacaccacgcgggagtgagccaccggagcaagggcgaancgaagcgcgcgcggcaacgacgcgccacggcgccaggcgcggcgaagaagccaacgaagagggggggcgcccccgcgcagcaggcggcgcccgcccgcggccaaccgaaagagcaggcccgggaagcgtcaacaaggataaaaaaggcaaaaggaggccagcgcaagaaagggggaggagtctgccaaggtcgcccagcaaacggtccacgccaaccccgtgccgtcaactgtcaaccaccctccgtccaccgcacgcgcacctcgccaccaacatccagcaactcgcaccagaacagcacctcccatcgttgacgcacaaagtagcaggccgtcgcactcgcgccctcccgtccacagtcgcagtcggaccagccaccaggttgttggagcatgtatcgagcactgattctgacctctga

SEQ ID NO: 29978 - DNA, 174 bp, Glycine max
  Clone ID: PAT_MRT3847_127071C.1
ggacgacagatgaacttttgcttgaacttttttcttacaaaatgcaagctactgcctaaatttttatccattgacctcgggccacagcagaacaaatcaacctcgtatcgctccaaggtgtactttcacaaaaacacaaggagggtgcacagggtattttattgtctacagcac

SEQ ID NO: 29979 - DNA, 308 bp, Glycine max
  Clone ID: PAT_MRT3847_127072C.1
ttcgggtcgagggataaacagtacagatgggttcgaagaacatcatggtggtgctaaaggtgtgttgctaggttcttttcgttgagggggttactaatgcacttctggaactgaaccttttcaaagggatcactcatcaagtgatgatgaggtttcaaaaccatgctgtgatctctgcatgtgcacagccttaaagccccctaaaggccttgtgcaaattttatgggtgaattcatttcactcactttgagatggctgtgcgtgctacacgcttcgatggcatggccagtagtctttgccttttacac

SEQ ID NO: 29980 - DNA, 536 bp, Glycine max
  Clone ID: PAT_MRT3847_127073C.1
tcgttttcgcgttcgatggagatgataacttaattagtgttcatgaatatgtcaagccttactttagtggttctaaattgaaaagttttctagctggtcataatattaccatttctgatggtattgacaaaactagtgcaactttgcaaattagaaagttagcagattgtgatttttttatgagaaactttaagcacatgtctaatgttttgagggtggtttctgaggacaaggcgagtttatggtcacaaacttcattatgttttatgtaataaactggaaatgcaagaagcttatcttgtcaattttcgtaaaagtgttactagaattgtttttgccagttcaaaggaagccttgtaattgagaaggaaagcttcttttcgcattgaatggctgtaaaaagctgatgtgcctaccatttcacaaattgaagagttccatctatgcaaaagattatgaaagcttctgatcaaatgatattttgtctactgcgagcattgtttgtgggttacacgggccagaagttttccaacaaa

SEQ ID NO: 29981 - DNA, 383 bp, Glycine max
  Clone ID: PAT_MRT3847_127074C.1
attatcatacccttcattagattttatacctacctccaataatcctgtcattgtttaatttaaaccaccactccactctaatctactactactataacacttaatccctctacacaaacacaattacacacactctaaacaaacacccaatcatcaatcttccaccacataaacttcataatttaaacataccacttaacacactatatcatcatcatttctaatataattacaaacctcctcaataatttcaataattttaccctatatctaataactactatcaacataattcccctaatacctcacattaatcatattaccccttacttaaacattcaattcaaatatattcccaaaaacactcataactcttcaaacca

SEQ ID NO: 29982 - DNA, 133 bp, Glycine max
  unsure (1)..(133): unsure at all n locations
  Clone ID: PAT_MRT3847_127075C.1
tannataaagncttaacaggccagcactactgctggcttggggatctactggggccaaaatattgacgacggtaccttgacttacacatgcgacactggacaccttgagattgttaaacctattttattctta

SEQ ID NO: 29983 - DNA, 408 bp, Glycine max
  Clone ID: PAT_MRT3847_127076C.1
tttaaatacagcgggcttacgagaaggagcttcctccctgaggagcgaataaccctttaatgatatgctacccttaattactgattattaatgagggggaaacaaggccactcaatcttgtcttgcatatactatctcatacattacatctacctaaggaatttgatctattaagggtacaacgcgtgaaaggagtgtgagagccaatatatcatgcacatgaggctaacatgaattgagtaactgaactagctaataaacggatgtccgtagagtttctaaagatgttagggaaattaaccttccttcgttgccagaaccgtatattgcgggtatcatcagccttaactgaagtccataccaagggaatccgcccatacaccgtaacaaatctcgttgacacatctt

SEQ ID NO: 29984 - DNA, 524 bp, Glycine max
  Clone ID: PAT_MRT3847_127077C.1
accaccccgagaaatggttttttaaaaaaaaacttaattatttccttggggggttccaaaacttattttaaaacccccattacccaaaaaaaaacgggaaaagttggccccaccttttttggattaaggaggctttttcccccttttaaaacccagggagggcccaaatttttgggggggggacccaaaaattttcaaaaagccccctttttgggaacccttgggaaaggctaaggcaattttaggagcaacatttttagtttaaaccttttgttgggacccccgccgggcaaaaaaaaaaaacctacccccattttttttcccaaaaaaaaatgaaaaggggccccggggggtcctttttcaaacaggagggggcctaattccaaaagggtttttttttaaaaaggacggggaaccttccccgggggcaacaaaaggggacggaaaaggatctgaaaaggggcctttaaaggcttaacgggcactaaaaggctttcctcgaaaaccctttggaaacttttaaa

SEQ ID NO: 29985 - DNA, 539 bp, Glycine max
  Clone ID: PAT_MRT3847_127078C.1
aggtttctgtgtctccgacaaccagtggtgggggggcttacaccttttactgatgggaacttgaaaaaggggaagcaccttcctgtgtctaatattggcccaagggaaaatcacgtacttcaaatacccttaatggcacacgaggaaatcgctgcttcaatagcatgcgtatggagaactgcattggggagcaaaaatagcaagcctaaagctactggaatgcatgggggagctgtggcaagcatcattgataggttggcatgaaccgactctaccataaatggaccaatgctttcagttgatacctatcataccactcctgtaaatgcagttcggagtatgctagttgcgcctgtcagaggcccaaggcccatacgagcggtaacatttacatgtaccacagtgcttatggagccagacatgaattgatggttgcagcgacacaccaccactaccaatggtgatcatggtcaggaaaagatctaaagatgttagagagatgtagatgaaccctgctggcttgcatcacgtcactccac

SEQ ID NO: 29986 - DNA, 372 bp, Glycine max
  Clone ID: PAT_MRT3847_127079C.1
ggttagcaaagaagatcggatccgtgatttttttccccctctttccttctttgaccatccaatccacttacatctcccagctttggacatgagtgaattgattgccagtacaatttacattgcctattataatagcaaacgtacacaggaacgagcattcattcatattttgcccataacactcctactatagagagctatatctacatgaatcataaatctatggtcacaccccttgctccagttacattaacacggggcgaagctgaagttttttccactcttgaggatccatgcctggttgggtcatatttttcaccatcaccccaaagagcatatgcttcttcgccgtggatggcatcgtcgccgatc

SEQ ID NO: 29987 - DNA, 335 bp, Glycine max
  Clone ID: PAT_MRT3847_12707C.1
ctcggaattcggctcgagatgattctgataagaaccatttttttggcagggctagatgaatgcaaactttgggaggaaatcgtggctccatgcacccagggaaccagatggacagagggaccggctctagaacaatacaccctgaggttttctaggagtcctacaagatgatggtgcgagcgcttgtcacgtacataaaggaggttctggccaacgatgagtctccacattggaatcccatagagcctgaaacagaaaaaggcagaggtggcggatatcatgatgactgtgtgcacgacagctatttctttcaatggtagattgacactagtgag

SEQ ID NO: 29988 - DNA, 269 bp, Glycine max
  unsure (1)..(269): unsure at all n locations
  Clone ID: PAT_MRT3847_127080C.1
gggattgttagtttgctaatattgttgtgtagttggtgctctgaagtggggcatgcttgagctctgccctgggtgacctttggctttctcccatttggcnaagtgttttttttgtntgttncccgggcagtancttggttgggggggggggttttttttttttttcaannnggaggaaccatngtgggggggggggggaggtgggtatccccccgccatgtagtggtggatggatttgtggganatcactctggttgcttgttagatag

SEQ ID NO: 29989 - DNA, 406 bp, Glycine max
  unsure (1)..(406): unsure at all n locations
  Clone ID: PAT_MRT3847_127081C.1
ctgcaatcatgtggaacccattctcttccctcccttcggaccattactctcctcacagatacaccaccttcgaagggtattacagcaagttccgactcccatctggcgcttctatagctttgatcatatcgtggattcccggtgtagcgaaagatcgcgattatcctaaatccgatacttgttcttccttttcttccaaaggtgaatccggtgttacgggtgcgccatacctcatcatcttcgcgtacgttacgaaggattgcagacaatggtttctgaaggagtatacgccggagactntatcgcaaggatcaagtgggaaggaccggagagggttcttgatcaagtgggatcaaggggagttcgaatgggatggacaggatgttatgagatgggatattaacta

SEQ ID NO: 29990 - DNA, 256 bp, Glycine max
  unsure (1)..(256): unsure at all n locations
  Clone ID: PAT_MRT3847_127082C.1
ctcggtgcattaagtcacttagaacttgacctcctttaaggcatatgctaaggacaggaatgttggatcaacaccgccgnncttgtnnnnnncgaagaccnagcaagcatcatcacccatgctctcaccaaccacaaattggaaatctttaatcttacagagcaggtatttagntgctccctcaatgtgcttcttaaacaactcctgttgctctgcatcgagcttgggagtcaaattcttgatgaacctcttcatg

SEQ ID NO: 29991 - DNA, 395 bp, Glycine max
  Clone ID: PAT_MRT3847_127083C.1
ataaacaacacaacccattttatagtcattaaatttgttcaaaacaagtatcccaaccaattcttggttgcattgacaacacctaaaggacaacacgagtatcataacccttatatggtgcattattgctagtccaaacacatcttgatcattcgactacttgaccacttacccaaatatgtaaaacccaccaccaaaatgtaaagcagccagcagcaattagcctcttcttgacctcaaagtcactcaagtagtcgatggtctctacacaataaggaatcttaaaggaccactgccaaaaggctgaaacctcaggaatcagttcacactcacatgcgcctgatccaagaactacggcccacgggataatgaatgtggtcccatcgaaaattata

SEQ ID NO: 29992 - DNA, 243 bp, Glycine max
  Clone ID: PAT_MRT3847_127084C.1
ccaaggtagggtttcccgtcatcactgtatgacgtcctccattctttgggggggggggggggggggggggtggggggggggccgaggggggggggtgggggggggtgggcgcgtgcaaaagtgggagtgggctttaaagggcacgaccggaaggcggtcttccttggaaggatccaaagattgatcgttgcgctcaaaggcgcataccaggataaggccctgttatcgatcggtttaaccttt

SEQ ID NO: 29993 - DNA, 1407 bp, Glycine max
  Clone ID: PAT_MRT3847_127085C.1
tatataaaaaaaaaagttaactcattaaaaaatcgcaagcaacatttaacctacaggttaaacgtgtcaggctaaaaagcacacttcttaaatgggttgttaatattgatgctcgtagcccgtgtgggttgtgagttatactggcagcctgcgagctagagctccaatgcccaactcatgactaaaaaagaaaactgtaatagacaaattcatgactaaaaaaagactttggttctcaataacgctgtgacagtcacaaacatatacatcatttgatatcatcctcatttaaattttttaataaattgccaacccttcgataaattacacatttgacattttacaagcaatcaataaatttcaattgaaacaacgtgctctaagtcccctacactcaaagtgtgggggcccaagggcaaaatcctttttccttgcttgtctgcaaagctcaagtgttcacaaggatgcaccaaaatgcttgtttcagttggtttgctagaaatagtatgcagacggctgaacccaaccaattgggtttctggagaaccatctacaacttttggccctttagagaacaacattacaacatggcttccatccaaaccaccaaggttcatcacagaaatatgcactgagaagctcaatttgttgcaattttgcaactgattaactggaacataatcaactccataaacctcattctctacctgatataataatctctttctagaaccatctttgatggttctagacaaactaattttacttggagctgataagaaattgtatgaaaaatcactgaaacttaaaccatgcccaaatccatatactctacctccagtataaaaccggtaggtccttcctggataaccacgtgaaggatcagctcgcatgctcatctcattcatgggaacattagtaaatgcctcagggtaccaagtcattggcagtcttccggctgcatcaaaaaccaacttggatagttaaaactctgccatagataattgacaaagcaaattttaaattcaagtatttcacacagtactttatagggtaacccatataaccatttaaaaccaaagctactaaaacacctaattgtgactttttatgccaaagtagggtttatttagtaactgattgtctaattggagtacttcacaattaatctccaatccatttcaaaaaaaattatttagactactatatatgtgtgagtattaataaacccatatgcgtgtgtgtgtgtaaccaacaatcatcaacgcacaactacatatacacacgacatgaaaacactgacttcattatattatgacaaataaacaatttggatactaacctatttgccgtggttgtttatggcaccaatgcttgatgacgtgcattggcgagtgaagatcttgc

SEQ ID NO: 29994 - DNA, 150 bp, Glycine max
  Clone ID: PAT_MRT3847_127086C.1
ctcggaccccccctcaaaatataggttatttttcaaaaacacggggcgccggtggtttgtagcttgttttgacaaacatttccttggttggtaattaggacaaggaacaccccgccaaattgtttttataagataatatgggaaatgaaa

SEQ ID NO: 29995 - DNA, 123 bp, Glycine max
  Clone ID: PAT_MRT3847_127087C.1
aaataggggatagaactttgaactatcgggcggtggagagtatgagcttcggatctatgtgtacctaagcccagtccgtatcagctcaatctgctctgcgacgccattcactagatctgcagt

SEQ ID NO: 29996 - DNA, 391 bp, Glycine max
  Clone ID: PAT_MRT3847_127088C.1
tcctctagagcggccgcccttttttttttttttttcatatatacagattttattgtcaataaggaaataagatatcattattcagtgcatataaagcaaagacagggatagacatggtccaacctcatctctgctggaacaggacagtggatcagggaagagaacatcaggtcagggtggggagggacagcagtgggcatgggtgggccagtctccctaactcctatgttatgcaaataagagcacagacacattcacatgcagctgcagaaagaggggtccggggatctgatgtcacatagcgggatgaagcatcactcagtcctcataaggcaggtatctcacactttaggaaccgcgagaaacacatcataaccctgggcactgtcac

SEQ ID NO: 29997 - DNA, 215 bp, Glycine max
  Clone ID: PAT_MRT3847_127089C.1
gttgtcaactgattaaactatgaattgaacagatacatttggcatgctccgaaatggaatcggtggatctaatagcggagttttggtttgtgtaccttatagcatgaatgaatcagtgtcgtttgcatgccatcaagaatcctagtgttttaaagtcagtggatagagaacataatctttctctactattcactttatatacttcactctttttc

SEQ ID NO: 29998 - DNA, 2531 bp, Glycine max
  Clone ID: PAT_MRT3847_12708C.1
gtcgcccctcgcccgaatccacacgtcacgatggtcgctgttgatagtgcaaccctgggttttccccgcatgggtcccaatcgcgagcttaaatttgctcttgaaagattttggcgcaaccagattagcgaagatgagcttttccaggtggcacatgccgtggaagaagccaattggcgcaaacaaatcgacgcgggagtgagtcgtgtgggagtgggtctcttttcgctctacgaccacgtgctggactggacttattacctgggcctcgcccctgagcggtttgccaaggtacccatgggtctgtcgcaatatttcgcgatggctcgtggcgtcgatggcatccccgcccttgacatgaccaagtggtttgactcgaactaccactatgaagtacccgagcttagtgccaagtccacgcctaaggctaatttcagctcatatttgagcaacatgaagcgtgctctggctatagttggcaccaataaggtagttcctattatactcggccctcttacatacttggctctgagcaagtatgacggtgctactcttgatgatcttctagtcaagatcctacctatctatactgtactgctgaatgagcttgctgctcttggtgtgacggaggttcaagtccacgagccttcacttgttggtactagtgctgatcaacttgcaaagcatctggcaacggtgtacggctccaaggatcaaaaaggtgccattcagcacgaaaaaattgctctcaacctgaccacgtactttgaagagatcaatcatgatgtttaccaatggtttgccacgtcgcccgtgtccgccatctcacttgattttacacgcggcgacaatctatcagttctacagaaatttggcttcccagccgggaaacgtcttggtgctggccttgtcgatggtcgcagtgtgtggaagtttaaccctgacacgatcctctcgcaggtcactgagatcaagaaggtgcttgctgtctcggacaatacttcgcttactatccagacaagctcttcgctacagcacgtgccgtatacaacggatcctgaaaagactttgaacgctggagagactgacggtttgttggatgtccttagttttgcgtacgaaaagcttgcggagcttgaggttgtcaagaagattgctgaatttggcgaggaggctgcgaaggctgagatcgacgctgccaaaaaagcttggtcggtgtattacgagaagaatcctgccaagaccgctgtgcagtcgcgtctcgctgctgtgacagaggctgacttcaagcgcccttccccgtttgctgagcgtcgacccttgcagctcaagggcctgcccgtactgcctacgaccaccatcgggtcttttccgcaaacccctcagatccgtgctttgcgccgcaagctcaaggccggtgatatcacgctggatcactaccgtggcaagatcgatgaacagattgcctacaacattggtatccaggaggcccttggtctcgacatcttggtccacggtgagcctgagcgtaccgacatggtcgagtactttgctgagaagctgaacggttttgcttttacgcaatctggctgggtgcagagctacggttcacgttgcgttcgtcctccgatcatcttcgctgacctggagcgccctgttgacatgacagtgcgtgagttcgtcgttgcgcagtcgttcactaccaagccagtgaagggtatgctcacgggtcctgtgactatcttgaactggtcgtttccccgcaaagacatcagccgcaaggagcaggcttttcagcttgctctgtgcctgcgcgatgaagttgctgaccttgaagctgccaaatgcactgtcatccaggtggacgaacctgctcttcgtgagggcatgccgctgaaatcttccaaaaaggacgaatacctgaactgggctgtggatgcattccgtctgtcgactggtgttgccaaaaacgagacctcaattcacacgcacatgtgctattgcgagttcgcggactgtatgcacgccatcgacgctatcgatgccgacgtgaactcgatcgagaacgctcgttcggatgacgagactattcgtgagttcaagtctatcggctacaagcgcgaccttggccccggcacgtacgatattcactcgcctgtggtgccgcccaaggaggagattgtcaagaagctcaagagtttcttaaacctcctgcctgccgagcaagtcgtggtcaacccggactgcggtcttaagacgcgcaagtggcctgagaccattgctgctctccgcaacatggtggatgctaccctcgaagtccgtgctacgttgtaagcttgatggtcgccattttccgtgagaagacgggaagctcactagattttatcgacgaattttgcgccaagttgctacagtagcttcgctcacttgacatgtcgtagaggcatggccaaggtgccgagaccttagtagcaggatgtctcgccaccttggataatctgaataataaaggtgtggttttccgtgttgtt

SEQ ID NO: 29999 - DNA, 640 bp, Glycine max
  Clone ID: PAT_MRT3847_127090C.1
cacaaacttctcttccgagtgttccattccaacttgggtgtggctatggatcgcgctcagcttcttttggtgggtgtgcctctcttcctcttctgctcagacctcttctcccttttcactcatcatccaccaccgccaccccaccaccatcacccccaccaccatccacctcaccaccaccatccacctcaccaccaccaccacccgcctcaccacccaccccaccaccaccatcacccgccccaccaccatcagcagccggtgataatagagttccctcccgagaaacccatcagcaatattgcaactccgggtctcggcaacactgtctacatcaatttctgctcttcctgctcatacaagggaacagcagtgacaatgaagaatatgttggagattgctttacctggaactgaggttattcttgcaaattatcccccatcgcttgcaaagcgtctgctaagcaaattgggtccagttgttcagattggtgttgtaggggtggatgatgcaggggaacatatttttacaatgttgggttttggtgcacctgctccttggtattacaacttgcgtgctaatcgggtgggaaccattgcgaggacttgacttcttgggaatgccttgcagacattcttac

SEQ ID NO: 30000 - DNA, 535 bp, Glycine max
  Clone ID: PAT_MRT3847_127091C.1
ggggggaaaggtttctaaccatcaaccaaggggggctataaaaataaaccttggggaatcaaaatttcatcggaaagcacccaaaaaccattcccctcggtattgaaaaaattgccctttatatgacccccctttccattggaattttatgatgggcccccaaacgaaaggacccgatggcttaatcttcttcagggggggggcccctcctataggggcatgagtcttctgtccttgaaaaaccccccaaatgccgaaaatatgaagaccccacaaacccctgttattataaggaccccctggaaagcagaggggacctcaaataattcaatttcaaaattcatcccaaatattcctgctccccccccaaaaatggcaaccacaaatggtgcaggtgggagaaaaagcccaaactgaataagctgatttcccacattatccagtggaagggtgaaaaaatcttctggggcatcaatggattctttcaacgatgtcaacttatttagagggctatcaatgacaacaaagtatgctt

SEQ ID NO: 30001 - DNA, 559 bp, Glycine max
  Clone ID: PAT_MRT3847_127092C.1
gcacgcctacctaagctccttaattcgctcgacatcctttataactctccccatttgccctcttttctcaacaataatgctcccataggagatataataataataatcctctcattctgcctcagccttattgcactacacaaaccctcacattggtagctagctatccaccatgatcaagaccttgaatccttacccaaatccagcaaaaactgctgagatcatgtcaaggtacaggccaatagcaccaaagcctgaaacctctccaaactcgtccatgagtgagggctcttgttcctctctctcccagaagatcaatcaatctccttaccttaggaatttatggccacagcttcaagccaggcccaccaggactagaaagagaggtagagctcctttgacactaccctcttcctccctcaagagacacaaaacaacacatatcccaagtttttgtcccccttgtcatgttgttacatcatccccagccaaaaacctttcttttcagggttttgctcctcttcctaaccatggacttggagtgctcaattgcaccatg

SEQ ID NO: 30002 - DNA, 815 bp, Glycine max
  unsure (1)..(815): unsure at all n locations
  Clone ID: PAT_MRT3847_127093C.1
ngtacgagtgtgaatgagagaacattcaatggcgtctaggaagggattcctttcgaaagtgagttccatgtttgtatcatcaagtaccgatttggagctgaaatccacagagggtgacttggaattggatgaagctgaaatgttcaactggaacatgtccaatgacaacaacaagaacaacactgtgacagagtcgaagaagagaccacgatctggtaagaagaaaaaggtgaaccctgtggcctcatcctcaatgccagtggctattcctgattggtccaagattctgaaggaggacttcaaggagcacaagaagagagaatttgttagcgaccacgattacgatcgagttcctcctcatgagtatcttgctagaaccagagaggcttctcactcagtgcatgaaggaaaaggaaggacccttaagggcagggacttgcgcagtgtaagaaattccatttggaagaaattggggtttgaagattgatttattaagtaaattggtagtagtgccacacacacatatgaacattagatctgattccatcactttttaatctttggaatttttttgtttaggtgatcaatttagtcagaggactatactagcaacttagtagctctgttaggaaaggtttatatttataaattattggacatttttctttcttttgggacgggtgactcttgattgttaggttatataaggagatatatgaagcctccttcatttggatgtctagaagaagggatcattatcatgcttgtaagttgtaattaagtgttttcaactatntaaatgcctacttatactt

SEQ ID NO: 30003 - DNA, 257 bp, Glycine max
  Clone ID: PAT_MRT3847_127094C.1
gcgagtgcaacctttcttgcagctcgcaaagctgaaaaaatatttgctgtattctgcagcatattaccaccagccactcactcactgccccaagaacacatgctgttccagatccctatatatgtgttcaatcttcatcatcatgatcaccaccaactccaactctccaaaacttgccacttcaaccttcctatatatgccttcctccactctctttctgagactgcttctgctatctttctgagagacctcacaaa

SEQ ID NO: 30004 - DNA, 1125 bp, Glycine max
  Clone ID: PAT_MRT3847_127095C.1
tccggggtcagaaccaccaaaaatttgtactactctattactccttccaaattttctctcaccttatctcccacctaatccattaagatgacttcatacggtaccacaattttggcacacttgtttggccttcttgctctcatcctcttgcttgtttggttgctgaattatcgcgagggcattgaatatgattctgaaaatccacttcgtgttttcaatgttcacccttttatgatgttctttggattcattttccttattggtcaagcaatactgtcataccaaacggtgccagggccacacgaaacaaagaagatcattcacttgacacttcatttcattgcaataattcttgggattgttggtttatgtgccgttttcaagttccatgatatggtatactgggaggacgtaaccagcctccattcatggattggcattggcaccttttgcttggttggcttgcagtggcttatgggactgggatttatgcttcaaggatcttcacaatcaaggagtgcaatggccccatggcacgtagcaggtggtagagcactatttttcatggcaatatgtgctgcactaacagggttgatggagaagtatactatgttaaaacccgccctacaccagagagaatctcatttaatcaacttcacgggtctagctattctcttgtttggagtctttgtggatatggcagtgggtttggcccgttatgcctgaaatattacttcatttaattttctccacttccatgtactttattccaattcgattgatccagcatttctacatttttttaatttttattttgttattgtgtttttatttgctggaaatggcttgtgtaattttatttttcttactatcttttggacttttgtgggatataagttgactcttgtggaaatgatttgttttcatactaaaacaaacaagttggttctgtgtggtcctctgtattggttcttgtagcattcatgaatagttagcacttagcagtgaacttaagaacttatgctataagcccaacccatgcaggtcatataattagtgcatggttcaatatattttaaagaaataataattatggtttagatatggtttcagaaatcataaaaa

SEQ ID NO: 30005 - DNA, 303 bp, Glycine max
  unsure (1)..(303): unsure at all n locations
  Clone ID: PAT_MRT3847_127096C.1
taattctcaatgagcaancctcgcagcatagcgggggatgctgagcccctctgcggccactctatgatcagtcgtcgcggtttcccttctttgcccaccgacgagttggaggcccgcgacttggccaccaaatcggtcgttttggtcaaagagagggccgaggtgaaaccggatgatcccactggagcaagtcgcgtcgggaaaaacattgatcagagtgaataatggggccccaaaggtcagtcccgaattcaaccgggtggagggccaacgcggcagtttgatcctcgagggggaaaacca

SEQ ID NO: 30006 - DNA, 199 bp, Glycine max
  Clone ID: PAT_MRT3847_127097C.1
gtcagtacggctgcgagaagacgacagaaggggggactttttgagagacgtccctgttttttaccaacaacaggtgagagggttaatgtgctgtaaggcattgcgcggcgcgcaacaacaaagcgaaggggaaaagcgcggccagtcccggctttacggcctaggaggataatagggaccaggccgctggggacagaga

SEQ ID NO: 30007 - DNA, 333 bp, Glycine max
  Clone ID: PAT_MRT3847_127098C.1
aatggaaaaattttgctatattggggagaaaacaaaaagagagaattccctttctaacataccatttgaaagatcacccccattttgttaatacacaaccaatttttcagggggcgggagccttttttaaaggttaaactaaatccctaattctcttgaatttacaaacttttaaagttgtccttcaattctgggaaatttaataaaaaaccgggtttttgccctaaaaaactcacaagccaaaaattagttctggtttttatagagggaattagattggaaaaaaaaactgatccattcttttgaaaactgtgagccccaagctgcaatttt

SEQ ID NO: 30008 - DNA, 2729 bp, Glycine max
  Clone ID: PAT_MRT3847_127099C.1
ttgagaagagtaaactcacaagtgaatgcaactattattaactttccaaggttaaaaaggcctgcactctgcatgacatttatatatgcggagagcacagcaaaatgccccactgatcacaaaaatatccattaaatttgatgaaaatacagtaaaaattaaaggactaactaatacaagaaaaaaaattgatatccatatagcaaatctgagttctaccagcaaattttaagcctaaatggtgctcagtcagagaagagacataaataagagatgatcataaggaggacacgttcccgtgtttttctgcttctccataataattatgaatgaacgacaggaatcttcttagcaaaatcctccccatcttcttcttgcatctaatcttcctctttattttcatcctcttctccttgttcatactcatagtatccctcttcaccttgttcatactcatagcccacatctctctgatcatcaccttcataattactgatccacatccaattcaatgtatcctcttccctccacatatttagcatcatagtattctccagctatttcagagttacaacaccgacaccaaatattctcactcgtcgtcttcgtctgcgccctaaccaaattcaattcaaactcttctcatcaaaatccaaggctcgttcttgaaaccctaattcgatatcctcctcctcagaagaagaaggatcgatgtgggcagcttcttgcctggcgtcatgctgcgcggcctgcgcatgcgacgcctgcaggaccgtcgtatcgggaatcagccgccgttccgccaggatcgcctactgcggcctcttcgccttctctctcgtcgtcgcctggatcctccgtgaggtcgccgctcccctcatggaatcccttccctggatcaatcacttcaaacacacacctagccgagaatggtttgaaacggatgcagttctgcgggttagcttggggaattttctgtttttcactattctagctgttctgatggttggtgtgaaaacccagagggatccccgggatagtatgcaccatggaggttggatgatgaaaattatctgctggtgccttctggtaatctttatgtttttcgttccaaatgagatcatcagcttatatgaaacaatatcaaagtttcgtttggtcatgtttcttcttgataatgtcatgcatactcagtgctatggaacaggtaggaatgagtattctgtttggatgactacccaataagggtatacaagaacatctaatgacttgggagtgaagttcccatttaacctaccaatgaagatatacaacagtttgtggaatgctgatgactgggccacaaggggtggtttggagaaaacagattggtccaaagcccccttcgtagcctcctacaagggcttccacattgatggttgtgaggcctcagtgaatgccaagttctgtgacacacaaggcaagaggtggtgggatcaaccagagttccgtgaccttgatgctgctcagtggcaaaaactcacctgggttctccagaaatacaccatctacaactactgctctgaccgcaaatactactctcatgtctgtcgagtgtgctccagagagcgagacatttactgctgcagtgctttcccctaccaagctcccctcgtgctggtaagcctctgcttccattggatgcaaaggaggatgaagagaaggagaaagcaaagccagttacatattcatatgccttcttccacttgattttctctcttgctagcatgtattctgcaatgcttctgactggttggtctacatctgttggagagagcgggaagttggttgacgtggggtggccttctgcgtggcgcgcgaatcccacgcgtccgaggacaatctacctttggtttgaccctactcgcgaataccacagatcctcagtgctatggaacatgtaccagattgtattctatgtggatgactacccaataagggtattcaagaacagcaatgacttgggagtgaagttcccatttaaccaaccaatgaagatatacaacagtttgtggaatgctgatgactgggccacaaggggtggtttggagaaaacagattggtccaaagcccccttcgtagcctcctacaagggcttccacattgatggttgtgaggcctcagtgaatgccaagttctgtgacacacaaggcaagaggtggtgggatcaaccagagttccgtgaccttgatgctgctcagtggcaaaaactcacctgggttcgccagaaatacaccatctacaactactgctccgaccgcaaacgctaccctcaagtctctccagagtgcgccagagaccgagacatttaatttggctcatcaagatattggtggtgtcaattatccactgactttgctcatgagtaatctttctgtccccatacatataatttaatataagcttccatatcctatttttattaccactaccataaagttcccatctacttgatttcatgaaggccacacctaagtgctgatacaaaattcaatttgggtttattgcttgtattgctgataatttatatcatcatttattgctgctgctaatgctatggtatgtatacctgtttgagctatgtaacaaaagaaatggcaatgtgccttaatttgtatctgtaattcaatcaaaatataccactgttactagcaagtatatgtgttatgttattattgttattcttggtc

SEQ ID NO: 30009 - DNA, 872 bp, Glycine max
  Clone ID: PAT_MRT3847_12709C.1
gcaaagcattatatctatctctcctccctctcttctttatatacaaaccaaatattcctcgaaagcctcaacttccaatccaacaacgacaccgtatcataccgtaacatgttcacagcaccttttcctacatccactgttactctctccggtgaaagcgtaacctcaccgccgcgccacgtcagattccggtcagtaatatcgttcgccaccgccactttcacggaggagcaacaacataaggcagctccgtatctgagacctcatcacgggatggctttgagcgcgacgctgtacgacattctggggatccgcgccacggcgtccggcgaggaaatcagggcggcgtaccggcgactggcgagggtgtgccaccctgacgtggcgccggtggagcgaaaggaatcctctgcgggcgagttcatgaagatccatgctgcgtactgcacgctctcggatcccgagaagcgcgacagctacgatagaagcttgttccggcgccagcagcgaccggtcaagacgacgtcgtcgggggcttccggctacggtgggcggaactgggaaacggaccagtgttggtagtgagttgagttgactcgtccgagtgggagcgcgctcgcttgaactaacttgctagctacttcggaattgggatcttgggcgcagttatttgaatcacctttaagtgtaaacagtacatactacgttgcaaattttaaaaatagaaagtgttaatcttaacagcctaaaatatcatttctctcccccaaaatattcaaatttgatttttttatctatttttttgtatttataaaatctaaacctacgtatttgatatctgtttactacaaatgtgacacgtgtggcttccg

SEQ ID NO: 30010 - DNA, 1895 bp, Glycine max
  unsure (1)..(1895): unsure at all n locations
  Clone ID: PAT_MRT3847_1270C.1
acgaggttcaaccgtgtactgtctgttaaggatagcaataaactacttgttgcttcactgaagatacagtcatctattgatctccagcgtcaccgcaaacacaccaacacacatttcgttatttgcatctttcgaggtatgtatatcatttggacacttatgtcgttagttattatatttgtggttgacatgtaactattgtttagtattacattgtagttcattgagtgagccatagttccccgcctgaggttcaattcttcttccccgcagcgccgcacagactcatcaaactcgttgtgactgcagctgcacagattttcctcttctctgtgcctttgcgagaacgcgcgtttggtttcaattcaatggcgggaggtaaagcgaagaaggaaaaggggaagccccatcagcagcagaagcacatgccctaccaaggcggaatatcgttccacaaatcaaagggtcagcacattctcaagaaccccttgctcgtcgattccattgtggagaaggccggcgtcaagagcaccgacgtcatcctcgagatcggtcccgggaccggtaacttgacgaagaagcttctcgaagccggcaagaaggtcatcgccgtcgagatcgatccccggatggttctcgagctccagagacggttccagggtacccctcactccaatcgcctcacggttatccaaggtgatgtgttgaagactgaacttccttattttgacatttgtgttgcaaacattccctaccaaatatcttctcctctcacattcaagttactcaagcacgaacctgcttttagggctgcaatcataatgttccagagagaatttgccatgagactggttgctcagcccggtgataaactatattgtcgtctcacagtcaacactcaactacatgctcgagtcttccacctcctcaaagttggaagaaacaacttcaggccccctcccaaggtggattcctctgtggtgcgaattgagcccaggaaaccccgtattgaagttaagcaaaaggagtgggatgggtttttgcggatttgttttaacaggaagaacaaaacacttggttcgatatttaggcagaagagtgtgatctccttgcttgaaaaaaactataggactgtgcgggcactggaacttgggcaagaagattcactaaaggaagtggatgctaaaatggacttctctagttttggtgatgatcgaggtatggagatggatgatgatggagcagatgatgatgaaatggaagttgaggatggggaagcagatgaggtgcaatctgaattcaaggacaaggttttgggtgttctgaaagagggagattttgaagagaagaggtcatccaagctcacattgcaggaattcctatacctgctttctctgtttaacaaaactggcatacacttctattgattttagattatcaattttctcgatagtttcttccctatttaaatctacactattctttcaataggcttatcattattcagaagttttccaagagagagtgatatcaaaaactgttaactatttatgcattgtattttgttaagctccatcgtggatgtatactactctatataatctttaggaggtttgattatgtggttcttttattgctttactaggatctgcatttgcgacttactgtatggtgtttgcaaatgcttaatgatgttatcattttctctttttgatgcaccctgattgatagtctgaattgtggttaatggttgtgaggcatattaaaaaccaatgtttagttagatgatgctttgtcgcacgggttaaatttctaacatttggtactaaagggntgttgagattaaaggacataactgaaaaatggnngtattctctcatcttattcattgactc

SEQ ID NO: 30011 - DNA, 513 bp, Glycine max
  Clone ID: PAT_MRT3847_127100C.1
actgctagtgtttgggactcacggtatcttcaggacatttcagataggaaatcaatatcaagagagggaagcagcattgcagatgactgggatgaaaggcatcattcagttgaagaagtgaaggccatgttgatgcagaggaaggaagctgctgcaatgaagagggacaagaccttatctcaagccttttccgaacaggttttaatccctcttttaagtgtgttttactaatttcctgaaattgaattaatttccttgacttggttttgtcaattgattttgaagtgtattttattggttcttgaactggaattaatttccttgacttggtttggtaattgtctgtattgattctttgaaattgaattaatttccctgacttggtttggttaattgattgtgatgcataatagatttggaggaatggtagaacatcatcaattggaaatgaagatgagttggaagagagaccaaaatggctagatcggtggatggccacaaagccatgggaga

SEQ ID NO: 30012 - DNA, 365 bp, Glycine max
  unsure (1)..(365): unsure at all n locations
  Clone ID: PAT_MRT3847_127101C.1
ttggtttcccacgcgccgatgattcgaagaaacgacgaacagagacagggaaaattttgaggccaaggacccccccaaccgaagcaaaancgcncngaaaggggccacngacaaccggaacagcaacggngacacccgcaacaacgaccacaccaagccaaccggaggaagggaaaccggaaaacacccccggaccaccacaggcccacccccgagaccacagacggagagacgcgaaaaggaggagacgcgccacaaagaggaggacaccgacgccgaggngcgggacccgccggacaccgccnccaggcagaaacaggagaaagaggcggcaaagccaaaccggggggacgcaagagagaaaa

SEQ ID NO: 30013 - DNA, 201 bp, Glycine max
  Clone ID: PAT_MRT3847_127102C.1
ggctcgagcgcaaacacgacttccatttgttaatatagtctttgaaacgctagaaatgtggcgggatcttcgtgggagactgctgcaaaaataaaattggagcggacaccatatctagagagctagctgtggatgagcctaaggtagcaacttgcacaaatagacacggaagttaagctggcgtcaccagagacgacctct

SEQ ID NO: 30014 - DNA, 1346 bp, Glycine max
  unsure (1)..(1346): unsure at all n locations
  Clone ID: PAT_MRT3847_127103C.1
gaacatctctgtctctctctcctctttcccgccaacctcactctataacaacatttctctctcttccttacccctggaataaccaccctagcaaattactaccatcatcttattttttcttcatcatccaccactctatttgtcacttgctttcatgcaattaacacttctaccaccttttttcattttctcactctcttcactaaaatgagtgacacacaccaacctttcatgtccgtacaaccacccatgaagctccaccacccctttaacccacaagcctcaagctcaaattttgacggcgacccaccatgcaaaaccgccggaaaaaccaaaccacctcacacgaagctactccgggtcattctcaccgaccatgacgccaccgattctgactcctccggtgacgacgacgacccaaaaaacccaccgaaacacaaaaaggtgaaaagacaaatcacccacatcaccataaaccttccctctttctcagaagccccaactccagcaccaataccaacaccttcttcgtcttcttctattgatccgacccgtttaaccctacccaagaaacgacccgccgtgcctcgccgccgtagcaagttccgcggggtccggcagcggccatggggacggtggaccgcagaaatccgtgacccgaatcagagaaaacgggtctggctcggaacgttcgacacggcggaggaagccgccgccgtgtacgacgacgccgccttgaagctcaagggccccaacgccgtcactaacttccccctctccgccgccggaaaaacggaacatgataccgcgccgccggaggcggctttctccggcgaaggtttttcatctcccacttccgttctcacttactttgacggagactcgacgccactttacggtttccgttacggcgaggtcgacgcgttcgggtttgacatcgatgcgccgtttagtttgacagacgttaacttaggggtgctgagtcagcggttcgggaaggaagatttcggcgagtttgacccggacgagttcttgacgtggccgagttaaggggcgtatttatcatttcgaaaaaaatacagggaatgtttagtaattctaatgaagtttttttgtcgtattctgcattgaattccgaaactaccctcgtgactaagtttttgtgcagcttagtagagtgttagagagcaatagagtgatccaagtagtagtagagaattttgtcctatgttaatttgtgtaattaattgtattgttatggagaaagaggatatgatggaaagtattagaatgattctcttgtagtttcttatatnnttttataaagtaaagtattagaattaatt

SEQ ID NO: 30015 - DNA, 247 bp, Glycine max
  Clone ID: PAT_MRT3847_127104C.1
acgcgtacgtgtgggtgcacgcatacatccgaatgggagttagagaacgacgagttatggggggggggggcttaacactgggaacaaacggcatgtgtttatggataatatagcagtcggcttacgtttaaggttctctcttcacttataactaataaccgttggatttcaataaataaagtggattaggggtcttgtgacggacacaacctgtgcttaattcgggtcattgtgatgtgcacataaa

SEQ ID NO: 30016 - DNA, 412 bp, Glycine max
  Clone ID: PAT_MRT3847_127105C.1
aaaaaattgtaatctaaatgattgtttaattaaattttgatgaaatattacccctacatatccacatgtagttgttgaagcaattcctaagcaaccctcccaaaatatacacacaaaatagctatggagtatggataacattaacatgtacttattcctatttgcaaattagtgtttctgagaagtgaaatctggttcagctggctttggaggtaacagaggtagtagtctctgttgcattctattgtgtctgctattttctctcaaatttcgcagtgcattggcagcaaaccttgatgcatatatggttgcaccaaggcttagactagactcttcctcatttgccaaagcatcttgtagctcatcttctgcttcgcgcaatgacctctcaatcttctttttccagtatcga

SEQ ID NO: 30017 - DNA, 181 bp, Glycine max
  Clone ID: PAT_MRT3847_127106C.1
atgtaaacatatatcaaacactctaaggtctattggagctcatgcttagggtgtaacatcctcatagacaacatttctttttttaaaacatactcaatatttttactacaaaataacatatccgacctataattatcataaaactctgacgcttgttatactctttactttggagaccttc

SEQ ID NO: 30018 - DNA, 398 bp, Glycine max
  unsure (1)..(398): unsure at all n locations
  Clone ID: PAT_MRT3847_127107C.1
ccggttccttatggcctggagggctggtggcacttagtcctagtccggggcacactatgtacctttaataattcacttatgtacagtaaagatctatttgggtctactaccccaggcttggtggagcttnggaggcatngaaggtttnaggggaattagacccactttttttaccatttgggggttaatcattctgggactgatctgagggcatgggggccttaggagatttagggggatgaggcctatgaccattggggcgatgatgatgatgacgtcggttatgatgaggaccattttccctcttcctctccttaggggttccaccctttttggcgacttcatggaatggggggggtacagcgggaacaggggaaacaagggggccattgggaaca

SEQ ID NO: 30019 - DNA, 312 bp, Glycine max
  unsure (1)..(312): unsure at all n locations
  Clone ID: PAT_MRT3847_127108C.1
ccgggnttggataccggggcggacccaggcgtccgttccgattatcggaagggagggtcccaaggtttactaatcgaaggcgccctagtggggctacggaaatccaaccagcaccgggtggttagaacccctgttgggaagtgtgatgcccagcccacttagaagggggcagggggccttattgagccttgttacgtggaggaggttccaagggattccaaattagggaccggctgattccataaggaataggtggcttaggaaccgctggtccgtaaacctggcttttgggggggtttgttccgggggagc

SEQ ID NO: 30020 - DNA, 483 bp, Glycine max
  Clone ID: PAT_MRT3847_127109C.1
gaatcacgcctcagcatgaaaattttattgaattaaattagtcgaacaagttaactacaactatgccttggttagtttaatccaccaaggatgattgacatttgagcagacaaggggaactgggttttaaagctaaaaattagaaatgaccaatgttgaaaaatattttcaacttcatttacgagtgggtgaaaatgctgaggacaattcgatttgagacttgtctgcttgatcacattatcagaactttctgcatgagctttcttaagcaaaacttgttgttgaagcgctttcaacatctcctttaatgttttctcttcttccatcatctcaaattcattaaggatggtttaaaagttatcaacttgaggcttacttgcatttttgtctaggttaacttgttaaagtgaaacttgtttctccagtgtcttcatcatcatctataaagttttttcttccacttgtaattgcattttcattatt

SEQ ID NO: 30021 - DNA, 230 bp, Glycine max
  unsure (1)..(230): unsure at all n locations
  Clone ID: PAT_MRT3847_12710C.1
cgaagctagagcctcagagcggccgctctccacccccaaaataatccccncacccaaagacaccgaagcgggcacttgcacacgggcaaacccccacaacccgcaccacaagaaagaaacgaatccgcgcccacaaacccccagcaaaacaaccaacacaaaacgaaggcaaccatcacccaaagacccaaaccacgccaccccaaggaagaagaacccaggcccacagg

SEQ ID NO: 30022 - DNA, 832 bp, Glycine max
  Clone ID: PAT_MRT3847_127110C.1
attagaagctagttttctaaagtttcaacactaactgaaccacagtatattgttgttactattgctattgtcaaatattaatcaagaacattgatatagctatggaggttggaaagaagaagatgatgctcaagtctttgatcaaaaaggtgataaagggtcttccattattcttggcaccaaatggagtacgtagtacgagaagggtttgttatatgagtgacattgatgaggaaaatgaacatgcaacaaaggtgccagaagatgttaaagaaggacactttgcggttatagcaatgcatggtgaagaaacaaaaaggttcgttgttgagttagattatttaaccgatcctgctttcttgaagctgctggagcaagcaagggaagagtatggctttcaacagaagggtgcacttgcagttccctgcacccccgaagaacttcagaagattatagagaatcgaccactgcgtaattaacacacttcttctgtttatacacgttaagctattacatagatcaattgatacttttttctttttcttttcactttttttggtaatcattttacagtttttgcaaaggttatgcatctaattaatagggatggctctacctattgcgtataccatttttttatatttaaaatctagcttgaacatatgacattgtttgtgtgacaactatattccagaaatattacagaaaggaatacaattggtcttgtgagatccctcgtgttactaattttttgagattcatatagatattaatttgttgcttattatatatggaaaatgggtgaacatgataatgttaactcatttaatgc

SEQ ID NO: 30023 - DNA, 1035 bp, Glycine max
  unsure (1)..(1035): unsure at all n locations
  Clone ID: PAT_MRT3847_127111C.1
ccacacgtcccctcttgtccagaaatctccattctccgaccagacaggctcccaccacctcccccttgtactgaaatctccattctccaaaactgcttcatctcttctcattttctttctctctctctctgcctcgcactggagtaccctctccaatttccttcaaatcccatcaaataagtttctcttataccctctgaatattcttcatcatcatcatcattaatcatggctcttttgatgtattttgtgctttttcttgccctcgctggccattcaagtgctctttactgtgtatgcaaagatggtgtgggtgatcaagctcttcagaaagcaatagactatgcatgtggtgctggagctgactgtacccctattctccaaaatggagcctgttttcaacccaacactgtgaaggatcactgcaactatgctgttaatagctattaccagagaaagggtaatgctcctggaacctgtgattttgcaggtgctgccacaactaatgcaaatccacctactgcatcatctggatgtgtctacccctcaagtcctagcaatgcaggaacaacaccatctacccccaccaggcacaacaccatcaacaggtggtacaacacccacatttgcaataagtccaacatctacaactggtatcaacaatgccaatggagctagtttaaaacccactaacaacactaagttgctattgctcttttttgttctaaccctttggttagcaatgagggtctaaactaaaaggtacagtggcaccactggactaggaaaaaaattgtggggggttttcatgtaattttgcttctgggaatcttccacaagcaaaaccggtttttctttttttttctttctttcttcctagtgaaagaagagtagggaatttggttttctggtttagtggtgttatattttgagtatgtagggaatttggacttggaagtagaatttgattgaattttcctcgtgacttttcaaaaaaaaaaaaaaaaaaannanctgcttntttannnnntcgtg

SEQ ID NO: 30024 - DNA, 1247 bp, Glycine max
  Clone ID: PAT_MRT3847_127112C.1
tgtaccagcccggctcgacccacctcaccgcttgtccagaaatctccattctccaaaactgcttcaactcttctcattctctctatctctctctctgcctcacactggagtaccctcttcaatttccatcaattaagtttctctaataccctctgaatcatcatcatcatcatcatcattagtcatggctcttgtgatatattttgtgctttttcttgccctcactggccattcaagtgctctttactgtgtatgcaaagatggtgtgggtgatcaagctcttcagaaagcaatagactatgcatgtggtgctggagctgactgtacccctattctccaaaatggagcatgtttccaacctaacactgtgaaggatcactgcaactatgctgttaatagctatttccagagaaagggtcaagctcagggaagctgtgatttttctggtgctgccacccctagtcaaacaccacccactgcagcatctacatgtgtttacccctctagtcctagcaatgctggaacaggcaccacagcaactccaacaaccactacaccaacaacaggcacaccacccaccaccttaactccaaccacccccactactaccactccaggcacaaccaccggtaccagcccaaccactggcactggtaccggcaccggcaccggcaccaccataggtaaccctaatgtgtttggaatgagtccaacatcttcaactggaacaggaggaggcttcaatgacccaaacaaaggagtggttcatttgcaagacataagcatgttgctagtgtctcttgttatcaccttcttgctagtaatgttgagggtctaataataagtggtacagttcttgggaaaaaaaaaacacttttggggctgtttgttttgatgtgtggatgagattttgccacactgtacaagggtgttcttgtaatttcatcacttggaatcatccagaagcaaaaccccccactttagcctcctgtttgtttttgttctgttcctacttctaagaaaagagagaaaaaaagaagtgttagggaatttggttccttttcagtggtgaatatttgataatatagctactaatggggtggaacctgatcggtttccatttgtatattatctatctatcactatgagaggcactattttttatttatttttatttactgagccttgctagttgctaccttgtattatttatatgttaatatgtgatatttacttgttttttactt

SEQ ID NO: 30025 - DNA, 1183 bp, Glycine max
  Clone ID: PAT_MRT3847_127113C.1
ccacgcgtccgcggacgcgtgggctcgcactggagtaccctctccaatttccttcaaatcccatcaaataagtttctcttataccctctgaatattcttcatcatcatcatcattaatcatggctcttttgatgtattttgtgctttttcttgccctcgctggccattcaagtgctctttactgtgtatgcaaagatggtgtgggtgatcaagctcttcagaaagcaatagactatgcatgtggtgctggagctgactgtacccctattctccaaatggagcctgttttcaacccaacactgtgaaggatcactgcaactatgctgttaatagctatttccagagaaagggtcaagctcagggaagctgtgatttttctggtgctgccacccctagtcaaactccacctactgcagcatctacatgtgtttacccctcaagtcctagcaatgctggaacaggcaccacagcaaccccaacaaccactacaccaacaacaggcacaccacccaccaccttaactccaaccactcccactagtacaaccccaggcattggcaccggcacaggaacaaccacgggcacgggcacgggcacgggcacaaccacagggtaaccctaatgtgtttggaatgagcccaacatcttcaactggaacaggaggaggcttcaatgactcaaacaaaggagtggttcatttgcaagacacgagcatgttgctagtgtcccttgttctcacccttttgctagtgctgttgagggtctaataacaagtggtacagttcttggaagtaaaaaaaaaaaaaaacacacttttggggcggtttgtttttatatgtggatgagattttgccacactgtagaaggggtgttcttgtaatttcatcgcttggaatcatccagaagcaaacccccactttagcctctttgtttttgttctgttcctactcctaagaaaaaagaatgaaaaaaggttagggaatttggttccttttgagtggtgaatatttgataatatatagctactaatggggtgaaacttgatgggtttccattgtatattatctatctatcactatgagaagcactattttttttaattatttaactgagccttgctccttatattatatgctaatatgtgatatttacttcttgaatttttaatctataatatgatccc

SEQ ID NO: 30026 - DNA, 790 bp, Glycine max
  Clone ID: PAT_MRT3847_127114C.1
gttaatgattcatgaattgaggatgccaagccaagatagaatcttcttagtctggactacaatgatctaaagtagctatcgtacttagagttaggagcgaaagtagccaagagagagccccaaggagagaagtcagaagtatcctagttcgtacttccttgataggtcgcccttccttgttgtcttgtctttgagttgaatcagaagcctcgaatggttgctctgattctgtgttctctttgttgtttgagaggggataaccatcttactagttcccacttccgggtataggagttgaggagcacgcccttccactaaaatgccggtcttggttaaagaatatcccctcctgctagcggtgtagctgttctgcgtcacttccggctttaagagaatacacctcttaactgagagttcctacaagcttgttcttagtgttatagtagttcttgagttcagttagcgactgatccaagggtatatctatcagctatgagttgaagaagctagactgtagttcctgtgcttcccgcccgaacgcagcagattctcgaacaagagcatacaaatacttgatatgagttgactagccttacttgcctatcaagagaagaccccaaaactaaacttttcttttaatctggtaatctcggattaacaacggggccatccaatagtggtgggtgggtacccaagggttcatttgctgtactccagtacctgtggacagaccgaagccaatcctgcgtccacctcctgagaatttaccactcaaggaagtttttggttc

SEQ ID NO: 30027 - DNA, 265 bp, Glycine max
  Clone ID: PAT_MRT3847_127115C.1
aaggaaaaaaacttcccaacacccgccgtttttaaaccatcgtgtaatttaaaaaacaccctacccctttaaccccctatctcagaccaccaatctccttcccaccacccaaaaatttcataactttcccagcccgcctaccaaaaatcttaaaaattaagctctgccttcaaattatccaaattcatttaattactaacatcttctcaaacaaaatcttccccaacaaatatcttccttcaacactcctcaaccattaaccttt

SEQ ID NO: 30028 - DNA, 835 bp, Glycine max
  unsure (1)..(835): unsure at all n locations
  Clone ID: PAT_MRT3847_127116C.1
attttgacactggagcaaccgaatatggtaaaaccaagtttaaagccactcctaccctatcatgtttctgtaaatcaggtggttcaacttcttgaacgagtccatgatgctctgaactaaatagacctttcttccccgttccaactgttttttacaacggtatgcagaacatggaacatgtacatgcagttgtaaacaatattgtccgtcaactgttgcgtgcttgcctctcaaaatgttgtcagatatagaacatgttatccccatcaatcgtgcaaagctaacaatcaagtggtaaggttcctggtcatcaacaacagttaggggtattcaaaaattagttcgttaaaagaatcgaagcaaactggttttgaattctttaaatcagtttgattttatatccaaatagtcaaactgatttagaaattggttcaaaatcgaaccaattttaaaaaattggttctaaattgagctaatttttaatcatttttaaatcagttctaagagttgaatcagtttcgaactaatttttgaactatttttttgaaataaaaaaatcagttcggttaactaaactggttttgtagaaacaatttggtcaaccgaattggttttaaaaaaaaggtacactcattttttcttgaactagttcgggaaaaaaccaattcggtttgagtgcagttacaattcggttcaatccaaatcgatttttttcaacatcggagtctcttgtctctgcatttgttgtatttttcatgaattatactgtagggaaaggtctttcctgncatacattgtatattaatgaaattagtgagaagaacattcttttttt

SEQ ID NO: 30029 - DNA, 305 bp, Glycine max
  Clone ID: PAT_MRT3847_127117C.1
gtctttgtctgatacccaaaccgtaactactctttcccaagatgggagttcaacggcgtgatgctttatctgaagacaacgagcctgctgaaaatgcttgtgctaatagttcctcgtaccaacgtgctcttgccagtatagtctgccaacatcgatccatgtgtaaatactgaaagtcggaaatttaatgaacctggttacaaatcttatggcaacatttctacaccgcatatctattgacaagatgtcttgaaaaataatatcattggcatgattggtatagtaacaaatgttgctggtgaatt

SEQ ID NO: 30030 - DNA, 412 bp, Glycine max
  Clone ID: PAT_MRT3847_127118C.1
atctgctagtatttccttctaatacatagtgagttacactattatcaacttgaggttgtgaagaatattaagagtgtgtcacatcacttttactacatttactagcaagaaatcgatgatgagttcaagtaatatagcatggactgtggcgattagtggtggagttgtggggagttgttgagagcttgaaggaccagggcctctgcagatggaattcaactttcaagtcagcacaacaaagtgtgaaaagccatatgagatctttgtcacgggcaaataagctctcttctgctatgctttctagcacactactgcatggagagaagacgaagcagtcagaagaatccttgaggaccgtcatgtacttaagttgctggggtcccaactgagaaattagtcctccaaatctaat

SEQ ID NO: 30031 - DNA, 445 bp, Glycine max
  Clone ID: PAT_MRT3847_127119C.1
gggttaaattacctattttttatcggatatgcccactctgacaaggaaaccgaccaccgagacttcagccgatacagaagacgcgtgtaaaatgaatcagaaaaaaaacaaaaacaaaagtgcggggggaatccccaagaaaaaaaataagaccccacccaaaatccgaaggaaaaataataaagaagcaggcacccccccctacaacaaaaaaaaaaaaagcacgaaccgcccacgaagggcgaaaaacctaaaaaacaccacccgcaccccccctagataacaatcaatcacacgagaatcacttgaatgaaaaaaaaaccctgcccccgcaaccagacaagcccaccccccccccgtaaaacaaggattaggaaaaaaacaacccccccactcctaacaaatattttaaaacaaaacaaagtgggctatcaaaaaacacccc

SEQ ID NO: 30032 - DNA, 429 bp, Glycine max
  Clone ID: PAT_MRT3847_12711C.1
agcctgacctttctcatgggattcttcaatggcgataaacctaaaacaaaagattttccatccaggcaataattccccttccccaataatcaacctcaaaaattttaaccgcaaaaggaaatgccttaaccctaacatatgggaccccacatcccttgcaaaaggggtaaattcccaaaaaaacttccctgcggggaaaaaatggggcaaaaatcaaccatttgcaagggggacctcgacctcaacccccggttaaattgggattgaaggaatctgcttaaccccctcgggggaactggagaaaacaaaaattcttttgggccccccccgctaaaaactgtcccatgggtgggggccttccccacacggggatttcccgggggggaagttaaacactttagtgggcatcctaacagggcccttcaccct

SEQ ID NO: 30033 - DNA, 2154 bp, Glycine max
  unsure (1)..(2154): unsure at all n locations
  Clone ID: PAT_MRT3847_127120C.1
tgctcactgccggaccagcgngnctcttgaagccttcagagatggngctcttcaggttattgacctgggtgaatatgttggagttaacgatgattgaagatttgctgctcatttctcgttcttcttctggcatcacacttacaccacttttcgtccccaaaacttcatcaacgtgttctgtgttcttttgtttgttagttggtcactatgactgttttgtcgtatttctattctaattgtttcatgataagcttgattaattctgcaatgatcttttccccccaaatttgaactatagttaggttggcacttgacatagttttttattttattttacatgacagagttcagtccaacagcacaaattctttgaaatgggaacttgactttctttggcacattccatgcgtatatgatcaaaagggtatcgacaaattaagcgatggggggcgtttgttctaggaagagagatcagcatgttgttgaagatgatttacacagaggagtctccgggaggtattggagtggctttctcttcatttctcgttcgtcttctgccgtcatactcacaccactcttcttccattttcattttctctgcgaattcctattcccatacacaaaccaaatgggtattaagggtttaacaaagcttttggcggacaatgccccgaagtccatgaaggagaacaaattcgagagctacttcggtcgcaagatcgccattgacgctagcatgagcatttaccagttccttattgttgtgggaagaagcggaactgaaatgctcactaatgaggctggtgaagttaccagtcatttgcaagggatgttttcgcggacaatcagacttctagaagctgggataaaaccagtatatgtttttgatgggaagccacctgatttgaagaaacaagagcttgccaaacgttactccaagagagctgaggctactgaagatttgtcagaagccttagagaccgccaataaggaagacattgaaaaattcagtaaacggacagtgaaggttacaaagcagcataatgacgactgcaaaagacttttaaggctcatgggagtgcccgttgttgaggcaccctcagaagcagaggctcagtgtgctgctctttgtaaagctggaaaggtttatgctgtggcttctgaagacatggattccttaacatttggagcttctaaatttcttcgccacctaatggatccaagctcaaaaaaaattccagtgatggaattcgaagttgcgaagattttggaggagctaaatatgaccatggaccaatttattgacttatgcattctttctggctgtgattattgtgacagcattcgagggattgggggactgacagctttgaaactcatacgtcaacatggctctattgaaaatatactggagaacctaaacaaagagaggtaccagatacccgataattggccatatcaggaggctcggcggctttttaaagaaccattggtcataactgatgaaaaggaacttgatattaagtggtcttctccagatgaagaagggttaataacatttctggtaaatgagaatggcttcaacagggatagagtgactaaggcaatagaaaaaattaaagtggcaaagaacaagtcatcacaaggccgattggaatcattttttaagccaacagcaaatccatctgtacctattaaacgcaaggaaacaccagtgaataatgctaaagaaactaacaaaaagaccaaggctggtggtggtaagaagaagaaatagttggctttgtgtcttgacaaaggttagagttctggatgtctttcatcacctgtttatgttactgtcacttttgcatgctcacatctgtgactgtgcctctattttcccctggtttgtcgccgttagcatgaaggaggatggattcacaatactgatgcagtcttccaaattgtaaaatattaatgtgaggtagatttaatgagcttgactaacgtaagctagagttcttcttctcatagaaggacaatttgagatacggtacttcatttgacagatactcaaaatcctcctttcctgagtgtaatttgacttgtggtttcctttcctgctgcatcgcatgactatttcaatggcttttgtcggttctggatattttc

SEQ ID NO: 30034 - DNA, 3015 bp, Glycine max
  Clone ID: PAT_MRT3847_127121C.1
attaatttttaaataataaaatctcaatggaggaagaaacacgcgtgatcgtacggaagtcgcttgttctatctcctagttcagtccaacagcacaaattctttgaaatgggaacttgactttctttggcacattccatgcgtatatgatcaaaagggtatcgacaaattaagcgatggggggcgtttgttctaggaagagagatcagcatgttgttgaagatgatttacacagaggagtctcggggaggtattgtagaagtggcagcacaaaatggttgagggccagaagtttgcgtgctaagcccaatcattgtgcaggagggggaacatgcccctctctcatggatctgtgcataaagaagatgcgtgagtccacgtgtattttgcgctttatctttagtttttgttcttctaccgatgtaggcatcattttgttcgtacggtttctcgtcaagctttttgttctctgtcatgtctggttcttcttctggcttaacacttacaccactctacttcccttttccattttctctgcagaattcctattcccaaacacatctcaaatggtatattaatgttttaataaagcttttagaggaaaatgccccgaagttccatgaagaagaacaaattcgagagctacatgggtcaaaagttcgctattgacgctagcatgagcatttaccagttcgtttgtattgttgtgggaagaattagaactgttattctgactaatcagccgtggtgtatctacgttttcctatgattttcataaatacaattccttttcaattcttccgagagacataaggcatagcaaatcattgaatgaattggttgattctcactgcctgaccgaagtgtctcttgaagccttcagagattgtgctcttcaggatattgaacctgggtgaatatgttggagttaacgatgattggatggatgtcatctcttcccaagggttgtccttactttcagttgatgcttgctggttctcaggtgacagatgatggattcgcgactcctaaaggattgctcaagtcttcaagcattgactctcagttactgtgaccaattttcagaatatgggcttaagcacattagtggtctttcaaacttgacttccttgagtatcaggaagagcagctctgtcaaacccgatggaatgcgtgctttctccaacttatttaatttggagaagttggaccttgagaggtgttcagagattcatggtggatttgttcatcttaaaggtttgaaaaagctcgagtatcttaatattggatgctgtaaatgtgttacggattcagacataaagtctatctcagagcttataaatttgaaggagttacaaattttcaacagcagtattactgatattgggattacctatttgagagggttggagaagcttaccacattaaatgttgaaggatgcaatattactgctgcatgtatagagttcattcatgccttaacttccttggcatgcttaaatctcaacagatgtggtctctctgatgatggatttgagaaaatttggggacttagaatcttgaagaggttaagcctggcttttaacaggaacacagatgcatgcttagttcatctgaaagatttaacaaatttggagtatttgaatctggattcttgcaggataggtgatggcgggctagctaatttgacaggcctcacactcttgaaaagtctggtgttgtctgacactgacattgggaacagtgggctgcgttatatatcaggtttaaaaaaactggaagatttaaatgtgtcattcaccacagtaactgataatggcctgaaaaggctgtcaggattgacacaacttaaatcacttaatctggatgcccgacagattaccgatgctggactagcaaatcttaccagtctgagtggattgataacattggatctctttggagcacgcatttcagacaatggaactacatttttacgatcgttcaagaacttgcaatcccttgaaatatgtggcggaggattaactgatgctggtgtaaaaaatataagagaaattgtctccctgacacagctaaacctgtcccagaattgtaatttgacggataaaactttggaattgatatctggaatgacagcactgaggtcgctaaatgtttcaaattctcgtataaccaatgaaggactacggcatttgaagcctttgaagaatttacgcactcttaccttggagtcttgcaaggttactgcttctggaattaagaagcttcagtcaactgatcttccaaatttgataagctttcggccagaatagaccaggagaatgagagaattctgttatgtgtctgttgaacaattatctgtacatatttatggctactgtctggatagttgaaaaatgtacataaaatgacatgcaagaatgtaattatgcctttattttgcatgtttgtatttccccgtctaagaaaaattgtacataaatctttttctttctccctttctcctctgggtaaatatgcctggtggggctatctaaagtatgtgcataatgtaagtgtaataaagatgtttggaccagagtgatggtgctcattattatgttcgtatagtaatgaattgtatttgactgagaatagagttgttccaagaatttgctgttcatttctcgttcttcttctggcatcacacttacaccactcttcttcccttttcattttctctgcgaattcctattcccacacacatctcaaatgggtattaagggtttaacaaagcttttagcggacaatgccccgaagtccatgaaggagaacaaattcgagagctactttggtcgcaagatcgctattgacgctagcatgagcatttaccagtttcttattgtcgtgggaaagagtggaactgaaatgctcactaatgaggctgggtgaagttaccagtcatttgcaaggggatgttttcgcggacaatcagacttctagaagctgggataaaacctgtatatgtttttgatgg

SEQ ID NO: 30035 - DNA, 127 bp, Glycine max
  Clone ID: PAT_MRT3847_127122C.1
ctcgagccgccctggccatgctttttttttctctgggaatgggacaacaatgtaaagataatatgcacatccacttccacattgcaaaaatatctttacattgtggaagtggatgtgcatattatct

SEQ ID NO: 30036 - DNA, 388 bp, Glycine max
  Clone ID: PAT_MRT3847_127123C.1
ggtttatgcaattttttctggaatttcgggttgcttatgatttggggctgatttttcacatggttttttttcttcattcctatctgctgatttgtatgttaacatcaatgtttatgctctcttgttgtcttatgttgtttggttgctgagaaattttaggagaatttcataaacctagaacttttaatgtatttattgttgttactgttaaaaccgctttttaccttaattttcaatatgaagagacaagttttctgcaccccagagtgtataacccgtgtttagttcactatattggattagttcttgtttatttgagagaaagttgagattcttagagtttttcttctgttgggcctcttagtcactgttttgttttcgttttggt

SEQ ID NO: 30037 - DNA, 444 bp, Glycine max
  Clone ID: PAT_MRT3847_127124C.1
aaacccccaactaatttattttccccgcccaaaaaaaccccaaacaaattcgaagaagggggtttttaaaaacacgtttggctttcacaggggtaaacaaaaaaaaaagctaaggctttaaagggggggaaacggggggcatcgcacggggggaaaaaaagatcttgaaaaaaaaggcccccaccagggtttaaagggaaagttaaacccccaaatttggggtagcattcccaccttatggaaagcttccccaattccgggaaaaaaaagggaaacaaaaagggctccatagccggggggaaaaaagggaagggaaccttggatggcccccctaagcaaactgaaaagggacccgatccgccgaagtgggggccaacttggcatttgccccaaggggatccccttcactaggggaaaccacctggggacccgggggtccacccg

SEQ ID NO: 30038 - DNA, 732 bp, Glycine max
  unsure (1)..(732): unsure at all n locations
  Clone ID: PAT_MRT3847_127125C.1
gggccggaattcccgcgtcgacccacgcgtccgtctctcttctctctctctctcaaacaaacctgcgcgcttccacttatcatctcttcccacgctttctgtttcaaagagttcagtccaacagcacaaattctttgaaatgggaacttgactttctttggcacattccatgcgtatatgatcaaaagggtatcgacaaattaagcgatggggggcgtttgttctaggaagagagatcagcatgttgttgaagatgatttacacagaggagtctcggggaggtattgtagaagtggcagcacaaaatggttgagggccagaagtttgcgtgctaagcccaatcattgtgcaggagggggaacatgcccctctctcatggatctgtgcataaagaagatgcgtgaggattttcataaatacaattccttttcaattcttccgagagacataagccagcaaatcttcaatgaattggttgattctcactgcctgaccgaagtgtctcttgaagccttcagagattgtgctcttcaggatattgacctgngtgaatatgtttggagttaacgatgattggatgggatgtcatctcttccaaggggttgtccttactttcagnttgatggttgctgggtcctcaagtgacagatgatgggattgcgactcctaaaggatnngctcagtcttcagcattgactctcagttactgtgaccaattttcagatatgggct

SEQ ID NO: 30039 - DNA, 884 bp, Glycine max
  Clone ID: PAT_MRT3847_127126C.1
gctttaacaggtctgagtggattgataacattggatctctttggagcacgcatttcagacaatggaactacatttttacgatcgttcaagaacttgcaatcccttgaaatatgtggcggaggattaactgatgctggtgtaaaaaatataagagaaattgtctccctgacacagctaaacctgtcccagaattgtaatttgacggataaaactttggaattgatatctggtattttcttcttgccttcaatactttatataccccttgaaattcgggtaatcagaattaaatatgaaaggaaagaaaaattggatggagaatattatttgtttgtattggtttttcattcctctccttgccctgtaattggatcgagtaaaagtttgttctgctttgattaacacatctttgtatatctttatatctgaatacaggaatgacagcactgaggtcgctaaatgtttcaaattctcgtataaccaatgaaggactacggcatttgaagcctttgaagaatttacgcactcttaccttggagtcttgcaaggttactgcttctggaattaagaagcttcagtcaactgatcttccaaatttgataagctttcggccagaatagaccaggagaatgagagaattctgttatgtgtctgttgaacaattatctgtacatatttatggctactgtctggatagttgaaaaatgtacataaaatgacatgcaagaatgtaattatgcatttattttgcatgtttgtatttccccgactaagaaaaattgtacataaatctttctttccccctttctcctctgggtaaatatgcctggtgtggctatctaaagtctgcgcataatgtaatgtgtaataaagatgtttggacc

SEQ ID NO: 30040 - DNA, 572 bp, Glycine max
  Clone ID: PAT_MRT3847_127127C.1
ctctctctctctctctctctccaaacaaacctgcgcgcttccacttatcatctcttcccacgctttctgtttcaaagagttcagtccaacagcacaaattctttgaaatgggaacttgactttctttggcacattccatgcgtatatgatcaaaagggtatcgacaaattaagcgatggggggcgtttgttctaggaagagagatcagcatgttgttgaagatgatttacacagaggagtctcgggggaggtattgtagaagtggcagcacaaaatggttgagggccagaagtttgcgtgctaagcccaatcattgtgcaggagggggaacatgcccctctctcatggatctgtgcataaagaagatgcgtgaggtgcatgttttttgccagctttgttagttgtttcgctttggttatttttgtcttcacatggttatttgctccacacatgttttgagttataacaggattttcataaatacaattccttttcaattcttccgagagacataagccagcaaatcttcaatgaattggttgattctcactgcctgaccgaagtgtctcttg

SEQ ID NO: 30041 - DNA, 385 bp, Glycine max
  Clone ID: PAT_MRT3847_127128C.1
ggctcgagctccctgtctctcgctggctcttgattcaactctctgagggaaactccaaatatggggactaccctatgggatttgctcctgaaactaccacattgttcaccagctatgcacgatcttcaatacgaatgcatcctcaatataagagatcagactatcgctgttagagcggctgaaatggcatgggaaaatgcgtgaggctttggaaagtatgatcaatggtgggcccacgcattagcagcgctgtagctataggacatgagatacactattgttgggtgctcatcacacgagtgtgaacgaaacacgaaatacccgaacgccctcagggctttggctgtcttaaggtgttgtggagaagggcggtgcactatgtgga

SEQ ID NO: 30042 - DNA, 138 bp, Glycine max
  Clone ID: PAT_MRT3847_127129C.1
caatttgcttttaccaagctaagggttaccttgaggcgcggggagactccctataaggactgcccattaagctcagcctatcaactcgaatagccgtattgtacctggacctagccaaggctaccacacagacacagg

SEQ ID NO: 30043 - DNA, 309 bp, Glycine max
  Clone ID: PAT_MRT3847_12712C.1
attttatccaattgaaattttaaaaatgactggggttaacttaagaattcaattattggaattggattagttaacaatttaattgggttggtcggatggttttaaaaaaatggaggactaacttccatttcttatttattattggattaacccatccacttggtttgttatcgaacatttttttttggattcaaaagtttttccggaaaaaattgaatttatttttattttccaatcaaatctaataactttggtcccggaggttcctggcctggaaaaaaaaatttgggtcctaatcgcccaaataat

SEQ ID NO: 30044 - DNA, 276 bp, Glycine max
  unsure (1)..(276): unsure at all n locations
  Clone ID: PAT_MRT3847_127130C.1
gaccggaccggaagaccttgttcgacccacgcngccaaataagcagaagaaaaaccagcaaaggcagcaagggggaattaaaccaagaacccccagaaccccacggcaaccgaagcgaggaggaagcccgaagaagccaaaccccacaacgacggcgaaaccagcgacaaaaaaaccgaaccacaccaaagcgacaaaaaagaaaagccaaaccagaacggccacaacaccacaagccccaacgaaagagacaaagcacgccgacggaggaaagac

SEQ ID NO: 30045 - DNA, 112 bp, Glycine max
  unsure (1)..(112): unsure at all n locations
  Clone ID: PAT_MRT3847_127131C.1
tnnaaacaacggggccatgcagggcatttcattgttccttaacaaaatcaagcaagatgtttacattaacattgttcttttctaaaaaaaagttccaccatggtgttttgga

SEQ ID NO: 30046 - DNA, 408 bp, Glycine max
  Clone ID: PAT_MRT3847_127132C.1
ccctgtgttccgccacttatgaatctattgattttacaatcatgccggacgaacagcaccagatggagttaaggccgacggcggagcctccaaaccctaccctcagcatgccggtcccatccgcacgaacggctacatcgtcaccaaacgacgaccctgcaaggttgcggaggatgcaacttgcaaaccggcaaagcacggtcacgctcagcgtcactctggagaaatcgatatacctactgccacgaaacctgaggatattgggccctcttgtcacaactgtgacgttcctcatctgaatcgtactggttacaagctcattcatcttgctgaagatggatgtccgagtccgcttactgaaagtggtcacactaacgatgaccttatgctatccactgaagagagtct

SEQ ID NO: 30047 - DNA, 683 bp, Glycine max
  Clone ID: PAT_MRT3847_127133C.1
ccacgcgtccggaattttattgcccttgatcgaataagagatattagttgactggaaaaaaaaaaaaaaaaaaaaaaaaaaaaaaaaaaaaaaaaaaaaaaaaaaaaaaaaaaaaaaaaaaaaaaaaaaaaaaaaaaaaaaaaaaaaaaaaaaaaaaaaaaaaaaaaaaaaaaaaagggggggccgttttaaaggacccaggtttacttccccgtccttgcaacgtaatattttttttttggggcccccaaaattaatttcatgggccggggtttaacaacgtcggaatgggaaaaaccctggcgttcccaaatttaatccctttgaaaaaaatccccttttccccagttgggttaataccaaaaaggcccgccccaatcccctttccaaaaatttgcccaccctaaatggcaaatggaaccccccttgtaccggccctttaaccccggggggtggggggtttccccccagggtaaccgttacatttgccagccccttagcccccgttcttttcgtttttttcctttcttttttccccactttcgccggttttccccgtaaagttttaaatggggggctccttttagggtcccaattaagggttttacggcccctcaacccccaaaaaaatttgtttagggggagggttcacgtaggggcccatccccctaataaacggtttt

SEQ ID NO: 30048 - DNA, 207 bp, Glycine max
  Clone ID: PAT_MRT3847_127134C.1
gctaggtttgattgggattcgcactttgaggaggggaaatcgcaagggaatctagattccagaatggacgctcaaccacagcttagcggtgatgattctcagtgagtgggtgagacatgtgcgacactaaggtggaggtgattcactcgtggtctgatccatcatccctcactccgagtctcatgtattcattttcttattcggatg

SEQ ID NO: 30049 - DNA, 760 bp, Glycine max
  Clone ID: PAT_MRT3847_127135C.1
agaagttgattaaatctaacttaattattgatttgcctttgtgtttttagaaacaatgattggggaacagtcttttactatgtttatgttccgaattttcgaaattttggaatgttggctagttaggtgccgtttcctggattagtagtgtatttagtttctatatggaaaatttgtgtcagctttctggccaataaaaaaaaaaaaaaaaaaaaaaaaaaaaaaaaaaaaaaaaaaaaaaaaaaaaaaaaaaaaaaaaaaaaaaaaaaaaaaaaaaaaaaaaaaaaaaaaaaaaaaaaaaaaaaaaaaggggcgcccgttttaaaggacccaagtttacttccccttccttccaacttaaaaccttttttttagggcccccaaaattaaattcattgcccgccttttaaaaacttcggaactggaaaaaccctggctttcccaaattaaatccctttgaaaaaaatccccttttccccagttggctaaaaaccaaaaaggccccccccaatcccctttccaaaaatttgcccaccctaaatggcaaatggaaccccccctgtaccggcccataaaccccggggggtgtgggggttacccccagggtaaccgttacatttgccagccccctagcccccgttcttttcgtttttttcctttcttttttccccactttcgccggttttccccgaaaagctttaaatggggggctcccttaagggtcccaattaagggttttacggcccctcacccccaaaaa

SEQ ID NO: 30050 - DNA, 281 bp, Glycine max
  Clone ID: PAT_MRT3847_127136C.1
cagagggtggtgcattgatgggaagctcgatgaagctcaaaggctcgctggtgaaatgtatcgtggcggatttgaccttggtgtaggggcttacaatgccatgcttgattgcgtgtgcaagctttgtcgcgagaaggatccgtttcagcttcattcggaggcggcgaaagtgctggtggcgatggagtaccgcggcgttccaaggaatacggagacattcaatgtgttgataacgaatttgtgtaaaattaggaagactgaggatgctttgggtttttttc

SEQ ID NO: 30051 - DNA, 431 bp, Glycine max
  Clone ID: PAT_MRT3847_127137C.1
gaagaggtaagcttttcatcagtaacagttcttcaagcaaaaacatgtggagtgcatcaaaatttgttgtgttgtatccattaagtactgatgaaatctgtctgtgctgaacatcaatatatgatatgataacacaataatacctgttaagatactcaaaagtcacttaatcagagcttaaaaatcctttaaatatgctgagatggctcagatggtagctaatgatacattgatgttttgatctcaagagtaattgtaaaccataatagctgaagtgacagattcatgaatgcacacttcagaagttattttatatattattatgtactataagagggcaagccttggcgcagtggtaaagttgtgccttagtgactggttggtcatgtttttgttccggaaacaacctctttgcatatacaagagtaagg

SEQ ID NO: 30052 - DNA, 194 bp, Glycine max
  Clone ID: PAT_MRT3847_127138C.1
tctacacgtacgtacatgggcgacctggtgcgtgagtgcatttttgaagctccaaacactgagtctcattacactgacaaacactcgcggatggggactggctctctccatcctgaaaacaggtgagcgtggtcttgttaacaaagtcaaacagaatgtgcatcgtcgcctattgtgaatgacctactatgttc

SEQ ID NO: 30053 - DNA, 187 bp, Glycine max
  Clone ID: PAT_MRT3847_127139C.1
gtcttgctgcggtcgtaactgtggttgctgaagctgctgctaattctgcaacggctgcatatgctgcaaaatgtacccatacttgatctacaccgagagaaccaccaccaagaccttggtcatgggagtgtcaccacttaaggatcaattcgatagtgccgaaatggggtttcccgcctcgaaagag

SEQ ID NO: 30054 - DNA, 306 bp, Glycine max
  Clone ID: PAT_MRT3847_12713C.1
ccgcctacggctgctaggaattctggtggagtgctcccaatgctgaaaaatgttgggggggaacatatcggcctgagcagtatggtaccagttcgcaatgatatacttctggggagcacgactggaacagtggtggtagggtggtagacagtgacagacacggtttgcgaactgaaactctagaccacctacttaatttgggtcaggagcggactatgtatgtagatttatactatggctctgacctgatgctcatgggcgaccttcggatgatgatgcatgtattgtcgcattgaaggacaacag

SEQ ID NO: 30055 - DNA, 500 bp, Glycine max
  Clone ID: PAT_MRT3847_127140C.1
gcgcgacgatccaagtgcagtacccctccgatatcatggccaagaagctgtggaagattctcgaggcgaaagcccgcggagagggcggcgggtgctcgatcacctacggcgcactcgaccccgtgcagatcactcaaatggcaaagcacctcgaaacggtctacgtgtccggctggcaatgctcatcgaccgcgtcgagctcgctcgagccgggacccgatctggctgattacccgtccaacaccgtccccaacaaggtcgcccagctcttcaccgcccagctggtccatgaccgcaaacaacgctggacgcgcagtcaggcactggccaagggcgaagacctgcccccgcccatcgactacctgcgcccgctcatcgcagatgccgacacggggcacggaggtctcacggctgctatgcgtctgacaaagatgatgatccaggcgcttgctgctgttatccatatcgaggaccaggcacctgctacgaagaagtgcggg

SEQ ID NO: 30056 - DNA, 498 bp, Glycine max
  Clone ID: PAT_MRT3847_127141C.1
tgctgtttgcgagaagacgacggatggggtggacggccatttttgtggaccttttgagaaaaggtgactaatgcaaaaaaagaactggaagaggtgctttgttgattctgagaggaattggacaagtgggggaagatagcgacatcgaggtgacaggtggaaggtctatcgcattcttgtgtaaggtgttttttaacacactgcatgtggaattcgaccatagaacgtgttagtgataagacttcaatggtggtagttcctctggggaccgtacagattaccaatgcaaagctaatggaaactatgtcgaagaccggggtgagagtaagtcatcacatgagcgcaaataggatagtggtcggaccaggaatggatgcatgtttggttgcaggtactggagaggtgttgttaccactcacacattccattcgtttaggccctggcttttgaacttctcctgtctttttattttgataattttggaacttcttcctgaaa

SEQ ID NO: 30057 - DNA, 661 bp, Glycine max
  Clone ID: PAT_MRT3847_127142C.1
caagaagcattgaaacttgaaagacacaagagtgagagaaggaaaaatagcagaagaagatcatggctgattgggggccagtttttgtgtctgtggtgctcttcattctcttgactccagggttgctgatccagattcctggtaaaggcaagatggtagagtttggcaactttcagacaagtggagtgtcgatattggttcactccatcctctactttgctctcgtttgcatcttcttgatggctattggagtacacatgtacactggttcctgatcccataccatcttttgtatacacatacaaacacattatttataattcatttcttcttggtttaaattgtggggtttatttattttggtaaaaacaaaatcctgtgcattcatatgcctgtgagggaatgacaaacattttagttttcagcgtatctgtcaagtaaaacatcatggtctgtttgttccaatgattctaatatttgttactaggaataggagtgttacaaaagggttgagactttacacttcagtgtttgtatatgtcattacgtattggcttcttcgatgtattttaatttatgatactactaataagcatttagatgccaacattttaggtcagattcccatatatgtcataataaggttttcattattgtcaag

SEQ ID NO: 30058 - DNA, 703 bp, Glycine max
  unsure (1)..(703): unsure at all n locations
  Clone ID: PAT_MRT3847_127143C.1
cctttattcatcttcacatatatctctcagctggctgaggcataattcttcttatccgtcaacatacccacattgtcactcacgacatcgagcagcgctcattcacactctttaaccctaccttacccatttagccgagatccgcaatgccttccatcaaatctttcgctgccgtcactttggtcgctttgttacctgctgtgcggggacatatggccatctgggatccatgcgtatatggagtcaacgatggggacagtaacgtccctcccctcgctggaatgtctttttgaccaatggtggttccacggtaaaatcaatgataaaccatcctcagtctgtacactcgttccaggcggaaacatcaactttgaaatctcatgttccaaatggcacacttcactcaccggaaacacttggaaccgacgcttgtccaaatgacgctggcgcttatcacgctggaggaactacaggaagtcaatccggttggggggggaataacgaggacaatttacctcggttgcgcccttcgccatcgcttacaagtcgaaccccccgagatgtcaaacctgaagactntacagtcttttcagttcaagaacgatgtgttcgacaaaaaatacttcctttgccatccccgccaacttgcccgcttgccccagatgtgaatgcacttgcgcatgggttctgcaaagaagaattc

SEQ ID NO: 30059 - DNA, 1395 bp, Glycine max
  Clone ID: PAT_MRT3847_127144C.1
ccaattcaaatagtaccatataatactaccaccgtcccttgaatctccccacctttcttctttcttcctattaaaattttcaacaaaaacatcatcccagtaaggaacctctcttccctttccaagttatcattttttcaacccatccccatcttcctccccctttttcatttcctccaatcccaaacaaaacccccaaaaaatgcaatcattcccccccatccccactctcgcatgcctttaccttactttctttacgtcactactattcctactacctttttctcgtgccggtttactctccgaaccggtgagcgaccccaaccagcctctcgaaccgggctccaacactgtccccgcctttcctgtccagacccaggccctaacctgccgcctcgacctctccgacgagctcttcggcggcgtcaaggatgcctgcggcaaggacctcgaccggagccgctgctgccccgtcctcgccgcctggctcttcgccgctcacgcccgcaccgctcttgatgtctccgccgcccctcctccgtcctccgccgaccttccgatgatgcccgacgactcccaaaaatgcgtcaactcgctccaggattcgcttctctcccgcaacatccgaatccctcagcccaacgccacgtgcgacgctattctctgcttctgcggcatcagactccaccaaatcacgtcgcttacctgcaacgctgcgtttaacgtctcgctttctcacaggaacgccaccccaaccgctgcggttcgcaacctcgagaataattgccgtaactcctcttacgctggttgcaccaaatgcctcggtgccctacaaaaggtgaaggggtataaaaacgagacgaagggaagtgatagggtgaagaaaatgttcaaccgggactgtcaactgatggggttaacgtggcttctggcgaagaacaaaacggcgtacatacctaccgtttcggcagtgctgcgtgcgatgatgtacagtgcgcaccctcacgagtccaagtgtagtcctgaccaagagaacatgccgctggccgttgattcgcttcagttcgagagcggccacgcgccatctcggccgtccaagttttgcgtgacggttttgcccctcgtggttctcttattattttccgcttttgtgtagaaagggtgggtccacttgctggggtttagtgtctgtcctcttctctttctctctcgctatcacgtgaagctgagctactcgacaaaacatgcaaacaaaacatggtgggttgtttttgtttctgactagagggagggtttttctcgctgtaaattttcagagtccattgacatgtctgtgtgtacatgatgctagtgcggtagtgtcaccaacttacatagaaagaagaggtttttttt

SEQ ID NO: 30060 - DNA, 1061 bp, Glycine max
  Clone ID: PAT_MRT3847_127145C.1
gagcattataattttgaacattcgattttgaacatcttgaaaatatggctcatcctccacctcgtgagaggactataaggaaaatggctgcacctgatttcacttatgaaaacttgtgcattcaataccctgatgaggatgtcccatatgttcttaaaactggactgatccacttgttgcccaagtttcatggtcttgtaggtgaagaccctcataaacatctgaaagaattccatattgtttgctccaccaggaaacctccagatgtccaagaagatcacatctttctgaaggcctttcctcattctttagagggagtggcgaaggactggctatattaccttgctccaaggttcatcacgagctgggatgacctcaagagagtattcttagaaaattttttccctgcttccaggaccacaaccattagaaaggatatttcaggcattaggcaacttagtggggagagcctatatgattgctgggagagatttaaaaaactatgcgccagttgccctcaccaccagatttctgaacagcttcttctccaataattttatgaaggactcagtaacatggagagaagtatgacagatgcttccagtggtggaacccttggagacatgacccctgctaaagccaggaatttaattgagaagatggcttccaactcccaacagttttgtgccagaaatgatgctatagtcattagaggagtgcatgaggtagctacaaattcacggacatcatctgaaactaagaagcttgaaggcaaattggatgcgttggtcaacttggtaacccagctggccttgaatcagaaatctgtacctgtcgcaagggtttgtggtttgtgctcctctgctgaccaccatacagacctttgcccttccatgcagcaacctggagcaattgagcagcctgaagcttatgctgcaaatatttacaatagacctcctcaacctcagcagcaaaatcaaccacagtaagcaattatgacctttccagcaacagatacaaccctggatggaggaatcaccctaacctcagatggtccagcc

SEQ ID NO: 30061 - DNA, 277 bp, Glycine max
  Clone ID: PAT_MRT3847_127146C.1
ggctcgaggagaaacgcaaagaagaaagaaccttttagcatttacgccagcaacaaccgaaaaggggaagggggagaacagaaacggaaccccccgcaaagaacatgggaaaaggaacaaaatcaacagctctagcagtgggcaggatctggtcagaaccggaacgaacactactgcgaacacaagaaggaacaggctcccaattggcggaccacgcccaaaactaacgagaacgtgactacaatgaagaagaacagaggacgggcacagtgggaac

SEQ ID NO: 30062 - DNA, 1499 bp, Glycine max
  Clone ID: PAT_MRT3847_127147C.1
aagatgcttattgaatagagtgcacatttgtaatgtactactaattagaacatgaaaaagcattgttctaacacgataatcctgtgaaggcgttaactccaaagatccaatttcactatataaattgtgacgaaagcaaaatgaattcagatagctgagagagaaaggaaaggttaactaagaagcaatacttcaatggccacccttgttgttcataaccaaacttcttctgctcaagatgctgaggctctccaacaggctttcaaaggatggggggctgatgacaaggccattatagcaatactgggtcacagaaatgttcatcagaggcaagaaatcagaaaagcttatgaggagatttaccaagaggatctcatcaaacgccttgagtccgagatctctggtgactttgagagagctatgtaccggtggatgttgcagcctgcggatcgtgatgctgttttggtgaatgtggcaatcaagaatggcaccaaagactaccatgtgattgcagagattgcttgtgtcctatcagctgaagagctcttggcagtgaggcgggcctaccaccgccgctacaagtgttccttggaggaagatgtggcagctaacaccaccggcaatcttcgccagcttttggttggattggtgacctcatataggtatgagggtgatgagatcaatgtaaaattttcacaaactgaagctaatgttcttcatgaatctgtcaaggagaagaaaggcaacagtgaagaagtcatcaggatccttactacaagaagcaaaactcaacttgtggcaactttcaaccgctacagagatgaacatggaatttccatcagtaagaaattgttggatcaaacatctgatgacttccacaaggtgttgcacactgctattcgctgcatcaatgaccataagaagtactatgagaaggttttgcgcaatgcagtcaagaagtttggaactgacgaggatggactaagccgtgtgattgttacaagggctgagaaggatctgaaggacatcaaagagctctactacaagagaaacagtgttcaccttgaggatgaagtgtccaaggaaacttctggggactacaagaagttcctcctcactctcttggggaaataagactaagttaagaacttgctctaagggcatcttagtaatgggtttttgttaattatgtcattggtttctggtttgtgcgatttcattatgttagttttccagtaagagtttgttatatctggttaagtttttgagacaacaagaactcgtgtcttgtttgagggcatgcgtgccatttcttagggttgtgttggtacttggcatgctcttattagaggacctctatgctgcgtgtttcctttggattatgctattacctcacctggtttgcttttaatgaaaggttgataacaaatttatatgtacttgaattcttcattttaaattctaatcagcagaggccccggtagcaagttcttctatat

SEQ ID NO: 30063 - DNA, 211 bp, Glycine max
  Clone ID: PAT_MRT3847_127148C.1
actcaggctcttcgcagcggctttctcggtttctttcatcttctcgggttgtcgatatcttcagatcgtttaaaaagactcacaggcataaagatgctgaaccaactgaatttgaagaatcacttgtacaggcattgtctgatctacaaaataccaacaattatctgaaaagtgatctgaaagatttatacataaactcatctgttcaaat

SEQ ID NO: 30064 - DNA, 2080 bp, Glycine max
  Clone ID: PAT_MRT3847_127149C.1
ctcatacaaatgcttgaatatgtggaaatgtgagggaatccagttggagtttgacagtgaatgtaataatatgctcatagaaactatgaagcatatgatggaaacaagtgtcgtgctatctgcttcctcgtagtacttcattgagagagacatggacactgtactaagtactacgctgctactcatgttggcatgctccatcgtgcatgttcttcgttcactacaagcaagaatgagaagaaaatcaaactacaatcttccaccaggaccctctcttcttcaccatcattagaaactctaaacaactctataaaaagccacagcagacaatggccaagcttgccaaaacctatggccccataatgcgtttcaaccataggccaatcaaccaccatagtaatcacctgaaatagatgccccacacccaagcaaaccaataaactgacttcaattagcctcgcaccgaacaaacaccgttactccatccgtcggacaaccacctcctagacagctttgttcttctccctccttcacccctctggcaagagatgagcaaacatctaccagggtacacttgattttccgcacagagcccttgacccaagcacggaccttaggcgcatgaaaatgaaggagcttcttcaacgatctcagcgaacgaatcctcaacagcgaagtggtgcaacattggaagaagcagccttcatggcatgcattaacttgttatcgtacacgtttctctctctggtattttgttccctctgtaggtgatggcgagctacaaacacatagtggggactctgttgaaagctaacggggacacccgaacttggtggattattttccagtgttgacggctatttgcatccacaagggatcaggaggctacaccaccaactacattgacaaagttgttcgatggtgttcgatcccatgtattgatgaacgcatgaggaggaggggagagtagggttatgccactagccatgacatgttggatatcttgctgggatatttctgaccagagtagcgagaagattcataggaagcagatcaatgcatttgttccttgacctattcgttgcggggacggatacaacagcctacggcttagagagaacaatgacggaactaatgcacaatccagaagccatgagaaaagcgcaagaaggagatagcagaaacaataggagtaggaaaaccggtggaggaatccgacgtggcaagggctggccatacctgcaatcagtgataaaagaatctctgcgaatgcacccaccagcaccactgctactacgacgggcggggaaaaccggacgtgcaagtctgcgtgctacacaggtcccacaggggacacaggatcctcatcaacgagtgggccataggaaggaacccggccatatgggaagacgcacataggttctcgccagaaagattcttggactctgacatagacgtcaagggtcgccacttcaagctcacgccgttcgggagcggaagacgaatttgccctggctcccccctcgccgttaggatgctgcacaacatgctcggttccttgatcaacaactttgactggaagcttgagaacaacattgaccccatcgacatggacttggatcagtccctcagggctatccctgttctcgtaaatgccaactaattcaacatcatctgtatgttggcatgccatcccatgtacctttttctcagaaacagcaaacagaagcttgattctttggtttgaatgtttctcgtatgtgctagctttgatccagcttgtttcttccagcctgggtttaggataaataaataaccaggctttgagtaacatgatgatcatttattatgtttattaattgttgcagaagataggagtcgtctgagtgtagctttaatctagctagtttgatttggcttgtagtgcctctttgtgttagcctttgtatgggatgtaaaacagtgtcctcttgaaggaaagaaaaaaaatagttgttctctattgtttctaaaaaaaaaaaaaaaaaaaaaaaaaaaaaaaaaaaaaaaaaaaaaaaaaaaaaaaaaaaccgtattaagt

SEQ ID NO: 30065 - DNA, 418 bp, Glycine max
  Clone ID: PAT_MRT3847_12714C.1
accatatcaaaatgacacgcacttcgtgattatctatataccgggaatggttgtggggagggattattagcggaacgagatagctgccaccgccaaagcgtctgtggagaaatgccaggccagtacggactacgttgtttagaactctgggtgcttaaatcaccgcctttttgcccgcgaaaccgacatgcgccccacacagatcataacgcattctatttggaaagcccatgatattcttgataggactttgaagtcttgagaggccatattggctgactttgatcaacagtctggggcgaaaccaaaaaaagtccaaggaccacatgacgatgggaagaactgttttggtacaatagatcagctgagaagaaacattaaattttttggtgataacaatgtgtctatgaatgatgat

SEQ ID NO: 30066 - DNA, 931 bp, Glycine max
  Clone ID: PAT_MRT3847_127150C.1
tacggctgcgagaagacgacagaaagggggcatgaatcctttggggtcttgctatctgcttcctcgtagtacttcattgagagagacatggacactgtactaagtactacgctgctactcatgttggcatgctccatcgtgcatgttcttcgttcactacaagcaagaatgagaagaaaatcaaactacaatcttccaccaggaccctctcttctcaccatcattagaaactctaaacaactctataaaaagccacagcagacaatggccaagcttgccaaaacctatggccccataatgcgtttcaccataggccaatcaaccaccatagtaatctcctcaatagaagccacccaagaggttctccaaacccatgactcattattctcggacagaacaaaccccgacatcacaacctcgtacaaccacaaccgttacagcttggtttttctccctgtctcacccctctggcaagaactaagaaaaatctgccacggaaacttgttttcggcaaagacccttgacgcaagcacggaccttaggcgcatgaaaatgaaggagcttcttaccgatatccgccaaagaagcctcaacggcgaagtggtggacattggaagagcagccttcatggcatgcattaactttttatcgtacacgtttctctctctggattttgttccctctgtaggtgatggcgagtacaaacacatagtggggactctgttgaaagcaacggggacaccgaacttggtggattattttccagtgttgagggtgtttgatccacaagggatcaggaggcacaccaccaactacattgacaagttgttcgatgtgttcgatcccatgattgatgaacgcatgaggaggaggggagagaagggttatgccactagccatgacatgttggatatcttgctggatatttctg

SEQ ID NO: 30067 - DNA, 795 bp, Glycine max
  Clone ID: PAT_MRT3847_127151C.1
gttgttcttacatcattttttcgatctaatttgcgtttcatggtaaagcatagtcgaacatcacaggcttcttatgcgaaagattttcatgaattgattcaagtatatggtagaaagcaaaatatgactggaaatgaaaagtatttcatctcagatgattcagatcatgtttctaatagctctgatgccagtagtatctctgatacagacagtgtttcacctgatgacaaccaagatgattatgcttataaagatattaatataatgcactcaggaaacacagacgattttttaacaggaagagaattatctgttgatttcctggaaaatgatgttgatgcctttcagagtgtggataactcagatgttacctgtggtgaattttgtgtacaacctgctcacaaggaatgggaattatctgagacaattgatccaccaaagaaaccagaaggaagacttaaatttcttaaaaagcctttggaacaaggaccaacaatcatatatgtacccaccagaaaagaaacactgagaattgcaaagtatctatgcaagtttggtgtgaaagccgctgcttataatgcaggacttcccaaattgcatctaagaagggttcatgaagagtttcatgaaaatactttagaggttattgttgctacaatagcttttggaatgggtattgacaaatcaaatgtcagaagaatcattcactatggttggccacagagtttagaaacctactaccaagaagctggacgggctggtcgagatgggaaattagcagattgcattctgtat

SEQ ID NO: 30068 - DNA, 390 bp, Glycine max
  Clone ID: PAT_MRT3847_127152C.1
ccagttggaggaaccattctgcgtagtgatctattggcaaaaaaattagacacacggcaatcttagagccagcgttgatttgcagcgcactcattgtattataggaatgattaacatggcgggcacggctggccttcctgagaatacaggaatatcattgccctgtgctatgaataaaccttttttggggcgcgcccgtactgatccctactccatcagctctcaagactgtgaattgtggaatcctgcttgcgcaaaaacaatgactctctcatttaatccacacccgagtatctcatgcatggagtttgaaatttctgaatcgtactggatttcattgagaaatcatttgtgccactggatggactgccccccccctgcacgatgctt

SEQ ID NO: 30069 - DNA, 281 bp, Glycine max
  Clone ID: PAT_MRT3847_127153C.1
ttttgttctcctgcataagactacagaacggggatcgggcacaaagccatggcttctttggcaagcttaactgatgttcaaccatcgtactgttaaaggccttgctctaactaagatctcttttaagacctctcggcaaagtttcagacccaaaaatttcaagaatgctgctgtagtaacaaactatggtgacaacaatgcgtactctcatttcgaggatctaggctccactactggtcaatgggacttgtacggatcctatgcacctttaccctacaacc

SEQ ID NO: 30070 - DNA, 298 bp, Glycine max
  Clone ID: PAT_MRT3847_127154C.1
ctcaggaaaacgcaaaacccgcgcggcaccatttcatctcattgcccgctcaatatggcagagaacaaattacgccagcgcatggacttcgcactctacgagctacaactcaagaacaagttgaaaccagactcatcagtcatggaatccctaaagcagttctccaactgacttttgctcctactacgactgacaaaccctatccctacactaccattacaatccattacgataccaagaagtaccacacttctaccagttcttcatgcatgcaacatcgagtacttcatccacagga

SEQ ID NO: 30071 - DNA, 820 bp, Glycine max
  Clone ID: PAT_MRT3847_127155C.1
tcgtggactcgtgggcggacgcgtgggcaaaggggtaacctttttcctccgttgaacacggtggagaaggtttctccactgccttttcacacctcaacttcccgcggtcttcacttgcttctcgaacttcttcctttttgaagttattaattaatactaggttgttattcggactctacatgtcttaggaacaggagcacagccaaccacccctctgtttcaaagcacaacctaagatgtctttgtcttggtttcgaaagcaaagaaacaaatgatagcagttataaataagttgatgtgggtagcatgtgtgctgatttctgtggcatttattgcaatgtcatacataattgttggggatcataaagagttggctatagcagccacagttctaggaacagtgattatggcagctacgttgggaacactctgttattgggtgattactcaccaccttgaggcctcaagattgcgaagtcttaggacaacaatgagcagtaggcagtcaatgtctatgtcaatgatgtcaggatcggagaatgagtataagacagtgtatgcaatctaactttgatttctaccatttcagagttctccctccttttttggccagttacactaacattgatgtagggtttgtttcttaggaaaacaaacattaactaacatgcctttgcagaacacaggctaaagatgtaatcatagtttccttgataagtgaatgtgtcattctaaattgtaagtattggatcatacctattttgagtattttcaagttagcttcatcagaaaataaataatatacatacttactgccgtt

SEQ ID NO: 30072 - DNA, 2369 bp, Glycine max
  Clone ID: PAT_MRT3847_127156C.1
ggctcgaggtttctatctctttttgacgcgcacttgaagatttgaagtacttccacaaagggggtaacctttttcctccgttgaaaacgaggggaagaaggtttctcaactgcccttttcacacctcaacttcccgccttcttcacttgcttctcgaacttcttcccttttgaagctattaatactagttccttattcagtttctagatatcttaggaagaggagcacagaaaaccacccctctctctctaagcacagcctaagatgtcttactcatgatttcctgctatctcaaattgctgctacaagcaagaagaagtggagtctgattgaactctgaagtgggcagaatgcgttttgaaatcaagtggaccttgagtgcttaccgtagtgtacaattttgaattgctttgccaatattgctgggtgaattgatacagtgggaggcaatcaatagttgtaacttggatattcttaaggaaatgtaaacttgataagttggagctccaccaaagtagtaaagatacattccaaagatgatgaagaaacaattgacaggcatacggggtgattctcccctacaatcggcaatccgagttggaaatttagaattggttctggaaatcatctctcagagtccagaggacgaattaaaggagttgctttcaaaacaaaacaactcttttgaaactgccttatatgttgctgctgaaaatggtcatcttgatatactcaaggaattgattagataccatgatattgggttggccagcttcaaagctagaaatggatttgatgcattccacattgctgctaaaaatggacacttggagatattgaaagtcctcatggaggcctttcctgaaatttcaatgactgttgatctgtcgaacactactgtgttgcatactgctgcagcacaaggacacattgaggtagtaaattttctcttggaaaaaggtaatagcctggtaactattgcaaaaagcaatgggaaaactgtgttgcattcttctgcaagaaatggctacttggaggttgtcaaggcccttgttgagcaaagaaccagaaattgcaatgagaattgataaaaaggggcagacagcactccatatggcagttaaaggacagaatcttgagttggtggatgagctcgtgaaattgaatccatctttggcaaatatggtggatgccaaggggaacactgcactgcatatagcaacccggaagggtcgtctacaggttgttcagaagttactagaattgcagagaaataaacacagatgttatcaacaaatctgtagaaactgcattagatactgcagagaaaaatggtcgtttggaaattgccaactttatgcaacatcttggagctcaaagtgccacgtctatcaagtcattgactacagatacggtccttgagcacaaacaaatagtgagtgacataattagtgaggttcataacacagctggaacacacaattaaaacgcaaagacgtatgcaaggtatagcgaagcgaatcaacaaaatgcacactgaggggcttaacaatgcgatcaactccaacattgttgttgctgtccttattgcaacagttgcttttgctgccatatttaatgtcccgggccagtatcctgagaaaccaagtgaactctctcctggaatgtctcctggggaagcatatattgctccagatattggattcatgatattcataatctttgattctactgccctcttcatatcattggctgttgtgattgtccaaacatcagtggttgttattgagaggaaagcaaagagacaaatgatggcagttataaataagttgatgtgggttgcatgtgtgctgatttctgtggcatttattgcaatgtcatacataattgttggggatcataaagagttggctatagcagccacagctctaggaacagtgattatggcagctacgttgggaacactctgttattgggtgattactcaccaccttgaggcctcaagattgcgaagtcttaggacaacaatgagcagtaggcagtcaatgtctatgtcaatgatgtcaggatcggagaatgagtataagacagtgtatgcaatctaactttgatttctaccatttcagagttctccctccttttttggccagttacactaacattgtaggtgtttgttgcttagtaaaacaaacattaactactgcaacaaaagcatgcctttgcagaacataggcaaaagatgtaatcatagtccacttgataagtgaatgttattctaaattgaaagtattggatcatcatgcctattttaggtattttcacattagcttcatcagaatttgaatattatacaaatttactgtttaaaa

SEQ ID NO: 30073 - DNA, 205 bp, Glycine max
  Clone ID: PAT_MRT3847_127157C.1
gtttgctccagatgggtactactgaaaatgaagagagaggatgggagactgtcacatacatgaatgcagggagactcgtgacgcacgatgattttgaaggacacactggaacaatccgatgttggcgacttggaatggatgaccagaaggagaggctgaggtcactgagaaatgtgtgcgagttacgggaccgaagaggtggctg

SEQ ID NO: 30074 - DNA, 430 bp, Glycine max
  unsure (1)..(430): unsure at all n locations
  Clone ID: PAT_MRT3847_127158C.1
atctttttcaagtgcaaggttaatcaggttccagagaagaaaaaaaggaaagagtcttaaagttgaacatgaacaaagctgttagtgtttatggccttttgggactttttgcaggtgttattttcagctcatgcatttgtgggactcccaggaattttaaggtggagaatgattccggtctaatggtcaaaattgaaacatcactcaacaacagtacaataccaaaaaccatttacaatggcttcctcattcttgcaatcaagtttgtgcactacctattttcaaggggatacaagtcagctgctccttatacgatgatccttccattttgggtggcatttacactatcagtttcctatatgtcangcttatcattaagctgagacttgatagtaaaagcgatatccaagactgataactgcattcaaaa

SEQ ID NO: 30075 - DNA, 682 bp, Glycine max
  Clone ID: PAT_MRT3847_127159C.1
ccacgcgtccgtgttacttttttgttgttctcttgacctctgctctgcaaacgatgaatttggagtgggaaccactgatgtctttgatgatgtcctaactctttccggcttcagctaccctcatggcagccctcctctgccagatgcttagactacccttagaccctatgatttgctctacatcagagttgatataccaccctcgagctctggagtttccatatcattgaactcagatgtagaccttgatgtttcaagagttgaaagggtgccaaaaagctcactgccactgatatgctttagagtccgctttaaacacttctctgaaggattcagctgtcaaaggaataaatggtcttgatgttgagcagtgctttcctatggagaaaaatatcactatgaaattgacaaatgaacagatatctccaggtgcttggtacattggtcttttcaatggcattggagcttcaagaacacaatcaaagatgattattcgaggttcagcatactccttcagtgccaatataagtgtggaagcatgctcgaattcaatgatgaggggggagttatgtaacagtacagtctatccactttcatgcacagcatctgatgtctataattctatgaaggctacagtgaagaagccaatgatggaaaatgcaatgacctgcaaaagtaactt

SEQ ID NO: 30076 - DNA, 506 bp, Glycine max
  unsure (1)..(506): unsure at all n locations
  Clone ID: PAT_MRT3847_12715C.1
ttgtccacgcgtccgtttgagttggaaatgtgggggtctgttgataattcatctgacgatgagcaaattgcctgtgatcccgagatcactttccgaggccgctccgttcgtccattgaaatggctttccgaagtgtcttcttgtcgttaccttcccgagggtgaaatggtcacagtctgtcagatcctcatcagtcggcttgcatatatgccaaacactgtctccgtacaatcccctgctaccatttgcggcgatattcatggacaattttacgacctaatgaaattgtttcaaattggaggtgacattctcgaaaccaattatgtgtttctcggtgactacgttgaccggggctattatagtttggaaacgatctcttacctaatgctgctgctgctaaaatacccggacagaataacacttctccgcgggaatcatgaaactcgtcgagtctcacatcagtacggcttttacgatgaagtgccacaaaagtacngaaattctgt

SEQ ID NO: 30077 - DNA, 275 bp, Glycine max
  Clone ID: PAT_MRT3847_127160C.1
ggctcgaggctcggtgcatagttccgaatctcttggtcttctgatagtgaagggagcttgaggtttatttaattcaatgcggtccgagaaaagcgctgagagagagaaaatagaaaaggtgaaaaatcgaaagtcggacacgcatatggaagctagggttggtatggcggtggctggcggcggtgaccacaagctggcgcaagctgctgccttgcatactgcaactgtggctgaactccttgtggcacatgccttcgccccgttcgacagtgcct

SEQ ID NO: 30078 - DNA, 604 bp, Glycine max
  Clone ID: PAT_MRT3847_127161C.1
atttcctccctccatgaatcatttcagtaccaaatgttatgtcatttccaaactcctctcttcatctatatatatatagagagtcatggttacagtccaaattaagcaattcaagtccaagaattctctaagcatcaaaaaagaattaagcataatgggtttcagtttgcgtggtcttcaaaggcgtgtggatgtcccaaagggccgtgtagcagtgtatgtaggagaaaatcaaaagaagcgctttgtgattcccatatcatacttgaaccaaccttcatttcttgaggtgttgaatcaagctgagcaagaatttggatttgatcatccaatgggtggcctcacaattccttgcaatgagaatgtcttcctagatgtcacttctcgcttgcatagccgatagattaaggagctcaattaacatagatatatcatgcaagtgtcaatattgataaactaattatatagttttgtagaaatgacaaagtctaaccttgtagactttttcttctttccattttgttcccccaaggaaacggaatgatgtaccgattgtactctaacagagaattctatgaacaaagattattagactttttcttcg

SEQ ID NO: 30079 - DNA, 351 bp, Glycine max
  Clone ID: PAT_MRT3847_127162C.1
ccaaaacgttaaaaaaacaaaggttatcatcttgctgaaaaaatagaagctaaccctagaaactacatgactgccaagcagattagaagcgatgaacgcggtatcacaacatatgtgcgaccgttcttccctaagccagatcctcaccatatgcaactacgatgcgtaagttgaatagggcccccaagcgaggagccacatccaagaccaaatctttcacctttaagaaccaagacgaatggcgaatttacatgaccttctttattaagacacaacatgaacgaccgtgatggatgcttccagcggttcttcgattggatccacaccggatcaccatttgcgaactttgta

SEQ ID NO: 30080 - DNA, 662 bp, Glycine max
  Clone ID: PAT_MRT3847_127163C.1
gggacagctttgaaaaccttctatttagtgtttgtcgtttccgggagcttactggcacctatccccaaaatataactgttgtaagttatgatttcaaggaaaacagatttgcgcatctacaccgatctgcgatcggctttccagaatcaaggttcttctatgccggcactcctgctacatcaaatgcaaaagcagctgctctaaaaggcgaggaattggtcagaactcagttccaagtagatccatatggatgtcgaggctcactttatcacaagaaactaaagcgtgacccttttcatcggtcaattccttatcccaatgggtgtcctgaaattgaaggcttgttcagatattgtggaccaactccttatcctggtgcactaccgtgggcacagtaaacatgacatggtcagattatatcattgtatactaacaaaatagagatattagatgccaacattgcatgaatttgttgataaaatgatgtgaagattaaattttgttctggagagaagatgataaattgtgtaaatcaaaatggtgttgcatgtttgtgtgaggagatatatttaattgaaaaaagttactcaaattgacggttgagataaaaaaaaaaaaaaaaaaaaaaaaaaaaaaaaaaaaaaaaaaaaaaaaaaaaaaaa

SEQ ID NO: 30081 - DNA, 507 bp, Glycine max
  Clone ID: PAT_MRT3847_127164C.1
cttattttcttgtcaaaatgactcctcactttaataatctatggggtattgttggtggatccgtgaagcctttaacttgatttataaataattgaaacctggcttctgaggtgtaggttagcactactttggctgctgctcaagcacgactatggaatgtgagggaagagagagaccagtttgaggaagcaaacaatcagatagttgaacacctgaaaataaaggtttgaggttctatttttcatggctgtgaattgttaaatcaatgttcctgaatagtgttactctcagcatcctgttgtctgaaattttgacttgaccttgattcacaggaagatgaactttcaaaatcaatcagctcatgtagggttgaagcagatgttatcaaaacctggattaattttctggaagatacttgggcacttcagatgatcaaatcccattcccttaccttacttgttccaattcccaacgcttcttcaaatcttttatttcattcttcagacc

SEQ ID NO: 30082 - DNA, 571 bp, Glycine max
  unsure (1)..(571): unsure at all n locations
  Clone ID: PAT_MRT3847_127165C.1
atctatatttgaaaatatttggactttgtaggatgatagaatgatagtattctcatccgnaaactttgggataatgctatggattaagaggtgagtagcttaagggagagtgttgattacaatcggaagaaagttctaagtcatgagtatctaatagaagaaatgcaaaaagaattgaaagcccaccgtgcagagattgtgaacgtgagcaaagtggtattccgtaatcctatggatccaaagaagtaatgtgttatcctattgttccttaatcttattgttaatttgcttgtaagactttccctatgctttgtaagattttccgtatgctttataagactttcccttcgattgtaagacttctctttgattggtaatactatggttgttcagtttgatatttccactatatctcttagtagtaatagcacgaggtatttctcatatttcagttaacaatatcataaaacatcctaatacattaattgaatccaaacatagttttacgaagtactttgcggaaaatccctaaaaaccaaagtccaaaaggtacaaaggaaaaaatcaaaaa

SEQ ID NO: 30083 - DNA, 450 bp, Glycine max
  unsure (1)..(450): unsure at all n locations
  Clone ID: PAT_MRT3847_127166C.1
cgttcgatcagcgaattcgtcaatcaaaatcgcgaccacagatcttgcgccatcattcaagacgataccaccccaccatcgccgaattcaaaatcaatcgtctgacgaataccggctataaacttagaaccaacaaacaccgacaacatgattattcctatccgctgcttctcgtgtggcaaggtgacgggcgatctctgggagaagttcgtcaagcttattgaggaggatggccttagcgatggcgacgccctggatcaactcgggtgcaagaggtactgctgccgacgcatggtcatgacacatgtcgacctcatcgagaaacttctcaagtacacgcccgatggtcgtaactacaagaagatcgagatgcaacanacacaccaggacgcttaaattcgggttttgacctacatatatggngcgttaagaagatggccatgcgttctg

SEQ ID NO: 30084 - DNA, 1393 bp, Glycine max
  Clone ID: PAT_MRT3847_127167C.1
caatcagccatggcaggcattcgaatgatagatatagccgtcaacttcaccgatggcatgtttaagggaatctaccacggcaagcaatgtcacgtctcggatattgcaactgttttgaacagagcttgggctgccggcgtcacccgaattattgtaactggtgggtctctagaagaatcaagggaggcacttgccattgcggaaacagatggaagacttttctgcacagttggagtgcatccaacacgttgcaaggaatttgaggagagtggagatccagaaaagcatttccaggctcttttgtctttagctaaagagggaattcagaaaggaaaggtggttgcaattggagaatgtggattggactatgacaggcttcatttttgcccagcagagattcaaaagaagttcactgctggagtcacccattcatttactggtagtatggatgattgcattaagcttctctcatttgataaaatgtacataggcataaatgggtgctctctgaagacgactgagaaccttgatgttgttaagggtattccagttgagagaatgatgattgagacggactcaccatactgtgaaatcaagaatactcatgctggaattggttttgttaaatctacatggccttctaagaagaaagagaagtatgatcaagagtgcattgttaaaggccgcaatgaaccttgtttagttaagcaagttcttgaagtggttgctggctgtaaaggcatcaacgatgtgagtaacctcagcagaacattgtaccataacacttgcaggatatttttccctcatgacttggattctgctgctgatgctcttctagctggcggtaattctacataaacatacttgctagtgacttggccttttctttgcttatattcggagctgttctgtagaccaaatcctcattttcttgagaaagcttggtagtgtccttgaagtggaactgagtttgtctgtcctgtccctttttgggaagtgacaactggcaaatcaagaactgatttccagagtttaatgagtgtacgacaaattattacattgtattttcatgagattatcctgtaaaaaaaactacgatactgaaagccaagagggatacgataagccgcagtgatgattaatgtttaggatgtcacgactgggagtaaatcaaaggaggctgattggtggtccatctgtagtctcctaaagtgcctcaaaacattgttgtttctttacattttttttttaaagtcagttgagttcaactgttcaagtctggatttagatgatacaacggtcagtgtgtcactcgtaacatcatgccttgtgagaacatgttattcaattaaacgtgccataaaatctgtcggattgaaaggaaaagtataaa

SEQ ID NO: 30085 - DNA, 783 bp, Glycine max
  unsure (1)..(783): unsure at all n locations
  Clone ID: PAT_MRT3847_127168C.1
aagtacgagaagacgacagaagggggagtgcatccaacacgttgcaaggaatttgaggagagtggagatccagaaaagcatttccaggctcttttgtctttagctaaagagggaattcagaaaggaaaggtggttgcaattggagaatgtggattggactatgacaggcttcatttttgcccagcagagattcaaaagaagtatttcgagaagcaatttgaattagcatatatcacaaaactgcctatgtttttgcacatgcgagcagctgctgcagatttctgtgaaatagtggagaaaaataaggacaggttcactgctggagtcacccattcatttactggtagtatggatgattgcattaagcttctctcatttgataaaatgtacataggcataaatgggtgctctctgaagacgactgagaaccttgatgttgttaagggtattccagttgagagaatgatgattgagacggactcaccatactgtgaaatcaagaatactcatgctggaattggttttgttaaatctacatggccttctaagaagaagagaagtatgatcaagagtgcattgttaaaggccgcaatgaaccttgtttagttaagcaagttctttgaagtggttgctggcttgtaaaggcatcaacgatgtgagtaacctcagcagaacattgtaccataacacttgcaggatatttttccctcatgacttggattctgctgctgatgctcttctactggcnggtaattctacataaacatacttgctagtgacttg

SEQ ID NO: 30086 - DNA, 104 bp, Glycine max
  unsure (1)..(104): unsure at all n locations
  Clone ID: PAT_MRT3847_127169C.1
cggctcgagcttttaccgtgtaggccattgccttattttcttaactaacaaccgagagtgcgcatatctgtatatgtatatatacctatacctatncctatatc

SEQ ID NO: 30087 - DNA, 488 bp, Glycine max
  Clone ID: PAT_MRT3847_12716C.1
ttcggctcgagtacggctgcgagaagacgacagaaggggaccgtcgcacccattattcattgcatcatcgttcactcgcatcagaatcacaggttttatttcttttgctcctcttaaatataataatattaataatttagaataaatttgtcattctcgtttcttgggattggattttgctgattatatccacctaacccttttgtgattgttttctggtttgtgatcagaacaatcttggatccgattgtgcgttatttgattgtctcttgtcaatttaatttcatctatttgtgatcattgatcaatatgtgtcggtctgtttattttattattttaatatatgtattgagaagaatctgtaaattgaagctttatgttttttatttggctcgtcaataatttgaacatgattttcatgtctgatcatttgatattatgattctctttatcatccgcgttatttactttttacgtacactcactgg

SEQ ID NO: 30088 - DNA, 3148 bp, Glycine max
  Clone ID: PAT_MRT3847_127170C.1
tatgtatcaaaagcacaagggctatagctcagttaggtagagcacctcgtttacacgagcgccaatgtttttttcagaggagtttcatcttgtaatcaaaagagtttatcttatagtaagaaatcgatgtcttactccattttaaggaacaaaacaagagaacaatagcctgacaaagggtttagccataaaatcgaatccatcattgatttgagatattgataaggtgaatactcatttctcgtcaatgctaggcataatgcgggtatagggacctaaaaaagattatcttttcttcctatcttatgaactttaaggtgtatgaagtgtcatttcctatcttagattttaattttagtaggtagataaagagtccatttaacttaagttgatctaggccagaagcagacctacgtcaagataatccttctttgaaacactttggtagtgctcttagattgtaatccaaataaaaaaatcagagcatagggaatcatctctttattcttgctgtcaagaaaaaagatggtggactaactaatatttctatcagttaatgaaaaagctcaatgcaaaaaaaatgcacgttgggtttttaaaacaattcaaatcatttagataataatcagtttgatttgttttaccaaaaaaaaaaaaaaaaaaagtacgtatagccctaatattcctacagatactaataatatttacatttacgatcgaatagatctcattactaatactatactattactaaattaagaatagaatagaaagaatttgtaaatttctatcggaacatattaatattcgatagaataatactaatagtagtatattcagatactagtctaaaaaaatttatactttattatttaaactttagactaataattaatactaatccggtatattttccacattcagaggagtacgtttatgtttcttctttacgaatatgatattttttgggcatttctaataatatcaagttttattcctattttggcatttctaatttctggaattttagccccgattagcaagggaccagagaaactttctagttatgaatcgggaatagaaccaataggtgatgcttggttacaatttcgaatccgttattatatgtttgctctcatttttgttgtttttgatgttgaaacggtttttctttatccttgggcaatgagtttcgatgtattaggggtatccgtatttatagaagctttcatattcgtgcttatcctaattgttggtttagtttatgcatggcgaaagggggcattagaatggtcttaattcttgactatttagacaattagattagacaattagaaaaaaatattgagacaattatgaattccattgagtttcccttacttgatcaaacaaccaaaaattcagttatttcaactacattaaatgatctttcaaattggtcaagattatccagtttatggccgcttctctatggtactagttgttgcttcattgaatttgcttcattaataggatcacgattcgactttgatcgttatggactagtaccacgatcgagtcctcggcaagcagacctaattttaactgcgggcacagtcactatgaaaatggctccttctttagttcgattatatgaacaaatgcccgaacctaaatatgttattgctatgggagcatgtacaattacaggggggatgtttagtaccgattcttatagtactgttcggggcgtggataaactaatcccagtggatgtctatttgccgggctgtccacctaaaccggaggctattatagatgctataacaaaacttcgtaagaaaatatctcgagaaatatatgaaaatcaaatgagttctcaacgagagaatagatgttttacaaccaaccacaagtttcatattggatacagtactcatactggcaattatggtcaagaattattctatcaactgccatctacttcagagataccatctgacacattttttttaaagtacaataagaaatagcaattcctttttttttaatttcatcataatgtaaataggaaagactaataccaaattcattaaaaaattcaggagaagcaaaaaaatgcaaggtcgtttgtcttcttggctagtcaaacatggactaattcatagatcattgggtttcgattaccaaggaatcgagactttacaaataaagcccgaggattggcattccattgctgtcattttatatgtatatggttacaattatctacgttcccaatgtgcctatgatgtagcaccaggaggactattagctagtgtatatcaccttacgagactagagtatggtatagatcaacccgaagaggtctgcataaaaatatttgtcgcaagaaaaaatcccagaattccttccattttctgggtttggaaaagtgcggattttcaagaaaaggaatcttatgatatgttgggaatctcttatgataatcatccgcgtctgagacgtattttaatgcccgaaagttggataggatggcctttgcgtaaagattatatcgccccaaatttttatgaaatacaagatgctcactaaatgataaaaataagaaactaatccaaacttctacaacccctgatattcaaagaatatcagtacattctcttatagatcagacaaagtaattgacattaaatcagtcagaataatggaagtatcattcacatcttattatgtatgtgagaaatcacaaaattcataaataatatagggattaaaatgggataggggttctttaagattctaaaataggaacaatacttatttattatgagccaagccgataaaataaataggatgaactacaaaaattctttatcatgaactatttaacgtgcacatcaacatcaacaattatatggccacgaaaaacaaatagtaagatcaagggagatgaagaaaacggaaaaaaacataaagaaagaaaagggctcgattctttttgtgtaatccaaagaagatgaattttgaatattcccactccacccatgaactctattagagtagacttttaggtctttcaaccaactaattaaaccattcgaatattatcgaaatagaaagattttttttgtaccccaaaaaaaaaaaaaaaaaaaaaaccaaaaaa

SEQ ID NO: 30089 - DNA, 249 bp, Glycine max
  Clone ID: PAT_MRT3847_127171C.1
ctcagacctaggaggctactggaggtctttttctgctgactaataccctgggaggtctacggcggtaatactgtagaatggatgaagctatttcaagacattttgtcgtacgtaagtctcctaagatatcaaaggtgcctagcgttccgtgatattgccacaatggatctcatgcgcaatctataagattaattttggtggttatggacagggatgctattgtaatacacgacatgaaatgtcatacaa

SEQ ID NO: 30090 - DNA, 280 bp, Glycine max
  Clone ID: PAT_MRT3847_127172C.1
gaaagtgctatgagtcagctcggcgaactatgtgaccatgttcacattcatgcacagaaaacccttccttccagttccagcagctcggacgatctatgtgctgcaagcggatcaatgcggtgtgtcgagcacgtagatcgtcaaacacgtgcccttccaccaagtcactggcgttcactgcacaagggagctggtgctaacgacatgtggtaaccaaactgaatacctgtgcaacatatcggccgtgaaccagccgttctacctccgaagacggtcggac

SEQ ID NO: 30091 - DNA, 664 bp, Glycine max
  unsure (1)..(664): unsure at all n locations
  Clone ID: PAT_MRT3847_127173C.1
ccacgcgtccgcacttagtagcgatcctttcgaagccctttccttcatcagaaaacacaaatcctgataaaaagaagaaattgcacgttctaaagtgttaggaacgtcaacattcagaagcacaaaaatttcctcacccttttcaaatttctgtcacccttttactagaaagcatgcaggcatcaacttttggtgttgaagaagctacttttggggttcaaagtcgtagggggttggtgggttttcgagagttcagaaatgggagtgttctgagacccagaagagtgtgcatggctaataataacattgatctttgtgggttaaggcttggttctgtcactatggaaactgaactaactaatgctagagttggttttggtggcatttttgggccctccgttaagcccagatcagtgagggttatggcttctggtttgtatgctgttgctggtggctttgatttgtttggtttattggctattgtgaatttttctggactgcatttgccaatgatgtgtatgtaatgtgcttggttcatgttgatgccctatgtngttgttttccttaatgatgnnctgtgtttggatttcgcggcaaagttgcttttttatgtttgattttgtttgttgttgaaccaatttgatgttttctagtaggactctgc

SEQ ID NO: 30092 - DNA, 610 bp, Glycine max
  Clone ID: PAT_MRT3847_127174C.1
gaaaaaatggcatttggcatatatgccgtgaattgcacggcaagcatcaattccactcttctccaataatcctttccttattcccttggtgactctcaccaacccactttgtcttttctttctccctcgacccttctctttcaccatatggagacaactaccacttccgcacccaacactcgacgccgctctttccgctgctccttcgtcacacgctgctgtcgctgcttctgctgtttctactccttcccttaaactaaacaaatgcaccttcttttttttcaatcatcgctgctcaacacatgaaagcagaggaacaacagttacaaccttcgaagctttaccttttaggttctcggtcaaatccacgccatcaatggggagtgggaaaagcagagacatctcaaggttctctactgctgcaaagtttacgagtttattttaaaattagggtttttaactttggatttggggattttattgttttttagaattgttctattcaagcttggattacgattatcttgttaggatgttcagcttaaattgtggtcttgacgaattgtcttgtaaaattgttgattgaaaaaatggcatatatgtttgaccc

SEQ ID NO: 30093 - DNA, 963 bp, Glycine max
  unsure (1)..(963): unsure at all n locations
  Clone ID: PAT_MRT3847_127175C.1
ctctcttctcttctcacaccgcgtataaaacacattcacaccatcaatcaaatacaccgaactagtttaataagtctcagaaacactcactcactcgattcttctcaaaccgtcaccgtcgaggctatgcccaccaacgaagacttccagagtgtttcaaattgctatgtgttcaagagccgattgcaggagtatgcacagaaggcggggctgcccacgcctgtctatgaaactattaaggaagggccttcccatgaaccttctttcaggtcaacagtgatagtgaacgacgttcggtatgattctttgcctggatttttcaaccgcaaggcagcagagcagtcggccgccgaagttgctttggtggagttgatcaaatctaatttagttaatcaatccatcactcaacctgttcattcacatgaaacaggattatgcaagaatttacttcaggaatatgctcagaaaatgaactatgcaatgcctatgtatcagtgcaagaaggatgaaacaccaggccgagcatcagtattttcatgtacggttgacattggggggaggcagcagcaaaagcaaagaggaagcagaaatagaagctgccagaactgctttataagctttccagtccaagtagtctttatcgagtataaactttttttgttgtttgcacggtttgggagtagttgatttttttttaatgcttcttttccttcgtttgtttgtactttgcacccttttgctgctcctcttctctagtagtcaatagtgcactatagtggagcagcagaatggactggccccgggctgctatgggattgaaatataggagtggtttccaatagcagccgttgaagccacagttgctgcttttcacatgctatagcggcattaccatgatatgggtttcaaaacctcttttttacccttgaaagntgaaaccgtgttgtcaaaaacataatagga

SEQ ID NO: 30094 - DNA, 1461 bp, Glycine max
  unsure (1)..(1461): unsure at all n locations
  Clone ID: PAT_MRT3847_127176C.1
ctcgattcccttcaaatcgtcaccgncgaggctatgcccaccaacgaagacttccagagtgtttcaaattgctatgtgttcaagagccgattgcaggagtatgcacagaaggcggggctgcccacgcctgtctatgaaactattaaggaagggccttcccatgaaccttctttcaggtcaacagtgatagtgaacgacgttcggtatgattctttgcctggatttttcaaccgcaaggcagcagagcagtcggccgccgaagttgctttggtggagttgatcaaatctaatttagttaatcaatccatcactcaacctgttgttttttccagcatgaaacaggattatgcaagaatttacttcaggaatatgctcagaaaatgaactatgcaatgccaatgtatcagtgcaagaaggatgaaacaccaggtcgagcatcagtattttcatgtacggttgacattggggggattctatatattgggggagcagcaaaaacaaagaaggaagcagagataaaagctgctagaactgctttattagctatccagtcaagtgcatctcatgcttccgaaaaccaggttggccatccacagttgaccgtccttccatgcagaaaaagggcaacaagttctgttgccatagctgatgagaattcaaatcccccaaagcctaagaaagcgcggtttaaaaggaagtcttccaagaggaaaccctctagagataagatgggccaaattcatactgaaaacttgggcattggagcaaatatcaatcatgaggtagaaacacatgcaagtgttaatggtgaatctggcgtccttgaaaagaaaactgaaacattcacttcagaagccgccaacaattttgagaatggagtatcagttaattatcaagagaaagaaacattggctggggagagttctcttgctgtcaatagccaggaaggaatttttgagaatgggaagtcaacagaattatattccaaggagaacaatcttgtgactgttgttacagaactatcttctgtgtcaaatggaggcataccggaaacaggtgtggaggtgaacaaacagcaatacaatggagaaatggtttctgaccattgtgttgtggggggttgaggcttattgaattatttaaattggaaggtaagattcaagcaatggcagtcatttattagtgttaggaaccttgaggcttccaactgtttttctttgttgggtgtcactcaattaggaaagtaaaatacaggatgtgatgattctcatagcatgttgataatttttatcgtttaactgatgagggtgttttaacaccatttatttatgttgtattagtatatttgagttatctgctccatttgtccgcgacatgggacatggatttggacgggtttgagtttatattaaaaacgctgtttcctttcagagtttaaattttaaaaaaaaaaaaaaaaaa

SEQ ID NO: 30095 - DNA, 490 bp, Glycine max
  unsure (1)..(490): unsure at all n locations
  Clone ID: PAT_MRT3847_127177C.1
ttgacaaaagcagcaacaaagttttcttaaggtacatacaatttttacgtgactttgaacagtgcagcacgtatgtatggggacatgtcgtgcttgcttttttatatagagagatgtacaccgtcaccgattacaaacttaaatcaatcggaggtatgtgcatcttaatccaaatgtggacatgagaacgatgcacgactttggctccgaagaggattcctcccgtaatagaaaataaaccacttggacacaggttagttgtttaaaaaataaaatttcatttgaaaataattaataatataacgcgtcgccacgggtgatttcatatttttttataagtggttgcgacgtggaaatcaacatattagcaatgatgatctgatagtttttcgtcgcaaattggatatcatgaaacgatatgaggtaagaagatcgtaatgtatntaataaataaaatgtcatgtttaagtgaaaattaacaattggatta

SEQ ID NO: 30096 - DNA, 305 bp, Glycine max
  Clone ID: PAT_MRT3847_127178C.1
gcattggctataaaataaaaataagggggctgaatgaaatggccggggaagaaattgaacacttccaaggataccagctttataatacaacacatgaccatgcttatggatttagtgtagagctcacccggaaagaaaacacctatgctatggtgtggtcattacccaaaatttacttggtgcgaactcattttctagctggatgaccatacctctcgatgacgtgtgggggcgccctccgcagatgcttacgaagacctgacgtttaagggtccaggactgattggcggcggtggccatttgca

SEQ ID NO: 30097 - DNA, 245 bp, Glycine max
  Clone ID: PAT_MRT3847_127179C.1
tcttacttcactgcacgtcttgctttactctttctctctcttacatgccggaatttcctctctctttctctctccggagaatagaatacataccctaaatcttcgctttgctgacacacacattagatcctgactacaactgctaacgttaggaattatgcgtcactagcgatgtccgattttgattccacaacgcgaaaccgtccggggtcgtggtcgccgtcgccgggcgccaagggaattcc

SEQ ID NO: 30098 - DNA, 736 bp, Glycine max
  Clone ID: PAT_MRT3847_12717C.1
ctttatatccactttggccctcactggaaaagtagtagtagtggtacttaaacgccattaaaagttatgtgatctttggaagtatgatacaggacttaggagtttggacaaagtacaaaaagcagataaaatgatgcccttactgtggaaaggtgagtgaggtgggaactgaagttaaaaagagaatctgaaagacatgcctctgtctttgggggttatatagggtttttggctgagcagcaatttgttgttgttgtaatcaatttttgaagaaaagatggggaagacagcagcttccaatcctgctttgcaagtgtctgtttcatttggtagatttgagaatgattccttgtcttgggagaaatggtctgctttctccccaaataagtacttggaagaagttgagaagtgtgccactcctggatcagttgctcagaagaaagcttactttgaagctcattacaagaacattgcggctcggaaagccgaattgctggcacaagcgaaacagatggagaaagattctcctagatcacaacgtcaaaatggtgaagatctgagttgtaacacttgtgggactgatgcagaatgtgatatgtcccctactccgggttctagtgaaggggttaaccacgaaaccaattcaattggtcacattgttaggactgatgtgagtactttaatggaggctgttgcagtttcaatagattatcaaggttcatcagttgagggagag

SEQ ID NO: 30099 - DNA, 367 bp, Glycine max
  Clone ID: PAT_MRT3847_127180C.1
cccacacgtacgttgacacgtgggctgagggatttggcctattgcatagaagaactgtgaaccatatctactgattgggatggattctatatatatttggtaggggtgtatgtctttccgtcgacacaccgactgaaggttccttttttcgacctagtacacttattggtgtagctggttcatctgtcactgatagcttgcctggttatttccgtgccaaatatacttcatacgaccgatctatagtagtgacggccgccaaagctatcagaccagcgggtgttaggcttatactatatgcctctaatgcccgcacattttgtcagaaatatggaaactgagctacattggcggttcacaagatctt

SEQ ID NO: 30100 - DNA, 330 bp, Glycine max
  Clone ID: PAT_MRT3847_127181C.1
cgcttccccccacgcttccgaccagacttaagttttgcctcataccattccacccaaactgacttgggcccatccctgggaaaacctggtgaaacctctcccccagactccaaatcatctccatctgtcttaatacattctttaggtaaatccactactgacaatgatgtcagaattcagcaactgcaggagattttgcaagatctacagatgagattagagagctctgaagcagagagaaaacagctacaggtcgaactccaatcccgaagggcagaactggtatgcttaaacaacactgaggatttcagagaacagcttcttgacctc

SEQ ID NO: 30101 - DNA, 596 bp, Glycine max
  Clone ID: PAT_MRT3847_127182C.1
actactactactactacttctttttcactttctctgtctctcacactatctaacaaccataaacgaggatatcactgcatcagtgtcagagtttcatccatggccttttgaggagtgataacagctagaagtgatacagattgataaattgaggtatcaagatgtcttatcgaagggggtctgatcagccaccacaaaggcggatactgcggactcagactgctgggaatttaggagctgacccgatcttggacagtgaagtggttccttcatcacttgttgagatagctccaatcctccgtgtcgctaatgaagtagaggctagcaataaaagagttggttatctctgtcggttttatgcctttgaactagctcacagactagatccgcaatcaagtgggcgtggtgttcgccaattcaaaaccgctcttcttcagcgtctagagaaggaaaatgtcacaacacaagagggaaggaaaaagagtgatgctcgagaaatgcaagctttttatgggccgtactatgaaaaggatattcaagcattagataacggctgctgataaggcaccgcgcacagggtcacaaaagcatatcaa

SEQ ID NO: 30102 - DNA, 768 bp, Glycine max
  Clone ID: PAT_MRT3847_127183C.1
ggctcgaggagagccttcagacgttcagttagaacattttgactttgtttgccccatcggattcggaatctattatcgtttttctgttgcaatatgtcacctatatcacctcactgaagcaccacaatgataatatttaatgtcatttcctttttcttttcttcttcgtaataattaatcaaataaaataaataatcgagaatcgggcttcagtgaagagcgaaaaaaagcgatgaagaagggcgaaaataagggccggactcggagcttcccggtggatccgaacgtgccccgatgggtttgccagaactgccgcaaccctctctgcatcgtcggcgccgattcttacgccgacaaattcttcaacgatccttctcgctccgggatgcaagggtcgtccattcatggtgccagcagtgtgctgagtacgactaaaatggacaattcatatgtggtgttgcccaagcagagacctctggctcagggaaatgctcctcggccacgcggtgatgccgctgcacagcctgggaaggcgatggaggagtcatttgtggttgtgtacaagtctgaatcggggattgatggaaacggggcgcatttgttgggcacaggggctgattctggtggccatttgccgcctcataactctgggtttaattctactattactgtcctgactcgagcatttgagattgccacgacacagacgcatgttgaacagcctttgtgccttgactgcatgaggattttgtcagataagcttgataa

SEQ ID NO: 30103 - DNA, 1888 bp, Glycine max
  Clone ID: PAT_MRT3847_127184C.1
ctgaagtaacgcgcaagataaggagtcgcattcacacactacagactacagaggcttccttggcagatcagagggagagagagagtgtgaaagttggaatggcgaaaaaggcagtgttgatcggaataaactacccaggaacaaaggcggagctgagaggatgcataaacgacgtgtggagaatgcatcgctgcctgatcgagcgatacggtttctccgaagacgacatcaccgttttgatcgacacggacgagtcctacacggagcccaccgggaagaacatccggtcagcgctgaccaggctggtccgatcggcggagcccggggacgttctgtttgtgcactacagcggacacggcacgcgcctccccgcggaaaccggagaggacgatgacactggttatgatgaatgcattgttccttctgacatgaaccttatcaccgatgatgatttcagagaatttgttgatggggtccctagaggttgcaggatcacaattgtgtctgattcttgccacagtggtggcctacttgaagaagctaaggagcagataggagagagcacaaagggagaggaggaacaatctagctctggctttggattttcaagttttctacatcggactgtggaagatgccattgagtctcgcggattccatatcccttcagcgttgcgccacaacagaggcagggatgatgatggtgatgaagctcaaaatagggatattgaacttccggatgggggctatgtaaagaacaggtctttgcccctttcaaccctcattgatatactcaagcagaaaactgggaaagatgatatagatgttgggaaactgagacctacccttttcgatgtttttggggaagatgctagtcctaaagtgaaaaagttcatgaatgttatttttaacaaactccaacatggaagtgatgaaagtgggggtggaatattggggctggtgggtggtcttgcccaagagtttctcaagcaaaagcttgatgacaatgatgagggatatgcaaagcctgcactggagacaaaagtggaaagtaagcatgaggcatacgctggaccaaccaaacgcggccttccggatggtgggatattgatgagtggatgtcagactgaccaaacttctgcagatgcaagtcctgcaggcaacgctgccagtgcttatggtgcttttagcaatgcgatacaggctataattgaggagactgatggtgcaatcacaaaccaagaacttgttcaaagggcaagagagaagctgaagaactccggtttcacacaaaaacctggactctattgcagtgatcaccatgttgatgctccttttgtgtgttgatctcttctcatctgatgactgatgcagagaaagagagaataatgtgtgttgtttatagtatgcttgtgtattgctgtatatgtttggacaatcaaattgaagttagtgtgttttcatacagttttcctatgcatcactattatcaggtacggaccattccctccaacattttagcacttctaatgtctccgctgattacagcattatggtgtatttgctgctacttgaccattttgcggggagaccaaactatcagagcaagttctatgcaccaaaccacagacttcggctctgtaaatctgaataaaatggtgtatgtgaaattattataaaatatatggttaagttttgtatttcctttgcaacattcttgcaactttgtaaggattttaatttgttgaacttagttgtagtatacttataatgttatgtttgtttctctttgttgagtagtctagaaaataggagaaattgactgtatttggatgaagaatttcaaaattttaaagaatttgaaatgcttagaatttaattttcttccc

SEQ ID NO: 30104 - DNA, 181 bp, Glycine max
  Clone ID: PAT_MRT3847_127185C.1
gatggcatattatgccctcaaacctgcccatttcaatgataacaagatctcacagagaatcctaatctctcattcacaaaacttttattcattcatattttcatacatcaacaataataacaatactgactaaccttattaaactaatgccaacataaatttgatcgatataactcataca

SEQ ID NO: 30105 - DNA, 376 bp, Glycine max
  Clone ID: PAT_MRT3847_127186C.1
gcgctcaccagagctaaaccgaaggagaatattcgatgatcagctcatccccagcaaccggtattctagatcgactcggcaaggcctcatcggcagaggagttattttcgctgcttggcgtcgagtacgaccctaagatcgcgaatgtcgcgcgccttcacattttgaagcgcatgggacaatacctcgcacaggagaaatttgctggtgccgcagagccggaaatcagaactcgatgcaaggcgatgctggaacgggcatatggagattccggggcatcgtcaccgaccgacgagcgagcgttcaaggttatgaaggatgccgtctcagactccaagaaggctgaacgagaaaaggtaaggaagcaaccatgttg

SEQ ID NO: 30106 - DNA, 247 bp, Glycine max
  Clone ID: PAT_MRT3847_127187C.1
cgagccaatggatatcatgactgtcttacaacttgtgctcagaaaatctctggcttatggtggttcgccgcgtggccttcatgaaggtgcaaaagtgattgagaagcatgctgcacaactctgcgtccttgcagaagactgtgaccagcctgactacgttattttggttaaggccccttgcgcagaccacaatgctagactgttgacaccccccagcgcaaagacccctgcataatgggctgctttg

SEQ ID NO: 30107 - DNA, 236 bp, Glycine max
  Clone ID: PAT_MRT3847_127188C.1
tttttaagaaaagactcgataatatattaatattcggcgccggggcacaacggaattacacgatagatcctgagcacagggatatcaaaatgtgtcgaaccacgtacatattttctgtccgattgttggggtgggtaaccaacaacaagccctgctttatataggggctcttctggttccataaaaatttttttcatactatgttgcagctgatgcacaaataaagaacctatttt

SEQ ID NO: 30108 - DNA, 445 bp, Glycine max
  Clone ID: PAT_MRT3847_127189C.1
cggctcgagatcacagtgaagcagatgctcctgggaaaagacttgctaaaccactcatattttgtcgatccgagagtgactgtcctatggaaaatggctatgcccgacctgttgagggtatctatgttcttgttgatatgcaaaacatggtggtgttagagtttgaagatcgtaaacttgttcccctcccaccggttgatcccttgaggaactatactcctggtgaaacccgaggtggctctgatagaagtgatgtaaaacccttgcaaattattcagcctgaaggtccaagcttccgtgtcaatgggtattttgttgaatggcagaagtggaatttccgtattggattcacacccaaagaaggtttggttatatattctgttgcatatgttgatggtagtcatggacgaaggcctgttgctcataggctgagttttgtggagat

SEQ ID NO: 30109 - DNA, 351 bp, Glycine max
  Clone ID: PAT_MRT3847_12718C.1
ctgaagcctgtcatgctgctggctgaaattgtatactttaccgatctggtggttgcccaccaggtgggtattctgtttcatctcacgcacaaggctctcatgggcacggtggtatgggagcaatgctcaccgggggcgctgccgaatgccgttgctgcttatggtgctcaccacttctttcatggctcccatggctcctatggccaatgtgctccatatgttgctcacatgccccatggaaaattcatgacccatggaaagcactgtaagttcaagcatggaaagcatatgccagtttggcaagcattgaatgcatgtcaaattctgctagcttgggtgctggttcactaa

SEQ ID NO: 30110 - DNA, 106 bp, Glycine max
  Clone ID: PAT_MRT3847_127190C.1
ggctcgagctcactggtatctgctactatcgccggacttgctcagcacctcggcgctgcgagactcttcatttctcactatctcacttgactggtttagttcttgc

SEQ ID NO: 30111 - DNA, 1607 bp, Glycine max
  Clone ID: PAT_MRT3847_127191C.1
aattgtctgccgataattattcggctcgagctcgagccgatcaagatgagatgcagattgttgctgtgaacatggctgtgtctggtttgtctgctgctaatgagcgagtgaaggaggttgccttgttggggattgaaaatcttgcggatgtgcagattcatgacctgttggaatgtcgcaagtgcaacatgagcttcaatgagaaggatttgtacttgcagcacctgttgtcctttcaccagaggacgacaaggcggtaccggcttggttcgtctgttggagatggagttataattaaggatggcaagtttgagtgccagttctgtcataaggtgtttcttgaaaggcgtcgctacaatggtcatgtggggatccatgttaggaattatgtgaggaaagttgaagattccccgggtcagccaaatgtccaggggacagacgacgagactcttgtgagatggtaaggccctctgaagaaaatgtggtacactcttgggattttaactcctctatatccacagaacaatctttgggttgtttacctgcattcaactctgatgagggaggaaaacagttttgcagtgttgatcatgaacatgataatgtcaaggggttccaggaattgagatttgatgaaatagatattgttgagtatgattttttcctgatgtaccaactgaattgagaaataacacagtggtggaagggacgtatgcatccccagttcagtttgaatcacaagaagttatgctaaatattggtggcagaaatcagcttacaactgtgtgtgtatggtgtggaatagagtttgaccatgatgctgttaattctgaaatacaaccagattctgttggattcatgtgtccagcttctaaggcaaaaatctctggtcaagtcaatgtgttggactgtggatccccgaatgctggctgtctatagactgttactcaagaaccaagtgatgagcaaaaaagcagtcatactgcatagaccaatatatatatatatatatatattaaaaagacaaaacaaaaaaattgaagttactaaaggtgggaaatgcgaggggagagattccaatatgatttaccctttccagaagaatctattaccaatatgatttacacttgttatcgtttgtacttgtcacaactgcagagattttagctttggcagctgaatgatattccaaagatagtaaaaacagatgatctagaagaaaaaagccaggatttggaggttgatggaatactcaattatagattgtatcgtgttattttttattaatttcacctcgtatgttgtattgtcgatttgtcgtacattgccccgttcattcgtatagaaaccgatattcagtactgtattgttttcttttatccacaacactgctgtaatagtgtgcctggggctttcatcttgaactaggtactaaactaacgagtgtattccccaattacaccaaatgaaatatgaacatcaacatatgtatacgctggctgtcgtttacttaggatacaaatgattctcactctataaacatgttcacaaatgacaatttctatttatgttatttaaatcgaaggttaactttgtgacgagtttcg

SEQ ID NO: 30112 - DNA, 728 bp, Glycine max
  unsure (1)..(728): unsure at all n locations
  Clone ID: PAT_MRT3847_127192C.1
nnnnnnnnnnnnnnnnnnnnnnnnnnnnnnnnnnnnnnnnnnnnnnnnnnnnnagcgccttccctccagggccccagttcacctctctccccatgcccccccccccatcccccaaccccccagtggtgcaaggccctgtgtgcatccccagttcagtttcaatcccaagtagttatgctaaatattggtggcagaaatcagcttacaactgtgtgtgtatggtgtgcaatagagtttaaccatgatgctgttaattctgaaatacaaccagattctgttggattcatgtgtccagcttgtaaggcaaaaatctctggtcaagtcaatgtgttattggactgtggatcgccaaatgctggctgtctatagactgtggcaggcaaccccatatcatatttcgtgtgaacttcaagcagagattttagctttggcagctgcatgatattccaaagacagtagaaggagatgatctagaagaaaaaagccaggatttggaggttgatggaatactcaattatagattgtatattggtttttattaatttcacctcgtatgttgttttgtcgtacattgccccgttcattcgtatagaaaccaatatttagtactttattctgctgtaatagtgtgcatagggctttcaatttgaactccgtacataactaatgagtgtattcacaattacaccaaataaaatatgaataacatacagaaatgagttctatgg

SEQ ID NO: 30113 - DNA, 1870 bp, Glycine max
  Clone ID: PAT_MRT3847_127193C.1
tgctcgagcgatgcggcatcgattgtgttcatcagttggagatggagttataattaaggatgggaagtttgagtgccagttctgccataaggtgtttcttgaaaggcgtcgctacaatggtcatgtggggatccatgttaggaattatgtgaggaaagttgaagatttgccgggtcaggcaaatgtccaggggacagatgacaagtctcctgtcagggggcaggatgtgcctttaaggatatcaaagatggatgccctcattgaaattgctcaaaactctattatggaggattctgtcactgaaccccatagttcagctaaactgaataggattcctgcttcagatattgctgttggttacatagatcaagacagaaactctgagtctcctatcagtgaacagaaaatggaagatagcatgactggaaataatgtggatcatgatttggatgaagaattagtagaggaaattgatgatgataaccatgtgattaatgtaaagatggttacttttctggataacatgggtttgttatctgtaaataagcaagatgttaatgtacctgagacttctaaggtaaaagatgatgtgccattgactattgaggaactggatcagtctgggatggatttggatgacaattctcaaaactgtttacttcctttatctaaacatcacataataccagaatctgaaaagagtgaaaattctgtatgtgctaatactaagggtcaatttatacttgatgaaggcatcagtaacaagagtgagttggaatttagtttaaatggcttgaaggatgtacctgttactgttagcactaatgtccaaaagatggtaagaccagcctctgaagaaaatgtggtacactcttgggattttaactcctctatatccacagaacaatctttgggttgtttacctgcattcaactctgatgaggtataaagcataacctatggatgcctttattttcagggttccatatatgttgaaaaactgagggaatagtcctacacatattatatcaaggtcctcttagaaagtgattaatttgaggtcttctgtatgtgcatgcacatgcatgggatgtggactactgtgctaattttcatctgtgtctctgaatgtattctggtttcattttgtattcaaccattactgtaatttttcattatttacaaagctcttgccagttggcacacatttcctgatttcaacaacacatgcggttttgtaaaccagttttgttgtctgagcagttattgttctgtagtgaattttgatcctttagtgtgtttttcacacaattgttattgcttctgtgcaacactgagtatgtatttttttcatccgtaactatctcacttttgcagtgttgatcatgaacatgataatgtcaaggggttccaggaattgagatttgatgaaatagatattgttgagtatgattttttcctgatgtaccaactgaattgagaaataacacagtggtggaagggacgtatgcatccccagttcagtttgaatcacaagaagttatgctaaatattggtggcagaaatcagcttacaactgtgtgtgtatggtgtggaatagagtttgaccatgatgctgttaattctgaaatacaaccagattctgttggattcatgtgtccagcttctaaggcaaaaatctctggtccaagtcaatgtgttggactgtggatccccgaatgctggctgtctatagcctggtaattgctgattctctgtagattggtttgattagaatggtttctgttatcctgtctcctaattatgatcttctcttccaaactgaggggagagcattattctaatatttcaaacttcctaatttggtttt

SEQ ID NO: 30114 - DNA, 383 bp, Glycine max
  Clone ID: PAT_MRT3847_127194C.1
tcggccacgcgtgcggacacgcgtccggcacgcatacgactgtctgatgttcaatggttatgctatcatccctggtattataactcactcacctgtacttgctggaacgaatatttcaaggaagaaccatatacagctgcataaattgaaacaatttcaggggacaagctcacttcatttttgaacaataatgccgcttatttagaagtgctgaaagttgcaaagcaatacaagctgcatcagagagattctcatgtgtattcagaaacccagagggctcatgctttcaaggatggcggattttcaaatctaagagacgaagacacgctcaagaagcctggtgaccttattaacgagaatcatcatatctgcagcggtttata

SEQ ID NO: 30115 - DNA, 427 bp, Glycine max
  Clone ID: PAT_MRT3847_127195C.1
taagaaaatgcaaacaaacctctctgcttttgattcaactggggggacggcggaagtgcttcttaaaatagaactagccgactgggctttacccctgcattatacagatgacaaaattcaacgtcatacgactgtatatactttggccagtccttaacagaaaaaaattggggctctataacttgtcacctatcacaacaagaaatttctacaagagtggtaatttgccagcaaaccctgccctacttcatggctatgcatgtatgaaacccttgggaaccaaactccgatcgctgcactatgtatggagccctgctgcccttgcacagaaaagcactttcaacagacctcttccttatctattgcgatccctatgctaggcaaaagaatttgcccttaagaacctattaagcaagcattctgttat

SEQ ID NO: 30116 - DNA, 268 bp, Glycine max
  Clone ID: PAT_MRT3847_127196C.1
acgtgtgttttaacagaccaatgtgcagtggtccacgaagctcacaacttcgaggcataccgcaatggcccaagtgagcagagtgcacaatcttgctcaaagcgctcaaatcatggggcattcttgcagtcccaactaacccaaatcgtggaattgagtttcattgagggcacgcctttggtgtccctggaaacctcgcatcttggtgcaccaaactggaagccttcagggaaagcctaatgcgtagaagggaaatccccgcatgtat

SEQ ID NO: 30117 - DNA, 295 bp, Glycine max
  Clone ID: PAT_MRT3847_127197C.1
gggaacacctaatgccggatttaaacccttgcaagtctcaatttccttagctaagccaacttttcccatgcccttattgttgggttacaagtgcgaggtgaagtcccacatcgagcaaaagtggaaaagttgagcattatataagtgaggagaatacccataaactcgagtattaaggttttgagttaaagtgtggtgtcaagttcccttatgtggtggctcgtggtccattggtgtaaatctccccgacgtttactcccctcgaattttcccaacaactggtattagagccgat

SEQ ID NO: 30118 - DNA, 514 bp, Glycine max
  Clone ID: PAT_MRT3847_127198C.1
atccacttgaagtatctgagcttcatggtatacacagatagaaagtcttccaaaatccattggtaagctccagaacttggagaccttggatgtaagacaaacaaaagtgtttcagataccaaaggagattagcaagcttttaaagctacgtcatcttctggctaacgaaatatcttcaattgcagtgaaggtttgtattggaggcatgacatctctacaaaaaatatgccttctgtaaggattatagccactaaggtcaagagaattcctctttcgcctacagtgttcaattattctataaattattacaccttttaattttaaaaatttgtaaagtaaagccgagactcatatatttgcttccatatactcctttcattctcttccaagtaaattaaactaacaatttccttttgatgttggaaaggggaaccatttatacaaacttggaagaattcattatcaacttcactcaactccaacagcttagtaaggtgtgcaagggaaataatgg

SEQ ID NO: 30119 - DNA, 367 bp, Glycine max
  Clone ID: PAT_MRT3847_127199C.1
tttgttttccctctcacttttctcattggaggaaaaaaatccaaaaaaatttcggacagtgaagaatatatcttcttcttcttcttcttcttccaccagtgaacaaatctagggttttagtctcttccttcagcttatttactaaattaatcagcttgtcaaacattcttcttgaagtggacatgcaaactaagaaaaaaacctccaggcgaaatgccagtcaagagcgtggcagtcctaaagtttcaagagcacagaggaaggtctctcaaaatggtcaagctgctgaaaagaaagtcacagacttaattacatcatctgctagaaagaataaatctcttagcacccttgagaataaaactagaga

SEQ ID NO: 30120 - DNA, 439 bp, Glycine max
  Clone ID: PAT_MRT3847_12719C.1
caacccctccctcacttgcactccccgtgttttatgcaaattctgcttgatatatactccatcaactgatgatataacaacgaattttaataacttgtcatgtcatcaagcagtctaatgagatcatcaagggtaattttttgttgttaactgtttttaattgcttaaaaacttcttgacatcatcaattgttatgaactgatgcgaaattaaaaacacaattttttcaaaaacaataacacgaggttgctctattagactccttaatagtatgataagtaactgggttgccggtattatacgaagcaataaatggaggaatatcaagtgttattcacataaaacacattatctattaattaatgttggtacttgacagtaagggctaaagcttagaaaaataaattgagaaatattcagggcctttcacataaaacac

SEQ ID NO: 30121 - DNA, 281 bp, Glycine max
  Clone ID: PAT_MRT3847_1271C.1
attgaaatgcttatcaggagggtgaggattcacggaattacattagggtttacaataacgttagcggttgctggcattgtagcagtgcaacgcatctctcgttaagtacgccttcggaacttgtctaatattcattaggaatgaaaggagtactatagagctcgctggtcaattactcagccatcaacagcatgctgcaagtctctgagaaatgttgacatgtcctgcatgtgccgacatactaacaaatttcactcagacgtgatcgcgggactagttgt

SEQ ID NO: 30122 - DNA, 209 bp, Glycine max
  Clone ID: PAT_MRT3847_127200C.1
caacagcttaaaaggggccttataaacatcagtaggtttctactgacggactttattcaaatttcatgctgttctttaacaaagacttaagttcatctcttctaaaagatctaaaccatttccagatgggattatctttcataccccttagaactcattttttccaggattgacgtacaatttttatacttcctgtttacaagtgtttg

SEQ ID NO: 30123 - DNA, 490 bp, Glycine max
  unsure (1)..(490): unsure at all n locations
  Clone ID: PAT_MRT3847_127201C.1
aattcggctcgaggcgaaaagtaaaatgagagaagcatggaaaaaagggcacgcccgagtgggagtaggcgtttgccatgcttgtccgtgagggatgggcttaacgttaatctcatgtcatgctttttaacccactcacacactctctcttctttcttcatgcccgcctccctttcttcttcctttgatccgttcatacggtggttagatgatggaatcctgtgattgtatagacacacagtatcctccagatgaacttctcgtaaagtatcagtatatctcggatgtgctaattgctcttgcctatttttctattcccgtggagctcatctattttgttcagaagtctgctttctttccatatagatgggtgcttatgcagtttggtgcttttattgttctctgtggagcaactcatttcataaacctgtggacattctccccacactctaaggctgntgctgntgtcatgacgattgccaaagtgtcg

SEQ ID NO: 30124 - DNA, 344 bp, Glycine max
  Clone ID: PAT_MRT3847_127202C.1
tatttttgattttgtttttcacttacgagatgttaagatatgaatgggtaagagatatacaatgaatcgattgaggatacatatatactatatgtgcatcacaaaaatataaagagacacactctgaaagtccattaaatcagaaatttaatgctaaatgttgagttgattataggccgcaggcacttatattcaggaggcgaagcttcattgcttgtattcatgaaagctttatttttgcaaaattacattgatctatgaggtgatacaaaacaacgaaagttacctgagcactaaaatcatctgggatacatgctagaaagaaataaccaatggcatgatgc

SEQ ID NO: 30125 - DNA, 317 bp, Glycine max
  Clone ID: PAT_MRT3847_127204C.1
ggagaagcatcaactccaattcccatctaaggaaacaaaggcacattctgattacttagtaaaagaatgcagcacttaagggcctccaattcaggatattccctatgttaaatacacagatttggaagattataagcttcaaggttatggttgatgtcgtcattctgaaccacagacatgtccttgatctcgagccactaacgcactcaatctcatctggtgctgcattttcatgcgattcaaatatctctgccaataactgccattatcattgatagagtcgcttaattaatcacacttacgatactacatctttc

SEQ ID NO: 30126 - DNA, 457 bp, Glycine max
  Clone ID: PAT_MRT3847_127205C.1
gaatcttatttccttagggttttttgtacctgccctaattttgatagcatgggcctgccatggcccatgctaactatggttctctctcatattgaaaactggctatgccgaacgactttgccaggtatcatgcactagagttaagctatgccagatagcccacgctatgcgctcctttattaccatttctgaagaccgccatcaaccatcgagcgacttcatgaatggccaccgtttgatatcagactgtaactctgctaaccgacgggctttctcttatgctacttaacgcgaactacatcactacaacatatttatattgtgcatgcataactccgtcctctctaatgtcccatactctgcaaaacattgatatggcgtggctgactttactgacaccttacatgttgaatgtgttacccatggcgactcttcgatgttgccgaccactctgaac

SEQ ID NO: 30127 - DNA, 499 bp, Glycine max
  Clone ID: PAT_MRT3847_127206C.1
tagctagggatcataacattctcctcacaagctggatgaacatgccagtgtatgaagctgattttggttggggaaagcctatgcaattcactttagcacatgtgtttcatcaagttgatagggtagggatttttccaagcccagatggagacggtgttgttgtctaccttaatttcgagacagcacaattgcaacttttgaagaagttgttctacgcggatatgtatgtatcctcattatagcacatatatggagctatgaaatatcctgttagctgtgttgtgtttgggattgctactactttttgcagattgtttactttttatgtttctgggcatgttaaagtcagtttacttgtttttaattagttactgtttaagagttgcaacgttcagttttttctttctttattaactattaagtatatgtttgatggtggcgtcacctgaaaaatgagacgatcctaacaagggctagtagaaaaaaaaaatttattttt

SEQ ID NO: 30128 - DNA, 262 bp, Glycine max
  Clone ID: PAT_MRT3847_127207C.1
aattgtctatttaagctaggagcaggaccaataatttggaatttatggcaattcttatcagggtgaaaaatgccttactgggcggggtatgactgtcttgcgagacgaatctagggtaaaagcatatattataccagtgtgctcatttaagacccaacctttcctatcacacaataggtttcgacggtggatatccatcgaatatcaagagctcgaccttgaccaaagatggatctagagggattcttttagttggattgag

SEQ ID NO: 30129 - DNA, 474 bp, Glycine max
  Clone ID: PAT_MRT3847_127208C.1
acgaggggaaaagtacaactaccatttccattttgagaagctgcactgtatattaactattaacaaagctcttctttctcgttattttctatcttcaggtatttgaatttgattgaataatcactatgcagctaagtgacttattgacaatctgttaccccttcttagttattggtaaatcttttttatttcgtcatttgttttgatcgatcaagaaggaaaatatggcttgctcaaagttactaatattttttttctctcccttgtttttgattattttttcttcttttatgggtggggaggcagggattaagttaattgaaaaaccgcgcatgtgttctgatgaagtgaatatgaatatctaatctgatatgatgattttgcttatatatgtgaatatgaataatcacaactaaactttgatgttgtatgcatgaaaccaaaaattgttgagtgaataaaaaaagaagaaga

SEQ ID NO: 30130 - DNA, 475 bp, Glycine max
  Clone ID: PAT_MRT3847_127209C.1
cccacgcgtccggatccaagtcctcattttttttctccgcattcatctggcatttttattaattgtataaagtataaactttcccgtgcagagactggatatgttattggatcatttaattggctggaacctcctaagagtatatagttgaaatgtttgataaccttggctgtgcacttgtgttgttcttcagttgatggaattatatatggtattttttttaatcttgtattgtccatagaattttgtgttgatgaccgcatatgtgctcagtttaagtttaggtttcttaatgtacgacagttattgtcagatcgattgttctattttgcattatttagtgtcaaatagaaggtgaaaatattgatgttgtagcttgtttatttttattcccgattagaattattctataacgttctcgtaacagtgtgcaagcaatggttcaaagtctacataattagaaatttagaatgga

SEQ ID NO: 30131 - DNA, 535 bp, Glycine max
  unsure (1)..(535): unsure at all n locations
  Clone ID: PAT_MRT3847_12720C.1
ttatctagcaaggcgnatgaagcctggcccatgaaccccaaaagaggcaatgagcagtatgaggaagaccccgaccaagcacgtctcctaaagaaccccatggtacgacccacaccaagtcaaatacatgcgcccattcctctgggagcccctagtctacctatccggtgagtgcacaagcaactaccactaggacactgctgggcttgtcgcatacacataaaactacgacaagaaccgagaactcaaagtgatccactacaagtgggccatgctaggagccttgggctgcgtcttcccggagttgctgtcccgcaacggcgtgaagttcggagaagccgtgtggttcaaggccgggtctcagatcttcagcgagggtgggctcgactactatggcaacccaagcctgatccacgcacacagcattctcgccatcagggacacacaaggtatcctaatgagtgccgatgaaggatacccgatcgctcctgacccactctcttaagtaactgacccaatctaccaatgtggcagc

SEQ ID NO: 30132 - DNA, 753 bp, Glycine max
  Clone ID: PAT_MRT3847_127210C.1
gcttgacctataaccaacaagacctcgtttttgctccctatggcccacggtggcggttccttcggaaactaagtaccgttcacatgttctctgccaaggccatggatgattttagagaactgcgacaggaagaggtagaaagattgacatgcaatttagcaagatcgagttctaaagtggtgaatttaagacaattattgaacgtatgtaccactaatatattggcgaggataatgataggacggcggattttcagcgacaatagtagtaattgtgatcctagggcagatgagtttaaatctatggtggtggaccttatggtattggctggagttttcactatcgctgacttcattccttgcttacactggctagaccttcttggagtgatacctccgacgacgaccttgtatgagaggtttgataaatttttaacctccattcttgaagacctcaagatttctcccactgaaaaacctcacgacttgttaagcgcatttttgtcccttaaagagactcctcaaggagaacatcaacttattgcatcggagatcaaagcagtacttgggcgatatgtttacagctgggacagatacatcatcaagcacagtagagtgggcaattacagaactttataaagaacccaagaattatgatcccagtccaacaagaattggatggtgttgtgggtcacgataggcttgtgactgctctagatttaccccacctcccttacttgcaagctgtggtgaa

SEQ ID NO: 30133 - DNA, 347 bp, Glycine max
  Clone ID: PAT_MRT3847_127211C.1
atttgacaacgttacgtggtgccgttccatgatttatgaactatgacccttcttgtggtcgtaatcttgggttccaaaagaacgagaagatgaacgttgatctggaatcattggcagaggcaacttctgtatccataggatcactgatcagcaccactattctctacccacttgacacctgcatgaccaagtaccatgctgaggctcgttcctcaggtcgaataaaatacaggaatctcactgatctattatcggaggcaatatctaaccgtcaggcgctttcactttaccagggccttggaacataaaatctccaatcctttattttacaatcattctacttctat

SEQ ID NO: 30134 - DNA, 287 bp, Glycine max
  Clone ID: PAT_MRT3847_127212C.1
atcagcaggcgcataaaagttattaacctattacgattctaggaatgtcacagggaaactaaacctgaagcccctgcccgtgcctaccaaaacacataacctaatcaatattactctaatgaataagatcgcttttcattagtgctgccttgttagctttgcattaaaaaaggtatccatttgcaatttgcttttggtatagccaagagaagcgctacctacagtgcgatgacttgatagccagcgggagttgaccacgatatacttaatgaacgctccggacatga

SEQ ID NO: 30135 - DNA, 150 bp, Glycine max
  Clone ID: PAT_MRT3847_127213C.1
aactgaataaatatgcattggaagcaaaatttaaacttgtcacatggacattggttggaacacctgggcgggttttgatatggattaaaatccacatctggcattgctcaggaaaaactaatttttgaaaaagacgtggtatattgcccc

SEQ ID NO: 30136 - DNA, 469 bp, Glycine max
  Clone ID: PAT_MRT3847_127214C.1
tcggtgaaaacaagccctacctttggtgaagctgctatggggagaattgcccagggaacaatggtcctggcccatggtggatatgagaagattctactgaatacattagagacagttccggacgagcggcttctgaattcttatgcatgatatatatccacgtgtgctgctccagttatgggagttttgaatgtatccaccgcagagattgcatattctagtgacaatgctattctgtatataaatgacaaccaaacagaatggaactatgatgacgcaatgattcctttacacgatctaaaatcagcgactacttcatcaaacacatacaattgtgctgaaaagtacatacaggtgatctcggctgacaattatgaattgtggtttatggacttattgaactatgatggtgctgtgtagtccctgcaagatgcccttgaatctggcaaatacaatgatgagcatagtc

SEQ ID NO: 30137 - DNA, 371 bp, Glycine max
  unsure (1)..(371): unsure at all n locations
  Clone ID: PAT_MRT3847_127215C.1
ggaacttggatgttacggtacctaaattgcttttcacaccgtttaaggatatanggtttcatggaaagaccgtgagtgtaaagattggaggggtgcatgcattgggtgataatcggtgaaaagatagtgagtaagtattcctgtttcaaaggaggacactgctattgttaaaggaaaatgggacctgctttggtcacgattgacttggatgattatgatgatgtgagagagattccgaaaccgaaaggtcctaattctgaggattataggttagaaagacgatggaagagatttgaacattcaagttcaaataaacgattgaagcaaaatcacagtgacagtggtacaagaactgtgaagagtcatggaaa

SEQ ID NO: 30138 - DNA, 307 bp, Glycine max
  Clone ID: PAT_MRT3847_127216C.1
aaaaaaacaaaacaaaactgggttcctatataaaaaaaaccttttgccccttcaattcccaaaagggtccacccaagaccctttttttaattacaaatcctttaaaaaaaaaaaaagtctccccctggttaaaatcccaaattgggaccaaaaagagtcttaaaaaagcgataagatttcttattcaagggcctgtgaaggtggggaccgcctttgtccccccaaaaacgggggggttggccaatttaccggggagaaaaaaccttacccggggttgaaatccccctgaaagggggggggggttctt

SEQ ID NO: 30139 - DNA, 189 bp, Glycine max
  unsure (1)..(189): unsure at all n locations
  Clone ID: PAT_MRT3847_127217C.1
ctggatggtgtnttactcaatttcatacaagaccanaaaaaagagctgnaaaataaccttgctcaaggccccttttgatagaatnttngtgctaagtaagtagagatctgataagtttttcttagttgtattagagcatctttagttgaagatcttaggtgaagatccggtctgtccacacaacatacg

SEQ ID NO: 30140 - DNA, 161 bp, Glycine max
  Clone ID: PAT_MRT3847_127218C.1
gaaaaaagaaaatcaatcttagcaccaacgtaaagatttctcataaaactgggggggcgttaggcggaacattttttcttcataactaggcaatatttgctctttttattttgatcccgtaaaccaacacatgtcgtgtgctaatattgcaaattattcaa

SEQ ID NO: 30141 - DNA, 1051 bp, Glycine max
  Clone ID: PAT_MRT3847_127219C.1
cggctcgagcaagctagcatttactggctcaacagataccggaaaagttgtactcgaactggctgcaagaagcaatcttaagccagtgacattggagcttggagggaaatcgcctttcataatatgtgaggatgctgatgttgacaaggctgttgaacttgcacactttgctctgttctttaatcaggggcaatgttgctgtgccggctcacgtacctttgtacatgagcgtgtctatgatgagttcttggagaaatcaaagaaacgggctttgagacgtgttgttggtgatccattcaagaaaggtgttgaacaaggtcctcagattgacgtggaacaatttgagaaagtccttaggtacataaggtctggaattgaaagccatgccacccttgaatgtgggggtgatagattgggctcaaaaggcttctttgtccagccaactgtcttctcaaatgttcaggatgacatgttgatagcacaagacgaaatctttggcccagttcagtccatcttgaaattcaaggacattgatgaagtaatacgacgggcaaataaaacacgctatggtctagcagcaggtgtgtttactaagaacgtgagcacagccaacacattgatgcgggcactgagagctggaactgtgtggattaattgctttgatgtttttgatgctgcaattccttttggtggatacaagatgagtggtattggcagggagaaaggaatctacagtcttcacaactacctgcaggtgaaagctgttgtctcaccagtgaagaatcctgcgtggctataaaatgtccacacttgtgtcccttgtgtcttcaacaataaaaatcgattgcacacaagagctgaattttaatcatgaattaatcacctcgaatttgatgtgatcttagctaacaaacgtgcttcgtatatttatttatccaaaataaaaagttccatgcatccttggctttgtgtgtcttgaactttagcaccatcccctctgaaaatataagcattatatagtctgaccgtggcctgtcaagctcgtatggat

SEQ ID NO: 30142 - DNA, 360 bp, Glycine max
  Clone ID: PAT_MRT3847_12721C.1
gtttttcatttgtgtgtcatacacttgtcgccaagcctgttcaccttgcaatataacacgtttttaatcctgatcttaccatttcagtcccacaaggtacgaaacacaggtgctcactggtatagacacacttatgctgctcactacatacgatctcagtgtgaccttggatttgccttgttacaatatgaacttgttgcttgctatgctaagcccctatttgactacgagtgcaacttaaccaactaactctgtaaattaccaccatccattacattctataattgtattcaaatgacttcaacaccaaccacagctttgagaacaacaacacgcaaacatggctcatgtatgctacct

SEQ ID NO: 30143 - DNA, 671 bp, Glycine max
  Clone ID: PAT_MRT3847_127220C.1
cttaacactttgaaagatgtaacgcatgcggatacctttaacagacataagcgcgggctcgacccaaagcatttcgatttaccacaggggctgaaagcaccatactcgcagatagctaaacgaagaacatctttcctatttcttaaacaaagtgtccacaaaacctattacgtagaacttttcaaatgctttatttagcttacttaacctagagactggtaccttttcttatcattgaatcaacccctttttaaatttgttgtaaacacatcccaacccaaaggataagcgcccacctagtccaatctagtccgaaaaatgcgaacaagaactacatgagacactatctctgtcgttacgaacctaacactttctaccaagcttaatcggaaaaagacctcacaaacactcacaagttatatagggcttgaaagaaaggctaggattggctttgggataacagctctaataaggagagtcagctaattggattaaaaagagcgatcaaaatgaataacaaaatccaagctttttacggaatccatgagttcaaaattgatgcacacttgataattaaagaatgcatgcatgttcaaattgaaagggaaaggtatcagaacatgacatgtggcgcagtaaagcaattaagcctggctcagtttttttttttc

SEQ ID NO: 30144 - DNA, 300 bp, Glycine max
  unsure (1)..(300): unsure at all n locations
  Clone ID: PAT_MRT3847_127221C.1
ggtcggtnatagttgagtttgaagtagtgcttcgcgtctnacattcagttcaatgggcttcttncatctgtgntctntcggncttcccgtnaaatcacagntnnccancnaccaccntnnntgctccnnatccctctcctatcaaacgaagnaagtgncgaaatgagcaggaggcgttttgcgtttaagggaattgtggnctctggcgtttcggtcgnggcttctacnctcacagngnnnncgaacnatnttcnaaaggttttgaaagattgccgtacaagcnggaanggtanaattatg

SEQ ID NO: 30145 - DNA, 167 bp, Glycine max
  Clone ID: PAT_MRT3847_127222C.1
tacaggtgttagaagagctcagaaagggaaacttaacgtgcccgtaagttgcaggaaaaatgttttctctaaaactgcataatcggttcgcccccggagcgttctcaacagtggcataggaaaggtgggggttgaccctcacgaaatcaaggaagtctccctggaca

SEQ ID NO: 30146 - DNA, 525 bp, Glycine max
  Clone ID: PAT_MRT3847_127223C.1
ggagacggtaacagtcacacagtaaatgagattaatttatgatccaggtaaaaaaaacaataaactttactaaaatcatactttaatttatttacccgccatagaaccataaaactttatattttccttcgattcagttccggaaacatacgaatgatgaggggaggtatccatatcaggtaccattgcctttgatgaaaaacattttataaaatgaggtcttttccccctagtgtattaacaattccatagttgaagcttactcatcttttaccatctacttcccttatctaccaatgatgacaaaaaagggccacgagtttcataattcttcttctacagcactcccagccaaaacttaagtggacggggaaaaggctttacatgttttagctatgaaatttgcatgaacgagcacgatactcaatgtcaagggctaattgcttcctgctgcacccaagtcctttgctgactgattgaaagctcaccttgaatgtcaaaaagaattgatcccacatgtgctta

SEQ ID NO: 30147 - DNA, 288 bp, Glycine max
  unsure (1)..(288): unsure at all n locations
  Clone ID: PAT_MRT3847_127224C.1
cacgcgtccggntttagacgtttagtttaatagcttcttgttctcttagagccatcattacattctttttttttcattcttcaatagcattggttttgtaacattttccaaaggggaagcataacaagttaacaacaccatctccatctccacttacctgagagaatctgaagtaaaacgaaatgaggtttgtgactggctctcccaaaggcacgtggcaacccattatgactgcggatacaaccacagaaagttactggttgaattggagggttttgntttgtgcca

SEQ ID NO: 30148 - DNA, 416 bp, Glycine max
  Clone ID: PAT_MRT3847_127225C.1
tagatatcatagagtgcagtgattgcatgaggacgtgggctgcagcgagagctcccaactctagcttgatggccgtagagtacctggatgcctaaagacgaactgtagtagcgcgctttagagctccgtggtagaagccggacagggaacatcgagactaacgctcttggggctgcttaaacaggcgtaatcagcctgtaacgtgacgagtagcacagaagccatgtgccggtctggacatcgcaccagtggaatctttgcaaatagactggcacgctttaaagtataaaaggaaagctgcctggcttacaacatcacaagcacaatgtgcagtaacggatcaccttttgtgcggttatacttagtgcagtacccgatgcataactagcgcatttagctatacctgcggcagatgc

SEQ ID NO: 30149 - DNA, 1858 bp, Glycine max
  Clone ID: PAT_MRT3847_127226C.1
ctttcccttcagtttgtgttgagaggaaaagtgtgagaacgaaaatggagcattgtaactgctacatgttcacgctgagccttcttcttcttcttcttcttactccgccttctctctccgacgatctcggattcgattttccggcgaagaagctgataagagaccttaacctttttccttctgaagatgtcaacatcgttcctcgccactccaattctcacgccaacaaaatcgtcgagaaaccgcttaggttcccaaacttagtgccttcagactccggcatttccctcgacgacttggctcaccgcgctggctattatcttattcctcattctcatgctgccaagatgttctactttttctttgaatcaaggaacagcaagaaggatcctgttgtgatttggttgactgggggaccaggttgcagcagtgaattggctgtgttttatgagaatggccctttcaagattgctaacaacatgtccctagtgtggaatgaatatggctgggacaaggtttctaaccttctgtatgttgaccaaccaactggaactggctttagttacagtactgataagcgtgacattcgtcatgatgaagaaggtgtgagcaatgacctctatgactttctacaggccttctttgctgaacatcctgagtatgtaaagaatgacttttttattacgggtgaatcatatgctggacattatattccagcttttgcagctcgtgtccataggggaaacaaagctaaagaaggaattcatataaacctaaagggatttgccattggtaatgggcttactgatcctgggatccagtataaagcttatacagattatgcactggacatgggcataattcagaaggctgactatgaacgcatcaacaaagtgatggttccagcctgcgaaatggcaataaaactatgtggcactgatggaaaaatcgcatgcacggcatcatattttgtttgtaatacaatattcaattccatcatgtcacatgctggtgatatcaattattatgacatcagaaagaagtgtgaggggagcctttgctatgatttttcgaacttggagaaatacttgaaccaaaaatctgttcgggacgcactaggggttggagatattgattttgtgtcttgtagttctacagtttatcaggctatgctggtggattggatgaggaatcttgaagttggtattcctgcccttcttgaggatggaatcaatatgcttgtgtatgctggggaatttgatctcatctgcaactggcttggtaattcaaaatgggttcatgccatggagtggtctggccagcaagaatttgtggtctcatccgaagttcctttcacagttgatgattctgaagctggattattgaagaagtatggacctttaagtttccttaaggtccatgatgcgggtcacatggttccgatggatcagccgaaggcttcgttagaaatgctgaagaggtggactcagggaaccctttcagaatctgcagctgatgcggagaaattggttgcggagttgtaatcactttcgttattgcaattagtccagaaaagggatacaaaagtattatgcaataaagagaagggaattaaagtgatcagcatgtgttattaattataaagtgagattgaatcaaggccatgcaggaaaaaaactattcatatatagaatttcgtgtgtgcatgtatactgttttaataaaatgctgagatgtaaattgcttacacctcatattgtgcttatacctctaccacaaattgcttacaccctatggggagttttgccattctaaattttttaaaactcgagaaaaaaaaaaaagcgtcatttaatat

SEQ ID NO: 30150 - DNA, 169 bp, Glycine max
  Clone ID: PAT_MRT3847_127227C.1
gggttttgttccaaacaccctcccttcctccttctccttaacttccctaattgttcaaacttacccatctcatttaccctgtctctcacccaaaaaactactgtctttcagggaacgaaagagcttagttttttcgtgtggcaaacatttgacccatagaattgaacca

SEQ ID NO: 30151 - DNA, 273 bp, Glycine max
  Clone ID: PAT_MRT3847_127228C.1
ccggatacccggtcgaccacgcgtccggttacatataatatacctattacaaaataacgtgaattaatacaactctttcaacgacagaggcttcctggcatatgctaaagatggtgcgcttatctaaatatctattccttccaagcaatgacaaaacccagaccctcttgctttctatacaatacaggatcgttcattcgattttgcactcatatattctcttctggaacgacatattgatccatcttatatcgtttgatcataacaatggct

SEQ ID NO: 30152 - DNA, 443 bp, Glycine max
  Clone ID: PAT_MRT3847_127229C.1
gttgacgcagaagaggctggtgaaattgctgcttcctcatgagcctatttctagccttctctgctgcatcatagggacttttggccttttccttgaaatgagtcctccaataaatcataatctcattgccagttctccctggcaagctccttgcaattgctgaccacctgaagtttatggtttaacaatcaaggccttggaatatgtatgctgccattatatggaaacatgcaggttcaagagaatgagaaaataaatcttacctgtttccccaccttgcatgcaactctagacctatgctctcttcttgaggtgttatgtgtcccctcttgaaatcaggcctcaaatgcttcacccatctcaatctgcagctcttcccatatatttcaatcctgttaatggacaacaacgtaatacatactaatcactttgatacgtaatcc

SEQ ID NO: 30153 - DNA, 275 bp, Glycine max
  Clone ID: PAT_MRT3847_12722C.1
tttctcgggcttggtattgtgaagagaagcaatcatgcacatgaatttctaaggcttgctgctgaaacaatgcactgtgtgtgccttatgcaatctgtggataacatcatcagattcatggaacgaggaacctaatctaatgggcctaacattcgaaggttacctcccagcaatcataaaacgcatggaccgtgcagggaaatctgaccgtcaagaagggataatggatccgacagtggcgatagaaggggaaataacaaccctggaagaggccc

SEQ ID NO: 30154 - DNA, 288 bp, Glycine max
  Clone ID: PAT_MRT3847_127230C.1
tctctatctaagctctttgaataggagcaactctagccttacaattaacatgaacacgtgcaccatatatatccactgtgactgcgtccctcggcagggtcagccaccagaatctgtgcattctctataccttcgggtcggccaataccagcttttctagacaagaacgactccttcatctactaatgaatccattcatgagcctgagggtttatttagagtccggacaaattctaaataggtgctttcctcgattatcattacagcatccacagctaattttgcaaa

SEQ ID NO: 30155 - DNA, 234 bp, Glycine max
  Clone ID: PAT_MRT3847_127231C.1
accaacaaacatttctttcctttttttttaaaaaaaaaaaacggtttggggactggaaaccatccctcagaaatcattttaggggacccctcaggggttgaaaaattccagggtttcaggacccggttaagaggttttgccaagttttaaaaccccatatcacccacggaaaaaaaaataaccacccttgaaagagggggcatttttttttaaaaggagggtttagggtttttt

SEQ ID NO: 30156 - DNA, 281 bp, Glycine max
  Clone ID: PAT_MRT3847_127232C.1
tttctttattctctttgtcccatcagttcatgttctttgtttattgcctgtctagcctgagtcttggatcttttttttatttggtcatctatctccctaagacccaaactcattccctccttttttctctatctcttaggttagtcatggcatcctttgttacgtgaatactatttactggtatagttgcacacttgcttaagagctaagatatacaactttttattattaattacaaacatgatatcctgttaccattcagcatgcactatactgctata

SEQ ID NO: 30157 - DNA, 154 bp, Glycine max
  Clone ID: PAT_MRT3847_127233C.1
ctgagggacaagttcaatgaggaaattcacctcatgagatatactcatcctatctctgctattgcctccactggtattgcgtgccatctggatgctgggaatggaatcatattatctccattatcatatagaaaaataatgaatcattcgacta

SEQ ID NO: 30158 - DNA, 202 bp, Glycine max
  Clone ID: PAT_MRT3847_127235C.1
accaagaaccccgatgactccgacgactcttttgacaccgggatcggcccgaaaagctgacaacgcttggaggagcgacttccatcctgggagcaactccgccacaaagagcatcggggatcagatgactgacaaaccaattccgaacactcccactgtatatgactggatgaacagaggggagaacagaaggaggcaccgc

SEQ ID NO: 30159 - DNA, 327 bp, Glycine max
  unsure (1)..(327): unsure at all n locations
  Clone ID: PAT_MRT3847_127236C.1
attgactacatcgnccgcccacgcgaccgcccaggcgggcttaaacacaaacaacccacaacaccgccgccgcaacagccccaaaaccaaaggccncagagaagaaaccnncgaacccaangagggagacaaaggcgcagaagnccgcccccaaaaacnccgcnggcgagagaggagaacgcccaaccagagccgccaaggagccggaacagcacagaggccaagcccccgcngcccccaaagcaaggcacacgggnnccgcccccgggaccagaagaaacgagaagacngcacgccacgncaccgccagaggggacaaggcaacgc

SEQ ID NO: 30160 - DNA, 395 bp, Glycine max
  Clone ID: PAT_MRT3847_127237C.1
ggataacaaacgtccacggagatatacgacgaaatacaaaaacctgtaaggttctaaggggcatgtcacacaaatcaaactacaattttatgaaccttaacacaaataacataaactttaaaacgttctaaaaccaaactgattttcctttttttttctagaatccattttacatatgcacttgttgaaacaaacaaaatcaagggagagaccaaacaaggccatactgaacaccatgttactgttctcaccacttaactaagccaaaaatgaattctcttctatacatcatcacaagttggataaaataaaacccttcatcttcacctaactctcgctttatggctgaaggaaacgttatttgaaatcctcattaagctccctctctttaccaa

SEQ ID NO: 30161 - DNA, 318 bp, Glycine max
  Clone ID: PAT_MRT3847_127238C.1
cgcattcatatcccttaacagccctttttctacataaatttgggggatcttttttcaataatagaatgctaacagtccctttaaacactagtttaggaatcaaaagggaaaagtttttaggaaaaaataccacttttaccaacgtaccctaccggggttctgaataaaaacattttatttattgattccctaactagggcctttaagacacaaggtggcgggacctatttcaatatctgctttggtcttcaggagatttaggcttggtacatttctcccgggggcgtgggttcccctggttgatcacaaacagcaatt

SEQ ID NO: 30162 - DNA, 273 bp, Glycine max
  Clone ID: PAT_MRT3847_127239C.1
tgtgattccatttttggaacactagaatttataatccttcagcctctaatatttgatggtcgaaagtgggtttttgatctgtatttgtgaatcaattcaaagtttaacaacaaacaaaaatcaaagtactgcgtaatcccccccaccctccaaaagaaaaaaaaggtttcagactttcaggggtcattatctaatttgttttgttttccgctctctatcagagggaattcgaacaaaagctctgtgctgtgagggccgatacagtggctacag

SEQ ID NO: 30163 - DNA, 652 bp, Glycine max
  Clone ID: PAT_MRT3847_12723C.1
agttctgcatttgaacagcaggtcatgcatatattacgtgaaaatgccatatcatacacactatccattatcagaaaagaaaccttattactgtatagttttctctctctctcttaaatacattctcggaccccaagaaaacctaaaaactccaaatgcattctcttctctcaatgcataagggaaagcaaaaaactatacataaatgattttacactaggtagatggttagtttctgttttacacttcgcaagcatgaccgttagaatacgtaaccatctctgggattcttcagctatctcctttcatatacaagcaattgaactgtacagtacagtatgaagtttccagcacactctcagacaactgcataatcttacgcgtcaaagtgacactagtaccactttgtatcatcatatccgaccacaagccagcaaagtaacccatgacagccatcaaagcccatggaactgcactaaaccatgctgcatgcctgagatccacacggtacactgagctgaagtatatgggcatccaagaaagaacaataaaaaaaccccaactgtgcatggcatttgcaatgaatagagaccatgttggcagctttgaaagcaagcgcctgaaaggagggataactttaactttcttgggc

SEQ ID NO: 30164 - DNA, 317 bp, Glycine max
  unsure (1)..(317): unsure at all n locations
  Clone ID: PAT_MRT3847_127240C.1
tcgcangcacgcgtacgtaagctcggaattcggctcgaggntnnncancagnacannatngnnnggnnanncncncnnntnnnntcatngggggacnntgtnccnnntanatannngacnctaccngactnngnntnacnaggttnncntnngangnnatngantannannncnnnaanntnnganncntctnnntnggcnaccantgnangcatnnacngggtnanctannnnnanncacccnnnntagcnngctnctnnnntcnnnannngancggttanncantggncncannnnncagtcgttgccgnntgtn

SEQ ID NO: 30165 - DNA, 154 bp, Glycine max
  Clone ID: PAT_MRT3847_127241C.1
ctcacccaatcgttcagggaaaattgtttttgggcggggattcaaagctcatggtgattaaaaaagcagctaagctctgcaatgcatgtggagctttaaatatcattttagtgccaagcctgatgacctaattgtccagctttgttaatccttt

SEQ ID NO: 30166 - DNA, 227 bp, Glycine max
  Clone ID: PAT_MRT3847_127242C.1
aagctcgatggctcgagctctcagctcaccaatggaaaactctactcattctcatcaccatgaattacatgctggcaatcaaccctagctggaaatattttagaactatgagacatttatagatctccactccataatcgcaataaacacattacacacttatgagctgtcggaaaataataatatacagctaatacggaatgatgtataagaatctcaccaggtct

SEQ ID NO: 30167 - DNA, 319 bp, Glycine max
  Clone ID: PAT_MRT3847_127243C.1
ctgggacatttatttttttttcatatttaccattactccaagtacaggccatgagcttgaattgagtatcacactctattgttacaaaatacggtgatgggaacaaggcccagtatgattacagtgctacttgttccatgctaaagtatcttcaattatgcattgaccaaaagtacaccaaaacttctatatacctgaaccggatcaatcatgatgcatggctacaccgtgctatcagctgctgttacatgcccggacaattagtctggcagaaggggacgccacaaatctatcctactacttatctcatgaacatctt

SEQ ID NO: 30168 - DNA, 328 bp, Glycine max
  Clone ID: PAT_MRT3847_127244C.1
aggggggaaattaaaggccttttattaatgggacccaattgagttcaacacaaaccgaacttattttcaagggacattattacagaccccttaaacattaaagttttttaaaagttttgggaacacattcaacatttcccaacgggcttaaaaccccccacggggaccggggacaaggtgaaggggtgattccttttggatgttgtaaccaacgaggggcctttcatccttgagctgtttgcccgcaaaaaaaaacctttgttggtcccgggggaagccctccttggcctgaaaattggccttcacaatgtcaaaggggttaaaactt

SEQ ID NO: 30169 - DNA, 301 bp, Glycine max
  Clone ID: PAT_MRT3847_127245C.1
gtctaccagccaggacgcccaagaccttttccgcggtctgtggcctgcttatgctggaacccccactaatcacaggatcgttgatctcgatgtcatctatgccgtattcaccgctttcctccaggttgattagatggctttgggtggatcatttccattttgctccttcctagcaggagtactttcttgagaaggaactgctgttcttgctgttggactcacgatccaagtgcttacagaaaataaggaattcaaggatcttgcacctgatggagcttttgcggagtttggtctctggaac

SEQ ID NO: 30170 - DNA, 511 bp, Glycine max
  Clone ID: PAT_MRT3847_127246C.1
ggtgatcaatgtactcgaaattggactgtgaactactgaagattggtgtttatccttcttttccttctaattttaagccacattttcattttcactgcatcctgtgatggttctccaaattgaaacttgtttacaaatttcacggttgttgaaatgaccatacaggcttgtggacatgttgctggagttgcactcactgtatgttttacgctgcattgttaagatttgtagcattcaataggtttcgaattttggcaggaagatatttcttggttgttaataatttcttatcactttttatgtgaaaaaaacaatctttaactaaaataaggctgaaatttctatttgtgacattcaccaccaatattaattaattatataaggacacaacgaaatcaaatgtaatattgaactaacctagaattggtagataatatagtagaagaaaacaaaaatggccaaaaagtcaagacgtttgtagattattttgtaggtttacacacttgttgaa

SEQ ID NO: 30171 - DNA, 707 bp, Glycine max
  Clone ID: PAT_MRT3847_127247C.1
agtggtctctttcaaagaattcatatccgtcttccacaacttgtaacatggaatataatcagcaaattgtacattttaattccttgctattacaatcgcatatttaagaggattttgaaacaatttggctatgttttgaaacaatttactgatagaaggtttttttgatagttgactcttagtcaactagctagtctgactagcgggatcacctgaatgtaagtattttatttttatttttaaataatggagtacgagttcatgtgatgtagactcattaatcatccatgagatgtgggtcacgagatagacaattctaatctttggaccttactactttgatctccatcaataaagactgcatttgaggtcagaattggatctccttgtcggatgattaatcttggtaaatctgcggtactcgttgataatgatagactcgagagttttaactcacaaactagaagatttaattgaaagaatttcagaattaatgcataatttatagtacaaaactaacaggattctccttcaaagttcaaacaaacttaaacagtttaacacaacaaatcagaaatctgtcacaaatactatttaagagatacacacataactgccatacaacacatcatataattgtcccaggattactaaacactcattactatgctatcgatcagtgtcttttaagtgtactatgcgaccta

SEQ ID NO: 30172 - DNA, 452 bp, Glycine max
  Clone ID: PAT_MRT3847_127248C.1
tcctctatagcggccgctttttttttttttttttttctttttgtttccctaatgcgggtctacccatgactacacacatcttcccgttagcttttctgcgcagataaaaccttgtgacacttcagtggcatacactagtttattggtctaccgctggtcggtccccaccaccacgctcggccaggatcagcgcctccccagccttccgatttggagccatggcgtgggccattacctatttctggcttaggatctacgggttcaattggttcgcatacactgcgtgtggcggctgagttcccctagcgttggcaagttgtgagccttgctgctggctctggtattcctcggcttgctgaccagattccatcttggctgtctgagcttgttggtctttcagctgtgccccctggtgctgatcttcaagaggctgcggctgctggggatcacaa

SEQ ID NO: 30173 - DNA, 322 bp, Glycine max
  Clone ID: PAT_MRT3847_127249C.1
ggctcgagggaacgaactgatgtaggatgactgttgctttctgggaggatatgcaaagctgctcgtataatacccggacagaaaggtgagggtcatcgtgtatggcaggctcattaggactatgcatacgggtgcctgccgatgataaacgatcaatgtagcagagcaaaacgatgttcgttacaccaggactatgctatactgaactactggagcttactgccggcacagggatcttaactttggatcactactcaggcatcggcgtgatggtcatggatgttatcaaagggtgaagaccttgattggaggtgacaacgct

SEQ ID NO: 30174 - DNA, 1550 bp, Glycine max
  Clone ID: PAT_MRT3847_12724C.1
gtcgtagctcgattcggctcgggcaagtggtcatggcttggggagtggccttgtggtcacttgctacttttcttaccccttgggcctctcagacctccctcttggctctacttgctgtccgtgctttgcttggcattgctgaaggagttgctcttccttccatgaataacatggtcgccagatggtttccacaaactgaacgatcaagagctgtaggaatctcaatggctggatttatgcttggatgtgcaatagggctcacactttctcccattctcatgtcacaaggtggtatatttggtccctttgtgatttttggattgtctgggtttctttgggtgttggtgtggttgtctgcaacatcaagcactcctgaccggagtcctcagatatcaaaatatgagctggagtatatattgaatagaaggcacaagtctttttcagtggagacagctaagcccaagaaagttaaagtgatccctcctttcagcgcttgctttcaaagctgccaacatggtctctaatcattgcaaatgccatgcacagttggggtttttttattgctttctttcttggacgcccatatacttcagctcagtctttcttggggccccttctccttctgctcgctggaccggctggtcctctgccgtaccgtgtggatttcctgcatgcagcatggtttagtgcagttccatgggctttgatggctgtcatgggttactttgctggcttgtggtcggatatgatgatacaaagtggtactagtgtcactttgacgcgtaagattatgcagtgcattggttttgttggtcctggactctgcctcattggcttagcaacagctaaaaaccccgcgattggttctgcttggcttactttagcttttggcctgaaatccttcagtcactctggttttcttgtgaaccttcaggagattgcaccgcagtattctggtgttttacatggaatatcaaatactgctggaacattggctgctatatttggaacagttggagctgggctttttgttgagctagttggttccttcccaggatttctgttgcttacatcgctcctttactttcttgctgctattttctattgcctattcgctactggagaaagagtaaattttgacgatcctgttgtctgagagtgctggaaactacatactgtactgtacagttcaatttcttgtatatgaaaggagttaaggagatagctgaagaatgtcagagatggctatgtgttctaactgtcatgcttgtgaagtgtaaaacagaaactaaccatctacctagtgtaaaatcatttattgatgtatagtttttttgctttcccatatgcattgagataatgcatttggagtttttaggttttcttgggttccgagaatgtatttaaaaaagagagagaaaaaactatacagtaataaggtttcttttctgttctgtccttgctgatcatggatagtgtatgatatggcatttttacgtaatatatgcacgacctgttgttcaaatgcagaactaaacacaggcattttg

SEQ ID NO: 30175 - DNA, 1116 bp, Glycine max
  Clone ID: PAT_MRT3847_127250C.1
cccacgcgtccgtacggctgcgagaagacgacagaaggggatgaaattgacttctttgggttcggcggtaccctacacttagttgttgtgttgctgtgcacccggtgagcggtgacctcttccgctttgatcttcttctgtccagggtaaccaatctggttacttgggtcaaagatttctggcatctctgtcatggcaactagacttcagtttgagaataattgtgaagttggagtcttctcaaaacttaccaatgcctattgtttggttgctattggaggttccgaaaacttctacagtgcatttgaggctgagttagcagatgttatccctgtggtcaagacctccattggtggcactcgtattgttggtcgtctttgtgttggaaacaagaacgggcttctcttgccccataccatcacagaccaagagcttcaacatttgagaaacagtctacctgatcaagttgttgttcagcgtatagaagaaagattatccgctctgggaaattgtatagcatgtaatgaccatgtggccctcacacacactgatcttgacaaggaaactgaggagatgattgcagatgttctgggagtagaagttttcaggcagacagttgccggtaatattcttgtgggcagttactgtgtattctccaacagaggtggtttggtccaccctcatacttccatcgaagacttggatgaactttctacacttcttcaggttcctttggttgccgggactgtcaatcgtggtagcgaagtaatagctgctgggatgacggtaaatgattggacagcattttgtggttcagacaccacagcaacagagctctctgtgattgagagtgttttcaagctgagagaagcccaacccagcgccattgtcgatgagatgaggaaatcactcattgatacttatgtctaaatattgctcatgttctactgcttgttgctaagatattccagttttgtgtcagtttttcccggtgaacagtttgtgatagttttatcatctaaaatatgaatgtttatttcaatcaagaatcatggtttccattaattgtatgtcatcttttatttcaatcaaagatatggatgcttttacgttaaa

SEQ ID NO: 30176 - DNA, 251 bp, Glycine max
  Clone ID: PAT_MRT3847_127251C.1
ctctcttctccatctggctacctcattcttaataagcacaattaccaaaagtgggggctgttgtctgaatcacaagattcatcttcgaagcaggtggccgatgaactgagggacagctgcaagcttgtgagaagttcctcttccggttcatctaaacatcggggaagagagagtcataaagggccctctggttggtcgctttggggagatgatgatcaattcggtccctacagtagcaagaaggggtcctt

SEQ ID NO: 30177 - DNA, 642 bp, Glycine max
  unsure (1)..(642): unsure at all n locations
  Clone ID: PAT_MRT3847_127252C.1
ggttttgatttgcctggccaccaattgggggcggtagatcaaaatcaagttctttcatttttacacttttgagtttttccaacctgaaatgtctctgttctggggttggatgctcgttccaaaacatccaatccagaaccacaataactttcaaaaccttttcttcctatgttttcttgaacattagttctaattcatttacaacactcagaagacatcatttgattgatacaaacatttgtcttggagaaatttgtagctggttccattgaagattggaagtactaacacatttgaagtgaaaaatttcggacgcaaaaatagatcgaagagattcaacaatgtcgtcaggcgcggtgaaaggcccggtgaaaggccaaatgaaaggcctcctcaaaggacttagatacatatcccaaatatttgacgaggaggatgaaaaggagatacaaatcgggtttccaacagacgtaaagcacttggcacacattggagctgaaaatgccaaagcaagtcaaccaagctggttgagcgagttcaaggaattatcagaaggtggaacagtgacgaagggcacatctgaaggtgatgcatcangtattgtagaagatgatgctaatagcaaaggtgaaggtagcaggc

SEQ ID NO: 30178 - DNA, 452 bp, Glycine max
  Clone ID: PAT_MRT3847_127253C.1
cacaatcatcatatatgtaagtgccactatccaaataaggatatgcaatccttttaatagtacattttttattggtactacagttttaactcagggtggatgaccaaaataatactttagtagtattcaaaatttaatgttaagagttactcaagtgcattaaaaatgaaatggtctgatcggttttgttatgggatgggattcttttggcctttcttgtattctgtggctctatgccttttctttttatttaagggagcttacaaggtagattacaaagagactttattgtgggctagttcgttttgtagtttgtacatgttccactcttgcttttgtataagaaaatagtatagttatcatcctctctgtacttgttctgcttgttcccttttaataaaacatattctgtgtagtatataaataaatttatttggaattggtgatacttt

SEQ ID NO: 30179 - DNA, 359 bp, Glycine max
  Clone ID: PAT_MRT3847_127254C.1
taggggaaaaggggaagccaatgcacgcttttagagatttcttatttgtttctttgtacattaatatggctgatagtgtatgattgcattcaaattattgtcaaaattcttttaattatatcttcttgtgttgcttgcaataaaattttcaatattccgtcgaaaaaagcgtattaacatgcatatacatattatgcataaaaaaactcccacaagggggggggccggaagacacaaacttttctaaagccgttgagttctaaggggcggtttcccatccaactagaaaggccctgaccctttcaataaaggggtgggcaattccccgattttacaaagcaaagttgagagacccccaa

SEQ ID NO: 30180 - DNA, 427 bp, Glycine max
  unsure (1)..(427): unsure at all n locations
  Clone ID: PAT_MRT3847_127255C.1
tacggctgcgagaagacgacagaagagacacctgcttactactgcgctctgcagtggttatatttcccctttcaaaagagacaatgtcgtgtttgtactgatcactttgatcaccggtgctgaaccatgagagtttaaatgaagcctgtctcgataataaagaaaataattaaaatcaatttgcttaagtaggagtaaatcagagtatatacattgcaattttagcaatagaaaagaggaatatgtctttgaagtaaaaatggtagaagatgtcttaccacagatttctaagttcaaatacatgggatcaataatacaagatgatggaaaaattaatgaagatgtcacgcanaggatacaagcgggatggataaaatagagaaaggagtcaagggttatttgtaatcgcaaagtccctaccaaaatc

SEQ ID NO: 30181 - DNA, 1022 bp, Glycine max
  Clone ID: PAT_MRT3847_127256C.1
gtcagtcatgtctttataatttaattttctaatgtcaaagaaagactggaacttatcagctgttgtcagcgtcattaacttttgggtaattttgtagcccccttctagtatactctgctatttgatcccaagatttggactatgtctttgccttttagggtttcaattattcaaatttactcgcatcatccatttacttattactcgcatcttccatttacttaatatgcagatgaagacttttatcatagtattattaaaactgatatgttaaatgtagcaatttgaccctcataaaatttttgatcgttacattattcataaaattctattatcaaattcaatggccctatgatggaaggctgtaaatagtacattcacatagattatgaaaatatattgactacaaagttttgttttataatacatctcgactttgggtgaataaatttctactaaatccatttgagaagatatttacataaaattttatgattaataaaatgcttatttttgtatgcttaaattagttcactttgtaattacatggcctttagtttgaaagctctgtaaattttacaagttttctcaaacttgatctcatactatatcagttacctgagggtgattttggaattgaaattctaaacattttgtgtgcatcatattttctcttggatgtgttttgctcaaatgaaatatgaatacttactctgctcatccaatctaggaaagataatgtatgggtgggtcacctactttctggatattcgctgccaatggaagatccaaaccagtcaaaaggagaaaaaaatgtggagattggtggaacatggagacagtctataaaagctgcatatgaagccacttattctgcatttcctggtggtgaaattcttgcacatctagaccacaagtgagcttaatgagcattgtccttatgcaatcagcaatctgtttgtattgctaatgccaaagcaagaagtgaatgctatttcatggttgagagctgaacagtttat

SEQ ID NO: 30182 - DNA, 389 bp, Glycine max
  Clone ID: PAT_MRT3847_127257C.1
aacgcactcgactttggcatttagctagggcattggagaaggcaccgctgttggcggagagcgagtacgactacaaggtggagttcagggcgtacttcgacgactcgtgggacgcgacgcgcgtttcgctgcacggagaaccactgggagtgacatacttcatcttctccgacgactacgacaacgcgtttcaagcctcctagtttgcggacgtgtttgagcatcaggagtttggggaagacttcagagacctctccaaacacgttcacgacaacgattgtgatacacactctgatgctgtctcggtcggcgcgtgtcactgtctctgtcaatgatgatcttcactacgatgaccctgtcgtcgacggggtgcaccatggaatgcatta

SEQ ID NO: 30183 - DNA, 445 bp, Glycine max
  Clone ID: PAT_MRT3847_127258C.1
aattcggctcgagtacggctgcgagagacgacagaaggggtcctccatgctcttttgttattctgcttcctttttattaataatactctagttgtgctgcttttggttgatggttccgatgtgtcaacttagttcagatcgttgtaacattcacatgcagtatcaagccgtttttatcacacaaaaaaagtttatgattttatgcattttctttaaaggtttttttaattaagtataatttatatattcctttaaagtgtacatttttttgtactgcctgtaacgtgtacatagtacaccagcttagtagaactaaatggtttgctgaatgacacggtggattcgtgtgttatattattagtacttgataacgttcatttcaattttattacttaattaatccaaagtttatttgtctatcttcggtattattttgaaaatgaac

SEQ ID NO: 30184 - DNA, 379 bp, Glycine max
  unsure (1)..(379): unsure at all n locations
  Clone ID: PAT_MRT3847_127259C.1
caacttcaacancacnaancacancgananactangannaanacnacncanaaccagagacaaacaacaanaccaaaaancnanaaaaaaanccaancacaaagcaanncnncaaagcacnaacanaaacaaagacaccncaaagagaaacnacacacacaaacgganatnannanaaagngancaaaaaaaaaanngacaaacaaagagaagaagagaaaaaggagaaangacatgnnnaaagncnccggagnagaagacngaaaagaacgngncanaggagagantgtganaccnaggaaaaganaccaaaaanancagaaanaanaancnaaaaaagaaaaaaaacaaaaacagaaaaaaganangnagaaaanan

SEQ ID NO: 30185 - DNA, 534 bp, Glycine max
  Clone ID: PAT_MRT3847_12725C.1
gaggaaaaaaaaaccgtttttgttttaacaactaattcccaacaaagaaggggcaaaaaaccccatttttttcacttaaaaaggggtttccccaaaaaaaaaaaaaaaacccaccctttaacaaaaaaaattttcctaaaaaaaacccctaaatcgaagggaaggggcaaaaaagtcagttaaaaaactagggaacttggggacagccttggccccccaaaaaacggggggcttggccaaatcaccgggcaaaaaaagcctgaccgggggctaaaattcccttgaagggagggggggctttttggtggaacgggcaaatttaaaaaaatccggggcaaccttttaaaaaaagtcgttgaaaaaactgttcaaaaatcccaaggccttgcttgaaaaaccaaagggaggggggacccgcttaaaaaccttgaaaaaggaaatcttggttggccccccccccttcggggttctttttttttttttcccttttccggcggggcctcccttctttggaagcttttttccggcctttgg

SEQ ID NO: 30186 - DNA, 2609 bp, Glycine max
  unsure (1)..(2609): unsure at all n locations
  Clone ID: PAT_MRT3847_127260C.1
attgaaatggcttctacttctaatgccatcatccaatgcacctcttcttcttcgtttgagtatgacgtgtttgtgagcttccgcggtgaagacacacgcaacagcttcaccgcttttctttttggagctctgaaaaaacaaggcatcgaggccttcaaagatgataaagacatcaggaaaggcgaatccatagcaccagagctaatacgagccattgaagggtctcatgttttcgttgttgtcttttcaaaggactatgcttcctcaacttggtgcctgcgtgaactagcacatatctgggattgcattcaaacatcacacagacctcttctgcctattttttatgatgttgatccatcacaagtgcgaaatcagagtggagactatgagaaagcctttgcccaacaccaacaaagttccaggttccaagagaaggaaattaaaacatggagagaagttctggaacaagtagccagtctctctggttgggatatcagaaataagaacacttgttaagctttccaatgaattaggatatcttggttgggaaaagtatccttttgagtgtttgccaccaagttttgagcccgacaaacttgttgagttgattctacctaaaagcaacatcaaacaactttgggaaggcacaaagcctctacctaatttgaggcgtttggatctctctggctccaaaaatctaattaaaatgccatatattggagatgccctatatcttgagagtcttgatctcgaaggatgtatacaactcgaagagatcggtctgtccattgttctttcaccaaagcttacttctctgaatttgagaaattgcaaaagtcttatcaagctgccacagtttggagaggacctaattcttgaaaagctacttctcggaggatgtcaaaaactcagacacattgatccatccatcggtcttctaaaaaagctcagaagattgaatttgaaaaactgcaaaaatctagtaagcttacccaatagcatactaggcctcaattctcttgaagatctgaatctctctggctgttcaaaactgtacaacaccgagttattatatgaactaagggatgcagagcaatcgaagaagattgatatagatggagctcctattcatttccaatcaacatcttcctactccagagaacataaaaaatcagttagttgcttaatgccttcctccccaatatttccatgtatgcgtgaacttgatctaagtttctgtaatttagttgaaatccctgatgctattggaattatgtgttgcttacaaaggctagatttaagtggtaacaattttgctacactgcccaacctcaagaagctttccaaactggtctgtttaaagttacaacattgcaagcagttgaaatctttgcctgagctcccttcacggatttacaattttgatagactaagacaagcaggattatacatttttaactgcccagaattagttgatagggaacgctgcactgacatggctttttcgtggacgatgcaatcgtgtcaggtgttatacatatatccgttctgccatgttagtggaggtgttagtccaggaagtgaaataccaaggtggttcaataatgagcatgagggaaattgtgtaagcttagacgcatgtcctgttatgcatgaccataattggattggcgttgcgttttgtgcaatattcgtcgtacctcatgaaacactctcagcaatgtgtttttcagagacagaaaggatctaccctgattttggtgatattctagtggatttttatggagatgtagatctagaacttgttttagacaaatcagatcacatgtgcctattccttgttaaacgaatggatttcatttatcattttcatctcaagcacaaatatcttggcagattggttttggaatgtgatgatgagtggaaagagtcatatgcggaggtgaagaaatacggatatcgctggctatatgaagaggatatagaagggccatcaaatccgttggctaggaagagcaaatttgggggaaatgaagaaaaagtgagcagaagggagaaaagatgatgcaagctgctcccaggaaaagacaataaagttgaatgttagggtgtagaatcatcatttcttctctcattttattcatttcagtcgtccttcaaattttgaataagcttggtggcgtaaaatcaggtttttggttgttatgggatgcttgtgtagctgtctttgttggttaagaatattgtttttttttccttttttggtttgagtaatgttaacagatgcaatttctcgttttcccatccctccatcaaggttcatatatctggaataagcattccaatcaccttgcccatcataaccttacctccataataatacgcagatgggtatccatttggaacaaagcatgaatttggattgaatggcttggccctccctttagctgcccccgcgagcggccctgtacaacaccgagttattatatgaactaagggatgcagggcaattgaagaagattggtatagatggagctcctattcatttccaatcaacatcttcntactccagacaacataaanaatcagttagttgctcacggctcgag

SEQ ID NO: 30187 - DNA, 737 bp, Glycine max
  unsure (1)..(737): unsure at all n locations
  Clone ID: PAT_MRT3847_127261C.1
ccttcctctccaatatttccatgtatgcttaaacttgatctaagtttctgtaatttagttgaaatccctgatgctattggaattactgtgttgcttacaaaggctagatttaagtggtaacaattttgctacactgcccaacctcaagaagctttccaaactggtctgttttaaagttacaacattgcaagcagttgaaatctttgcctgagctcccttcacggatttacaattttgatagactaagacaagcaggattatacatttttaactgcccagaattagttgatagggaacgctgcactgacatggctttttcgtggacgatgcaatcgtgtcaggtgttatacttatgtccgttctaccatgttagtagagttgttagtccaggaagtgaaataccaaggtggttcaataatgagcatgagggaaattgtgtaagcttagacgcatctcctgttatgcatgaccataattggattggcgttgcgttttgtgcaatattcgtcgtacctcatgaaacactctcagcaatgagtttttcagagacagaagggaactaccctgattataatgatattccagtggatttttataaagatgtagatctagaacttgttttagacaaatcagatcacatgtggctattcttttgttggtcgaaggaaggttcattgaatatttccatctgaagcacanatatcttggcagattgcttttgaaatgtgataatgaaa

SEQ ID NO: 30188 - DNA, 400 bp, Glycine max
  unsure (1)..(400): unsure at all n locations
  Clone ID: PAT_MRT3847_127262C.1
gcgcgttcngaagagcgcagaacggctcgagcgggatcaaggtgatacttatgagctgtttttgaggaaattatgtaaccaactgagtggtgcggattggacatggagccatatgaatacactctgaggggcaattggacttatataatggttcatgttggacgaacaggaacactcacagtcggttatatgcgtagtggctgtagtgctcgcaggtctattcaccatatgctaggagagcgaagcagctactgcgagtaagattaggtatgaggatgtgcagggtctacatgattcaacagctcatggtatgaggctgatggcagatagatttctcaataccgctgctgaggaagagacgcatgcattctagtgttgtgataacatgtgacgccatttt

SEQ ID NO: 30189 - DNA, 4015 bp, Glycine max
  Clone ID: PAT_MRT3847_127263C.1
cactttcctacaattttcttttcatcacaaaacaacccctcgcatatattatatttgttgattcattatttgtatccacaaacacttgttcttccttcacagctttgcaattgaaatggcttttacttctaatgacgtcatccaatgcacctcttcttcttcgtttgagtatgacgtgtttgtgagcttccgcggtgaagacacacgcaacagcttcaccggttttcttcttcaagctctgaaaaaagaaggcatcgaggccttcaaagatgataaagatatcaggaaaggcgaatccatagcaccagagctaatacgagccattgaagggtctcatgttttcctttgtcttttccaaggactatgcttcctcaacttggtgcctgcgtgaactagcacatatcaggaattgcattcaaacatcacccagacatcttctgcctattttttatgatgttgatccatcacaagtgcgaaaacagagtggagactatcagaaagcctttgcccaacaccaacaaagtttcaggttccaagagaaggaaattaacatatggagagaagttctggaactagtagccaatctctctggttgggatatcagatataagcaacaacatgcagtgattgaagaaattgtccagcagataaaaaatatcttgggttccaaattttcaactcttccatatgataatctagttgggatggaatctcattttgctaaattatcaaagctaatatgtctgggaccagctaatgatgttcgagttgttggaattactgggatgggtggaataggaaagtcaactcttggtcgagctttatatgaaagaatctctcatcaatttaattctctttgttatattgatgatgtaaaaaaactttatcaaggttatggtacattaggtgtacaaaaagagttactttctcagtctctaaatgaaaaaaatctaaagatttgcaatgtatctaatggaacacttctggtatgggagaggctatccaatgcaaaggcacttataattcttgacaatgttgatcaagataaacagcttgatatgtttacagggggtagaaatgatctgttaggtaaatgcctaggtaaagggagcatagtcattataatttctagggatcaacaaatattgaaggcacatggagtagatgttatttaccgagtggagccattgaatgacaatgatgctcttggattgttttgcaaaaaagcattcaaaaataattatatgatgagtgattttaaaaagttgacttctgatgtattatcacattgtgaaggtcatcccttagcaattgaagtattgggctcatctttgtttggtaaagatgtctcttattgggggagtgcattggtttccttaagagaaagtaaaagtattatggatgtgttgcgaataagttttgatcaattggaggatacacacaaggaaatatttctagatattgcatgtttcttgtacgatcatgatgtgatatatgtgaaggaaattctagattttcgtggatttaatcccgaatacggcctacaagttctcgttgataaatcacttataaccatgcgtaggatagttgaaatgcatgacgttttgcgcaatttgggcaagtatattgttagagaaaaatcaccttggaatccatggaagtggagtaggttgtgggatttcaaagatctcaacatagtttcgttggataataaggtaaaataatttttaaatataaagtcctactattattctagaatttgtaaatacttttaaatatctaatattttctttcctcttttcaatgttcaaggcaacagaaaatgttgaggccatagttcatgaagaagactatgacattgaaaagactctgacttagaagaagactctaacttagaagactctgacttagaagaagactctgacttagaagaagactctgacttagaagactatgacttagaagaagactctgacttagaagaagactctgacttagaagactatgacttagaagaagactctgacttagaagactctcactttcttccaacagtgagggtggatgctctatcaacaatgagtaaccttaaacttctcaaatttagatacgctggctacgaaatcaattattcaggaacacttactaagctttccaatgaattaggatatcttacttgggtaaagtatccttttgagtgtttgccaccaagttttgagccggacaaacttgttgagttgattctacctaaaagcaacatcaaacaactttgggaagatagaaaggtaatatcaattattattattattatttttctatattgttttcatttaaataaacaaataaaaaggcaaactttcttaagataatccttttttctctatttaattaaagaaacaaaagaaaggctgaatgtcattattaattttgtttcctactattggtcttgtattgtagcctctacccaatttgaggcatttggatctctctggctccaaaaatctaataaaaatgccatatattggagatgccctatatcttgagtggcttgatctcgaaggatgtatacaactcgaagagatcggtctgtccgttctttcacgaaagcttacttctctgaatttgagaaattgcaaaagtcttatcaagttgccacagtttggagaggacctaattcttaaaaagctatatctcgaaggatgtcaaagtctcagtcacattgatcaatccatcggttttctaaaaaaacctcgatcatttgaatatggaaaactgcaaacaactcaaacgcattgatccatccatcggtttactagaaaagctcagagaattgaatttgaaaaactgcaaaaatctagaaagcttacccaatagcatactaggtctcaattctcttaaatatctgaatctctctggctgtgtaaaactgtacaacaccgagttattatatgaactaagggatgcagggcaattgaagaagattggtatagatggagctcctattcatttccaatcaacatcttcctactccagacaacataaaaaatcagttagttgctcaatgccttcctccccaatatttccatgtatgcgtcaacttgatctaagtttctgtaatttagttgaaatccctgatgctattggaaatatgtgttgcttagaatggctagatttaagtggtaacaattttgctacactgcccaacctcaagaagctttccaaactgttgtgtttaaagttacaacattgcaagcagttgaaatctttgcctgagctcccttcacggattgaaatcccaactggtgaaagctattttggaaacaaaacaggattatacatttttaattgcccaaaattatttgataggaaacgctgcagtaacatggctttttcatggatgatgcaattgtatcaggtgatccattctttttacagatctgaaggtgttagtcctggaagtgaaataccaaagtggttcaataatcagcatgagggaaattgtgtaagcttagacgcatctcatgttatgcatgacgataattggattggcgttgcgttttgtgcaatattcgtcgtacctcatgaaacaatctcagcgatggctttttcaaaaacagatgggtactactcgggttttagtgatattccagtggatttttatgaagatctagatcaagaacttgttttagacaaatcagatcacatgtggctattcttttttgatcgaaaaatgttcatttttaaattccatctccagcccgaaaatcttggaagattgcttttgaaatgtgatggaaggagaaagtggaaagagtcatatgctgaggtgaagaaatacggatatcgctgggtatataaaggggataatgaacaaaggaagcgcaaatttggggaaattgaagaaaatgaaggaatgatgtcagaagaagggagaaaagatgatgcaagctcctcccaggataacacaatcaactttggatcttaagcctgtagaatcaattcttctctcatttta

SEQ ID NO: 30190 - DNA, 1303 bp, Glycine max
  Clone ID: PAT_MRT3847_127264C.1
caaactgttctgtttaaagttacaacattgcaagcagttgaaatctttgcctgagctcccttcacggattaacaattttgatggactaagtcaagcaggattaaagatttttaactgcccagaattagttgatagggaacgctgcactgacatggctttttcatggatgatgcaattgtgtaaggtttgcatgttcctcctttgctcctgccatctctttctctctccttttttgtgaataggaatcaggaaataacatattagatgtctctgctgtaccaggtgttatacacatatccgttctaccatgttagtggaggtgttactccaggaagtgttagtccaggaagtgaaataccaaggtggttcaataatgagcgaaaaatcacctaggaagccatggaagtggagcaggttgtgggattttaaagatttccttaaagttatgtcagataataaggcagcagacaatgtggaggccatatttcttatagaaaaatctgacattcttcgaacaatttcaacaatgagggtcgatgttctatcaacaatgagttgccttaagcttctcaaacttgaccatttggactttaacgtcaaaatcaattttttttcaggaacacttgttaagctttccaatgaattaggatatcttcgttgggaaaagtatccttttgagtgtttgccaccaagttttgagcccgacaaacttgttgagttgattctacctaaaagcaacatcaaacaactttgggatgcattgtagcctctacccaatttgaggcgtttggatctctctggctccaaaaatctaattaaaatgccatatattggagatgccctatatcttgagagtcttaatctctcaggatgtatacaactcgaagagatcggcctgtccattgttctttcaccaaagcttacttctctgaatttaagaaattgcaaaagtcttatcaagttgccacggtttggagaggacctaattcttggagagctagttctcgaaggatgtcgaaaactcagacacattgatccatccatcggtcttctaaaaaagctcagagaattgaatttgaaaaactgcaaaaatctagtaagcttacccaatagcatactaggcctcaattctcttcaatatctgaatctctctggctgttcaaaagtgtacaacaccgagttattatatgaactaagggatgcagagcaattgaagaagattgatatagatggagctcctattcatttccaatcaacatcttccgacttcagacaacataaaaaatcagttagttgcttaatg

SEQ ID NO: 30191 - DNA, 172 bp, Glycine max
  Clone ID: PAT_MRT3847_127265C.1
cccacgcgtccgccaacccttccaatcaaatatccttgcgaaaatggcgttattcaccaggacagggttcatacttgggagagcagaccttaccaaccggtcggcagtagcaacgcacaggagatcactcgtagtgaatgctgccaaagctgttgaagcagaaaaagtcagt

SEQ ID NO: 30192 - DNA, 814 bp, Glycine max
  Clone ID: PAT_MRT3847_127266C.1
ccacgcgtccggttcaggtagcagaaaatgttgaggtcataataattgaagatccatatgacattcttcgaacaagaacaatgagggtcgatgctctatcaacaatgagtagccttaagcttctctaccttggatattggaacgttggcttcgaaatcaatttttcaggaacacttgctaagctttccaatgaattaggatatcttagttgggaaaagtatccttttgagtgtttgccaccaagttttgaaccggacaaacttgttgagttgagactaccttacagcaacatcaaacaactttgggaaggcacaaaggtagtatcaattattattattatttttctatattattttcatttaaataaacaaataaaaatacaaacttccttatgttatttctttttttctctatttaattaaagaaacaaaagaaaggatgaatgtcattattaatgttgtttcctactattggccttgcattgtagcctctacccaacaatttgaggcatttgaatctctctggctccaaaaatctaattaaaatgccatacattggagatgccctatatcttgagagtcttgatctcgaaggatgtatacaactcgaagagatcggtctgtccgttgttctttcacgaaagcttacttctctgaatttgagaaaaatgcaaagtcttatcaagttgccacggtttggagaggatctaattcttaaaaatctagatctcgaagggatgtaaaaactcagacacattgatccatccatcgggctttctaaaaagctagaatatttgaatttgaaaaactgcaaa

SEQ ID NO: 30193 - DNA, 528 bp, Glycine max
  Clone ID: PAT_MRT3847_127267C.1
ttttttttttttttttttttttttttttttttttttttttttttttttttttttttttttttttttttaggacgggggggtcacccgggaaaacccgaaccggacccggagggggacccactttaccttaaagggagcaagaaaaaagcggggggaagaaaagaaaaaaacggcgcccgggggaaaaaggaaatccgcgcccaaacccaaaaaaaaaaagggcgggaaaaaaaaagggaaaagccgggggccccaaaggggggagccaacccaaaaaaactggcggggcgccaacggccccgttccaagcaaaaaaacgagtcggccaaccggcaaaaagaaaccgcccaccgcccggggaaaggggggttttttattggccccaaggggggttttttttttcaccagggaaaagggcaacggcggggggaccttccccgccgggcccggaaagaggtgaaccaagcgggccaacctgtttggcccaaaaaggcaaaaacccggttagaagggggacaacggggggat

SEQ ID NO: 30194 - DNA, 1175 bp, Glycine max
  Clone ID: PAT_MRT3847_127268C.1
gattgatccatccatttgtcttctaattagcttatttttgtgaattttgtagactttgaaagtcttaccaagttaccacattatcatatttggcctcaattctcttgaatatttgtttctttacggctgttcaaaactgtataataaccagttattgaatgaacctagggatgtagaacatttgatgaagatttatataggtaaagctcctttttatccccaatcaacaccttcctactccagagaacataaaagttgagttagctatttattgccttcctcgccaattttcccatgtatctgcaaacttgatctaagtttctgtaatttagttgaaatccctgatgctattggaattatgtgttgcttacaaaggctagatttaagtggtaacaattttgctacactgcccaacctcaagaagctttccaaactggtctgtttaaagttacaacattgcaagcagttgaaatctttgcctgagctcccttcacggatttacaattttgatagactaagacaagcaggattatacatttttaactgcccagaattagttgatagggaacgctgcactgacatggctttttcgtggacgatgcaatcgtgtcaggtttgcatgttcctcctttgctcctgccatctctttctctctccttttttgtgaataggaatcaggaaataacatagagatgtctctgctgtaccaggtgttatacatatatccgttctgccatgttagtggaggtgttagtccaggaagtgaaatacgaaggtggttcaataatgagcatgagggaaattgtgtaagcttagacgcatctcctgttatgcatgaccataattggattggcgttgcgttttgtgcaatattcgtcgtacctgatgaaacaatctcagcgatgccttttagtgatattccagtggatttttatgaagatctagatctagaacttgttttagacaattcagatcacatgtggctattctttcttgatcgagaaacgttcattgaaaaattccatctcaagcacgaatatcttggaagattgcatttgaaatgtgatggaaggagaaagtggaaagagtcatatgctgaggtgaagaaatacggatatcgctgggtatataaagaggatatagaagggccatcaaatccgttgtctaggaagcgc

SEQ ID NO: 30195 - DNA, 1685 bp, Glycine max
  Clone ID: PAT_MRT3847_127269C.1
ggctcgagcttccttcacagttttgcaattgaaatggcttctacttctaatgccatcatccaatgcacctcttcttcttcttcgtttgagtatgacgtgtttgtgagcttccgcggtgaagacacacgaaacagcttcacaggttttctttttgaagctctgaaaaaacaaggcatcgaggccttcaaagatgataaagatatcaggaaaggcgaatccatagcaccagagctaatacgagccattgaagggtctcatgttttccttgttgtcttttccaaggactatgcttcctcaacttggtgcctgcgtgaactagcacatatctggaattgcattcgaacatcttccagacttcttctgcctattttctatgatgttgatccatcacaagtgcgaaaacagagtggagactatgagaaagccttttcccaacaccaacaaagttccaggttccaagagaaggaaattaaaacatggagagaagttctgaaccatgtaggcaatctctctggttgggatatcagaaataagcaacaacatgcagtgattgaagaaattggtcagcagataaaaactatcttgggttgcaaattttctactcttccatatgataatctaattgggatggaatctcattttgctacattatcaaagctaatatgtctggggccggttaatgatgttccagttgttggaattactgggatgggtggaataggaaaatctactcttggtcgatctttatatgaaagaatctctcatcgatttaattcttgttgttatattgatgacgtaagcaaactttatcgacttgaaggtacattaggtgtacaaaagcaactactttctcaatctctaaatgaaagaaatctagagatttgtaatgtatgtgatggaacacttctggcatggaagaggttacccaatgcaaaggcacttatagttcttgacaatgttgatcaagataaacagcttgatatgtttactgggggtagaaatgatctgttacgtaaatgcctaggtaaagggagcatagtcattataatttctagagatcaacaaatattgaaggcacatggagtagatgttatttaccaagtggagccattgaatgacaatgatgctcttcaattgttttgcaaaaaagcatttaaaaataattatattatgagtgattttgaaaagttgacttctgatgtactatcacattgtcaaggtcatcccttagcaattgaagtaataggctcatatttgtttgataaagatttctctcattggaggagtgcattggtttcgttaagagaaaataaaagtaaaagtattatgaatgtgttgcgaataagttttgatcaattagaggatacacacaaggaaatatttctagatattgcatgtttcttcaacgatgatgatgtggaatatgtgaaggaagttctagattttcgtggatttaatcccgaatatgacctacaagttctcgttgataaatcacttataaccatggatgaggaaattggaatgcatgacttgttgtgcgatttgggaaagtatattgttagagaaaaatcacctaggaagccatggaagtggagcaggttgtgggatattaaagattttcacaaagttatgtcagataataaggtagaataatttataaatataaagtcctcctattattctag

SEQ ID NO: 30196 - DNA, 308 bp, Glycine max
  Clone ID: PAT_MRT3847_12726C.1
tttcggtttggtgagctaaagtcaatttaccttgctttactttccactagtcacataatcccgctagcggacatgggcagactctccgacttgcacgacgatcacggcaccatcatgaccaccgtacataacggcaccgttctccaaaagtgcatagactgagatgccagtcgcggtcgtcccatcaacaacgcacagccggaacttacccgacgacaagggaggaatacccggggcatcgaggggtacaactgaaagacgacttgggagacgacccgcataatctacatgctgctattccttttaca

SEQ ID NO: 30197 - DNA, 348 bp, Glycine max
  Clone ID: PAT_MRT3847_127270C.1
cttacgcgttcgcccaataagaatgatcgttcaatttctgattatggagtacgcagacataacttcaatcgagtgtgatcagtggtataatacaagaggaacgtaggggaagataaagagacgacgataaaacctgtagggcgggtgcatgaggggaagctgctggagaaggaactaacgataatgaccgtactgactgtgaacgtggtggagacatcgactgtggaaggaatgttgctagcagggggtttaaagaaggaagacagtgggcaggtgggttcgatgggaacgttgaaagacgtccggatcatggagcgctttctgttcacgctgtggtggttggcccag

SEQ ID NO: 30198 - DNA, 2188 bp, Glycine max
  Clone ID: PAT_MRT3847_127271C.1
tttccggggcgacccacgcgtacgcccacgcgtcggttcacagttttgcaattgtaatggcttctgcttctaatgccatcatccaatgcacctcttcttcttcttcttcgtttgagtatgacgtgtttgtgagcttccgcggtgaagacacacgcaacagcttcaccgcttttctttttgaagctctgaaaaaacaaggcatcgaggccttcaaagatgataaagatatcaggaaaggcgaatccatagcaccagagctaatacgagccattgaagggtctcatgttttccttgttgtcttttccaaggactatgcttcctcaacttggtgcctgcgtgaactagcacatatctggaattgctttcaaccatctaccagacatcttctgcctattttctatgatgttgatccatcacaagtgcgaaaactgagtggagactatgagaaagcctttgcccaacaccaacaaagttccaggttccaagagaaggaaattaaaacatggagagaagttctggaacgagtagccagtctctctggttgggatatcagaaataaggaacaacctacagtgattgatgaaattgttcagaagataaaaaaaatcgtgggttgcaaattttctattcttcgaaatgataatctagttgggatggaatctcatttttctacattatcaaagcagctggggccggttaatgatgttcgagttgttggaattactgggatgggtggaataggaaagtccactcttggtcgagctttatatgaaagaatctcgcatcaatctcgagccgctcgagccgattcggctcgaggcaaactttatcgactggaaggttcagcaggtgtacaaaaagacttactttctcagtctctaaatgaaacaaatctaaagatttggaatttatcttatggaacagaactggcatggaggaggctacacaatgcaaaggcacttatagttcttgacaatgttgaagaagataaacagcttaatatgtttactgcgaatagaaagaatctgttacgtgaacgccttggtagaggaagcatagtcattataatttctagggatcaacaaatattgaaggcacgtggagcagatcttatttaccaagtgaagccattggatgacaccgatgctcttcgattgttttgcaaaaatgcatttaaaaataattatattatgagtgattttaaaacgttgacttctcatgtactatcacattgtgaaggtcatcccttagcaattgaagtattgggctcatctttgtttggtaaagatgtctcttattgggggagtgcattggtttccttaagagaaagtaaaagtattatggatgtgttgcgaataagttttgatcaattggaggatacacacaaggaaatatttctagatattgcatgtttcttgtacgatcatgatgtgatatatgtgaaggaaattctagattttcgtggatttaatcccgaatacggcctacaagttctcgttgataaatcacttataaccatgcgtaggatagttgaaatgcatgacgttttgcgcaatttgggcaagtatattgttagagaaaaatcaccttggaatccatggaagtggagtaggttgtgggatttcaaagatctcaacatagtttcgttggataataaggcaacagaaaatgttgaggccatagttcatgaagaagactatgacattgaaaaagactctgacttagaagaagactctaacttagaagactatgacttagaagactctgacttagaagaagactctgacttagaagactatgacttagaagaagactctgacttagaagactatgacttagaagaagactctgacttagaagactctcactttcttccaacagtgagggtggatgctctatcaacaatgagtaaccttaaacttctcaaatttagatacgctggctacgaaatcaattattcaggaacacttactaagctttccaatgaattaggatatcttacttgggtaaagtatccttttgagtgtttgccaccaagttttgagccggacaaacttgttgagttgattctacctaaaagcaacatcaaacaactttgggaagatagaaagataatatcaattattattattattatttttctatattgttttcatttaaataaacaaataaaaaggcaaactttctt

SEQ ID NO: 30199 - DNA, 334 bp, Glycine max
  unsure (1)..(334): unsure at all n locations
  Clone ID: PAT_MRT3847_127272C.1
natgcacgcgtacgtaagctcggaattcggctcgagggaaaattaatgnncctttnatttnnntctgcatctgtantattctatcaccaancaattccactcnncttnccancngncnacatnaaatcaatctgggatacaaaaacaantgccgnnattagnggaggaantcttnccatcaaccccaggnnagttcaagatcgagnggncccannacatgaaccgccaactctatcggctgtttcgcctccaacagcanatgttactntgggcgctcttcttaatnggnntcanggtttcctagcnnagttcctaggttcacngattgggcagn

SEQ ID NO: 30200 - DNA, 506 bp, Glycine max
  Clone ID: PAT_MRT3847_127273C.1
ctcacgcgtttgtctttgcgtccgatgaataacaagaattaccaccttgagagtcaaaccacttacacctttgagtgtgaaatcgcagatacctggctttatgtaatggcagatacggaggtgcaggtttatgaaatagatgttgaggtcgattttcaattgcatttgcgggccactctacacttgcacttggagttgatttaggatgcgacctatgcttgacttttggttgagccagagattgatgcaatgttggatctgtctactaatgtaatattgcatatgattactaataaacatgatgatgccactactttagatcttttaggggccacaaaatcagacctctttgaggaaataaacgctgactacgatgatcatgtagacctttgctagcagctacatgaactgctcttagagcatgatctagatctgacggtagaggatgatatctcttagagggtaaaggaggatgtatctcagcggatcaagctacatgatgcgca

SEQ ID NO: 30201 - DNA, 269 bp, Glycine max
  unsure (1)..(269): unsure at all n locations
  Clone ID: PAT_MRT3847_127274C.1
aaaacatccacatcctgttaacatttgaccaagattcatcgaacccctacccgtaccatgatgataactacatctccgtcgttgccgcaccctgctctatacagcgtttacttgagaacccatcatccactatttataatatagttcattttctcgaggctcagtcaacatcatcatcgtccactatttattttgatgtttgttaccgatttaagcacacttatttgtncttgggtgtatgcaatgggttggtttgcttgcttgattgt

SEQ ID NO: 30202 - DNA, 168 bp, Glycine max
  Clone ID: PAT_MRT3847_127275C.1
gggggggggaaaaagaaagataaacatagacacaaccacaaggaagaagtgaaccgaagatgacaacacaccacgaagacaaactgacacaatcagcgaaacccaagagcaagcccgcgacaaaaacgagcccacaatatctttaaggggggcccagagaccacccaa

SEQ ID NO: 30203 - DNA, 617 bp, Glycine max
  Clone ID: PAT_MRT3847_127276C.1
ggctcgagcttaatgatatggtattgcagggaataataaaggaagagcaattggatacttttaacatccctttctacactccatccccatctgaagtgaaattggaagttcttaaagaaggttcatttgccattaattgtttagaggtgtctgtagtgcactggagcgcttgggatgaatggagtgttcttgactttgaatctgaaagcggatacaatttgacacagagcatgagggctgtggcagaatctatgctggttagccactttggtgaagctatcattgatgagcttttcagccgttaccaagaaatcttggctgatcgtatgtccaaggagaaaactaagttcatcaatgttaccatattattgactagaaaaccataagcaagaagtttgcatctaaagtttctcaaaaggtttgtcgttgtaattattgtgactgtttgcttgatttgttcttctttttctagcaaattataactacgagtattctgttgtacctttggtagtagagctttcttttatatattttctccattctgttataaaatattttattacgtgaaattacgatacgtgattcgtctattaaacaaaaaaaaaaaaagggcggcc

SEQ ID NO: 30204 - DNA, 405 bp, Glycine max
  Clone ID: PAT_MRT3847_127277C.1
agaaaaataaaaggggggtgtatttagtgaaaaggggggtgcaaatagaaaccaggcccacttgggccttcctgagggttccaaaaaggaagagcaaaaaggttcagcccttctggtattgagaaatctctcgaaatttgtgagaaaaattatttccgtgaaaaaaatccaagccgaggtgcgtccgtaacgttttcgagacgtttccataagcgatttcgtggagatccttcaccgttcttcatcgttcttcgtcgttctttggtcttcaaccggtaagttcccaaaatcgaatctttcaattcattctatgcatccttaggggcccctacttggtttgcgtactttttgtttcatttcgcttgttttacgtacctccttttaacgtgctttaatccgttattt

SEQ ID NO: 30205 - DNA, 563 bp, Glycine max
  Clone ID: PAT_MRT3847_127278C.1
cgcacacacaccacccctctcctttctagttctctctcgaaaaccctaactcaatcacgcgtccgcccacgcgtccgcgattccgctattctcatttctcaaacatgacagcagcgttccaagaaggcggcggcggcggtggcggtggtggtgacgatgacgccaccatcgacgtgcataccacgcgcggcactcccatccgctaccttcccctcgaccacctctactccgccacctctccctgccgcgtcaccgccagcggctcctccaacgtcatgtcgaagaaaatcaaagctcgcaaactcaccctaacgcataacaaccattttaacaaccacgaccagaagaaaacggcgccatcttcttcttcgtccctgacccttcctcccaagccccctctcctcttcgtctactcgcggcgccggcgcaagaggcattccccttccgcgacggcgtcgtttgtcgacggcgcggagaacgacgagagcgagaggaggttgctgaagaagaggaaaattgggagcactgagttggagaggctgggtgtggattgaatactgcga

SEQ ID NO: 30206 - DNA, 448 bp, Glycine max
  Clone ID: PAT_MRT3847_127279C.1
tggtgaccctaattttttgaacgtccacaactgcacccacagcagatgtatccagcatcaacatttcaatagctgagggtatccgaccacaaattaccatacttcttatatcattagggggtcactgatcaagatattgaaggttgatagcataccagaaagggaattcaagaatgctgtatcttgtggtgtaccttctccatagaacaagcactagagaatctattatatcttatggaatgctgatgatatgagcacgaatatgaggattggggagaactgattcgaacaaagcaacctttgcgagtactaccgcattagtatagacactgactgttcactaaagtaatacattgtaaatgctggtgctgaagttgacgcagaagacctagatcctgatagtagaataagactgatgtgagttgaacagtacttgatgatgtataac

SEQ ID NO: 30207 - DNA, 195 bp, Glycine max
  Clone ID: PAT_MRT3847_12727C.1
gatttgctgcactgaaagtcttgccaaggttggtggcgattgcatcaatttatcgctcaggcatgtttaattgttgcacatggtaagcctggaagggaaattacggaaatgccttttgctgcgtggtagattcaagtcctggctcgtggacagagaatgcacgatggttatcttcctactatcatagaagagctc

SEQ ID NO: 30208 - DNA, 1718 bp, Glycine max
  Clone ID: PAT_MRT3847_127280C.1
ctcaaaaattctttttttttatccttcgttctctttctctctctgtctttctatatcctcagcaacacactcggaaaaatgtagaacaactagaatcttttgttccaaacaaaaacgtatgaattggtcggtttttctccggagtcgtcttcacttttctccgagtttttattatcatcatctctctcgtgtccctgtctccatctccatctcttagtttcttcttcaaatggcagaagttgaagacatagacaaccctcatcacgaccaccatcattacctttcttcttctacaacacaacctccaatgatcaatttcccgcgagatctgttaagaaccttcgtgggagtgaacaacaacagcaataaaaacaataacaacagtcagcaccacaatttgcctatgccagtggtgaagttagaggatgagaaagaagagctggaactaagtctcggcctttcgatgaatggtagatttggggtggaccctacagcgaagaagataaagagaacaacctcgataccggagtttgtgcgcgacgaggagatgggatatgctgctgcgatggggtgcacggggtctctggtgaggacgtgttcgcttccgacggagacggaggaggagtggcggaagaggaaggagttgcagacgctgcggcgggtggaggcgcgggaggaagcgctccgagaagcagaggaacatgaaagccttgagagaacaacaacagaggtccgaagggagcaatccggtggagcaaggtgcaggggagtacggtgaggttgcaccacccttggcgaggaccgtgtcgttgaccgcacgtgtttgtggactcggcttgaatggggacagtgaaaaggagaagaaggagaagagaagtggaatagagttgccacctccctcgccttcacagggttccattggttcttccggaatttcagaagctgagtctcaacagggtcaaggaacaacacctatggatgttagaagccctactagtgctaacttgttgccagacagcgaactgaaatcaccagcaggtgttgctgagaacaacacaggcaagaatgctgctgctgctgctgcagtaacaatgagaagtcaatctaacaaatattcaccaccacaaagcagaaccaaagacattgtgaggaacttgttggaagacatgccctgtgtctccaccaaaggagatggccctaatgggaaaagaatagaaggctttctttaccggtatgggaaaggtgaggaagtgaggatagtatgcgtttgccatggcagtttcctcaccccttccgagtttgttaagcacgccggtggcggtgacgtggcaaatccattgaagcatattgttgttagtccaagctttttgtgaggccaagagaaagaaccaaccaattatgagtgatcaaatttttactctattggttcctatgttcactcttgaactcaccacctctacttctaatctgcatgttatgttcaaattctgttcatcttttgaaatcgtagaaattattatgaaagagtctgatttcttattcaggtatttttttttcccatttgttcttatttgacattagaacgcaaggggcaatgatacttgttagagtttgttagctagttttctgttatctgttagttttctaccacttaatttagtacttcagtttttatctaaaaccatcaacttaatttagtacttcagtttttgtttttc

SEQ ID NO: 30209 - DNA, 1099 bp, Glycine max
  Clone ID: PAT_MRT3847_127281C.1
gaaagaaatattgcgtcgtcgataaatgcaagaaaagaagtaggttgagttcaatacctcaacaatcaacatacatacatcccaaatgaaaataaatcaagaaaaagtgtttataaaaaagaagattaagaggacaaactgtaaatgcgtgtttttacaatttataaatgataagaaaacagggcaatacagcacgcgagtcaaacactaataactcgccgttgtccccactgaccgagtcgaacccaactcgcccatccaacaacgattccataaacccgatttgcttcgagacccgacccgctatgacacgacacaccagcatggcccttctgcccctgcctccgccggagctttcatgtgcaccgccgctgccggagaatgtgcagatcgccgcctctttgccgccggggaaggacaatgcgcaagcgccgccgtagggagcgccgccggaggtaggacccaagcagtgaaacctcatgacctcattcccatccgcacggcatcgcgcattctcctcatagtcatgggccgggcctgtttcggcccgacccttgacggcctcgcgaaactcctcgaagcgggagacggttcgtgggccgttgtggactttaaaaatcatctcgaccaggcccgagaagggctttggcccccagctggtgtggaagataatctccacgacgttccgcgaacgggtggccctcgggtgagttcggatgtagagtaagggaagcgagggtcggcgtggcgcgtggcggtggctgtcacgctcatggagcggttgatagtggtttcgaagtcgggcttggcggcggatcaagggctatctggagctggggtctttctgaagaggcaaggacgtaggtttagttatggtgcctgggcctgggcttggctgtggacatgactaggtctctgatgttctgaacggtgtttctgcagctggaactgggatggtatacgtcttggtatgctctggacttgcattgcaatgacttaacccacccactcgccattacctgaacgagaagaacaagtaataatatttctgactcttatcttattcaacttctaacaaatggggtctcatccttccgag

SEQ ID NO: 30210 - DNA, 342 bp, Glycine max
  Clone ID: PAT_MRT3847_127282C.1
cacgatcaccacaactaagaaggagaagctattggtggtcgcttagatctctgggccagatcttaccacagtcaaccgtgccagagccgtcatggtagcttcaatcactggcattatgtccatcgctggcttctccactagaacgacctacaataacctaacctgcattgctagatacatttgtagagtgcaatgcatgcacgtgtcaactccatatagccagaaaaacactcagactctgaaatacctaccagaccttactgatgcacaatcgacataggaagaatgagataccatgtttacgaaggagatgtaatgccgtagcttgatagatccacagtt

SEQ ID NO: 30211 - DNA, 560 bp, Glycine max
  Clone ID: PAT_MRT3847_127283C.1
gagctacttttttatgctgagctattctgtcaattcaagtcaatgtttggttacatctaaaggagttgtctatataaattttggagtcactgagagagctagggtcggccatatgtttgaatgtcctgcattaaaaccttaattgtggttttattggacttgtttttgaagcatctggtgattaattatcttcgttgatgaaatttatatgatctgcatttatagcagccgatggaagtttttagctatagctattttgataatacacatatgatataggttgctgaccatatacatttttggatgttttgcttgtataaattatagcacaaacaactggattgtaattttaactattgatgataattgttggatgctatgatgcctggtagatattgtcatttaacacttttaaggtttctgtatatttttgtctcattaacgatattttgttgtttatagacaatgtggatttgggcactgcctgcggcaaatattacagagtgtgctgccttagcattattgatcctggtgattcggatatcattaagacactgcct

SEQ ID NO: 30212 - DNA, 480 bp, Glycine max
  Clone ID: PAT_MRT3847_127284C.1
agctggagctccaccgcggtggcggccgctctagaactagtggatcccccgggctgcaggaattcggcacgagctctctcaagaaattgattcttgatggctgccccaacctccaacagctaccagaggagggtcttcccaattccatttcaaatctttggattattaactgccccaacctccaacagctaccagaggagggtctttccaattccatttcaaatctttttatcatagcctgccccaacctcgagcagcgttgccagaacccaggaggccaagactggccaaagattgcccacattccaactgtacgatgtacatcttattttagggatagaagagatgcttgtgtaataatgtgaagagtttacttttaaagagataattgtatttcttatataataaaagtatattataataaaaagtgatattatctcttaaaaaaaaaaaaaaaaaaaaaaaaaaaaaaaaaaaaaa

SEQ ID NO: 30213 - DNA, 317 bp, Glycine max
  Clone ID: PAT_MRT3847_127285C.1
agaagttgagttgagttgaagttgcgcctgaaataaaattgagtgagaatacacagacacaaaacctgaagcaaaccgtggatttggaaggcagtgagaaaaacacgccatccaagatatcacaaatcaagtatccgcatgccagtgacattgacgatcaagaccacagaatgagccatccacctaggaacgggactcaacgcgacttggtcgcagtccagtatattgggacacgcttctccggatcacagacacaactcagtgtccgtagcgacctcggtgcgcgtgaggaaaccttatccaactgtgctggtcaa

SEQ ID NO: 30214 - DNA, 325 bp, Glycine max
  Clone ID: PAT_MRT3847_127286C.1
cttggtgttgcttcaggatccgcagattgacacagacagtggagttttaacgaagctttcagcggggagaacacttgtgaagacatccaaggcgcagtcattaatcccaccggtggtagcttattggatcggatctttaccagcagggggtcagagttgaattggataaaggctagaaagaaagacttctgatggaagagtggttgatttgcacaagagcaacaaaacagctcaccacgcagagaagtgaattaggctccatctgaaacaaagcagaaacaatggttctttcttgcagtgatcaaaacccgcttttacccgctta

SEQ ID NO: 30215 - DNA, 456 bp, Glycine max
  Clone ID: PAT_MRT3847_127287C.1
atttgcttgtagtatcagatagcactgggcgaacactaacacactcttggtgaactagatgctgtgctacaaggatgattgctacagcatcatgtggtctccgtgctgatgctcattcacagagggttctggcacttgcagacgagctagattggacatgagctcactatgtccaaactactacaacatattccgctggggacaactatttctttcattctgtgctgcacatgattgagggtacatgaatggacatactgactgccgagacagatgagatcatcttttaacttttgcgtctaactggcgacaaagcgtaccctgagtgggatttgaaactgttacatgcttgtgagatgaactaccgcatggacttacactatgtagcactgctggatgataatagcggagtcatgaactacatgatgcacatgttgtttcttgctgagaccctga

SEQ ID NO: 30216 - DNA, 268 bp, Glycine max
  unsure (1)..(268): unsure at all n locations
  Clone ID: PAT_MRT3847_127288C.1
tagattgcagccctcagcaaaaancaatggctgaagggagtcatagttatggaaatgctactaatacctcaggcatagaagtaaatgagaaggttatttcaggttcttgggcgcatcaacagatgctatcatccctaatagtaggggcgacccattcaatagatctaatggatggaatgctatcaaatcatccacacccagtaacaattctagtatgaaaattcgtgaaaatgaaagtgttgcagcctcatcatgacaaagctatgca

SEQ ID NO: 30217 - DNA, 187 bp, Glycine max
  Clone ID: PAT_MRT3847_127289C.1
acgacaaaacgacacaatgagttcatttactcacacaaatattcatagccgttttgtttgtgctcattttgaatgaccaccacaccaatctatatcctgaaccatattgagcaccttcttcatgatgaaccaacctatgacgaccaatagcctaaagacattccccaacgctctttttggtctgaaa

SEQ ID NO: 30218 - DNA, 1991 bp, Glycine max
  Clone ID: PAT_MRT3847_12728C.1
aattgtgcaaccctaaagtgtattataattttattaaaatagctacgctggtctatttagaacaagagttttagaaaattttcctcaacaaaatatcactaaaactccaaaatcaacagatttttctattgtaggtttataaccctctaccatttaagagttttattttttgtcaaattttaggcccagttaaattccatagaagtaccactaatgaatccaccctgctgctataacccactgccttagcaaaatcaggctgcttaaccaattgccgcactcccgtgcccgtaatgagtcaattaacacaattacacaactaaaacaacatagttcaatattgccattcagtttaggtacgtaacaggagcagcgaagcataaaagcaatgcatccaaattaaaacccacaacggtactggtacacatctgaacatcaaacacaacaacagaaaaagaccacaagaacaagaatctgaagtagattctagtagtcttcgtcctcatcctggccctcaccagactcagcacccacttcttcataatccttctcgagggctgcaagatcctcacgggcttctgaaaattcaccttcttccataccctcacccacgtaccaatggacgaaggcacgcttggcatacatgagatcaaacttgtggtcaatgcgaccaaacacctcagccacactggtggagtttgaaatcatgcaaactgccctctgcaccttggcaagatcacctccaggaacaacagtagggggctggtagttaataccacacttgaaaccagtagggcaccaatccacaaactgaattgtcctcttggtcttgatggtggcaacagcagcattcacatctttgggcacaacgtcaccacggtacatcaggcaacatgccatgtactttccgtggcgagggtcacacttggccatcatggacgatggctcgaaagcactgttggtaatttcagccactgaaagctgttcatggtaggccttctcagcagagataactggagcataggaggaaagcatgaaatggattctgggatatgggaccaagttggtctggaattcagtcacatccacattcagggccccatcaaacctcagggaagcagtcaaagaagaaatcacctgagaaacaagacggttgaggttggtgtaggtaggacgttcaatgtcaagggagcgcctacagatgtcatagatggcttcattatccaaaaggacagcaacatcggtgtgctccaagagagagtgggtggagaggacactgttgtatggctcaacaacggaggtggagacctgaggggaggggtagacagtgaaaccaagcttggatttcttgccataatcaacggagagacgctccaacagaagggaaccaagtccagaaccagttcctccaccaacggcattgaatactaagaacccttggagtccagtgcagttgtcagcaagctttctgatgcggtccaagcacagatcaacgatctctttcccaatggtataatgaccacgggcaaagttgttggcggcatcttctttgccgctgatgagctgctctgggtggaaaagctggcggtaagttccggtcctcacttcatcaataacagtgggctcaagatctacaaagacggcacgtggcacgtgctttccagcaccagtctcactgaagaaagtattgaaagcatcatcacctccgccaactgttttgtcacttggcatttgcccatcgggcccgatgccgtgctcaagacagtagagctcccagcaagcatttccgacctggataccagcctgaccaatgtggatcgagatgcactctctcattttcagagatgaaaaatcgaattccgggaaggaaacggaaacggagaagaaaggcgtttatgaagacgccttctttgaattctgcaagtgaccccttctgtcgtcttctcgcagccgtacgcacgcgtggccggacgcgtgggcggacgcgtggg

SEQ ID NO: 30219 - DNA, 634 bp, Glycine max
  Clone ID: PAT_MRT3847_127290C.1
tggctcggaacctttgggctgatttatgtgcttgcagtcgtgagaagatgatagaagggcatggtcgtgagaagatgatagaagggcatggtcgtgagaagatgatagaagggcatggtcgtgagaagatgatagaagggcatggtcgtgagaagatgatagaagggcatggtcgtgagaagatgatagaaggggaccgtaatcgaacaaccaagaaaagttacccttacagtagttcaagaaaacgaagagtatcagtccgcctgtcactccctcatcccgtgttcctattctacattcattccttgttattgtttaggatgcgtctgatgcggacggtgacttgacctggaatggccctacacatcatgccccgttggtaacaagaggaaatggcggtggaacagaatgagttgtatctgggaaagatatccgtttcactatcgcagcgtaactctttaacttaaatctcaaggggccagaaaccaagcccgaactcgtacattttgttcaccatacaaatgaaatttcaaccccgtaaacaaagcctagccatttatagtagcgcgaaagaaagaacttccggcgggttaccctcaaagacacactcgaaagattattcgtcaccaaatct

SEQ ID NO: 30220 - DNA, 2198 bp, Glycine max
  Clone ID: PAT_MRT3847_127291C.1
cccacgcgtccgtacggctgcgagaagacgacagaaagggataccaaggtggaggcttacccagatgacaagcttagtgcgcgagtctctctcccttataacccttcttccacttccgtgtcttttacgagttagatttctcattcgtcatggaacaacacattcactctctctctctttagtgattttttcgatttgattgacaaacacaacgaaccaaagttaactactttagagagagagagagagagagagagagagagagagagagtggagagtgaaggaagaagagaaggaggagagagagaaacaacagcagcgacgaggaaggtggagggtgctgagagaagatacaaaggaataaggatgaggaagtggggcaagtgggtcgctgaaattagagaacccaataagcgttcaaggatttggctcggttcctattctacccctgtcgccgccgcacgtgcctacgacacggccgtcttttacctccggggaccctccgcacgcctcaacttcccggagcttctcgtcagagaaggcccggccgccctagtcgccggctgcgacatgtcagcggcttctattaggaagaaggccaccgaggtcggtgctagagtcgatgctcttcaggcaacccttcaccaccactacgtgcccccgcggcaacttctctctggcggtgatggtgggtccggggatttcccggtgcgggttgttgacctgaataagatgcctgaacccgagagttcggactgtgagtgggatgtgaattgaaggaaaaaaaagtacatgttttcttattcggttgctaagcgcgggttgaggcaaagtgatgttgttgatgaggcctatgggtggtgccgagtactgtactgtatcttattccttcaattttctctcttgggtcttggctagttttttttttttagatattacaaaagaaattttggcgttgtaaaaatatattaaatgtaaattaactagtccagtagccaaaccattttccataacttccgcccctgatgatgattaccttagcgttcacataaaaatacttggtgattggactcgaagtctgaaagccaaattcacacaggcgtgccagcaacccctcaatggacagagtggactcctaagagctgaatgcttgaaaggagataacagcccaagttcctttcctaaggttctggtggatggtccatatggggcgccagcgcaagactacagggagtatgaggtggtgttgctagtggggcttggaattggggctaccccaatgataagtatactaaaggacatggtgaacaattttaaggccattgatgaggaggagggaataggtggtgctaaatcaccaacgaggttgagtgacttcaagacaagtagggcatacttctactgggtgactagagagcagggttcatttgactggttcaaaggggtaatgaacgaagtggcagaagaggaccgaaggaaagtgattgaactccacagctactgcaccagcgtctacgaagagggtgatgctcgctctgctcttattgctatgttgcagtccctaaaccatgcaaagaatggagtggacattgtctctgggacacgagtcatgtctcactttgcaaaacccaattggcgcagtgtctacaagcgcattgcgcttaatcatccagatgcccgagttggggtattttactgtgggccatcagccctcacccatgagcttcgtcagctagcattggatttctctcacaacacatccaccaagtacgacttccataaagaaaatttctgacaagatcgagctaagccgtccaccacctagatcattccactttgttttttgcctataaataattaagtttctacatgtggttcttatttatggctttgtaaaagcaccaaggcaggtgggagctaaatggttaaaatagagttgcctaccaattataaaaggtgtggacgtctgttaatgtctctgcgtgtctttatgtccatgtaaatttaaggagaaataaccactccttggaaacaccttgggagaaactagaaagtaatacagaagagagaataatgtctagctggagcgcacttgatactttgtattaatccccgatgccttttagctgatcaattgcagaattcaggagattcatttataaatattataaataatttgtgcacccgcaatatttatt

SEQ ID NO: 30221 - DNA, 548 bp, Glycine max
  Clone ID: PAT_MRT3847_127292C.1
agacattattctctcttctgtattactttctagtttctcccaaggtgtttccaaggagtggttatttctccttaaatttacatggacataaagacacgcagagacattaacagacgtccacaccttttataattggtaggcaactctattttaaccatttagctcccacctgccttggtgcttttacaaagccataaataagaaccacatgtagaaacttaattatttataggcaaaaaacaaagtggaatgatctaggtggtggacggcttagctcgatcttgtcagaaattttctttatggaagtcgtacttggtggatgtgttgtgagagaaatccaatgctagctgacgaagctcatgggtgagggctgatggcccacagtaaaatacccctgcattgcaatttaatgaatttggaaaaaagcaaaaagcagacgcaacgtgagtagaaggggtgggaactgaccaactcgggcatctggatgattaagcgcaatgcgcttgtataacactgcgccaattgggttttgcaaagtgagacatgac

SEQ ID NO: 30222 - DNA, 427 bp, Glycine max
  Clone ID: PAT_MRT3847_127293C.1
ggagaaaaaaatgttttggggatcccccataaaattggaagtaaacttcaagttttaaagcttaatttcaaaacttttaaagtttaaaacggaactgttttaatttttggaataaaaactaaaaaatttttgggaagggccttttaccaaaaattttggtttaacttttcgctttttggacccaactaaaacccgcccttccaatttttttggttaaacttgggggggtttccaggtttttttccctttaaaaatttttttggggttcaacaggggtacggaagttaatttcaaaatacatttttttcgcaccaaacttttttttaatttttaaaagctggttttttttaaaaaaaaccttttacctgcatggggctccacttttaatttgacccgttgccaaaccaacaaaaagggcagcaatgaa

SEQ ID NO: 30223 - DNA, 403 bp, Glycine max
  Clone ID: PAT_MRT3847_127294C.1
acgcccacgcgtacgaaaaaaataactagcatagactattgattattaaaagcataaagacattgatatgctagctgcggcaatgggatctagcagattatgattcaattaaagtacttgtgctatgaaaccttttcatccatgatcattgactcaagggttgcagaggcacgtaccctgccataatcagccttattgccttccaaagttgatatacctactgttggtcctcttccactggtggcaccactgccaaatatacctgtgactctccctacagtacctgaactacctgcagtacctattgtaccacttgctgtagtgatagttaataacgcccaaataatcccttgagtacctatgatctatgcattcactactacttattttgtcacttggtcaa

SEQ ID NO: 30224 - DNA, 379 bp, Glycine max
  Clone ID: PAT_MRT3847_127295C.1
ctatatcttttttttttttttcttcatttttttttatttaaaaagcgaagcaataatcttttaggcatatgactacaaataaatgcctgtgtattcaaatctatatctgctcccatagggaaggtgggtacacattaattacagaatacaattatcgtggttcagacgcaaccaaaccgaacctattatagtgttattgctccggcatgcttattgcttctgcattttcgtctggggcacaagtttgcttctacttaaatactatttcccgggaagaaagtacccttattggtaagctcctactacatgaaattctgtattttccatggggctaaaacttacccgttgtttaggggggttgtgtatgggcacagttttt

SEQ ID NO: 30225 - DNA, 454 bp, Glycine max
  unsure (1)..(454): unsure at all n locations
  Clone ID: PAT_MRT3847_127296C.1
aattcggctcgagtttcattatctttcttctcacacactctcttcatatgttgtttcttcattaatttttttttctatttatagtgaagattattatcaactataataaataaattcttttggaagttgaaacaaaaataactttcaatatattcattcaaataagttttatttagtaaaatacaattttttaattgcatttaaatcgcctaaatcttagtgataaaaattcaattattactatacatgcagcttatcttttgacttgaaagtctatattagtcgcaccattacatanataaataggaatttggatgtacaaagcttaaaagaaattatatcagccatggtatccgaacaaaaaggcaaaaagcaaaagaaagcanaaggaatgagacaaatgaaataaaaaaatgtgtgataaaaagtatataaatctctaaaagacctttct

SEQ ID NO: 30226 - DNA, 534 bp, Glycine max
  unsure (1)..(534): unsure at all n locations
  Clone ID: PAT_MRT3847_127297C.1
gacagaccgttggatgggtggttattgtttgggacttatatagggctggcttagtggtgggagaggagagaagggagaagtcttggactcaaatctctcccactaacaaactaacgattaacattcgtcggtaaaaaaaaacatgtagatgtttgtatgttttttttaagggtcatcagtaaaaattnnngatgcttnngtcctattatgatatcattcctttactaacaatccgttatctataaatgataaatttctcnnnnttaacactgaacagaagactccatggtagaccgagagtgtttttggtcttacagctcttgcaaggcagtatgaaatgaattgtannaatacaaaaaatctatctaaaatgaagttatgctcaatcttcagatcatacagaatattaagaatcactgattaatttttcnnncttgctggggaaatgaatcaacaatgaaatatggcttgaacaaatacaaaaataaaaagtnnaagtatcttctttagagaattcaggataaaccatagacc

SEQ ID NO: 30227 - DNA, 250 bp, Glycine max
  Clone ID: PAT_MRT3847_127298C.1
ggctcgagaccgattgctaaaatggaattttgatgctcagacatcatttttaccattctcttctgggttgctcttgcaggagagagccatgtccatgcatcgctacctgaggaagattattgggaagctgtatggccaaacactcccattcccactgtactgtgagagcttctaaagcctctctctgcatgtgttgaaatctgatgaactctctaagcaaatcgttgatacacagtacctcaaaacaatt

SEQ ID NO: 30228 - DNA, 413 bp, Glycine max
  Clone ID: PAT_MRT3847_127299C.1
aacactatatttaaactcactctttttggggttttttttacacattttctcgcccctagagtggtgacacaaaaaaaatgtacaaaaaaacagggcgcactcgtggaaacgcacacaaaggggaaaacccccggtgaaaacaaaaattcctcacaggggggccccccaaataaaaaaaaaaatccccccactccccctaaaataaaaaaacactgagcgctctgggggagacccacaaaggggggggggaaaacgcacacacacggggtcttccccacaaaataaaaaatatagcccgagagagcacatctaaaatcatacacaaaaatcttagccccaaagagacacacacaacgccccccttttatattgtgtccaccccccacaaaagagagggcaccccgggcgcgaga

SEQ ID NO: 30229 - DNA, 266 bp, Glycine max
  Clone ID: PAT_MRT3847_12729C.1
ctcttcttgttctcttgtgtgcgctgggtgtgaacagaaggtaagaaaatggaaagagggaaaagtttttcaaactcctcactttcttaaatcacttctctatgaaagtgaggagtttgaaaaattctctgcaagcttgacaggcttgtcacttatgcaaatttcaaggtaatgatgaagaaacgacacttaaggagacaaaatctgacgacaaatgtgcggagccattgaattctatgaggacacttttagcacaaattcataat

SEQ ID NO: 30230 - DNA, 296 bp, Glycine max
  Clone ID: PAT_MRT3847_1272C.1
ggtagcttttcccttttctcccatttttatattttctccaacacacaacccatagcgtaggggttattgaagaggccccgtctctcttctcctttgagatgaccatgcacatatcctctgtagaggaagccacggatgcgtacactatcatttatgatgccaaatctcttatttgcttcttcattcacactgaatcattgttcactaactataatctttctctgctgctcaatacacaccccactacctcgaaaatttcctttagctcatctatttatgggaaatcatcctcacct

SEQ ID NO: 30231 - DNA, 439 bp, Glycine max
  Clone ID: PAT_MRT3847_127300C.1
ctacccgccgctcgatgggaattgcgcttcaaggcgtctcgtagggctaatccgcctcacgagggtcaccaacggcacgtgcctttggggggcctgcgccccctactgtgaggccgcatacggccagtggtaagcacgccccgatcactagccagtgtaggtgaatagaggcgtgcatgccttaactaacacagcgtaactttgcgcctctgcacttggagaccagcgcgatgaccgattgatgacaggagcagccactgtagcactggatgcaatcacagaggggacgatgagcttgcaattagcagctgctgctgggagtacacagtctggcggtaggctctgaacacgtgcggatgacgacctgaatcatggtctttctactcctagccacaatgcatatgcataacagcatgttgaggctgagaatacaatgcac

SEQ ID NO: 30232 - DNA, 114 bp, Glycine max
  Clone ID: PAT_MRT3847_127301C.1
gcttcttaaggatagtagtaaccatgatccttcatacaggtcccaccttctaggatggtatgataacttctattatagagaacatcggctaatagtatgtgaactacttaaagc

SEQ ID NO: 30233 - DNA, 1961 bp, Glycine max
  unsure (1)..(1961): unsure at all n locations
  Clone ID: PAT_MRT3847_127302C.1
gccacgcgtccggtgcctttcacttttcgccctaccttacctaccataacatgatcccacgacctcactcctttcattctcactcatgacttccaaaacggacggtttcactacctgtcaccgtcacccttccacacccgtaaccggtttctgtgcctcctgtctccgcgaacgtctcgccggcatcgattcctcctccgccgactcgccggaactccgccgcaccaagtccttctccggccgcaccgccgacgctccatcctcctccgccgccccggagccccgccgcaggtcctgcgaggttggactgccgccgctgggcggcttgctgtctgaccccttcaacgttgccgacaagaacaagaagcctccgaatcggacagctgagatctgttccggccccgccggcgtcggaaccggagagaacgagggcggcaacgcggttagagtttctggcgatgacgacggagaggggaagacgatgaaggagttcatagatctcgaattgcgggacaaaaagaacacagggagagatttcagagacatcgctgcgagttttcgagatgcggcttccgttttcagcaagggattgatgaaatggcgacggaaagagaatccgaagagaaaccgcaacaacgacggcgccagtgccggcgttggttcggtcgaaaagctagggttgaggacattgcatgagacgcaatcggaggtcggagaatacggtttcgcgttaggtagaagatcgtgcgacactgatctgaggttatccgtggacgattcgcggttttcgttcgaagctcctcgagcttcttgggacggttatttgatagggaaagcgttccctagggtttccccaatggtttgtgttggtgatagggttttgcttgaagaagagggagaagagagtttggagaatggtgaagagtgttgtcctggtggttcagctcagactaagcattactattcagattggcataggaggagaaggagttcggctaggtcgaattcgcgtaagaagccgttaatgggggatgttgatgaattgagagtgatatctaatgctaaggtttcccctgcctccactgagttgttctatggggcaaaggtattgataactgagaatgatttgagggatgcgaatttgaaaacgtccaatagtgttctatctgatagtgtaatggagtctgcttctaaggatgatgcttgtgatgctgcatatggggatggccaaaagggattgaacaggtttcacaagtggggtaagtggtggtgtaaattagggatagtgcagaggagaagggaagataggttgggagaaggagagtatgctggtggtggtgtatgtggttaatgagccaattgcagagtcttggcagaagctaaggagggtggttaatggacaagcaagcgagtcggtttgtgagaagcttattcgtagccatagtgtttgttgtagagatccttgtagaacggtgggtttagccaatggctttgtgggttctgagactaaaggccatgttttcaatggaaggcagaagtttatgcttcagaggaaccggagtgttaggtattcaccaagtaatgctgacaatggcttgttaaggttctatttgacacccttgaaaagctataggagaagcaggtctggaaagactagcttaaagagttcaaatccaacagccagaagtttcttttgaggctgtaactaatggaagtatatctggttgtataaacatatataatgaaattgtttcttgtccttgcaatcaaagtacttcacattgttagattgcatcacaatagagagatataactgttgaaatctggctggttgcagctgttctcatgatgttggtagcagaataaaacattcattctgtgatactaatggcattgtgaatttctgattgcatactatcataagagtanagattgtaggttaagtttttaagccctgttca

SEQ ID NO: 30234 - DNA, 124 bp, Glycine max
  Clone ID: PAT_MRT3847_127303C.1
cttgggggggcatatgggctcatcctgggattttaaggttttggcttttggggccccatccttaagcccttttacaagaaaacggttggaataaaaagggcaccaggggaacacccttggattt

SEQ ID NO: 30235 - DNA, 296 bp, Glycine max
  Clone ID: PAT_MRT3847_127304C.1
cccacgcgtccgtacggctgcgagaagacgacagaatggctctgatgatgatgaaaaatataggggtcgttcttccgatatttccatgaagaaaacgttaacatacatcttctgatgaatgtttcttatgcttgacttcgtattcctcatatccataatactacaccggctatccatgacaataccaatgattcatatgctgtgcgtgaaatttttaaaagattatatcatttagaaccaaaccttggccccatagtggtgcactgcagtgccgatattggtagaactggaacata

SEQ ID NO: 30236 - DNA, 164 bp, Glycine max
  Clone ID: PAT_MRT3847_127305C.1
caaacaccaaaaaacttgaatttatcaatggagaaccattctttgtgggaaccaccataataacaagacattatttcaataaaatacacacatttaacagggtcctcaattagaaaacctaacggaaagcccccccattattaatttaaacccattggtgcttt

SEQ ID NO: 30237 - DNA, 256 bp, Glycine max
  Clone ID: PAT_MRT3847_127306C.1
attgaatccgattcaaggaagactcagagacttaatcctacggctcgaagaagtgtaagacgtttcattgaaccagcgtaatgctcttcaaatatcgttctcgatcacacacggtcatggtgacaacactattcgaaatatcgcagatggattctaggacgttgggaacgtcgtcaccaggtctaacagcttctcggtcaaggtctcctccttatcgcatgactactgtctagtttcacctatctcaaggggcgtg

SEQ ID NO: 30238 - DNA, 516 bp, Glycine max
  Clone ID: PAT_MRT3847_127307C.1
tcaagtcaaaataataaccccccaaattagtagctcacggtatcacgaggtattgatttgttgatgtgtatttgcctttggacttaggttaaccaagtcctgaacaataatcatccaagtcttgataactcatggtattgtgaggtgatgatttgttaatgttttgatacatgctgacgagttgttctagtcaatcatccttgccaacccatttgatcgataccatgtaaacttccttccaatgatcacaagagctattctcttttagacttttcaactcctccgataaccttcttttcaactctaactcgcatggtgaataaacattgacaaaaataacactttgtccaccttccttccatgttccttcaaggccaatatatccatctctttgaaatgaattattcaaactaaagtactccttactccaaagacataacaacccccctgcagtatttacagataacttcataattcattacacatcataatctccccaaatagcttgtcacatct

SEQ ID NO: 30239 - DNA, 608 bp, Glycine max
  Clone ID: PAT_MRT3847_127308C.1
gtttctcgtaatggataagatcggcgtggagcacatgatggagtgcggagattcgaaaaaggggaagggggacgccggagagaaaccgagggttccggcgagtgctgacgtggcggaggcgtgctttgcggtgaagcggcagatggaggttctgcaggcggagaacgggttgcttaggaacgccgtggaagatctccggcgagaaattgtcggcggccgaagcggaggctcgattttggggaaaaaccctaaaaagaacgagaggaaaacgacgtcggattacggtaattttcccgggaaatcgacggaggctgaagcgagtgaggaattgaagaaagcattaatgggagcagctggtggtagtagtgcttgaatttgaatctgtagaattgtgtttttctctgttgcaattttagtttcagttttgatgctgcgaaattttcttgtgtagtgttatatatattatgataatgatgatatataggttcattaggttggttcgtcaaggctgcttgttcttgtattcaattcaattttgaagttttgaacggaggatcatgaaaataagaaaatttgaggtttttagtagttggtacgaaatcagaatc

SEQ ID NO: 30240 - DNA, 245 bp, Glycine max
  Clone ID: PAT_MRT3847_127309C.1
cacaaggctactttggcatgtaatgctcttatcacaatgggtttcattggccgtccgaacactttgttgggttgggacttcgctggagcagataggcaccttaccattatagttggttgcgtcatgtcgtaccgctgaagacgcaaccacccactggatgtactgggcaggtgttgtcagcaatagaactctcgcggatcctatataaaaggatgtacgtatcgcctccagcgggaaccagaatc

SEQ ID NO: 30241 - DNA, 334 bp, Glycine max
  unsure (1)..(334): unsure at all n locations
  Clone ID: PAT_MRT3847_12730C.1
ctttgccttttgcattgtgggttctctgtaaacaaatcctggcgaaggaagattaatatggaatattcggctggggttgaatccctgagttgaaagcgttcagacattgatggctattctaagactgtctcgctctctcattcatgtgccaactgtacgacggaagacaggctgcgtaactgccacctacccttcgacgcacggtaggcgtagagctttgccttatgaatgtactagcccttcagacttgctcatactagctggcggancatgctgtcacttctagcttcatggtacctcccatggggacccactacacgtaagctatccccgg

SEQ ID NO: 30242 - DNA, 481 bp, Glycine max
  Clone ID: PAT_MRT3847_127310C.1
aagaactaaactacaaacatagaccactagcaatggctttatttgtttccaaattggtagtttcatagacaggaagctcttcttggtaccttgcagctccaataagatgatccagctcaaacatatctgaacttgaacaactcacatcatcatcatcatcttcatcatcatcatcataaaaacctctaaaatcaaattcaccctgaccagaatttcgataaccttttacaaaaccacgcgctgctgcttcttcagctccattttcatttccccgagcagtgttcttcttcagctcctttatggaagaacttcttacaccaagattaggttcactctcgtaaatgatgttacatttatgataactagattgtggttcagaatcctcacctaggattacgctaacggggtaaaaccttacggatcttatgacttcgttgatgttggattttttagcccgagagggtgttttgcttatgcaaga

SEQ ID NO: 30243 - DNA, 286 bp, Glycine max
  unsure (1)..(286): unsure at all n locations
  Clone ID: PAT_MRT3847_127311C.1
nnnccgaggagagccgatcnccacctacncaacncancgaggccaacncnnggngnnngtnncacngngtntncnccnngnnccnngncnacannncgnnnccctncnncccacanggcncncgtncnnnnnagnaccagngcgnnngccnancangagcngcnnccnccnggnnnnnnangggtntggagngcnagtngnnncactannnnntngcganngccntntngtggngnggnaggntcagacgcnangtgnnntgtagngttgngcncngggtgngtgn

SEQ ID NO: 30244 - DNA, 2369 bp, Glycine max
  Clone ID: PAT_MRT3847_127312C.1
gcgaggcgtggtctctctcgtttttgtctttcaccgcgttatggcaatcgccgttgctgtttgccactcttgtttctttttattcgtctctcctcccttcatttttttagtaaccaagacacttactaagtttggtagcttagctctgcctctgattttgatccttgtaaagttggtacttacatggatctatattctgttatatcttgttcattactttcgaccgccttcgcttatgttttatcttttgcccttctaagttctagataatcattattctgttcacattctaaatattcattgccctgaaccaaatcactttctttttttcattctctgtccttaaagttcgttgctttacattacagggtgtccaaccaaagctaccctcaaatctcaatgctttctaccaacaacaacacaacaagtgcaatgattctggagggttgcaggaggataaaaagtttctgatatttttatttttttgggtattgatttggatgatcctctcctttgagttgctgcttcaaggagagagagaattatttgggatgaaagatgctagtgttgatctgggtttttgctggaaggaagaaaagaaggttctgaattctgatatatagtaatcaagagtcaaaactgaggattcgttaggttggtgttgaatccagttccaatggacacaccaaatgcacagccgcaagctgcatcagcaagcacgccaaggaaaaaaatgacaaagcaattgacaggtaaaagggatgatacacctttgcactctgcagcaagagcagggaatatgactgttctgaaagacacggttggtggcactgaagagggtgaactacgtgtgttgctgacaaagcagaaccatgccggagaaacggttctttatgttgctgctgaatatggttatgttgatatggttagagagctgattcaatattatgatcttgctggggcgggaattaaggccaggaatgggtttgatgcactccacattgctgccaaacaaggggatttagatattgtgaagatcttaatggaggctcatcctgaattgtcaatgactgtggatccatccaacaccacagcagtgcacaccgctgcattacaagggcatactgagatagtgaagcttctattggaagcaggtagtaatctggcaaccatttctagaagtaatgggaaaacagctttgcattctgctgcgagaaatggacatttggaggttgtgaaagcgcttctggggaaggagccttcagttgcaacacggactgataagaagggacaaacagcaattcacatggcagtgaagggacagagtcttgaggtggtggaggagttgataaaagctgatccctcaacaataaacatggttgataataagggtaacacagcattgcatatagcaaccaggaagggcagggctcggattattaagttgcttcttgggcagacagaaaccaatgccttggtagttaacagatctggcgaaactgcactagacacagctgagaaaactgggaattctgaaattaaagacattctccttgaacacggtgttcgaagcgccaaagccataaaggctcaaccaggaacagctacagcccgagagttgaaacaaactgtgagtgacataaagcatgaagtccactaccagttggaacacacacgccaaactcgaagaggtgttcaaggcatagccaagcgcatcaacaaaacgcatgctcagggactcaacaatgcaataaactccacaactgtggttgcagtcctcattgccacagttgcctttgcagcaatcttcacagtccccggccaatttgctgatgaaccaaaagacatccctgcaggttcaggaatgaccattggtgaagcaaacatagccccacaagctgcatttctcattttcttcgtctttgattccatcgccctcttcatttctctggccgtggtggtggtgcaaacctcggttgtgatcatagaaagcaaagcaaagaagcagatgatggccatcattaacaagctaatgtggttggcttgtgtgcttatttctgtggccttcttggcactgtcatttgtagtggtggggaaggatcagaagtggcttgcaattggagtcactatcatagggacaactataatggccacaactttgggcaccatgagttactgggtcattaggcatcgcattgaggcctcaaacttaaggagcattcggaaatcttcaatgggaagcaggtcaaggtctttttcagtatcagttatgtcagattctgagctactaaacaatgaccgcaagatattgtatgccatatagaatcactaataaagccttgttgccctttcatttactctcttttttc

SEQ ID NO: 30245 - DNA, 355 bp, Glycine max
  Clone ID: PAT_MRT3847_127313C.1
tgtcctaccacgcgtccgcggacgcgtgggtggcccacttgttcgtagtaagtaaattccactccatatgttatgaagttaagagaacactcagaatgaataatattgtcttagttaatctcagttaagttcctaatggtatgcgattgaatcatcttgcaaaaatttagtatcaggacatttttttttctaatattatcacgtaaaattatttatatttatttattcattgttacaaacttcaattttaataaagataaagacgaaaaaattccaataatttgtatgccaaacaaaatggagtgaggagcacttgcgaggtattcaaagttgtctctggaaacatttaaaagag

SEQ ID NO: 30246 - DNA, 1835 bp, Glycine max
  unsure (1)..(1835): unsure at all n locations
  Clone ID: PAT_MRT3847_127314C.1
cgacccacgcccgtccgctgatttatactnnggaaggttaagcgagaatatgctgcgtggaaaaaagggtaaagcactaaagctccatactctcctgaatgcacaaacaaacaagcacatttgcatccttagaatttcatgttaaactgagtaaaaagaaatttgaaataaaatgcaaaacataaggttgaaatgtcttttgtatgagggggtaaatctttcacaaagggaccaccagactagctggtcagacaaatgctgtgtataattaataataaattctaactctaaatctttgtgtaaaattaagggaagatgatatcttgtttgtactatatgcagagtaaatatttaaaggtgtatgatatgattgtgacattgcatttagcttcatcacatgttaccaccaattcaaccatcgaatacactattgaccattaactagaaaattttgaaatctcatctgatttttttcaattgaaacggagcttcaaagcatggcagcttttacatcaattgttgtgcagtactcatccacatcatctttacagtctttggtaccttctttagaagctacacgcgatcataattcatggtgggggagagtgagatcatacagatccacaggaaaaaattcactccaacagaatatcacaagaggcttaacaatccaaaatgcagccacaaaaccagctaagtcaccagctgaagaagactggaaggttaagcgagaatatctgctggaaaaaagggtaagaagtgtggatgcaaaggaagctttccgtcttcagaaagaaaataattttgtgattctcgacgtaaggccagaagcagagttcaaagaggctcatcctccagatgctatcaatgtgcaaatatataggcttataaaagagtggacagcatgggacattgccagacgtgctgcatttgcattttttggtatttttgctgggactgaagagaatcccgagttcatccagtctgttgaagcaaaaatagataaaaatgcaaagataatagtagcttgctcagcagggggtacaatgaaaccatcacaaaatttgcccgaaggtcaacaatcaaggtcacttatagcagcgtacctgttggtccttaacggttataccaatgtctttcatctagaaggtggactgtacaaatggttcaaagaggaactgccaactgtttcagaggagtgaagctagtgccaaaagtgtgtgtgtagtcatgtgtagacctaattttaattgtaattatgacaatgctgacaaatttcaagaaatgaactgatgaactaaactgtgactgttgaacaggtgaggaaaactattgttcaaaaattgacaataaaaatggcatgttatattcagtgcagttctcgttccaaccggaaagggtccacttatctatcagctatatcttatctgcggtcagaattttagtgacttataaaaatcatgtatctgaactgttcatgcacaacggcggcataacgctaccatgtctcccctcgtatcgactcctaccatcgcagcaacaatggccataaaaaccgtccgtgcgcccaaccccgacttggcagtttggttcaccggtctgaagttaaacctaccattgcctaagcctttaaagaagctcttgccatggctagagccccgccataacttctatttcctccaataaaaccactcatgtgcacaaaagtacaacctgggattccggcaacctcagagaggttgtcattttctaaacccctccaaagatatggtaacggttttctgctctcaaatttagcaggtgaaattgccactgcctgcagtcgctagttctct

SEQ ID NO: 30247 - DNA, 186 bp, Glycine max
  Clone ID: PAT_MRT3847_127315C.1
gtgtttatgtgtttcaccttggtgcatacatcacattatggaggaccaaaatggtagtgataagtggtgccaatggctaattgaggtgaatccatacctagctatattgtcctttcagtttttcttcttaaggatgtatttcatcactatggtttctctcaagcatggtatgaattattgaatact

SEQ ID NO: 30248 - DNA, 297 bp, Glycine max
  unsure (1)..(297): unsure at all n locations
  Clone ID: PAT_MRT3847_127316C.1
tggaacccttcacttgctncggcnacctnaacttccttctnctcttcggaaacctnaactccctcctcctctactatcactgctgctccctcctcctctgcgggggaatnaactncctcctnctctnctatcactgctgcttcctcctnctctgcgggnactncanctncctcctnctctgcgggnantgcanctncctccttctntggantnacngcngggncctncttctctgcgggcactgncagctaccnnctnctcggcngggcnngcaaactgncggtctnctctgcgggg

SEQ ID NO: 30249 - DNA, 356 bp, Glycine max
  Clone ID: PAT_MRT3847_127317C.1
cgagataagtataggttctgtagcaggtagatatctacgttgccaatttaatcaagtaaaatgtaaattgaactgattcacgctacatctatccacaatgtgggcgcttcttgcctatttacctattttaaccatgggccactaacctttgtattattaggtgcctctcaaggcaacagaagagattatcctaatgcgtgatcgatagactaaattattgtgtattaagccagttaaaccaaataatggatactacctgtatatacagtgtattaaactctgatttaaaattgataccttaatttttctacttacgcacagatgcagatacaatgaagaggttcgcctttcatcaa

SEQ ID NO: 30250 - DNA, 325 bp, Glycine max
  unsure (1)..(325): unsure at all n locations
  Clone ID: PAT_MRT3847_127318C.1
acgagaattattactagactaaatgttacctttttaatgattcacaaaaaattgttggaaaaaaaaaaaaaaaaaaaaaaaaaaaaaaaaaaaaaaaaaaaaaaaaaaaaaaaaaaaaaaaaaaaaaaaaaaaaaaagaaaaaaaaaaaaaaaaaaantngggggggggccggatcccaatttccccttttataaagttttatggggccccctattgggacttcttttaaaacggcgggaatggggaaacccgtggggttccccaattaaatggctggggaaaaatccccttttcgccacttgggtaaattccaaaaaggcccgc

SEQ ID NO: 30251 - DNA, 490 bp, Glycine max
  Clone ID: PAT_MRT3847_127319C.1
aatttctcacactcgcaagtctcacgctgctcacacaggaagcgtcatacaaatgcacacagaaagtaaaaagcgggagttaaggagcggtggtcacggagagggagaataaataaaatcatcaccataccatggggggagaagaagtagtaagagttacatcagagtggttcgacgacaacgaaagcgatctgaacgactacaacattttgagcgagatcaaggacttgggagtgacgacggctcacgcattgaaagaagagatggatgacggctgccgctaactggacattcgggtagtcgacttctctcaaaccgatgtaagggttgcacgaccgtgggccactctccgatcctgaagaagacgtctgaaatggtgtacgaccctcacaccaaccctattgtgtcgtggagccaaactcgccatattttcttaatttaggactcgcacgagttctgcaaagcccttatctcaaagtacttcaagcac

SEQ ID NO: 30252 - DNA, 335 bp, Glycine max
  unsure (1)..(335): unsure at all n locations
  Clone ID: PAT_MRT3847_12731C.1
tcncccccnccngnccagtcgctgcangcntacntcnnctcggaattcggctcgcggaaggtccttgnntnnttcgtngctacaattttnntngcatggcaatgccatgcgnncgatntgntcctcctacnaatgcacactggctanggtgccntnctccggacgtgnnatgcgcangtnggnggntgctgnggaagcacacaacatcnttggctttgngaccattctgaagngtgcgttgacgcnacnanggaatacatccatggcgnacaatatngancagactccnaaacngttaaccaacaagcttnntntatgccagagactcgnngtcc

SEQ ID NO: 30253 - DNA, 1565 bp, Glycine max
  Clone ID: PAT_MRT3847_127320C.1
ctttgtcgctggttgtgttttgccgttgaagatatcaaaatcctacgaaaggagaggagaaagatgacgccggaggttgtggaggagaaggatcaggaggtccttgttgcagcagggatgaagaggcccaggaatggtgaaattcacactttgatagtccttttctctttgtttctattctcccatctctgtacgttctctcccgtcaacgttggctttctctctctcctcggattttgaaatagaaaagatgacgccggagaatgggaaagagaagaaggattttgatgcagaagcagcagggatgaagagatacaggaatggtgaaatctgggagtttgaggatgacatgggtgtctcagatggtgatggtactggtgtcttgttgggcttggatggtggaaccacctccactgtctgcatttgcatgcccatgattcccttttctcactctcagctccaatctctccctatccttgcaagggctgttgctggatgctccaatcacaatagtgttggagaaattgctgcaagggaaacgatagagcaggttatggcagatgccctttcaaagtgtggttcaaaacgatctttagtccaagctgtttgtttggctgtatctggtgttaaccatccaacagatcaacaaagaattctcggttggcttagggatatattcccaagccatgtgagactatatgttcggaatgatgctgtggctgctctagcaagtggaacaatgggtaaacttcatggatgtgtattaattgctggcacagggagcattgcatatggatttaccgaggatggaaaagaagcaagggctgcaggtgctggacctgtcttaggtgactggggcagtggatatggaatagccgcgcaggcactaactgcagttgtaagagcgcatgatggccgtggtccaagtacaatgcttacgagtagtattttacaaacgcttggtctttcttctgcagaagaattaatcgggtggacctatgcagatccctcttgggcccggatcgctgcccttgttccagttgtagtgacctgtgcagaggctggggatgaggttgcaaataagatcttgctagattctgtacaagagctagcttcaagtgtcaaagctgttgtagagagacttggattgtgtggtcaagatggaaagagtgcctttccccttgttatggttggcggtgttctcgaagcaaataggaggaggtgggatataggaaaagaagtaatgaattgcatttccaaatacttttctggggtaattcccattagacctaaggtggagcctgctgttggtgcggcatggctagcttggaattttttaatgaaagaatgtcacaaaggctgacaattgatgaagtggaatatgagaggaaaaaataaaaatagaaagcaaaaagaaaagcgacaacttgcaattcttgactattaaaagtgtatattactcaatgacgaaagtgtgaatacctattacctatgctatgccatgtagtttatgtaccatccaaaatatatgtttattttagtttaaaaaaaaaaaaaaaaaactc

SEQ ID NO: 30254 - DNA, 339 bp, Glycine max
  Clone ID: PAT_MRT3847_127321C.1
ccacgcgtccgacaaagtcaataatactggtaaatgccttttgtggggtttgtttgaataattaactggaccaaaaccttttcgtgttagcattgccatttttttgtgtgatacctctcatggctcattaacgggaaattgagtgagccaattttgatggtttgatcacttttatgttttgatttgttgcttccgttcttttgttatgcatttattttgtggctgtgttggggttttgatagactgatttaatctgtcataaagtgttaaatttgtatacgaggttacatatataaattttgcttatggtgcttattgtagatcttattttgtttgttg

SEQ ID NO: 30255 - DNA, 235 bp, Glycine max
  unsure (1)..(235): unsure at all n locations
  Clone ID: PAT_MRT3847_127322C.1
gtacgtaagctggaacccttaaagcggccgcttttttttttnntttttttttttttttttgggaaccaaggggggccgccttctttcagtcggattcttgtagccgtacctttcagncgtattgacgcatgcgcacggacgtgtggtcacacccgaagttcgaaccggtaattgcagaccgaccactgtatgctaaacagatttgcataaaaggaggccgataacagcttgatag

SEQ ID NO: 30256 - DNA, 132 bp, Glycine max
  Clone ID: PAT_MRT3847_127323C.1
gtcaacagtccaaacaacgatgggttgctagatcgctagactgacaaattccactctcttgtgagaattttcatggtacctgtgtgcaattgacgcccttaagctcgtgctagtacaaaagggccccaaaaa

SEQ ID NO: 30257 - DNA, 333 bp, Glycine max
  Clone ID: PAT_MRT3847_127324C.1
attgagaaacttatttgttttgaactttactcgttgttttacggcacccccaccaacgtgcaagacgagtaatttctgattgaacggtcttggaagtcagcacttaggagcgcacgtcgtttgagcaaacaaaccaatggcctacacttacattccggtggaagttgaataagcaaagatgtgtttgtgaaaggatgagagagtcaaggatgtcaaattcatccattatttagcatttgtaattatggtttacaataatggcataaactcgaaaatcctgatgagtcattagagacatctaacaacatctttcaaaattgccccatgtgtggt

SEQ ID NO: 30258 - DNA, 751 bp, Glycine max
  Clone ID: PAT_MRT3847_127325C.1
cacgcgtccggtttaggctcgagcttcttgttctgcaagtttaatggcgtgagagagtgtgtagagtacacctacggttcggttcggttcggttcccagaaaccgtatgagaatgttgaatctttgcatgcttcaccaactcctctcaaattaaaacccaataacccagatagatagatagatgtatgtgatcttgttgttttttctttttcaaatgctaatgcgattgtgagtcccttcatttgattgttcaacaaagtcctccactaccctacccacacgacgtcgtctcgttcttaatgggttaattttctttttccgttctgattcttctggggctccactgagtgagtgtgttagttttgtttttgttttgaaaaaatggcgagagagacgatagacaaagtgagagaccatggggaactggaggaggagctagaattgttgctggatgagatccctcacgccacatcacacaatctccttcgccaccatcatcatcatcatcatcatcatcatggtgatgacgacgatgccgttttcgtaacgaaacagacacaccatggtcacgctcatgctcatggtatgtattacgatgatgacttcaaatcccctatgagtgggttttctctgcaatctgacggttcttcttcgagtttgttctcgtcatcgcctccgcctttcgaggacctcaaatccaccgtggcttctagaagcttcgattctaagatccctgatttcactgtgaaga

SEQ ID NO: 30259 - DNA, 111 bp, Glycine max
  unsure (1)..(111): unsure at all n locations
  Clone ID: PAT_MRT3847_127326C.1
caacctaccatcaattttactaaccttttattcccaagagttttttacaatacaaccctttnaaaccaatgtctatctaattacctcacataaatacctaccttcttatcc

SEQ ID NO: 30260 - DNA, 292 bp, Glycine max
  Clone ID: PAT_MRT3847_127327C.1
gggggggtattttacaattccatccaaatccttcccaatgctgataaaatatcatgtctctagggaaaagaaaatcaacccgcaaagttaaacaatagaaggtatcaaatcaaaatcaatggatgaatatgccctggaaacaggggttgaagagaccgatgcttccctacccaccgactaacacgcatagattgagtgagcatctcgaagattgtatacaaaaccatgcgctgcgacccctatcacggcgccatgccgcttatgacaggcggttgtgacaaaaggtggcaga

SEQ ID NO: 30261 - DNA, 2914 bp, Glycine max
  unsure (1)..(2914): unsure at all n locations
  Clone ID: PAT_MRT3847_127328C.1
ccacgcgtccgtatgattatcaccaaatgcctgcacctttcattcagattaagttgctgaaaatacttgcattactgggaagtggggacaagcaggctagtggacacatgtacactgtgcttgaggatataattaggaggagtgattcaatgacgaacatagggaatgctgttctctatcagtgcatatgctgtgtggcttctatatatcccaatcctaagttgttagaggctgctgcggatgtaattgcgaaatttttgaagagtgacagtcataatctgaagtacatgggcattgatgcccttggtcggttgataaagttaagtccacatattgcagaacaacaccaactggccgtcattgactgcttggaggacccagatgatagtctgaaaggctcgaaaaactttcgaactactatacaaaatgaccaagtcctccaatgtggaagtgattgttgacagaatgattgattacatgattagcataagtgatgatcattataaaacatatatagcatctcgatgtgtcgaacttgcagagcaatttgctcctagtatcattggtttatacagaccatgaataaagtctttgagcatgctggagatcttgtgaatattaaggtggcccataatttaatgcgattgattggtgaaggatttggagaggatgatgatgctgcatatagtcagttgagatcatctgctgttgagtcatatttgcaaattattggggagccaaagcttccgtcagcatttcttcaagtaatctgttgggttctgggggaatatggcacagctgatggaaagtattctgcttcctatatcactgggaagctatgtgatgttgcagaggcatattcaaatgatgaaactgttaaggcatatgccggtttcagcattaacaaaaatntatgcatttgaaatagcggctctcgagccgaatcggctcgagtacggctgcgagaagacgacagaaggggggaggaaagtggatatcctatctgagtgccaatcgttgattgaagaatcattggcatcacactctacagatttgcagcaacgtgcttatgaattgcaagctcttataggtttggatgtacaagctgttgaaacaataatgccacgagatgcaagttgtgaagacattgaggttgataagaatctttctttcctcaatgggtatgttcagcagtctttagaaaggggtgctaaatcctatattcctgaggatgtgcgcactggaatggggaatatgaacaatttcagaagccaagatcatcatgaaactttgcagcatggtctaagatttgaggcatatgaagttccgaaggctccaatgcaaccaaaagttactccagtttcatttgcatcctcagcagacattgttccagtacccgaggttttgtcttccagggagacccaccatatctcatcagtgggatcaacatctgaggctggatcatcagagcttaagctacggcttgatggtgttcagaagaaatggggtaaaccaatgtattcgtcttcaacatcatctgcctctgtctcgtattctacttcccaaaaaccaacgaatggggcaactcaggtggatggtgctacaactgtcaattcaaaagtgcgtgatagttatgattcaagaaagacacaggttgagattactccagaaaagcaaaagcttgctgcttctttgtttggtggttcaactaaacctgagaaaagatcatctacaagtcacaaggtttcaaaatctagtgctaagtgctgcagacggatctcggggatcaaaggctgcggttgtacccaatgaagtagctgtggaaaaagcaattcatcaaccacctcctgctgatttgcttgacttggatgagccaactgtcactacagctcctccttctgtggacccattcaaggaattggaaggacttcttgacccaagcactaagtctgcaacaaatcataatgtagctgctgctacaaatgcccctgatattatgtcactctatgccgagactactgccagtggtggttattctatacccgtgagtggggggtatgatgaaatttctgcaacaaatcataatgtagctgctgctacaaatgcccctgatattatgtcactctatgccgagactactgtcagtggtggcgactctatacccgtgagtggggggtatgatgtaaatcttttatctgaattgtcaaatgcagctacaaaagctactcgtgaagaaacaattgtgaagccgttgccacaatctattatgggtcgagatgctaaagattctttggagaaggatgctttagtgaggcagatgggtgtgaatccctcgagtcagaatcctaacttgttcagtgacttgcttggctaatctgttttctaagccaattctagatcatgatgcttgaagatagattgcctagcgactttgctgctttatcgagttgcctgaaatagtttaatgtctgatatacacgctgaattgaataatacaagttattgtcaggcatggataaatgcagcctcctagaatggggtgattcaatgtcctggaatgatggcagaaccaggttaaagcttgaactcattgcagaatagcttttgtagctataatagaatggacgagtttcctcgcatcaactcggtcatattgttatttacacgtaggaagttcctggccatctttgttgtaccaaagctgtatttttttgtttgttttaaacatttatgtgcagttttccatgtccataagatgttttttcaacaatgagaagtttgacactgcggttaacaatcagtttgatgatgtgaatggcatttgcttttctaataattttagagtgataacgaggatatgtttatcacttcatctgttcctttatggaaataccattgtgttcataattggccc

SEQ ID NO: 30262 - DNA, 319 bp, Glycine max
  Clone ID: PAT_MRT3847_127329C.1
ggcccccgtaaagaagtccaagtccttgaagtccaacgagtcgctcaacgcgaagctcgcacttgccgacaagtccggtaagtacagtctcggctacaagagtgcgctcaagcaaatgcgctctgtaaaggccaagctcatcctcattgctggcaactgcccccctctgctgatgttgtacattgattactacaccatgtatgacaagatctacgcccaccacttcaacggccgcaatgtggctcttggcaccgcgtatggaaagatcttacgagttggtgacatgaccgtaactgaccaaggtgactatgatctgctt

SEQ ID NO: 30263 - DNA, 392 bp, Glycine max
  Clone ID: PAT_MRT3847_12732C.1
cccacgcgttcgtccacactttcttacactcatacatccactcgtccgcgcctttgattgtgagcatggttggtcttgctaccaaataatgattcacatattcatgctggatccctcttacccttcataagcaatatcgttttagtttgaaagccaccggtgaaactatccatgtgtgaactaaaacaacatgggtaattgacatcaaccgagcacgttactgggggtccctgccgtggcttccgtcgcagatgcttctgcaccaaacattgttaattttaagggcttcctttctagagcttccatacaaaatgacacatccatgctacttctactctcgtctataatgaaccactatgtaattgacaatacggggtacccaaactactata

SEQ ID NO: 30264 - DNA, 1878 bp, Glycine max
  Clone ID: PAT_MRT3847_127330C.1
ctcacttcttttatttctttttttctaatctcactagttacatatctatgcacttatttaatttcttggttgagaatttgtttattggctgcgagttgcgtcttgagagtactacaataattatatttcctttcgctgtgtatatttccaggttgcatccttcactggggaaaagcaagcagtatctagttatagcaaatttcttgtagatgcttacaaatcaggagttcatgaaggttccatagctggcgctggtctaggcacagttatgttagttattttctgtggttatgctttggctgtatggtttggcgcaaagatgataatggaaaaaggatataatgggggcacagtgattaatgtgattattgccgtgctaactgcttcaatgtctcttggagaagcatcccctagcttgagtgcttttgctgcaggtcaggctgcagcttacaaaatgtttcagacaattgaaaggaagccagagatagatgcttatgatccaaatggaaaaatattagaagatattcaaggcgaaatagagttgagggatgttgatttcagttatcctgcaagacctgaggaactgatatttaatggattctctcttcatataccaagtggtacaactgcggctttagttggacaaagtggaagtggaaagtctacggttatcagcttggtagaaagattctatgatccacaggcaggtgaagttcttattgatggcatcaacctgaaagaatttcagcttaggtggattagaggaaaaattggccttgtcagccaggagccggtgttacattgcatcctagcattaaggataacattgcatatggaaaggagggagcaacaattgaagagataagatctgcatctgaacttgctaatgctgctaaattcattgataagcttccacagggattggacacgatggttggtgagcatggaactcagctgtctggtggacagaagcaacgcattgtcattgcaagagcaatcctgaaaaatccgagaattctacttctggatgaagcaacaagtgcacttgacgcagagtctgaaaggatagtgcaagaggctctagacaggatcatgggcaacagaactactattatagtggcgcatcgcttgagcacagtgaggaatgctgatgtgattgctgtcattcatagagggaagatggttgagaaaggaacacacatagaattactaaaggatcctgagggagcttactctcaacttatacgcctacaagaagtaaacaaagagacagaaggaaatgctgaccaacacaacaacagtgaactttctgtagaatcctttagacaatctagtcaaaagagatcacttcaaagatctattagtagggggtcatccttagggaatagtagccgccactccttttcagtttcctttggtttacccacaggagttaacgttgctgatcctgaacatgaaagctcacaacccaaagaagaagcaccagaggttccactcagccgccttgcttccctcaacaagccagagattccagttcttgtgattggatctgtagctgccatagcaaatggggttatatttccaatatttggcgtgctgatttccagtgtcatcaagacattttatgaaccatttgatgagatgaaaaaggactccaagttttgggcactgatgtttatgatccttggtcttgcatcatttcttataattcctgcacgaggatacttttttgcggtggcagggtgtaagttaatccaacgtatcaggcaaatgtgttttgagaaggttgtcaacatggaagttagttggtttgatgagcctgaaaactcaagtggtgccattggtgcaaggctctcagcaaatgctgcttctgttcgt

SEQ ID NO: 30265 - DNA, 190 bp, Glycine max
  unsure (1)..(190): unsure at all n locations
  Clone ID: PAT_MRT3847_127331C.1
agcnanngaaanccccacaanagggnnaccaaactccncggcccaacagaggaagccaggggnnggaaagggancngccccngactncacatgcaagaaagacacaaaggaggcnaccanngaggccgngaaacagggcnacagacactncgacactgctgctgcttatggctctgaacaggctctcggt

SEQ ID NO: 30266 - DNA, 220 bp, Glycine max
  Clone ID: PAT_MRT3847_127332C.1
tcgaccacgcgtccggaaaaaaaaaaaaaaaaaaaaaaaaaaaaataaaaaaaaaaaaaataaaaaaaaacaaaaaaattaatacaaactaaaataataacacagggcaggggaaatatttgggcggcctattataatatccaaaatttcatttcccgtgctttccaactcaaatacctttaatatggtcccctaaactaaaatcaatggccttatttta

SEQ ID NO: 30267 - DNA, 294 bp, Glycine max
  Clone ID: PAT_MRT3847_127333C.1
ggccaaccacgggaaagcctaacatttttgggggaaggggaaaaatccccgggccagggttaaaaaaaagagccccggcttaaaaccccaaaacttggggggggccccccccccgggggaagggaatcccaggggaaaaggttccccccccgggcctggggggccccccccggcccggggccaaaagacaatcccccccggggggcccccccccaagagccgagggggtctaaacaacctggggaggcccccctttgggccaaatccccaagaacccccaaagtttggggggga

SEQ ID NO: 30268 - DNA, 270 bp, Glycine max
  unsure (1)..(270): unsure at all n locations
  Clone ID: PAT_MRT3847_127334C.1
cagannantcttcatactagtccggagccctgagggggtctaaagagccgacctcctagcaggaagccagccgtgattanagaggatgccagctgaggctggagggagggcaactctgtccccagagataacttcctggggctcgtagcatgttgaattttcacttagcgttaactttagttttttattggtggaaaatgatttcaaatctcgctagtggaagancacnnaaaaannngaggatgagattgattcacattgtgacatatc

SEQ ID NO: 30269 - DNA, 493 bp, Glycine max
  Clone ID: PAT_MRT3847_127335C.1
acgagctcgctggtagtgctctttggatcaccttctggagtttgggttattaggaaattaggcttgacatttctcctcgctggtagtgttctttggatcaccttctgtagcatctttcacatttattcaaaacatcaaagttgcatagccatgcactttgtcttgcatcaaataaaactaaattagcttatttagaaatgtagtaaattttgttaacttcttgaatatacctaccaaccaaatgttaattatgttgttttctcctaaaagatcttcaaaatttactttactttgccagtttctcagttgactatggtatgttcaaattttgcatagctaacacagaattcgattggagaaaaggatcagaacaatataaattaattgaaaattgcctagcaacggttgactgacaaatcttacaagccatggctgatatttcttgcacataaggtacttggttattcttctacaaggttctatgctacagaag

SEQ ID NO: 30270 - DNA, 576 bp, Glycine max
  Clone ID: PAT_MRT3847_127336C.1
ggggcaaaaactgcccgggggcacaccccttttatttccccccaaaaaagctattagggtttttttcaccccccaatggaacaagatttcctttcagttcccatttaaaaaggggtccccaaaaccccttcccccaaaggagccaccccaaatcctggtgcacagggctggttttaattccacaccggaccacccatggcaatatgcatccattgaaccttcttggaaacaaaccggtttaaaaaaaaaaccccaataatagcactacccgggcgaccaccagggggcaccatatcaactccccccgaattcattgacccccaaaaacttttttttaacgggaacccccatagtttgccccccctcgcttcaaaagcaacaaaaactttttttgcccggggataacttgggggaaacccccctggaattgggggtcccaaacccattttgccggccccaaataatggggccagggcaaccttttttttaagcccccggtttccagcctaccccaaagcatttggcaggggaaacccaccccctggccctggggtaataacccccaaaagccttccc

SEQ ID NO: 30271 - DNA, 464 bp, Glycine max
  Clone ID: PAT_MRT3847_127337C.1
gaaagaaaaaagttgcaaatgggagcacaataaccaattagcaaggggaaaataccaatagaacaggaatttcaatcactccaacatgcaacaaaggaaggaattaatttagaacaaacaaattaatttcctaccacattaaaacaaagaaaataaaaagattgagatgcaacattatatctacaatacaattgaagaagtagcattggataagaacccaatgttactccttagttttgttgttctgaccttatatatggtatttcgaacactagatttggttttttcatcctcagatctgccacaaacaacacatttggttataaagaggtggcgttgataacatcaaagagacctcacaacaagaggacgatgtcgttggcaatgaatctagttatcactttgcagctacaagaggaagactgaaaggagatgggttcactgctacaaagatggaccactac

SEQ ID NO: 30272 - DNA, 457 bp, Glycine max
  Clone ID: PAT_MRT3847_127338C.1
cttactctctttctctctctaaagggtttcctttgttctcttccaacttccaaggtaaccattttaatttttgagcctcattttgttgatgagaaaattaaaaatgaatatcatctggggtacttaaagtttgagactttgaacaatcttctattctgggtgttccacaatttgctgattttttttttggggtccgaaaatgaaaagaaataattgaaagatttttatgcttttcgacgttattcatttttgctaaacaaagtgcttctcatagtagtagtagttgaagttatagcttttttcaatgctacgggaagtggaaatggtaagatcaactattgtttctgataggtgctgtgctgttttctgattaaagaaaaaaggaagttaaggggaggttaacataaataatcttggtatctatttgtcagaactttgattttaatgattcattatg

SEQ ID NO: 30273 - DNA, 420 bp, Glycine max
  Clone ID: PAT_MRT3847_127339C.1
cccacgcgtccgattttctgtaaaaaaaaaaaaaaaatcatgttcggatattcgggtatcggggtgggaggaaggaaagacactcccgccacggaaatttctgtggctctgtgctttgagactgaatctcatctacagtgacaacatcgatcttcttccacagtttccactttccaccaccaaatctacgttagggttcgtcttcatttcaaattcaacaacttcgccaaccacgccatggcaactcttcaatcactgcgaccttctttccgtccatcaatcccatccccaaattctcacactttcccagccactccctttaattattcccccaaatcgattggctcaaagggtggcagtgttaccgtaagacactctatcgtttctcccagggtttcggtttccaattcggagtatagt

SEQ ID NO: 30274 - DNA, 1233 bp, Glycine max
  Clone ID: PAT_MRT3847_12733C.1
gtgcgtctctacttcatccacggtggcaaacgaatctggctctctagcttccttgaaactgcagccaattcggctcgagtccttcccataatcatttcttacattcataaacgacgtcgtcatcgctcttccgccctaatctctatcaagccccctctcttcctcgcctccgccctcatcggactcctcaccggcctcgacgactacctctacgcctgcggcgtggctcgccttccggtctccactttctctctaatccaagcctcccacctcgccttcaccgccgtcttcgccttcctcctcgtccgccacaggttcacgccctactccgtcaactccgtcgtgcttctcaccgtcgccgctgtggttctggctctgcgttccagcggggaccgccccgccggtgagtcgagtcgccagtacgtgattggttttgttatgatacttgcggctgcggcgctgtatgggttcgttttgccgttgatggagttggtgtacaaaaagagcaggcagcgtatcacgtactctctggtcatggagattcagcttgtcttgtgcttctttgctaccttattctgcaccgttggaatgataatcaataatgacttcaaggtgattccgcgagaagcaagagattttaagcttggggaaacaaagtactacgttgtgttggtgtggagtgcaataatgtggcagtttttcttcttgggagcaataggggttatcttttgtgcctcgtctttgttgtccggtattataattgctgcttttcttccagtgacggaagttttggctgttattgtatacaaagagagctttcatgcagagaaaggggttgctttggtgctctctctttgggggtttgtgtcctatttctatggagagataaaacaagacagggaaaagaacaagaatcgttgtccagaaacagatctgcctcaaagtcttcctcccaatgcatgattgcaagtaattaaagttgatttcactatcttttcttgtgttgaattgtcaatattgaaggctagctttggccccagatagaggaaaagaaaaaataagacaaagacaaaccgtgcaatgaataagacaaagctgttttttaatacagatttggttgcactactagatgtcatgaatatttttaatacaaacattttagtactaagttcaaatacaaacatgataacgttctacaatgtgtggaattttttgatatatatctaaaaaacc

SEQ ID NO: 30275 - DNA, 194 bp, Glycine max
  Clone ID: PAT_MRT3847_127340C.1
attttcaagctttaaactactgcaatgcatgtgggagctttagaaattatgattgatagttattgacgttctggctggaacataattagagcacagatattgggtgatgcttatcattacactactgaaaacgcagatcgtcttgtttttggtgcgcctttgagaggagggaggtccaatcgggaggatacata

SEQ ID NO: 30276 - DNA, 117 bp, Glycine max
  Clone ID: PAT_MRT3847_127341C.1
tccttggaagaaccaccccaccctctccttggcttttttatgagaaaccctgtcaaaccctctatatacattgtccctgaaacagtcagccttagcctttccttgcaaagggccctt

SEQ ID NO: 30277 - DNA, 394 bp, Glycine max
  Clone ID: PAT_MRT3847_127342C.1
aattggagcgggcgcactacttatgggggctcatgtgagtttgttgaaacggcaacacacaggacacttggtgccccttttggggccagaagacgacagaagggagaaaaaggaatcggagatggaacagcttgctatggaatggatgatggggacgacatttacatgcggtcttggactggaaccattattgtgccccatattgctggtcgtgaaggaagaactcatcaactgtggctgttttgcgataaagactacccacaaaagccccccagtggtcggcttccttcacgaaccaatatgacttgagttcatcatgaaactggagcgggcgaaccaaaaaaactgggacctcttggaaaatggcaacggcacgttaccatggaagatatac

SEQ ID NO: 30278 - DNA, 389 bp, Glycine max
  Clone ID: PAT_MRT3847_127343C.1
aaaaaaaatagtgtttgatctaaaagatccaaaacttacaaacacgggcatgcggaaaaaataaataataggtctggcggggccgtccattcaaatctattgttacgcttctttacaacggcagtggctgggattatctgtgccattacctaacttaatttccttgcctttttacctctttgaccgttggcacaaggacaatacttggcttaccgatcttaattgtttgcattttttaccctttggcgtaattggtataatgcctgtaccgtcccatctttcttgccgtgtgaaaagtttactagcaaaatgatcgatcggtttgccacccccttaggtccagctggtttggcggtttttgatggctttctcggctcgtttttttgctt

SEQ ID NO: 30279 - DNA, 130 bp, Glycine max
  Clone ID: PAT_MRT3847_127344C.1
gagcggaaaagccgggctggcgttcataggctgccctgacgcataaaaatactataagtggaaaccgcgactataagataccagcgtctgaagctctgccttctgtcactgcgtaccgatacgcgctttc

SEQ ID NO: 30280 - DNA, 130 bp, Glycine max
  Clone ID: PAT_MRT3847_127345C.1
aatagaagcaaaattccatccaggctttaaaattgaggttatttgcaaataggtgtccccaaaaaccaccggacttgaaccgtatttttgaaaaattggacttgaagggcaacggattggtaacccttga

SEQ ID NO: 30281 - DNA, 779 bp, Glycine max
  unsure (1)..(779): unsure at all n locations
  Clone ID: PAT_MRT3847_127346C.1
ggtccggattcccgcgtcgaccccgcgtccgtcgtaatatagcagaggcaccaatcgaagcagtttttaccaatcctagctatggaaagtttgaacgtggagaagcattagaaaatattgcacaagatgtaaagagagtgctcgaggaagaaggtgatgaagaaagcttaaaagtcttgtcaaaggcagtagatactgtgaggaagaaggtggttcgtaaaagaattattgcagaaggatacagacttgatggaagacagctcgatgaagtaaggcctttgtattgtgaagctggatatgtttccatgttacatggatctgcactattttcccgtggagagacacaggtcttatgtacagtaacacttggagcacctacagatgctcaacgcttggaatctgtagtcggtcctccaacaaagcgatttatgcttcactatagttttcctcccttctgcataaatgaagttggtaaacgtggtggtctgaacaggcgtgaagttggtcatggaactcttgctgagaaagctcttcttgctgttttgccccctgaagatgattttccatatactgttcgtgtcaactctgaagtcatggcttcagatggttcgacatcaatggcaactgtatgtggaggtagtatggctttgatggatgctggcattcctgtacgtgaacatgttgctggggttttctgtggggtcttgtcagtgagctttgatccatccactggcganatagcagattatcgtatcttgactgatattctgggcttggga

SEQ ID NO: 30282 - DNA, 300 bp, Glycine max
  Clone ID: PAT_MRT3847_127347C.1
gcacataaaaaacctcaatcttacccttttaccggggtgaaaagtattatcaaccggaccctatttttgatttttccaaacaccacaactcacattttctttttctatatcatcccttaaacaaaattatcccacacataaccttatttgaattattgaacacctacatacccatgttttcaaacttgaattccggacctcaaccttcatgtttacaacctttccttatactaattcaccttacatcattggttcatcatgatcatacatgtttgctgtacaaaaactttatacagttac

SEQ ID NO: 30283 - DNA, 370 bp, Glycine max
  Clone ID: PAT_MRT3847_127348C.1
tcccctcctcaacccacgcgtcgagcccacccgtccgcacctccttcgaagtctcaactgttttcccctccgcatgaaaccgaaatccaaagcaccatcacactttcgctatcaactcaatggaaaatgcttcgccctctatcaacatctcctctctaaactttcacttttaccattgaaccatacatcgatgcacacaagaaggttgtccacgttaacctctgaatcttcaagaccaaaatcggaaaataatctctgtaactagttattgatattgaaaaacaagttcccgaatgctaccagggctaaatagggttgaacacatgacagtgagacgaacctaatttttgcgtacaaaaccctgtcataa

SEQ ID NO: 30284 - DNA, 377 bp, Glycine max
  Clone ID: PAT_MRT3847_127349C.1
acgtgttttttaaggccaccgaagggggtgcgacacagagtgtgatttcagcgagcgagcggcgtacactcgaccgcagcatagcagtgggccactccagcggaagatgtcgttaagaaacatagtccggggcaggcctgaagaggcgactaacgcggacacattcacaggggctgaggatgaggtcaggtcaaccgtgatgtaggcggtcgtcgcgtcacgctgccacggagactgcatcaagctcaccgacatcggagatgtcacctctgctacgcacaaatacgacgccatggcccatgcatgcgccctagacgtcgccgtcgacgaaagtggagacatgtccggcggacacatcaaccccgccgacatcttgg

SEQ ID NO: 30285 - DNA, 174 bp, Glycine max
  Clone ID: PAT_MRT3847_12734C.1
aaaaaaaaaaaaaaaaataaaatctgtttcgttttacaacaaacacgacaacacatcggaagggtcagccgccttaaaggactcaagctaacgaacgcgtgcatccaaagcatcacctcagtaatatagctcctacgtagcattccaacgcccgaactagaacaagccggaact

SEQ ID NO: 30286 - DNA, 897 bp, Glycine max
  Clone ID: PAT_MRT3847_127350C.1
cggacgcgtgggcggacgcgtgggtgtccccagaagtggatgacttgtcaaggggtgatttcatatcagaaactaaagctttggcaccggatgtggaaatgaagaaggaagatagtgtcaaggtggaaagaccagttaagaaggagaaaactccagaagaaattgaagaggcaaaaatggtaacatttaaggagaagtttgatgtgctaaaacatgatttcgagaagcaaaacaatgccaatgacataaagacaaacaataaattggaagagcaggatgggaatagggaactagctactatatcatcaaatcccaaagaagagataaccgttcaatctacttcaatgcctttatcaacagctgaatcaggacggcagagcagtctctctcccattggacacaagccgcccttgcagccagtttcaaagacggacaaaaccacaggatcattgacactaaagcatgcgaattttgtcctctctcaacggcaacccaagagatgtgcaacccattattacattgcttgtaacatcttacaccagcagtgtacaaagatgaagccccctttgccagcagctattggctctggttctgtgtgtgacacaaagcacaataatgtcaactgtgtgccctatgcagaaagtatggcctttgggaagcaatctcaaaaacacttaccaattgtaaaccaaaatgcttcacaagagaaagggtgggctgcgaccagcattcctagtcttactgcagccaaaggttctaataatgtcaaaccaatggattcagctcatagggtgcagcttgtgctccagcaaggtccaaatcctggtccaactggtaatctagtgcatggtcctgctttcctcttatcctccagccagcatcaagcgtcagttacag

SEQ ID NO: 30287 - DNA, 789 bp, Glycine max
  unsure (1)..(789): unsure at all n locations
  Clone ID: PAT_MRT3847_127351C.1
ccacgcgtccgagaagaaggaagatagtgtcaaggtggaaagaccagttaagaaggagaaaactccagaagaaattgaagaggcaaaaatggtaacatttaaggagaagtttgatgtgctaaaacatgatttcgagaagcaaaacaatgccaatgacataaagacaaacaataaattggaagagcaggatgggaatagggaactagctactatatcatcaaatcccaaagaagagataaccgttcaatctacttcaatgcctttatcaacagctgaatcaggacggcagagcagtctctctcccattgggtattagtctattattagatcatcacttccctaggaatatgcccttttcatcattcttatacttctagaattctactttatgttggttatatcaataatgtgactttgctaaggtcgataactatgattggcagacacaagccgcccttgcagccagtttcaaagacggacaaaaccacaggatcattgacactaaagcatgcgaattttgtcctctctcaacggcaacccaagagatgtgcaacccattattacattgcttgtaacatcttacaccagcagtgtacaaagatgaagccccctttgccagcagctattggctctggttctgtgtgtgacacanagcacaataatgtcaactgtgtgccctatgcagaaagtatggcctttgngaagcaatctcaaaaacacttaccaattgtaaaccaaaatgcttcacaagaaaaagggtgggctgcgaccagcattcctagtcttact

SEQ ID NO: 30288 - DNA, 161 bp, Glycine max
  Clone ID: PAT_MRT3847_127352C.1
cggaatgcggctcgagctcaccaccccctccttcaccacctccacctaagccatactattaccactcaccaccagcaccacgagcaaagaagagaccatagtagtagcagtctccacgacctgctcctccagagaggaaagcatactactatcagtcccca

SEQ ID NO: 30289 - DNA, 358 bp, Glycine max
  Clone ID: PAT_MRT3847_127353C.1
gaacacttgatgagctaaatgggaacctcaatgatctaaatgatgttgagaagttgaaagctgtaggctcaaaatgcctaactttgttccgggagtttcaagattcaataacgaaggtgcactggaaagcaccctgcttcagtggtgacggtgagtgggttgtgggtggttctgctaataaaggggagcacaagatttacgtatgggatagagttgggcatcttgtgaagatccttgaaggacctaaggaagcccttattgatttagcatggcatcctgtacgtcctattgttgtatctgtttctttgaatggcatagtttatatctgggctaaggattacaccgagaactggagtgc

SEQ ID NO: 30290 - DNA, 409 bp, Glycine max
  Clone ID: PAT_MRT3847_127354C.1
aaacacaaaaaaaacccttcaaccaaaaaataaactgggggaacaaaaaaaaaacccccccccacagaaaagttttaaagttttggaaagttttaacacaacaatttggaaaaaaagcttactaaattaaaaccccccggacaacataaaacggccccataaaaaacaataaaagggtttgggccgcttaaaaaaaaattttatccagccccaaaggccttaagttctcgcttccaaaaccccatgttaaaaaaaaaacacgggaaccgccaagggtctgctctaacattttaaaacaccccggggagctaaaccaaggggataaaaacttttaaagacccccaacctttggcagggtaaaaaaaacatcccccagggaacatcccccacaagcttccaatcgcccttt

SEQ ID NO: 30291 - DNA, 333 bp, Glycine max
  Clone ID: PAT_MRT3847_127355C.1
cagctactactcgcggcccccttttttttttatttctctccacccttaaaagaaaatcacactttttgggaaggactctctcataccaataccttaatgattcacacgcaacttgccattgtcactaacccctaatcaatatttaaaacccgctcatctggacttacacatgaaattctacactgctatgaatctatcaaacctaataagagtatagacgctctacttttttagcgccaaaccaaagaagcctttcctgtaaaaaccctgtctcacatactattcgctatatgcaactccaataaagcttaattccgagaggcaacggcctga

SEQ ID NO: 30292 - DNA, 229 bp, Glycine max
  Clone ID: PAT_MRT3847_127356C.1
ggaaaaggaggagaatgggaaaaaaatgatggatacgaacatgaagaaaggtaaaaatcttgcagttacaatggcaacgaaagcgggcacacgagcaagagaattgaagtccattaaatcagatctctgttttatgcaagaaaggggaggttaacttgaagaggaaaacaggagactgcgtgacggcactgcaaaaggagctagacctgaagaagacgaccaggggagg

SEQ ID NO: 30293 - DNA, 899 bp, Glycine max
  Clone ID: PAT_MRT3847_127357C.1
cacgcgtccgctctcccaccccgatccccccgaatccgaacctgatgttgttgtttcaaaacccgaacctgatgttgttgtctcaaaacccgaacaacaacaacaacaacaacctgcgatttattatttcccaggcgcggaacagcgcgtggtggtgtactacacgagcctgcgcgtggtgaggcccacgttcgaggcgtgcaagagcgtgctctccatcctacgcggcttccgcgtccaaatcgacgagcgtgacgtgtccatggactcgggcttcaccgccgaactcaaccgcatcatgggccgccccgagctcggcccaggcccatccctgccgcgcgtgttcatcgctggcaggtacgttggtggggccgaggagctgcgacagctcaacgaggtcggcgagcttaagaagatcctcctggacctgcccgcagtggatcccaccgctgagtgccacgtgtgcgcgggtcacaggttcgttctgtgcgacgagtgtaacggtagcaggaaggtctacaccgaaaagaccggcttcaaaacgtgtaacgcgtgcaatgaaaacggtctcgttaagtgcccctcttgtttaccttctacttctccaccacccattttatcatcaacaacatccaaatttaacaatgaaatccaaaattgaaaccattttcctcttttttttttttaaattaaattgtttaggttttatttttggataatgagttttgtagctttttgggcgtgtgagaatgatatgtataggcccatctggaagggtaatattttgaagattatatatcttaatttaactaacttgtttttttttttgttgttttccttttactcaatcacattgtctcttctcttgaaacaaaaagttgtgtaattttattttattt

SEQ ID NO: 30294 - DNA, 181 bp, Glycine max
  Clone ID: PAT_MRT3847_127358C.1
attttaagaaaatggtggactctgggttgaggcctaacttggctgcttacaataggttggttgatgggtcggttaaggtcgggaagattgatgcggccaaggcgttcctttggttgttggcgaacaatctcatgattgatgctgccctcctccattctatgatgacagtactaattgttca

SEQ ID NO: 30295 - DNA, 841 bp, Glycine max
  Clone ID: PAT_MRT3847_127359C.1
tgctgtctctgtctttgtttcaattccaaaacagacacttgacaccccctttttttcttcctttttttttctattttcttttttcagttaatctctttcgttgaaattttatggcaatgatattgcccttttgttttctctcttgcccccgaagtcactttctttcttcttagttggatggattaagtttgagagccatcttgtttggatgctgagaaaattcgtgagaaaatctcaaaatcaggttttttctcttttctatttctggggcttaaatttcacttaagaattcactgaacccagaaacaaaaattcaatcttttccctcttcccattatttttctgtacatggacacttatctgtaccactgaattgaatttcttgaactagagagagagagagagagagaggaaaaatggcatatgcacacggttttgctccaattttcaaattgggttttgtgttttcttctgtttcaccatcacaaaagagacaccctttggtgtttcctgcatcacactgtggatattccctcaaattctatgatggggtgttatctgccagatcctgcaagttcaaaaacccttcctttgtaaaacaaggttcaataagaggtttcagggctctgaaatcggttgaactggaccagtatgtgacaagtgatgatgaggaggatgaaatgagtgatggtttctttgaggcaattgaggagcttgagaggatgacaagggagccctctgatgttctggaggagatgaatgaccgtttgtctgcaagggaactgcagcttgtgttggtgtatttctctcaggatggaagggactcatggtgtgctttgga

SEQ ID NO: 30296 - DNA, 343 bp, Glycine max
  Clone ID: PAT_MRT3847_12735C.1
ggggaaatacaacctaacatgcacattgaccgttattgatggaaacaaatgctccatttaaatcacagaattaccttacccagaaatgttacggggaaaaacattaaattccaataattactactttaccacttgggtgaccaccttaatcgaagggcttgggattaacattaaatcttaacttaaccgaaggggccacaaacaaaaatttggtcacccaccaccacttccagaaggcaaattacccttattattcccggcacgattacccgcaccggcaccaagtcgaggggccaattgtttattatttgcattggattccccgattccttggccatttaaa

SEQ ID NO: 30297 - DNA, 1784 bp, Glycine max
  Clone ID: PAT_MRT3847_127360C.1
ccacgcgtccgaaggtttcagcggttggcacgcgtccggttaccctttcttccctcttccgatttgaatctggttcggtttcgctgttatcaaaatccaaatcatcatttggcgtagcatgctctttggcttcttcttcacctgcgaaggcgcttcgcagaatcctggactccccaggggtccaccaaggtcctgcttgcttcgacgctctcagcgccaaactcgttgagaacgccggcttccaattctgcttcagcagcggcttctctatttccgccgccagcctcgccttgcccgacactggcctcatctcttacgccgaaatgctccatcagggacaactcatcacccaatccgtctccattcccgtcatcggcgacgccgacaacggctacggcaatgccatgaacctcaagagaactctcaagggatacatcgcagccggattcgccggaatcattctcgaagatcaggtttctcctaaagcgtgtgggcacacgcgcgggaggcgagtggtttctcgagaagaggcggtgatgaagattaaggcggccgttgatgcgaggagagagagcggttccgacattgtgattgtggcgcgcagtgatgctcggcaagctgtgtcgttggaggaagcgcttgttaggtcaagggcctttgcggatgctggagctgatgttcttttcatcgacgcccttgcttccagggaagagatgaaggctttctgcgacgtttctccgctcgttcccaaaatggccaatatgctcgaaggaggtggcaagacacccatacttaatcctatggagcttcaagatattggttttaaaattgttgcgtatccactttccttgatcggggtttctatacgagcaatgcaggattcactcactgccattcgaggtggccgtattcctcctcccggaagcatgccatcttttgaagaaattaaggatatcttaggtttcaatgcttactatgaagaagagaagcgttatgctacaaccaccaatccgcagctttccaagagagagagcagtaacctatacagtatacaacggcgagatcaagttgatacagagcagacaaatcaaagtttcaaagatccaattgtggaagttataacacctgatgatgtgtacaataaatatggtgcagatagttcaaggaaccctttttctggtatctggtctcgaactctcagagtaaaaataactggcagagatggatttgagagacttgatcttaggattcctgctgggtttctggatggaatcacaaacatagttcctgctttgggtggcataaacatcaaagagcttttagatgatgctactgaggaagttggggggaaactcttgttagattttcaagacaggatgggtgacagaattcaagtatttctggagtgattccagacataacttttctcaagtctaacggtgataactggaagctaagggttaaacctgatctaggcacaacagctcggttgttggaagtgaggaagccggacgtggtacaagcagcatggtcatcgggaaccagtaatttaagatatcacatggatttattatccaaatactggaaaaagaaaaaagttattacgactatagtcaggaatgggaaatttcttgaaaataatttttccctttattgtcagcccatttttatatttatttgttctgatagggagaaagattctcatgtcctatatcgctaagataagtttaccgagcgttgaaactcacaatttcatgcaaaaaaaaaaacaaaaacttagattt

SEQ ID NO: 30298 - DNA, 2017 bp, Glycine max
  Clone ID: PAT_MRT3847_127361C.1
ggtcgacccacgcgtccgcccacgcgtccggttaccctttcttccctcttccgatttagaatctggttcggtttccctggtatcaaaatccaaatcatcatttggcgtagcatgctctttggcttcttcttcacctgcgaataaggtagagattccattgctaatgatagtgcagtcagcgatgaaggtttcggccgagggatagggatagggatggagaaagtgaaggtgcttcggcgactcctcgagacaccaggggttcaccaggggccagcctgtttcgacgctctgggtgcgaagctcatagaatccgctggcttcccctactgcatcaccagtggcttctccatcgccgcttccaggttggctctgcccgacaccggcttcatctcctacggcgaaatgctggagcagggccaactcatcacccaagccgtttccattcccgtcattggcgacgccgacaacggctacggcaatgccatgaacctcaagcgaaccgtcaagggtttcattgccgccggtttcgcaggaatcattctggaagaccagattgcgccgaaagcgtgtgggcacacgcgcgggaggaaagtgataccgagagaggagggcgttatgaagattagagccgccgtggatgcgagaagagagagtgggtctgacattgtgattgtggcgcgcacggatgctcggcaagctgtgtccttggaggaagcgttgacgaggtgcaaggcttatggggatgctggggccgatgttcttttcatagacgcactcgcttcggttcaagaaatgaaagctctctgtcaactttctccccatcttcccaaactcgcaaatatgcttgaaggaggaggcaaaacgcctatacttagtcctcaagaacttgaagacgttggttataaacttgctatttatccaatttccttgattggggtttgcatacgagcaatgcaggatgcactcactgctattaaaggaggcgctgttcctcctccgggaagcatgccatcttttgaagaaatcaaggacatcgtaggtttcaactcttattataaagaagaggagcgttatgctacaagcaccaatcaccagccttaaaaattataacagaggttggagagaccaatcttaaacaacagcccttgtactgtgtgatgatatcagtctacttttattctcagctacttttaactgtctttgggatatgttcattgttcaataccgaatgatgaatatcgatcttaatgtctgtctgtttagtagtattttatcaaaataaataagacccgtctaattaatcatggagtaaatttcgtgataaatggcaaggttgctcaaactggcagagatggataaaagaaacttgatcttaggattcctgctgggtttctggatggaatcacaaacatagttcctgctttgggtggcataaacatcaaagagcttttagatgatgctactgaggaagttggggggaaactcttgttagattttcaagacaggatgggtgacagaattcaagtatttctggagtgattccagacataacttttctcaagtctaacggaaattgatggttcatattgatgaaggtgataactggaagctaagggttaaacctgatctaggcacaacagctcggttgttggaagtgaggaagccggacgtggtacaagcagcatggtcatcgggaaccagtaatttaagatatcacatggatttattatccaaatactggaaaaagaaaaaagttattacaactatagtcaggaatgggaaatttcttgaaaataatttttccctttattgtcagcccatttttatatttatttgttctgatagggagaaagattctcatgtcctatatcgctaagataagtttaccgagcgttgaaactcacaatttcatgcaaaacggcgtctaagtttttttaaatctatagttgtgtatatgtctatttacaattacatcgactactttcacttcaaattatttttaagcaacttttactag

SEQ ID NO: 30299 - DNA, 521 bp, Glycine max
  unsure (1)..(521): unsure at all n locations
  Clone ID: PAT_MRT3847_127362C.1
agaaaaagaaacatgtcagacgcgttctgcagcgactgcaagaggcagacggaggtggtgttcgaccactccgccggcgacacggtgtgctcggagtgcggcctcgtcctcgaatcccactccatcnacnatacctccgagtggcgcaccttcgccaacnagtccggcgacaacgaccccaaccgtgtcggatggggcccctcctttcaccataatttctacctcnctctaccgacggagcttcaccgtatgcagccacggggggggggagtcttcttcctggcgtgggaccgggtcaacccgacggcctatcaccttaagactcgcccatgtcatagtggatgtgcaccataagagaggcatgccaggatctgtccttagtggtactgatgttgaagctatttgggaaaaaagcagttgattgttataagaggacatttatttgcatccctcatttgtgtcaggatcgggcaaatgagatatataagagggttgaagatcaaaagtctagtagaggaaga

SEQ ID NO: 30300 - DNA, 417 bp, Glycine max
  Clone ID: PAT_MRT3847_127363C.1
atacaaaaccggcgggttagcatccgcgtccgctcagggttaggatcgtttcatctacgatgtttgttctcctagggttatcgtgtttgtttcccatagcagctccaatttcttagttttgtgaattagcgtctttctcttttccgtgtttaattcatcaatgttatttgtcatgtattcaattgaatccgtgcacaataagccgatgctctggataacataatgaaggcagcatggttgtgtgctcggaaattgaaatattaggtcaatatgtctgctctctttgatgaacttaatgataagagggcctggttgcgacctacattttttccttgtttcctttcaaattttctttaatccctgttttttcaaagtgatggagatctggtttcatcggtgacggaaaaaaaaaacaac

SEQ ID NO: 30301 - DNA, 379 bp, Glycine max
  Clone ID: PAT_MRT3847_127364C.1
tccagaaaaaggttttttcccggcaaaatccagtttgttggtatcgaacatggacttctatgctaggagaattccctgtccgtacatactggatcgccgtctgctatgacttacaggagccttcaggtcctttgaattttttaacagctcctttctgttatgcgcattgcggagcccctttgccattcttgaactagaagctgcactgctcaatcattggggaggagtctataggccatgagggttgcccgtggattactgccctatggcagcgcggataggttttgctaccatacatctgtgggtggacaacccagatgctgctgctggggaattgaatgctacatctggaatggcaacaattctgaccactgtcatg

SEQ ID NO: 30302 - DNA, 430 bp, Glycine max
  Clone ID: PAT_MRT3847_127365C.1
ggctcgagctctagccggtcattctaccgttgaccctcttctcgcatttctttcaatagaacgtcctggactcatttctgctcatcgacctaaaagttgcctgtaaaactttttctgtcgcgataagttctttgatcataaactcgggatagtcatctgtgctattcttatctccctttgacacaaataatcctgcaaggactactcccctgaatactgtgagcgtctctatactacttttgccgaaagaacactggactaccgcgtctgaattctattgtgactctctagtccgtatcccacaatatcgacggcttaaccgtctgaactctcacgggactatctgacatcgttgacgaagagagttccggcatgggctcacacgccgtactcatctggtcgatatgatatacctgcccttgaaagacga

SEQ ID NO: 30303 - DNA, 283 bp, Glycine max
  Clone ID: PAT_MRT3847_127366C.1
gccacgcgtacctgcacgcgttctaaaaaaaaagatgtgatccggcgcgtacattctggaggggggcatatagaggatcgaagtgattttaaggccttttttattcatgcatccacacacttgcgctagagaactcaacactgaacaatttacattgctcattacacgaacataatcctcaaactattcaaaatctccaccctttgccgtttcatctagaaccttattctcctaacctatactattcccacaatcgttaacattttcccttattttcacaccc

SEQ ID NO: 30304 - DNA, 1341 bp, Glycine max
  Clone ID: PAT_MRT3847_127367C.1
tacggctgcgagaagacgacagaaggggacacaagaagtcatcttttattgtacgccaaagaaaagaaaagaaagaaatcatagtttttttgggttgtgtgtgtcttttggtggaggaatgcttgtcacctactccttttaagttcccccaaaaacacttttgtgagtgagagaaagaagaagaagaagaagaagaagaagtagcataagtgatggatagacacaaatgcaagctttgttcaaggtctttctccaatggcagagcccttggtggccacatgaaggctcaccttgctactctccctctccctccaaagcctcactcttattcctcttcctctgactcagaacaagaacaagaacaagaatctcttaattatgctttaagggagaatcctaagaagagcttcagggttgcggatcctgaagacagagagagcgaaacagagtctagaaaccccactcgccaacgatccaagcgcaaccggaaatccaccatgccgaagctcacaccgccaccccaccccgaacccgagcctctcagctccgtctccgacacctcccccgaagaagacgtcgccatgtgcctcatgatgctctcccgcgacacgtggcagcaacacaagcacgccaatgcagctacacctaagaggcgctgcagtagcggatcagagatcaagaaaaatgtccgcgggaaccacctctgccacaaatgtcacaaatcctttcgatcttctcgcgcgttcggaagccacagaaatgtgtgttgtccccgcgaggaaggccaaaataattacaacaacaaccgtagcactaaggttttcgaatgtccgttctgttacaaggtgtttggctctggccaagcgctcggtggacacaagagatctcacctaattccttcctcgtcttcaaccgttaacgattctgttaagttgaaacatagcttcatagatctcaacttgccggctccggcggaagacgacgaccttagcgttgtttctgatgcgtaattcgatctcgatatgtttaattgttcaatgtttagttgtctggtggtgttactgataaagtggattttttttcttcttcttctttttttttttaaaagtaggtgagaatatttcattgtttattaacagatcaaatgctcttgattctacaatgatagctgagtataagcgatgttctgtgtcttttttttttaacttttcgacaggtagaagatatgactagagttataacttacatggtgaattttattggtttatacgcaacttggttcatcgtactattaggttttaaacgtagtttcaatgcaaatttgagatttggttgtggacc

SEQ ID NO: 30305 - DNA, 435 bp, Glycine max
  Clone ID: PAT_MRT3847_127368C.1
gtggattgcaaccatccctcgcaataggcgaaaagtttttgagctcttcttctacactcactacctctacaccctcttcattgtcttcttcatctttcacgtgggcattttctatgcatgcactattctccccggtttctacctcttcttggttgatcggtacctaaggtttttgcaatcaagacgccgagttcgtttggtttctgctcgtgttttaccatgtgaaactgtagaactcaacttctccaagagccatgatttgacttataatcccacaagtattatgttcataaatgtaccaagtatatccaaacttcagtggcatccatttaccattacttctaatagtaatttggagccaaaaatgatgagtattgtcattaaaggagaaggaacttggtcccagaagctctaccagatgctttcaaccccttc

SEQ ID NO: 30306 - DNA, 136 bp, Glycine max
  Clone ID: PAT_MRT3847_127369C.1
gcctaccacacgtacttttacgtgcatgctccgactgatgatcctataccaccgctctgggctcagcctgagagatctaatgatctaagtactcgtcatgttggtttctcgtggtgttcatgctgatcaaccgcgc

SEQ ID NO: 30307 - DNA, 373 bp, Glycine max
  Clone ID: PAT_MRT3847_12736C.1
atttggccctcgaggccaagaattcctgccaacagtaacagtgcttaatgtgtcgatcgggaagtcgccttgcgtggcaccaacttcaagcctgatactgttgaggttattggggggttcttgaggggtaacactttgggttcttacttttggggtcaagctgctagcgatgtatttactaactgcttatcttctttttgaggcctctcattactctcatttttgcgagtatgctctctttgattataactctgtcctcctgcacatgacacgtcctgttgaaggtctcttaacggtctcatgtgtgtctattatattgtctaccattgtagtccttaatattacagtgtgtgccatatttggtgtgtggcct

SEQ ID NO: 30308 - DNA, 166 bp, Glycine max
  Clone ID: PAT_MRT3847_127370C.1
ggtgacagcccgcgagaagacgacagaggggggggcacatggagaaaagaagccccggataccccccgacaaaggacacgggaggggagcgcccagggccaacgagggcaggcgcgcaaaacggaagcccaacagcccaggaaggaccgcggagacggcccggggg

SEQ ID NO: 30309 - DNA, 389 bp, Glycine max
  Clone ID: PAT_MRT3847_127371C.1
tgctgaccggaccggcacgatggctcgctcggtgaccgtgatctttctggtgcttgtctctctggccgtcgtgcttgccattcagaaaactccccaaattcaagtgtactctcgccatccaccggagaatgggaagcccaacttcctcaactgctacgtgtctcagttccacccacctcagatagaaattgagctactgaagaatggaaagaagataccaaatatcgagatgtcagatctgtccttcagcaaggactggtctttctacatcctggctcacactgaattcacacccaccgagaccgatgtatatgcttgcagagttaaacacgtcactctgaaggagcccaaaaccgtcacctgggaccgagacatgtaatcaagctcta

SEQ ID NO: 30310 - DNA, 602 bp, Glycine max
  unsure (1)..(602): unsure at all n locations
  Clone ID: PAT_MRT3847_127372C.1
ggaagaagatgcaccagtcttgaattaaataacgaaatagcagtagcaaattaaatttaattgacaacgcacgaataattcattataacatacaataagcacaagaaagaaaaattaagggaagaaagatatagcctgggttgaagcgcgtaaacgctatccttagagagaaaacgcccccactgcacgggtaagaaattctgattgcgctcctctcccaagatacgacaacccggaaggttccttataccgaaatacaatatcacatgctctttctcttatatttttatctttcagaaaatatattttaaaattttaaattatgtgggggaatgttggtaaatatttgtgttttaatttaaaatttataaatatatatattaattctattttataaaataatatttattttagattctcttaagattttattttaacgagtcaaactagtttgttatatttgttgggacaactgtatgttagttttccaacggncatatttccaacggtcatattttgttgttgcaaaatgcctatatatatttatttcctcttttctagaaaagatagactgagagctctggtttctttcggcccacaat

SEQ ID NO: 30311 - DNA, 537 bp, Glycine max
  Clone ID: PAT_MRT3847_127373C.1
tcctctagagcggccgccacgacgactgcctctccttcgccgtcgacgagctccccgtcatccacggccggtcgccgctcgactgctacgacgccttcttccgcagcttcgccgacgcgttccaggacctcttcgactccaccatcaccgacgtgacggtggggctggggccgaacggcgagctccggtacccgtcgtacccgccggggagcgacgggcaggggttcaccggcgtgggcgagttccagtgctacgacaggtacatgctggagcagctgcggcggcacgcggcggaggccggcgagccgctgtgggggctgtcgggcccgcacgacgcgccgcggtacggcgactcgccggacgcgtgcggcttcttcaacgaccacggcgggtcgtggcagagcgcgtacggcgacttcttcctctcgtggtacgccggtcagctggtcgggcacggcgaccgcgtgctcgccgtggcgaacggcgcgctcggcgacacgccggtggaggcgtcggcgaaggtgccgttcatgcact

SEQ ID NO: 30312 - DNA, 433 bp, Glycine max
  Clone ID: PAT_MRT3847_127374C.1
ttctggcatgctttctcgaaagataataagaaagatatttttgtttttccgaataaaagaatgattagttgattaattaataaatagcactacacacacacacctctcaactaaaaaggaattcaaacaaatgctgagttaagatcagtctggattaatacttaagcaacctaactcctaagtaacattgcttaagcgttaatatattcctttttttatattttggatgtactttagggtaatcatgtatttatgttcaacatagaatgtttttctgtattaattgtattggctctgcatgccagctgctgccttaacaaaaaatatatttgttcattggaattttcttttactccaaaagaatgtctcttgttatttaatgtgtttgttttacagttatttcaatataagcagaggatgagggaaaagaata

SEQ ID NO: 30313 - DNA, 2591 bp, Glycine max
  Clone ID: PAT_MRT3847_127375C.1
ccctctctttcgcggacgcgtgggcacactttgtgcgatctttcacagtgaactctgcaattttcaattctctctttcttgcaccaccctctcctttcttctatttccttctttcttcttcttcttctttaaacaccttcaccatttgcataccacttagctccaaaaacccttcggtttctttctggatgcagatctaatggtttcacacactttcttcactacggatcattgtcttcttcatctggggcaccccaatagcttcttctaatcgatagtcaaattttgttgggttcggatgccggtggtagacaggatggactattgtggtacaaggactcggggcagctcttgaatggggatttttcaatggctgtaatccaagccaataacttgctggaagatcagagccagattgaatctggctgtttgagctccaatgaatccggcccttatggtaccttcatcggtgtctatgatggccatggagggcccgagacatcacggtttatcaatgatcacctatttcaccatctcaagagattcacttcagagcaacaatcaatgtcggtggatgtaattcgcaaggcactccaagcaacagaagaggggtttatttcggtggttgccagacagttttctctgtcaccacaaattgcggctgtcgggtcatgctgtcttgttggtgttatttgtaatggaaccctttacatagcaaaccttggggattcccgggcagttttgggaagagcagtcaaggcaactggcgaggttttagccatgcaattatcagcagagcacaatgcatcgatagagactgtaagacaggagctgcatgcttcgcatcctgatgacccaaatattgtggttttaaagcataatgtatggcgtgtgaagggccttattcaagtttctagatctattggtgatgtatatttgaaaaaggccgagttcaatcgagaaccactatatgctaagtttcgacttcgtgaaccatacaagatgccaatactaagctcagagccatcactgtttgtgcatcatttcctattcacatgatcaatttattatattcgcatcggaaggattaatggagcagcttagcattcaagaagcacttgaagcaattcaaaaggggtcatgctgtcttgttggtgttatttgtaatggaaccctttacatagcaaaccttggggattcccgggctattttgggaagagcagtcaaggcaactggcgaggttttagccatgcaattatcagcagagcacaatgcatcgatagagtctgtaagacaggagctgcatgcttcgcatcctgatgacccaaatattgtggttttaaagcataatgtatggcgtgtgaagggtcttattcaagtttctagatctattggtgatgtatatttgaaaaaggccgagttcaatagagaaccactatatgctaagtttcgacttcgtgaaccatacaagatgccaatactaagctcagaaccatcaatatcagtgcatcatttgcagccacatgatcaatttattatatttgcatctgatggactctgggagcacctcagcaatcaagaagcagttgatatagttcaaaacagtccccgcagtggaagcgctaggaggctggtaaaagctgcgcttcaagaagctgcaaagaagagagaaatgagatattcagatttaaagaaaattgatcgcggagttcgtcgtcatttccatgatgataccacggtgattgttgtgtatcttgactcaaatctcgtgagtagggccagcactgtgaagttccctggcatttctgttagagggggtggtattaacctgcctcataacacactggcaccttgtaccacaccaacagagattggtggtacctgatctaagttgtatcttttattttcttctttgttgtatcattttcttgtgtgaataccagttatcttcaaaatagcactgagaggagcagcacttcaattctttgaatgtgaactgtaacttactaggatactaatactcatgtttaggttttttttcttttttgttttcccttcccctcaaaaccaaaagaacagaagagatcttctgatgaccattataagagttgcctcggcaccattttatatattttttttttatttccctgtttatgtcggtaactttggtcttacagattgtgatgtgggaagtgttgctgtattgctgaggatgttcttagtcatagataatgcaatcaatgcatttaggtgttggagaggagagaggaaaatcgtcatgtaaatgcacgatgtagattatgcatgatgtaatgttaaatgagtattcattgtcacattattgaacataaccaatcaatctcacatagacaccacgtcttctctcaccaatatgaaataattgtaacttgttcggatcttttagatttggtgaaattaattttaaaaaataattgatgcccaaagaaatgattttgaaagagtcgacaagaaaaacatttgttgtgttaggaaatatcttcttaggagatatgataaacgtctccacaaaatggagtggatgcccttctgtcgtcttctcgcagccgtat

SEQ ID NO: 30314 - DNA, 718 bp, Glycine max
  Clone ID: PAT_MRT3847_127376C.1
tttattgattctctctctatatctttctctctctaactagttcttcgtagtggtgtggagcccatagctggacctgtgctttgctggctccaagctcttcattgatagtctttttatggggcttctcggctgagttcagaacaaaacaagagaaaaaaaagggtttcacactttgtccaatctttcacactgaactcttcaattttcaattctctttttcatgcaccactcttctttttcttcagacaccttcatcatctgcataccgcttagctccaaaaactacacacacaagaattctgtttctttctgttgatttgatggatccgcagatctaatggtttcacacactttcttcactacggatcattgtcttcttcatctggggcaccccaatagcttcttctaatcgatagtcaaattttgttggtttgtggtggatcatcttcgtcgttgtggtgactagtgaggagtgcaggactatacctatctatatagtgtatgaaaattctggggggtgaagtcgtttttggggtagttgatagatgttgaaatccttgacggttgattggtgaaatgagggatgttatcggggttgatgaacttattgagggcctgctttcggccgggttcggatggatttacacgtgcaggttcggatgccggtggtagacaggatggactattgtggtacaaggactcggggcagcacttgaat

SEQ ID NO: 30315 - DNA, 676 bp, Glycine max
  unsure (1)..(676): unsure at all n locations
  Clone ID: PAT_MRT3847_127377C.1
aaagcctacgtgcaaaaattaaggtcaacaattgtggtttctatccaataatttgtgacattgtacacaaacaatatccatggcctctgcagcttccatttcctcatcacaaccagaagcaccaaaggttcatgcatctgatatttctagcatcaaagcctttgcagaatcaaagggagcctctctgatcccttacacctaccactccatcacagagcaccatgatgatgatgtagcagatgagcttgctgcttccatcccagtcatcgacttgtctctcctcacttcgcatgaccctcaaatccacgccaaagccgtgcaccaactcggcaaggcctgtgcagagtggagtttcttcatgctcacaaatcatggaattcccgagagcctggtggaggagttgatgaaaaagtctcgcgagtttcatgatttgccgatggaagaaaagaaggagtttggtaataaaggaccctttgaaccgatcaggcatggcaccagcttctgtccagaagcagagaatgttcattattggagagattatctcaaggccatcacgtttcctgaattcaacttcccctacaagccaccaggttacagggaaagtgcttatgattacagcaaaaaaatcagaggtgtgacaaggaagttgcttgaaggaatatcannagagtttgga

SEQ ID NO: 30316 - DNA, 834 bp, Glycine max
  unsure (1)..(834): unsure at all n locations
  Clone ID: PAT_MRT3847_127378C.1
ggctcgagaagggttgcacactttgtccgatctttcacagtgaactcttcaattttcaattctctttttcttgcaccaccctctcctttcttcttcttcttcttcttcttcttcttcttcaaacaccttcaccatttgcataccacttagctccaaaaacccatttctgtttctttctgttgatttgatggatccgcagatctaatgatttcacacactttcctcactacggatcattgtcttcttcatctggggcaccccaatagcttcttctaatcgacagtccaattttgttggtttgtggtggatcatcttcgtcgttgtggtgactagtgaggagtgcaggactatacctatctatatagtgtatgaaaattcaggggggtgaagtcgtttttggagtagttgataaatgttgaaatccttgacggttgtttggtgaaatgagggatgttatcggggttgatgaacttattgagggcctgctttcggccgggttcagatggatttacacttgcaggttcggatgctggaggtagacaggatggactgttgtggtacaaggactcggggcagcacttgagtggtgaattttcaatggctgtaatccaagccaataacttgctggaagatcagagccagattgaatcaggctgtttgagctccaatgagtctggcccttacggtaccttcgtcggtatctatgatggccatggagggcccgagacatcgcggtttatcaatgatcacctatttcaccatctcaagagatttacttcagagcaacnaatcaatgtcggtgggatgtaattcgcaaggcactccaagcaacaa

SEQ ID NO: 30317 - DNA, 238 bp, Glycine max
  Clone ID: PAT_MRT3847_127379C.1
ctcttaatgttatgcttttctcctctgcaatagaacaggtatgcgggcggtggaatgagatcaccacagttttctagacttaaagttgaaggaacgttcctttaggttgcaacataaaacaaatacacggcctgaaaggaccaaatagcagttccaaaatgaagggggggcttggttgacagtcttcccctcatacttctcccttttgccttccagggtacgtaacacagactaaatc

SEQ ID NO: 30318 - DNA, 361 bp, Glycine max
  Clone ID: PAT_MRT3847_12737C.1
aatctaagatctgtgtggtgtatttggaaaattttatatggcagttcgggaatttgggacctgaacatcacaagaacaagtttttttcacatccattcagaggtgagctcatggaaattctaaaaccttttatgaaaactagttctttcttaacaactgctcttattattctttcttcagaatcaccttcatcttcatcttttaattttccttactattttttactttattcacaccccaatgtttacacacacacttcttcccctttctatttactccaaagccaactattcttaataggctctgagcaaccaccgaattcccttctcgggctcaaccacttaaagccggtttaaatttt

SEQ ID NO: 30319 - DNA, 207 bp, Glycine max
  Clone ID: PAT_MRT3847_127380C.1
aaagctaggtgtcttcagaaacgtgatccaggttttattgttctatttcgctagtcatattactatttcattatttttttttcctttgataccagccaagagggttatttttgatcccttaaagctaatttctcattttcttttctgggactgtagatgttgtctctttgaaatctccttcatcctttcctggcttgttgaaaagtt

SEQ ID NO: 30320 - DNA, 324 bp, Glycine max
  Clone ID: PAT_MRT3847_127381C.1
gtcgttcacattcatgaatcgcttccttcagaagttggccatcgtcgagagatgcgtgtgagccctattcgttcaagatgagagctaagtggtagaagaagcgcatgaggaggttgtagaggaagcgccgtatgatgagacacagatctaagtaagtgctagagcaggagtagagatgatgctttgcatgtgctaccatcgctatgacattctaagctgttatggctcttatgatcgttgggtctagtcgctaggggagctgcatgtctgacttaaattgctatactgatcctggtcctgttgcatgactactgagtgtgggta

SEQ ID NO: 30321 - DNA, 701 bp, Glycine max
  unsure (1)..(701): unsure at all n locations
  Clone ID: PAT_MRT3847_127382C.1
gccccccgaaatctgaaacacatacaagcttttaaaattcgaatccaatccaccaaccttgtttcataggacacatatataaatacaaaccaaattataaccccatccacatgataaaaaaaacaaacacacactacactaagttcagatcacagagagacaaagatatggaacaagagggagaaaaagggagagaggagaaaagacaaattcaacaacagcaacctcctcctcagcagcatcagaaatgtccacgctgcgattccatgaacaccaagttctgctacttcaacaactatagcctctcgcagcctcgtcatttctgcaaagcgtgtaaaaggtactggacactcggtggaaccttcaggaacatacccgttggtggcggttcccgcaaagtgaagcgtggcaaaacaaattctccatcttcttcttcttcttcttcttcttgttcaaatttgctctcacagccacagcagaatctgttgatgaggccttctccaccaccactcactactaatactatggttcagtcaactagtccttattattataatcttggtgttggtggaaatgggtatctctcttttcattcttctctgaacaacaacacaccatcacagccttccgatcagtatctgaaagttggtnnnnntgatcatgnnnnnnnntcntctnnnnnntctcctcntnnnnntnnc

SEQ ID NO: 30322 - DNA, 2746 bp, Glycine max
  Clone ID: PAT_MRT3847_127383C.1
ttccggtccgaattccgcacattttggccgaaaacctcagcgtagttcctaacactacactcttccgccgattatttctccaaaccgattattcttcttctgtgccctagcttctcttccgccgctgtcaacgaccgtctcccttgccgcttccggcaccgaacgaacagtctccggccaacttcagctcttgcgtgcgaaaattctcggaatattttgaatccaggaaatcatgcacgctccagttctagttctcaaggactctttgaaacgagagtctggatctaaggtccgctatgctattattcaggcggcaaaggctgttgctgatgtagtccgaacaacattgggacctaggtccatgctaaaaatgcttcttgatgctcaaggaggaattgtggttaccaatgatgggaatgctatcttacgtgaattagaccttgctcatcctgctgcaaagtctatgattgagttaagtcgcacccaagatgaagaagtcggagatggaacgacatctgtcatcattcttgctggtgagatgcttcatgtcgccgatgcattcattgacaaaattcaccctacagttatttgccgagcatataacaaagctttggaggatgctattgctgtccttgacaaaattgcaatgcctattgatgctcaggatcgaggtataatgctggggctagtaaaaagctgcataggtaccaaattcacaggtcaatttggggatttaattgctgacttagctattgatgctactacaacagtaggtgtttgaggttggccaaggtttgagagatgtagatattaaaaattatattaaagttgagaaggtcccaggtgggcagctggaggattcgagagttctcaagggagtcatgataaacaaagatgtggttgcccctggcaaaatgaggagaaggattgttaacccacacatcattcttcttgattctccccttgagtataaaaagggtgaaaaccaaacaaatgccgaactgctcaaagaagaagactggagtctcttattgaagatggaagaagaatatattgaggagctatgcatgcagatattgaagtttaaaccggacttggtaatcacagagaagggtctgagtgatttggcaacccattatctcagcaagcatggagttagtgcaatcaggaggctgaggaaaactgataataatagaattgcaaaggcttgtggtgctgttattgtgaacagaccagatgaattgcaggagtctgatgttggtactggtgctgggttatttgaggttaagaaaattggagatgagtactttgcatatattgttgattgcaaagaacccaaggcttgtactgttctactaaggggtgctagtaaggatctattaaatgaagttgaaagaaacctacaggatgccatgtctgttgcaaggaacattataaaaaatcctaaacttgttcctggaggtggtgctacagagttgacagtgtcggctgccttgaaacaaaagagttcatctattgagggcatagagaagtggccttatgaagctgctgccctagcttttgaagccataccacgaactttggctcaaaattgtggagtaaatgtcatccggactatgactgctctacaaggaaaacatgcaaatggagaaaatgcatggattggtatagatggaaatactggcagtatcactgacatgaaagagcgcaagatttgggatgcctacaatgtgaaggcacaagcatttaagactgccattgaagccgcttgtatgcttctgaggattgatgatatagtgagtgggatcaagaagaagcaagcccctggagctgctccttcaaaacccaaggttgagaccgaggcagatgctgacagtgagcaaatccttcctgactgagaatctcggttcaacagacattgttttttggtagagttgatgatgtgcaaggttctttatcttccttaaatcttatcactattcttaggagttttgagtcctttattgggatgctgttttttgtgccttctctactgtttgcaagagcaaattgtgtactttgttgatgttaaagacttaattaactggcgtatgctttattgggtgttctcggtccattatcttgagattttgtgccaggttcaaactgaccagtttcaccaattctgttacgctgtttctggtttttcatcctattcattcgtgaaatgttttcttcatcttaatatctaagtactccattggaacgttccggtaaactatggtacaacagagacttttttgttggtaatagtgttcaatttagaaaagtactgatagtcttctagctcgctagtgattactgattagtcttttagaaaactaccaaggatttaagaaatgcttgagataatgagatgggtatttgatgtgcagcattagatgattcttatgcgaagaaacgttaactgacaagtagaaatagaagttcaaatttgttcagcaatatgttcttaaagccaaggccatcgttgtacttacgcaagtactcccaagaattttatacaattatttgagggatggcataaaataggcttttttttttattgtacattttatgtaaaatttaatgtaaatttggttaaatatattttagtaggaagttgtatttttttatatattattatataatgaattattttgtataccaaaattgttattaattattttaaaagtgatatctactatagatatttaatgtagaaaaa

SEQ ID NO: 30323 - DNA, 1168 bp, Glycine max
  unsure (1)..(1168): unsure at all n locations
  Clone ID: PAT_MRT3847_127384C.1
tctcgagccgattcggctcgaggcaaggtgcagcatgctaatattcaagcagcaaaggctgttgctgatataattcgtacaaccttgggacccaggtccatgttaaaaatgctacttgatgcttcaggaggcattgtggtgacaaatgatggaaatgctatcttgcgtgaaatagatcttgctcatcctgctgcaaagtctatgattgaattgagtcgcacccaagatgaagaagttggagatggaacaacgtctgtcatcattcttggctggtgagatgcttcatgttgctgaagcactcatagataagaattatcatcctacaggtatttgccgagcttatgacaaagctttggaaggatgcatttgcttggccttgaccaaaatgctatgcccgttgatcccaatgaccgaggtacaatggctggggatagtcaaaagctgataggtaccaatttctggatctgttgatttatgtatcatatattcttccttggttactgaacttagctattgatgctactacaacagtaggtgttgagattggccaaggtttgagagatgtagatattaaaaattatattaaagttgagaaggtcccaggtgggcagctggaggattcgagagttctcaagggagtcatgataaacaaagatgtggttgcccctggcaaaatgaggagaaggattgttaacccacacatcattcttcttgattctccccttgagtataaaaagggtgaaaaccaaacaaatgccgaactgctcaaagaagaagactggagtctcttattgaagatggaagaagaatatattgaggagctatgcatgcagatattgaagtttaaaccggacttggtaatcacagagaagggtctgagtgatttggcaacccattatctcagcaagcatggagttagtgcaatcaggaggctgaggaaaactgataataatagaattgcaaaggcttgtggtgctgttattgtgaacagaccagatgaattgcaggagtctgatgttggtactggtgctgggttattgaggttaaaattggagatgagtactttgcatatattgttgattgcacccaggcttgtactgttctaggtgctgtgtctattaaatgaagttgaaagaaccctacagatagaattaaaantatttaaggg

SEQ ID NO: 30324 - DNA, 139 bp, Glycine max
  Clone ID: PAT_MRT3847_127385C.1
caaaaaggccaaaaccatcaataatattgtgtataatctccattattacttatgcatacatgtctctctatatactatcaattattgctaactatttaatatctctacaaacaaaaagtgtaaaggatcatctttattc

SEQ ID NO: 30325 - DNA, 218 bp, Glycine max
  Clone ID: PAT_MRT3847_127386C.1
gtattgatggatatagtacaaagtaaacctatataacaactgaacaataaatgaattgaaaaaacacacataataatcaaaaggggagactatagatattatgtgtgttttttcaattcatttattgttcaggtgttatataggtttactttgtactattgaagtattgatggatatagtcttttttacggtttaatgttcgatggttcaggtggtat

SEQ ID NO: 30326 - DNA, 385 bp, Glycine max
  Clone ID: PAT_MRT3847_127387C.1
actccacgcgttcgcggacgcgtgggttatcctaagtcgagagaaaaaagagatgcattggtttcttctttgaaagaggagacccttttagcaacctctggttacccaggggggaacccgggatataaagccctaaagttgattggggaacaaaacccttatgtccaagaatatttgtggaacgacgaacgaactgcttgttccatcccacccacatttttgcccggggctgtggtgattcacaaacataaacccattttaaagcctcttgggtttgttaaaaacctttatcaaacacgtaattattacaacatcttggcttctcaccccttcctaaaagccttttttagccaaagaggcttttttattgaccctttagaaaggg

SEQ ID NO: 30327 - DNA, 732 bp, Glycine max
  unsure (1)..(732): unsure at all n locations
  Clone ID: PAT_MRT3847_127388C.1
aagaagcgatcgatttgaaggctttgttaattttctgacttaccctcttcacatttgtgtgcaatgttagaggacattgaatcatctactactcggctttgtaaaatgggattcggtcgaaattcgacctcaagaagcggagattacttggaaggaatgcttaacgactatgttggaggaaggaacaaactgaaggctcagaagagcgccgccacaacaacgaagtttgtggcagtgctcacgtgccttcagtttttctttgcagtctatgcaacattcctattgtattacatgggcccttccattgatttaagaaccaagccagagttcacatgggcaacaaaaattgcccaacaatggaagcaactcatcatcacgccccatgttgttggccactaccaagaagctgcttcctctctcatcaaggaggatcttcttcccacaactccttcccaagtgtgtgagaatgagaagatagacttcatgcaaaagaagtccaatgatgtccaaatgatcaagataaagagagagctctatgatgaggtgctgagcttccaaagcaaaacctttggctccgagactctccaagagctaatttcaatgagatccaaatgggacttgaaaggtccaaacaggccaaagatcacggttttgctaaaccacttcaagaaaagaacctttgtgctcactcgattctttgctccacaaaccctnccttttcatcatgtttgg

SEQ ID NO: 30328 - DNA, 387 bp, Glycine max
  Clone ID: PAT_MRT3847_127389C.1
ccatatacacagaggacgacgccccccccccaagaaacctatcatggggggaaatcaagaccatcaaccacagctaggtttttgtagaggcaacaaacgaacccacacttgagggagaaaaaaaaaaaaccacaaagccatggccgcaagggacaaaaaaaacaacgggcaagcaagaaacgaactcagcgcaccacgcagagacaaaagaagagccgaccactggggaggggagcaatacgcctggacgctcattctgaacaaaaaaactaaaatggcaagtgaggctgcaagggaaggcacaacccaaaaaacagaaggagccagagaaaaaaaaaaaaggcggcccccgagacctaggaaaaagaagggaaggccccagaaaaa

SEQ ID NO: 30329 - DNA, 316 bp, Glycine max
  Clone ID: PAT_MRT3847_12738C.1
aattccgggtacgacgcacgcgtacgcgtaagtccaaggccactgatactacgctttctactgatccagtctactatgcgggagcggctaacattcaaggatggtagtccagtaaatgactgtacaaaatgctgatgcagtaatgctgacgtccataatgctacactaaatggcactattactaacgctacatatgcatattacacaactgatgcagtgtaaaaggtgtcatcacatccgaataattttgactgatctcaatctaaagctcattctctaacaattcagactgcatatgatgatgaccagaggactg

SEQ ID NO: 30330 - DNA, 369 bp, Glycine max
  Clone ID: PAT_MRT3847_127390C.1
ccttcgcgtccgctttatctctggttgattcggatctagagtcttcagtttctcctcggtgttcttcgctttcctgttttcaatttcgattctttcgttaatttaataagatgtttgggagggcacccaataagagcgatatttcgaggtactacaaaaatcctcgggctcctgcaagaacgctttccaaggagatcctgaaaaaggttaccaaaaagcccgcatttagaattacccccaccaggggggggatccccagaaggttaaaaaaccagtcgcaggcttatgaggtgctgagagaccccgaaaagcgtgggatttataaccagattggggataatccccttacgaaagaatcggcgggggccg

SEQ ID NO: 30331 - DNA, 696 bp, Glycine max
  Clone ID: PAT_MRT3847_127391C.1
ccttctgtctgtattattgattataagtcctaactacaagatcctttctctctttttttaagtgtggtgtaaacaaaaaagaaaaaaagatgagttgcggccaagtgtggattgggtttctcttggctttgtcactcttgaattcatgtgctcttgtctactcctaccccaccccaaattctccttcacaccctcctcaccatggtgcacacaagccagggtgctaccagcatactcctccaacacataggcatcgtaagattccaccaccaccatcattgccgttcttgtcgccgctaccacctggagcattttatttcttctctccaccccctcctagtcctacccattatccaaaaactccaaggccggtgggcctgggcccacccccaccaaggttccgggtactttgatttggcataaataacatatacatatatcactgagagcttcatcgggcctaggcggaaaaagcttgttgttacagtgcttcgggttaattatatatcttgtactctagtctttttttttctcttccgatttgttagagtaaactgtaacagtagctgttctcgtaacgtctggtatattgttaatctggaagtgtctgaacgtgttcatttgaggtgaacaggtttgccattttacaagtttttaaattccccactgaatctaaatgttgataattcagagaac

SEQ ID NO: 30332 - DNA, 605 bp, Glycine max
  Clone ID: PAT_MRT3847_127392C.1
taaaccagagtatatcatatgaagcccctgcagtggacatgcaggaattcgagtaccagactatgaccagaaaaatactgaactgcatggcttcctataccgatgaattttacatttcttagacgttgtgaaacttcattggataaggggggggactgcactagagaggagcaatgtcctgctattttgtatttgacaaaatggcttatttgggattgagttttgaatgctctgatctaatgataagaagttttcgtagcctcacagggattgcaagtttaagtagcaataagtattttgtatgtacagtatagcaacagatgtaatcccagaataagcctttaatcagtgagtgacttggaagaggcttggatgtgaactctgttgtgaccttagcattaataactccaaagatgccccatgcagtttcgaaattattgtctcttgaatattgtagagaaagaaaaagaattcattttttttttttgtgtagacaactgttaataaatatttattacctcatactagatgacatagctcataacatctaggtctatctcatggtctacccttggattttattcaatttatattcatgtgataat

SEQ ID NO: 30333 - DNA, 216 bp, Glycine max
  Clone ID: PAT_MRT3847_127393C.1
gttgccgcagtcgcaacagagagacagcacgaggagattcatttgcaggagacgattcaatggcgccggagatgccccgaagcacgtccaggaagaccgacttggtacggggaatggggatgctatcgaggtcactgatgtatgtcagtaggggcagttgggcgctctgtgccaaaaagagccgtgttttgccgctccgcgatatagagcctcacc

SEQ ID NO: 30334 - DNA, 169 bp, Glycine max
  Clone ID: PAT_MRT3847_127394C.1
ttcattctccatttccacactgacctggatcgaggttctcgtcattggctacgtagaggctcagaggaacgtacatctggacgcacataagaggctgaaccactgtggcatctacttggatctactgtgccgggtctcagatccagagaagaaagctatccttcaattg

SEQ ID NO: 30335 - DNA, 236 bp, Glycine max
  Clone ID: PAT_MRT3847_127395C.1
ggcacgctgcaatatggatggagtatggacccgttaattgaaaattgaaacgaagaactgttagtcccgtgtctttattttgttttattttatctatttattcacttttacaagaattgtacttttatttatctctctatctagagagttcagcacaatattggtcattgtctttttaattttatgtttagcccttagttaatttttaaattggatacaaaattatgattggcaca

SEQ ID NO: 30336 - DNA, 517 bp, Glycine max
  Clone ID: PAT_MRT3847_127396C.1
ggctcgagctcgagccgctcgagccgaatcggctcttgaacagcagaaaaatgtctggctgaatatggtgttgataggccaacaatgggtgctgtattgtggaatttggaatatgcacttcagctccaagaaagtgaacaagaaggggagtcatatgatgatagcagtgctcgggaaacagtgaatgtgacaactacaataattcctgggagtccttctagtaacgtaataagagagggagataatggtaatggttattcagacataagtgctaccgaagttttttctcaactaatgaacagtgaaggcagatagagatagaaatatcctgcaaatagaggctattcttgctgatgtataaaaagtttcacatggaaataaaggtatcaatctttacctgtgctttgatagttattttctttataatttttcttttgttaaagaaaattgaaccaaaaccaatattaacatttacatatggaaggcagtaataggcaaggctcatttatagtttctt

SEQ ID NO: 30337 - DNA, 174 bp, Glycine max
  Clone ID: PAT_MRT3847_127397C.1
ggctcgagcacgggtggaccaagagtttttgtttgaccagagaatatgccaagcgcgccagagcagaatgttgtgcgttactaaggatcggcgaaggcacaccatgtgtacgatggaaacatagacgtatctgcggactagagtaacatggatgcacggggcgctatgatgaac

SEQ ID NO: 30338 - DNA, 360 bp, Glycine max
  Clone ID: PAT_MRT3847_127398C.1
tttatagtctacagaagggttcctgtcttttcgaatgtgaaattattttttattgctaaaggaatatgttcaacattagcatttttattagccttttaaatgtgaccttccaacctaccaaactaaaactataaaagtcatataaaatatattttctatgattaaaagataattaattaaaaaatatcactaaatccttcgttagagtagatattatgtcaaaatataaatttagtgcacaaaattaatttttaacgctaaatcgtttataattttaaataataaaaagaaaatgggtaaaataaacttattctactctattagtaactaaacaatcataaattatttttctctatattc

SEQ ID NO: 30339 - DNA, 688 bp, Glycine max
  Clone ID: PAT_MRT3847_127399C.1
acttgcaactttcacatcccgctacccgaatatgctagttttgactcatcaaacttcacaggtgtgaaacaagaaggcataagttctgcttctgtgaattctggtttcttcacaacattggttgaagcaggagatgtgaaggcagttttcactggccatgatcatgtcaatgacttctgtggcaagctaacgggtatacatctttgttatgctgggggatttggatatcacgcttatggaaaagctggatggtccaggagagcaagagtggtgctagttagcctggagaaaacagataatggccgttgggaagatgtcaaatcaattaaaacatggaagcgccttgatgatcaaaatctaactggtattgatggtcaggtcttatggagcaagagctttggcagcaaccgcaggaaaaaacaagatgatggctcttaagaatttgcatgatgcggaaaatatgttagtagcatgaaaggatattttggaatgaccaattatgttttgtccacgtattttttattttttattttatcaaattaacccgtttactacttgtcctataatcaagattcagaatgcaacaatacaaggtagcttgggcaaaaaagaatatataaaagggattgaagttcattaatgtggtgcaatgactgtatgctatgcgattgcaatcgtctgttcactc

SEQ ID NO: 30340 - DNA, 397 bp, Glycine max
  Clone ID: PAT_MRT3847_12739C.1
ttgcgttttcgtggagtcatgagacctagctgcattcttttcattattggcttcaacacaggagtacgtcagggagacagacaggacatctcttgccatttttttttaatattattgagacacccattttaatagtctttttattaatttccctatcacaagtgcgatatcttgttgaggaatagcatcaccataccacctagttgtccattccggatatctcaattcaagtatctaagtcatttagccgctgactggattatgatgtcaatgaaaaatataagatggggtttgtcgtttggcgacaaaataattgccttttgtcaatttgaggcctgactggatgtttgttcttttttcccttgtaggagtttttattgtttgacagggaatactc

SEQ ID NO: 30341 - DNA, 265 bp, Glycine max
  Clone ID: PAT_MRT3847_1273C.1
ctcgagcgattcggctcactcaccggtttggagcttctctttctttcccaccaaatttcctaggaatcaaacaccatggactcgttggaactctgctttgagctttgaagaagaaaatgttcgggttctctcgcaggcacatgaaacttggcagtagattgaaggttcaactttctgacaccaccctgggaactagaagtaccatcaggcaccataagcgaaatgtaaactccaatggtgatagagttacagggacaagtggtca

SEQ ID NO: 30342 - DNA, 218 bp, Glycine max
  Clone ID: PAT_MRT3847_127400C.1
ccccaccggattcaacagggtactattcaatcaacagaggttactgctttaaataaatgaaccatgtttttttccaataacaccttgtcaacataggccccaatgttcaacataaaaatgcttttaaactaaagggtgagatacaaaaaaactagtcttccataagcatttaaatcagctttcaataaaactggtttacttaagaaaaggtatgcctt

SEQ ID NO: 30343 - DNA, 101 bp, Glycine max
  Clone ID: PAT_MRT3847_127401C.1
ttgtgggcctcgaccaggcaggcgagcccagaagatggttcttgttatgcaggctacgagaatggtcgcgcggaccacaaagcggtgaacgagaacgaaat

SEQ ID NO: 30344 - DNA, 872 bp, Glycine max
  Clone ID: PAT_MRT3847_127402C.1
actatgcataaacgacttttcatcactttattaggttttatcattttactagctggatgcgattattctaaagaagagaaccaaactggtatattttataacgtttttgtaaaatctatggatggatttcttcattttcttggcagagtctttcaggataactatggctttgctattatttctattgtactcatagttcgtttcatcctattacctttcatgttaatacaagttaagaatatgcatatgatgcgcgaaaaaacaaaagtcgtccaaccagaattggatgctataagagataaaatgaaacacgcaacatcacaagaagaacgtaatgcagccaatcaattgcttatgaaaaagtatcaatcgtatggaattaatccattaaaaaatatgttagggtgtcttcctgttcttatacaaatgcctatattaatggggctttatatgagtttgaagtacccttcgagtcacggaattactgaatacccacatttcttatggtttgatttaacgcaacctgatttgattatgacaataatcgcagcaatcatgtattttgttcagccacttgtaaactcaatccattatccaaaagatcaaagaaaaacatattactttatgatggtattttcaccgatattcataacatatgcgtctctacattctgctgcagctttgggcttatattggagtataagcgctgcttttctaatagtgcaaatgcattttgctcactctcattataagaaagtggcactacatgaagctaaaaaactcaaacaaaaattagagcaaaataaagacaatagtgagttattaaccgaagagtcataaaaaagcacgctataaacaatcttgcaaaattg

SEQ ID NO: 30345 - DNA, 438 bp, Glycine max
  Clone ID: PAT_MRT3847_127403C.1
ctctaacgtgatcacaagatcactcatcgtcacaaaaacacaagatgcaccttgtgttgcataaggactacacctttgcttcccttactttcttggaaaaagcctcctcgagctcgaagaggacatacttacttcacgctttaaacacaagaacactcccatcagtgcattttgcggatggaattgacgtaccgacgagttaatctttctcttgtataaaggacaaggagggggaattatattaaaatctgcctaccctctttgaacgtacccttacactcagaatttctggcatgatgtgttaaatagcacaagatttttttttaaggactagggggcattacgttttgattcatggcttgggacgaaactctttggatgaactcctagcagacttataagtcgtttatcttatgctaaaaccgctaaatgatttgt

SEQ ID NO: 30346 - DNA, 846 bp, Glycine max
  Clone ID: PAT_MRT3847_127404C.1
aaagacgtgcgaagcggtgatctattccgaatttccgatcttagtttgcgttgcgttggcgtaggttgaagaagaagaagagagagagagagagagagagagagagagagagagagagagagagagagagaagggtaaggtaaccctagagtggtgaatcgaattcgaaacgatggaaagtgtttctcgaagaagaggtggaggcattttcgaaagcctctacaaggtcgttatgcgtcgcaactctgtctatgttacctttgtcatcgctggcgccttccttggagaacgggctgttgattatggagtccacaagctctgggaggcaaataatgttgggaaacgatatgaagacattcctgtgctagggcaaaggccgtcagaatagtgaccagcttgttagccattttgaagttttattattttcataaagatttgaagtgattaagagctggaagcagtttccatttttacaataaataccatatgcttgtgcgtggtttcattgactggccattggaaatattaaacattgaaccattgcagaattctgtattttttttgaaacgatttatccagaatcattggttatgcaagtcgcagactttctagtttgcctatggatgtttaaacagggaaaatcagtaatgctcattaatttcatttagcattcaactaaaaaaaaaaaaaaaaaaaaaaaaaaaaaaaaaaaaaaaagggcggcgggccccaattattgagttcccccccccgggaattaaatccgggccctttcctgggggcgaatcaattttttttatagggggttgaattaaaacctggggaaataaaaaacccatttctttc

SEQ ID NO: 30347 - DNA, 324 bp, Glycine max
  Clone ID: PAT_MRT3847_127405C.1
gttagtagatcagctcttgttcacattaatcagacacattggcttgggcatatccggacaccaatatttggcatattgtaattttaggaagagaagaagtaaataattttttttgcagaaagtaaattcaaatttgataattatgtaaagataaaaaatatattttagtctatatatatatacacacgcacgtctgtcaagcgaaaagctgaattttgagtacctttttggcatatttctttctcaatatctgaaggggcccacgtaagttagtgtacctaaaattatgacatgaaacaaataaatggctgccacacacacata

SEQ ID NO: 30348 - DNA, 1491 bp, Glycine max
  unsure (1)..(1491): unsure at all n locations
  Clone ID: PAT_MRT3847_127406C.1
ccacgcgtccgcgttggcgtaggttgaagaagaagaagagagagagagagagagagagagagagagagagagagagagagagagagagaagggtaaggtaaccctagagtggtgaatcgaattcgaaacgatggaaagtgtttctcgaagaagaggtggaggcattttcgaaagcctctacaaggtcgttatgcgtcgcaactctgtctatgttacctttgtcatcgctggcgccttccttggagaacgggctgttgattatggagtccagagtttgcgtttggcgtaggtggaagaagaagagaaaagagagagaagggtaaggtaaccctagagtggtgaatcgaatctgcaaagatggaagctgtttctcgaagaagaggtggaggcattttcgaaagcctctacaaggtcgttatgcgtcgcaactctgtctacgttaccttcgtcatcgctggcgccttcctcggagaacgggctgtagattatggagtccacaagctctgggaggctaataatgttgggaaacgatatgaagacattcctgtgctagggcaaaggcagtcagaatagtgaccagcttgttagccattttgaagttttattattttcatgaaaatttgaagtgattaagagctggaagcagtttccatttctacaataaataccatatgcttgtctctttcaggcttaactcttatgcgtggtttcatttactggccattggaaatattaaatattgaaccattgcagaattctgtacttttttgaaacgattatttggaatcattgattatgcaaatcgcggactttctagctgtaataaaccttctcggctctatgcttaatttaaacaatctatctatccattttatgatgcatgcaatgtcatatgctgttagttttctcagaaaatagatttgactgctcaaattgaattcatgctttagttggattggatgttgtattcttcatgttgatgcttgttttaagatctttacattgtatcacttttaaagggatcaaacttctaatgtttctgctgttttaattgctatgataggttgtccatgatatttttacaatttcttatttaatttatttatagctgcggttttgaatagatctcttatgggatgactgctttttatttgactgcttcataatgtttgctatcttgccaagttctattcaaagaattataaatatataatacttgggtattgtctctcattaggtggcgcctagtgcctacgttccttgtttcccactgttttatgctacttcttcatcttggggctggtttattcagtggcaatttgcgaattggttaacattgcttttgcatgagcccggatcttgttgggggggtgtgccgggtggggacagtatagttttgcttgcgccaatcagtatcaattggtttgttttagtttttgtcaaaaaaattatcattttttatctttactgntctctgggtgcctgctgccc

SEQ ID NO: 30349 - DNA, 192 bp, Glycine max
  Clone ID: PAT_MRT3847_127407C.1
tgggaatgcagcatcaaaagggtgattggcctatggtcagtgtttaacaaaccacagcaagctttgtgcatgtagtggcaaaatagaccacttctggatgtttcaataagttgggtctataggttgaagtgggttggggcaataaactcatgattggttctatgcatccaagctcagtttgtttttggattt

SEQ ID NO: 30350 - DNA, 488 bp, Glycine max
  Clone ID: PAT_MRT3847_127408C.1
ctctgtctactccgtttcgaaaaccctgtgatgacgtaatctctgccatggtcatgcttattgcttaacgcttcgctttgttacctgcaagcaaataaactaatttaaggtattttattcttcaactttatcacgccctatgcctaattgccttctttctttccccaatttccaaatttcatgttattccttcaatccgacacctttttgcatggagtttttaatgttaaccctaatttttgaaccttgtttttcgtagagtgtgttgagacgcgttgattttgtgctatctcttgttcttatgtgtctttagtaatgacttgttattgattatcgcattaatctcaatgaattgcctcttcatgtttctagcaagtcaaacaaaatgaactttaaatccaatataatctgtattttttggtatgaaaagtatgaagctttttggaaattctgtgtttcttttcctaattattggttgtgagtattat

SEQ ID NO: 30351 - DNA, 503 bp, Glycine max
  Clone ID: PAT_MRT3847_127409C.1
ccggccggggctgttcaacttgatggtgatgtggagatgcttgatacttgcagacactgtaagtttgcctgctgctgatagtgtgaacaattctattgatggaacaagaaagacgaaagaagggattgaggatgatactaaaacacagctaaagtatatgagatgtcaatttcatgagaattcagtcagagaaaactcgtttatattcaggcaacagtgatgctttggatggagggagcacattggatttggatattttgatgtaactaagctccaaaagtaatggagcaatatgatatatggtagatgaaaccgggtaaggacgctgggctaataattgtttgtgaccatccttgtttgttggtcacttttggtgctaggattttgtaaacattgggcccaaaaacttcttcaatatagatcttcggctaaaagtatatatatatttggaaattcgttcaacacgagttttcaattacattcgttcaacccgatctaatttc

SEQ ID NO: 30352 - DNA, 726 bp, Glycine max
  Clone ID: PAT_MRT3847_12740C.1
ccacgcgtccgcctccctgtaagctctgaagcattaccagcaacatcgcaaacgaacgcagcgtaaaatttctttcttcagcattcgtatatcaggcttctgattgtgttctaagaggatggggagcgttactgaagggaagttgaggttttgtattgatagagggggcacgtttactgatgtgtatgcagaaatccctggtcagactgatgggcaagttttgaagcttctgtcggttgaccctttgaactatgatgatgcaccggtggaagggatacggaggattcttgaagaattcactggtgagaaaattccacgcaactcaaagatacccactgagaagattgagtggataaggatgggtacaactgtggcaacgaatgcacttttagagcgcaagggagaaaggattgcagtgtgtgtgactcgaggctttcgtgatttactccagatagggaaccaggctcgccccagcatatttgaccttactgtgttgaagccatcaaatctctatgaagaagttgtggaggttgaagagagagttcaacttgttcagtctgaggaagaagaagaaagcagggtgggtcttcatctgggggtaagggaatttcaggggagcttggcaggattgggaaagccttttaatgaagaagcactgaaacccatactgaaaaacttattggacaaagaatttagtggtttggctgttggtttggtgccctcttc

SEQ ID NO: 30353 - DNA, 464 bp, Glycine max
  unsure (1)..(464): unsure at all n locations
  Clone ID: PAT_MRT3847_127410C.1
atggcagcgggcgggatctaagttcagnatccgtttattttcacgcccctggagaaggattcttcttcaaatggcaccttggctctgggaacggatgccaaaaagtccacatctggcgctggagatgatggttgtaacatgacctcaccctccactcatgtggacaagaagacggacggcgcagatggtcccaaagaagacgtgcatgtgtacactaaaattgtgactatggcatgtagtgaagatgaagcagcctcagagtgatcaggagatccaagatctggtgtcagcttttggagtgacctgtaaggttgtaggacttggtgtatctcctagacctggagaggctgtggccgcaagctttattgttgcaccctttttttgtttcactagcaactgtcacgtgccctacgcttgttgatttttttggcaatactagtagaaaatatcgcactgtttgtgat

SEQ ID NO: 30354 - DNA, 291 bp, Glycine max
  Clone ID: PAT_MRT3847_127411C.1
ataacatacaaagcatatgacacaattacctacatgtgtaaacggtgcttacactataacaacccgaccagggcactttcacaaagagaaacctcatacggtatcactactatgatatgaccaacacctttctatcacaagcaaaactctaatctcttaataatctccttcccaagggcacaacaataaaaaagttcacactatactagactgaggcatgcccttgttttataatatcagagcttatagctgacaagattgttcgtaaccccaactacgggaccaacagga

SEQ ID NO: 30355 - DNA, 2846 bp, Glycine max
  Clone ID: PAT_MRT3847_127412C.1
ccatcctcatctctctccatccctttcgccttaagtcccctacatccaatccaattcccaattttcgaatctaccctttctctctctacgatggagccttcctcgatctctccaccgccagctccgcctgccaccgccgtccccttccccgccgaacccaacgaccaccttccaccacccattcccgaaccaccttctaaccacccaccctacgccgagatgatatacacggcaatcgaggcgctgaaggagaaagacggttctagcaagagggcaatagcgaagtatattgagcaagtgtatacgcagcttccaccgaatcactcagacttgttgactcagcacttgaatcacttgaagagtaggggattgctccaaatggtaaaaaaatcttacgcccttcctagatctgtgcccgtgtctgttcctggacctgcacccacacaagggacatcagcagtgccggctgctgttgttgccatcacgacgactccgaggcccagaggtcggcctcgcaaggcccaaaatccagttcagaactcgcctctgcgtcaggacactgtcaacgtgcaggttcagcagaatgacgcgccggtctgggcagcacaaggtcggacagacaagcccgtgcacagcgagaaggcagtggcccgaagcgaggtcgtcctccgacaaaaagcatcttaagagcgcgcatagcaaaaagaggccagtcctcccggcatcgaggaaaaaagccgggccgtcctcccacagcaaccacaacagatgtttctgcttctgctgggcccaagagacgtccaggccgcccgcccaagaatcagtcgcagcccactctcattccctttgctccggctgtatctgccgcttccgtggatacagagcacgtggcagcatcagctgaaactgcgccggttgatgctgacgcggctctcggaccaagagcccgtggacggccgaagaaatatgctgacgagatgattgctgcgggccgaggcaggggacggggccgtgggcgcggtggcggcggaagaggacgagggagagggcgtggtgaattgcctgcacagcccagaaaaccaggggcaaggcccgtgggtcgtccgaaaaagggttcaacttctgctagtacttctcaaaatgctgcaaatgaagatctcaggaggaagcttgaacactttcaatcaaaagtcaaggaatctcttgcagtgcttaagcctcattttaaccatgaaagtccagtcactgcaattgctgctattcaagagctagaagtactgggaactatggacctcaatgtaccactaagggatgaaacacttccacatcaagtggagctgccaccaccacagccaccagtgcagcagcagcagcagccaccacagcagcagctgcagcagccaccacagcagccaccacaagcaacacctagcaccacaacaactgccgccacagccaccgatatttcagcaaacatatcctccatttcatctgccgcagttccaccatcaccagccttcgctgcagttccagcaacagcagcagcagccgccacagccaccgccacagctattccagcaccaggcacagcctccttcccaccaacagtttcatccttaggaatcaggcccaggctaggaagaattacatggtcctcaatttgataatatgatgctaggaagaattacatggtcttcgatttggttatgaacaatctgaaacaagtgttttaacaaggcacatgaggggtaacatatttgtaaagcgagtaggcagtagcagaactgatttttcgtcaagtgaatcgattgtccatttagtttgttgttgtgcactattctagattgatccctgaagtaatttttagattttagagtactgataattctgttattgaagtaatatttgtttgactttggcagctttagattattagtcatattgttcatgttggtctaacacgttattgaatccgtttcctgttgctttccaatacccacgtctggttgctcggttagaccttccaccattaggatatttcctatctctgtgacagaaaaagaaccattgcctatctcccgttttcaatatagattgcccaggcaaatcctcgggatcccacttatacacatcggtttcatgaatcacgtcgagcttcagcctcttcccacaaatcttccgcttcagatagtacatcaccaactcctcatccgtgggatggaagcgaaaacccggcatcgacgacatcatctggctgaaacaatcagcggaaccagctcccgaagcctcacccattctcgatcgcaagaaaaaaatcaaacaacccttgatcacccaacacaaaaaacggaaacttttttaatcaaaacggaaaacccccaacacgattcgagcctccgagtattcgaaatcgccgatcgaatagagttaaaaaccctaactggggaaatcaaattaggggaaaaaaagaaaccaaaattattggaatcaagaagtggcaaagccgaaatcccacaactacatggtacgaatcgtacctctgggtgagaggattcgaaaggctgagtcgcggaacgaaaaaactagagcgagagagagagtcttgaaaggaaagaaacgcgtgaattgcgcgtgaattgggaaattggcgagggttttcctgcaaaatattacaagcctttagtcagtaatcaaacaagaacatattgaaggctagtcagagttttatttcagattaaagatcccttgccagtatatatgacagatcgatagagatgcacaccatatgctacatatataatatttgcctaaaagtagccagaactttagaactccaaagcattgac

SEQ ID NO: 30356 - DNA, 2567 bp, Glycine max
  unsure (1)..(2567): unsure at all n locations
  Clone ID: PAT_MRT3847_127413C.1
cggtccggattcccgggtccgtctcgagtccgcgtaaatccaatccaattcccaattttcgaatctaccctttatctctctacgatggagccttcctcgatctctccaccgccagctccgcctgccaccgccgtccccttcccggccgaacccaacgaccaccttctcccacccatttccgaaccaccttccaaccatccaccctacgccgagatgatatacacggcaatcgaggcgctgaaggagaaagagggttcaagcaagagggccatagcgaagtatattgagcaagtgtacaaggaacacctcccaccgaatcactccatcttgttgactcagcacttaactctcttgaagagcagcggaatgctccaaatggtcaaaaaatcctatgcgctccctagatctgtgcctcttaccggagctgcacccgcacaagcgcatgatgccgccacctctgctctgcagttgacttccccgaggcctagaggccggcctcgcaaggctcaaattccggtccaaaacttacctcaggacattaatgtgcaggttcagcagaatgccgagcccgtctgggccgcgctcggacttgcagatgagcccgtgcagacagaaggcagcagcaagaagcggggccgtccgaagaagagtgtcactcccggagcaggtccggcaaagagaggacgtcctcccggttctgggaaaaggttgggccgtcctcccaaggagaagtctgtcactgcaacaacaacaacggatgtctctgggcccaagagacgcccgggccgcccgcccaagaatcagtctcagccaactcccattccctttgctccggcggatgcagccgctgccgtgggtacagagtatgtcccacgcgctgaaactgtgccggttgatgctgcggctgctctggggcctagagctcgtggacgaccgaagaaatacgctgatgagatggttgctgcaggccgaggtaggggacgaggccgtggacgtggtggcggcggcggaagaggacgagggagaggacgcggtcaattgcctgcgcagctcagaaaatcaggggcaagacccgtgggtcgtccgaagaaggggtcaacttctgctagtacttctcaaaatgctgctaatgaagatctcaggaggaagcttgaacactttcaatcaaaagtcaaggaatctcttgcagttcttaagcctcattttaaccatgaaagtccagtcactgcaattgctgccattcaagagttagaagtactgggaactatggacctcaatgcaccactaagggatgaaacacttccatcgcaagaggagcagccaccactgcagcagcagcagcagccaccgcagcaacagttcccaccaccacaacagcagccaccacagcaacacctagcaccacaacaactgccgccacagccacaggcaccaatatttcagcaaacatatcctccatttcatctgccgcagttccaccatcaccagccgacgctgcagttccagcagcagccacagccgccacagctattccagcatcaggcacagccaccttcccaccaacagtttcatccttaggaatcaggcccaggctaggaagaattacattgtcctgaatttgataatgatgctaggaagaattacatggtcttcaatttggttatgaacaatctgaaacaagtgttttaacaaggcacatgaggggtaacagatttgtaaagcgagtaggcagtagcagaactgatttttcgttaagtgaattgattgtccatttagtttgttgttgtgcactgttctagattgacccctgaagtaatttttagattttagagtactgataattctgttatttaagtaatatttgtttgactttggcagcttaagattattagtgatattgttcatgttggtctattttgtagtccccttttacccctccgttttttgttgtgttctgggaatttttttcactctatctgatagggattatttgcatatcacgtcancgatcctttcctgtgctttccaatacccacgtctggtgctcggttagaccttccaccattaggatatttcctatctctgtgacagaaaaagaaccattgcctatctcccgttttcaatatagattgcccaggcaaatcctcgggatcccacttatacacatcggtttcatgaatcacgtcgagcttcagcctcttcccacaaatcttccgcttcagatagtacatcaccaactcctcatccgtgggatggaagcgaaaacccggcatcgacgacatcatctggctgaaacaatcagcggaaccagctcccgaagcctcacccattctcgatcgcaagaaaaaaatcaaacaacccttgatcacccaacacaaaaaacggaaacttttttaatcaaaacggaaaacccccaacacgattcgagcctccgagtattcgaaatcgccgatcgaatagagttaaaaaccctaactctgggtgagaggattcgaaaggctgagtcgcggaacgaaaaaactagagcgagagagagagtcttgaaaggaaagaaaccggacgcgtgg

SEQ ID NO: 30357 - DNA, 415 bp, Glycine max
  Clone ID: PAT_MRT3847_127414C.1
aaaaaacaaaaaaaaaagggggggcaaaaagttttttttttttacaaacagtaaacaaaaacttttttcaaccccaaactagcaaaacaaaagttaagggggctttgacaaaaacaatggcaatcaggaacttccctacagggggcaacgagcataaagggcccccccctttttccaactttaacagagtttttactaaaaaatttgaaaaaagcaaaatccccctgggcaataagatgcccaacattttttttcatatgaactttgcgggcgttcatcaatggcaaaaaattatttggggggcagggggaaattttcaccaggtttcccaccttttccaggtggcggcaagcccctttttaaaaaaaaatgcaacaatgctctttggccccaccctcttttttcagggttaact

SEQ ID NO: 30358 - DNA, 225 bp, Glycine max
  Clone ID: PAT_MRT3847_127415C.1
gcttctcctggctcagcagttgcagctgacactgcagcagccatggcctcagcatctgtggtccttaaaaagactgatcctacatattcaagcactctaatcaagcatgcaacacagttggttacttttgctgaccagaatagagggtcctatagtgaggatataaccggagttcagacataatataactccactgggatatggtgatgagctttatgggcaact

SEQ ID NO: 30359 - DNA, 1988 bp, Glycine max
  Clone ID: PAT_MRT3847_127416C.1
gtaataataagtaactctcataataatccacatataaatttcaaatatacccagacctgacaaattttagtcgattcttgacccattttctactcaccagtttcaagaattgtgcaggtcgatgaaataaccggttctcgatccatagttgcataccggttattcaggacacatgtttatttatcgaacaatattaatctaatgctaatgtttttttttttttttacaagttacaaccaacaaaagatcattacaaatacaaagacagattccacaagataagatcttatccatgtacaatcaatctccaaaataaagtgctctccgggttaataaagaacaatatattacatggggccaaaaagaacaaactaaataaacttatccaaaaataagattagacaagcataaaaacttgctaaagtttttatgaatcaagttagcaattcaccctgcaaattcctttacagcgccttctcttgaattaaggttcattagaattaccctacaccttatattgcctccagtattcacaaagatttttttttattttgagaatatgttaggacagcactgtttggtaattctggggagatcccagacaacagtcattctgggaggtcccagacaaaatacctagcagcaaaactttggatttacataaatatattcaaggagaaatacttctacctactagtcttaagtttccaacaaaaacccaacaaaaagcacataaagcaataagaatagagaagaaaaggaatggaagtccctttctgccagctctcttcatagttccagtgtctttacctgatgcagcaatgttggtgtgcttgatcttcaacctgctgaagctagacattcgattcaaagctcggttcaccaatgcactttcagcagctgatgcaggagtagtaggtattgactcaacaaaggcccagagagcagaggacaagctacttgtagcaacatcttccacagtgctactttgattgttattgccttccgtaggaaagccaacagattcatatacaacacctggggatgatagctgattactttcaccatgcatccagaattcaccaacagtttgattggcatcctctggatttggcagcaattggtaactttgacattcaatattgctgctgacaagggcatttgtatatgcatgtgaatctgtttcatgaataattggccccaagtcacgaagaaacatctgtgcatcttggaacaaatcaagttcacttaacccatcttcaaaatgctggtactccacagaattttcaacatttgacaatgtaggttcagtatcaatgagatcattaatttccaagaagccatcctcattaaagtcaagctcctttgttttaatgttggaagcagaagtgacctcagatgtttcagaaacatgcagatgagaagtaactggccgattgaagtcaaagctaggctgtgcatcaaaaaattggttgctaggctgtgtgattctgactggctcagggaacatcacagcctcagagaactgatccacaacagtactttgtgtttcttcactaacaacctgaggaaagtcaggataaccattcacatgctgctgatcaaggacaagctcatcatccaaaattcccctaatgatgttgtcgatttcatcatcaagcaaaggctgcagtacattaccattatcaacatcatttggagcctcctgatcagctgagttgatattaaaatctactatgtcatcatctgcccactgttcttcattaaatggtgcgccatactgttcaccattttttggaccaggtccacttttcttgtaaaccttgtaaagtgcataatagtccttaacacccaggcatctcttaagctcctcttcatccaaggtatattcatgcataacccaatcagtccgctcaccactaggagctctgccagcatagaaaaccagggtcttttacactccaactgacctagaattgcctcgagcc

SEQ ID NO: 30360 - DNA, 384 bp, Glycine max
  Clone ID: PAT_MRT3847_127417C.1
ctcacgcgttcgctcaaatatgccattcccatgatgcccatagatgaacaaattctttctaaggttgcacaagacatggcagaggaatggcttgcttgtgttgatgaggaggattactttgagggagtttttttagatgcggcacttaatggtgtcgcgggtctcgactatatcgacagaattccggtcgcctcatttatgggctttgctgatgatccttcacgcgaaggtggtgcacttggcataacgatgactgtttctgtggatggtgtaaagatgacaacgactgctcgaaccagagatgaagaggctcactgcaagataattgctgaacgtgagattagtgcacctacattgcttgagttggaacgtcccaaggatgag

SEQ ID NO: 30361 - DNA, 560 bp, Glycine max
  Clone ID: PAT_MRT3847_127418C.1
cactttttcccttctttctctctctatctttatatccatctctttctcgatataccgtaaatccaatccaattcccaattttcgaatctaccctttatctctctacgatggagccttcctcgatctctccaccgccagctccgcctgccaccgccgtccccttcccggccgaacccaacgaccaccttccaccacccatttccgaaccaccttccaaccatccaccctacgccgaggttcagcagaatgccgagccggtctgggccgcgctcggacttgcagatgagcccgtgcagacagaaggcagcagcaagaagcggggccgtccgaagaagagtgtcactcccggagcaggtccggcaaagagaggacgtcctcccggttctgggaaaaggttgggccgtcctcccaaggacaagtctgtcacaacaacaacaacggatgtctctgggcccaagagacgcccgggccgcccgcccaagaatcagtctcagccaactcccattccctttgctccggcggatgcaggccctgcccggggtacagagtatgttgcagcc

SEQ ID NO: 30362 - DNA, 980 bp, Glycine max
  Clone ID: PAT_MRT3847_127419C.1
gagcatcataatttctattttaccattaatatcttattcatgtacaaccaatctccaaaataaagtgatctccgggttaataaagaacaatatattccatggggcctaaaagaacaaactaaataaacttatccaaaaattagattagataagtataaaaacttgtaaagtttttgtgaatcaagttagcaattcaccctgcaatttcctttacagcgccttctcttgaattaaggctcatcagaaattaccctacatatattgcctccaatattcacaaagctttatttttttttttatattgagaaaatgttaggacagcactgtttggtaattccggtgagagatcccagacaacaatcattctgggaggttccagagaaaatatacctagcagcaaaactttggatatatatatatatatatatatatatatatatattcaaggagagacacatctccccaatagtcttaagtttccaacaaaaacccaacaaaaagcacataaagcaataataatagggaagaaaaggaatggaagtccctttctgcctgctctcttcatagttgcagtgtctttacctgctgcagcaatgtttgtgtgcttgatcttcaacctgctgaagctagacattcgattcaatgctcggttcaccaaagcactttcagcagctgatgcaggagttgtaggtattgactcaacaaaggcccagagagcagaggagaagctacttgtagcaacatcttccacagtgctactttgattgttattgccttccgtaggaaagccaacagattcatatacaacacctggggatgatagcgagaaagaatcaacaaagccttctgatgcacttggggtgtttctttcaccgtgcatccagaattcaccgacagtttgattggcatcctctggatttggcagcaactggtaactttgactttcaatattgctgctgacaaatgcatttgtatatgca

SEQ ID NO: 30363 - DNA, 2418 bp, Glycine max
  Clone ID: PAT_MRT3847_12741C.1
ttctcctcgcacgaaggatgcaggcataaaagcctggaaggcttggtgtctttggtgctgaagaaactattggttcaaaaccaaagctgtagagaaactttaagatcgtttaggctagcagttgggaggatgtaataattctgtgctcatgcatccaaatttttgaactagaaagtaacagattcagcctatgcacaatatctaggtagtactcatgttggtcttcatgttcttctactatatttttttaataagctcgaggatagaagagcccaaagcgaattcgaacttagatcttaatcttcacttgttcttcgatctcgcgaaccagtgagctggagtttcaacaatgatggagaaggcagactctgtgcagaagctggtacacgcgtatgcgactctgggaatttccggatcagtatgtgattgagccaacggatggatcttctggttcttctttgtctgttagtcgagtcgatggctccatgaagctcattgatgaggttccagaatgcagcacgcttcgagttcctaagatttacacgattttcagattcttgttgggatgttgaagctgttggctggatcatatttgctggttataactgagcgtgaatctggctggatcttacccggggcatccaattttcaaaatttctaaatcacaagatttttcaatgcgataattctcttaaaaatacccctcctgaaaagaagaaaatagagatggaattttctggaatgcagattgttgctgagacaaacgtctgatagctccatctaatatgaatctaatttaacctatgagtgcacgtcgttcgaatgacctgtatgatgagtctagatttcttcttctttatatattgtcttttttcttcaacttattcataaatgatacggtatttagcgctcattgatatatagcttgctgtatactatcgtcgacccacgcgtccgccaattttgtggaaacagaacaaattatgcagtttaatgggtatactgcttcatttgttcaggtccgtggttcaatcccactcctctggcagcaaattgttgacttaacttataaaccaaagtttgagttattgaaacttgaggaagctccacgagtcctagagaggcatttcttagatttaaggaaaaaatatggggcagtattggctgttgatcttgttaacaagcatggcggagaagggcgactgtgtgaaaaatttggtgatgcatcgcagcatgtggctggtaatgatgtaagatatctgcactttgattttcaccatgtctgtgggcatgttcattttgatcgtctctcaatcctgtatgatcaaatttcagatttccttgagagaaatggatatcttctgttgaatgaaaaaggagagaaaatgaaggagcaacttggagttgttaggaccaattgtattgattgtttagaccgtacaaatgtaactcagagcatgataggccgaaatatgttggaatatcagcttagaaggcttggtgtctttggtgctgaagaaaccattagttcacatccaaatctggatgaaaactttaagatcttgtgggctaatcatggggatgatataagtattcaatactcaggaactcctgctcttaaaggagactttgtcagatttgggcaccgcacaattcaagggatactacaagatggtgtcaatgctcttctacgatattatttcaataattttgttgatggaacgaagcaggatgcaattgatctcttgcaaggacattatatagtttctgttggccgagatacagctgccacttctcagaaaggaggccttgaagctatagcttcatttcctctggctttgggtctggttctgactggattcctctttgcaaccatgtcactgaggcaagttcaatatgatttccggcacttcttctttttcgctactgtgggcgggcattagcatcggcatagcagcatttgtgagggccaatggccgtgttttctgcaacagaccacgcctacacaatccccggtgataacttctattcagacaagtttgagcaattgaaatttttatgtgaagtgttcagcttccgcagcaggagtcactggcagaggtcttagttctacatctagatcactttaacgatcaatatttacatgaggctccttcttgaatcttattatatttattctttcttactaatttgtaatcaatgtagcttccagatatacattcgtaccatagccctatcgaaccccatttgagtgattgctactttaccggtgtttcttacacaccgtatcctccctgtatatctgagtttctatttgtgtcgtctttaaaagattatggaaacatttgaaggttctttggaaacacattgatttgattatcttctattcttttaagtaaaaaatttcttgattcagaa

SEQ ID NO: 30364 - DNA, 796 bp, Glycine max
  Clone ID: PAT_MRT3847_127420C.1
agcagcaaaactttggatttacataaatatattcaaggagaaatacttctacctactagtcttaagtttccaacaaaaacccaacaaaaagcacataaagcaataagaatagagaagaaaaggaatggaagtccctttctgccagctctcttcatagttccagtgtctttacctgatgcagcaatgttggtgtgcttgatcttcaacctgctgaagctagacattcgattcaaagctcggttcaccaatgcactttcagcagctgatgcaggagtagtaggtattgactcaacaaaggcccagagagcagaggacaagctacttgtagcaacatcttccacagtgctactttgattgttattgccttccgtaggaaagccaacagattcatatacaacacctaattcatgaccaaaaacaaaaaaaaaactagcatatattaggggatatcctaagacatttgttttagattttacaaaagagacacttgaaactggctcggttctcattttcccagcgggaatatatagtcagaaatcttaatttgagtttttaaagatctcaaaatgacacaaattttatactccagaaaggtttctgccatgcataagctggcatgtcattcaggagcagtaaactgtgaagagctcagaacaaatgagatgggaagcttgcatctccatccgaatcaaagaagagtaaatcattatttggcagtggagccacactgtatcttgtgctgattactatacctggggatgatagctgattacctttaccatgcatccagaattca

SEQ ID NO: 30365 - DNA, 650 bp, Glycine max
  Clone ID: PAT_MRT3847_127421C.1
cttgtttttttttgttttttttttttttttttttttgttttttttttttttttttttttttttaaactaaatggacaatcgattcacttgacgaaaaatcagttctgctactgcctactcgctttacaaatatgttacccctcatgtgccttgttaaagcggggggttcaaattgttcataaccaaatcgaagaccatgtaattcttcctagcatcatattatcaaattgaggaccatgtaattcttcctagcctgggcctgattcctaaggatgaaactgttggtgggaaggaggctgtgcctggtgctggaatagctggggcggtggctgtggcggctgctgctgctgttgctggaactgcagcgaaggctggtgatggtggaactgcggcagatgaaatggaggatatgtttgctgaaatatcggtggctgtggcggcagttgttgtggtgctaggtgttgctgggggggctgctggggtggctgctgcagctgctgctgtggtggctgctgctgctgctgcactggaggctgtggtggtggcagctccacttgatggggaagtgtttcatcccttaggggtccattgagggccctagttcccagtccttttagctcttggatgcccccattggcgggaccgggctt

SEQ ID NO: 30366 - DNA, 1447 bp, Glycine max
  Clone ID: PAT_MRT3847_127422C.1
tatattgcctacaatattcacaaagttttatttttttttttatattgagaaaatgttaggacagcactgtttggtaattctggggagagatatcagacaacaatcattatggaaggttctagagaaaatatacctagcagcaaaactttggatttatatatatatatatatatatatatatatattcaaggagagacacatctccccaatagtcttaagtttccaacaaaaatttttcaaatagcacataaagaaataataatagggaagcccaggaatggaagtccctttctgcctgctctcttcatagttgcagtgtctttacctgttgcagcaatgtatgtgaagctcatcatccaaaatttccctaatagacattcggatttcatcatcaagaaaaggcagtggtacattaacattatcagcaacatcatttggagcctcctgatcagctgagttaatattaaaatctactatgtcatcatctgcccactcttcttcattaaatggtgcaccatactgttcaccatttttaggaccaggtccacttttcttgtaaaccttgtaaagtgcataatagtccttaacaccctggcatctcttaagctcctcttcatccaaggtgtattcatgcataacccaatcagtccgctcaccactaggagctctgcctgcgtagaaaaccagggtctttttcactccaactgacctagaattgcatatcacgttacgatcctttcctgttgctttccaatacccacgtctggttgctcggttagaccttccaccattaggatatttcctatctctgtgacagaaaaagaaccattgcctatctccagttttcaatatagattgcccaggcaaatcctcaggatcccacttatacacatcggtttcacgaatcacgtcgagcttcagcctcttcccacaaatcttccgcttcagatagtacatcaccaactcctcatccgtgggatggaagcgaaaacccggcatcgacgacatcatctggctgaaacaatcagcagaaccagctcctgaagcctcacccattctcgatcgcaaaaaaaaatcaaacaacccttgatcacccaacacaaaaaacggaaacttccttaatcaaaaaccaaaacccccaacacgattcgagcctccgggtattcgaaaccggcgatcgagtagaattaaaaaccctaactggggaaatcaaattagggggaaaaaaagaaacaaaattttttggaatcaagaaatggcgaagctgaaatcccaccactacatggtacgaatcgaacctctgggtgagaggattcgaaagactgagtcagagaaggaagctaatagcagtggttgcgagagagagagagagtgttgaaaagaaagaaacgcgtggtgtgggcaatttgtgagggtttttgcggacgctgggtcgagcgggaatccg

SEQ ID NO: 30367 - DNA, 586 bp, Glycine max
  Clone ID: PAT_MRT3847_127423C.1
tttcgtacggctgcgagaagacgacagaagggggaactatgaactgtgaatatcatcatcacaattaagatgagtagtgcaacaagcaaggcttggatattgtgacagccagtgttggagccgtggaggctttgaaggaccaattgggtgtgagcagatgaaattatatatgctttgaggtgtgctcagaagcacatgaaaaaccatgttagatccttgtctcaagcgttaaagaatgtttcttcttctggtctgttagcaaattaaagggtgagaaggccaaacaggctaaagagtccttgagggctgtcatgtacttaagctgttgcggtcctaactgatcttaaaggagacaactgatttgaaatgaatattgctttatgtgtaaatagagatgatagattgtatgaaaattgtaattccaaacggcaatattaattaatatacttttcaatgatgaaagtgtcttcatcagatatctatgtatgcttctcttgtaacagaaacaagcaattttattataaatcaaccaatattgaagtcagaaactggctaattattcctcaaaaaaaaatatgatgaatgt

SEQ ID NO: 30368 - DNA, 339 bp, Glycine max
  Clone ID: PAT_MRT3847_127424C.1
gaacgagaaagttgatctagttcgaggaagcatcctctctgcgtatctgctactactgttctaagaaaatgagtttaatcattcatctaccatggtcaaaaatatcaaaataccaatacctcttacgtcccatgttaatctaacaattaataataaccttcttcttcaacccctccactcactcctgtttcatttccataacccccatgagttccctcatccacctttttctctttttcttcttcttcctctgtctctctcactcttctctatgtgacacgtgtcccctgaacttcaccatcctgggcagaaccaaacccacatccttcgacacctccc

SEQ ID NO: 30369 - DNA, 619 bp, Glycine max
  unsure (1)..(619): unsure at all n locations
  Clone ID: PAT_MRT3847_127425C.1
ataagaaaaaatatacactgggccaaataggcccgatagctttttgagctgcatttcagcagccttgcctgctccatttggtccatcataccaagccaaatgggcccagttctttttgagtcactaattaaagagcctagcccgagctggcccatcggactgggccatttttttacagctttaactgcatcgtagaaaccatgaacaatggttatatatccacacacatcttttgccctaatctcctccaccatattcttgacctcaagcatctatatcactggatcatgttttgattttgtcgctgtatttgcttcttcctatgcttcctccaaaggcttcgtcaagtgcacatccaagagtttttccagctaagtgacctatctcaaagaattggtccctccaaaggtgggtagctccacctttcttgcccaagggcaggccatccactctcctggacattctcctcatgcttcatggagtggagttgagttgctcattattgccccccgaccttcaattctataccttccttctcccttggctccattgtcatgctatcaaccactgaaacatcaaagttcaaccataaaggctcacccancaagtttgaattcct

SEQ ID NO: 30370 - DNA, 271 bp, Glycine max
  Clone ID: PAT_MRT3847_127426C.1
gtatatattttaaaatctagaaccccctactaagtgttcatttaagatactttaaaatattgagatattttctagatattctaacagctacttaaagctgtcaacttgccatgctgctcacatgaatgcatctttagaggtctcaaaacatactctagttttaagatgtggtctctatgcaaattcaacctttgttttgaaacttctaagtaatttaatgggttttcatctgtcacttgttctgataatacctcctaagtgttcatcacgt

SEQ ID NO: 30371 - DNA, 612 bp, Glycine max
  unsure (1)..(612): unsure at all n locations
  Clone ID: PAT_MRT3847_127427C.1
tttttttttttttttttatattttttnngaccatgaaatatcaatttcattaatctacctgtcacttcttcatgctttaatataccataagaattgataatataagatgagtatccaacaaatagtaaaagtatcagaaaatatttcacaacctaattcctcttattcgcttattaaacattttctgctggctccctgtcacaagggagtgaaagtagagattctgtgtacacagctgatcgatatggaccattagaatagatttggtactcttgcagctgtccctcgtcattacattttatcaatacattacagccatctgtcccaacaatatctccatcttcggtagaacatattggaaataaggagagactagaaaaataatcaagagacacaacagtggtctttgtccaagatgaccttactttgtattctcccatcgcccatatttctaccgaatgtctgatctcctccacagcacatagattgagcaattctcccagtaccgccaaaacacagagttgaaaattgtccaaatcaaaatcaattggtagaagtatctctgaaaaactcctttcagttaaatcaaaagcacaataacatccattgata

SEQ ID NO: 30372 - DNA, 402 bp, Glycine max
  Clone ID: PAT_MRT3847_127428C.1
ggatttcgtttcatttgtcaataggagggacctcgagagagagaatcagaggaggacgatcatctatatgaagtggagtctccttaccggcccggtcgccattctcggcggcgtagtcgtcgccatcgccgccgcaaacgttatcttcgtcaagaatgtgaggttgctgatgaatcaaccaagtccaagactattgaatcaaaaaacaaattctaagcaaaaatcatttgtaagaattgctttctcaatggcttgtcctaatatttagaggatcccttcctcaaaccagaagagaggaagtatgaaaatgaaccttgctccaagtaggagaaaagagacaacagaagtttgcgttttgatgtcttttaaaccctgagttatgagctctgtatactcgtttgc

SEQ ID NO: 30373 - DNA, 311 bp, Glycine max
  Clone ID: PAT_MRT3847_127429C.1
gtggaaaaaaatttttattttccaaggttttttaccggggggcccaaaaatttttccccaaattttccaggggttaatttttcctaaaattggggggaggaaaccccccccccccctttacccgaccaaaagatcaaaccgggtcccaaaggggggccacctttgttttgtggtccaaacgggtttccccagtaaaaaaaccaaaagggtggaaacactgattagggggggcttttcctttaaaacctccttttttttaaaaaggtggggggcaaatgggcccttttccccgggatattcccttgaaaatt

SEQ ID NO: 30374 - DNA, 546 bp, Glycine max
  Clone ID: PAT_MRT3847_12742C.1
ctcggaaccctacttacgcttccgagaaaagaacaccattatgtcattgaacaaacaatgaaacgattaaaatacatttggtaatacactcgtatgtgaggaaggagaaagctaggtcagaggacgatgccagcatctactcccatactctgatttagggcccagcttatctagcatatgaaataagccagtatctaactaactcattgggctaacattggaacacacatgacggtgcgggagcatgctttacatggttaaacacaatgtttactttaacagaaggctccatatgttttccagatcaccttcatcacatgtaagcaaagagctcatactgttggattaaaacaggatgatcatcatccgcgtcaaagtccagctctggatgtcaaactataatatctggatggtttccaactgctgtggcccccttggagtctaagcccgacaatggtgcaaggttgttgctcccccataacgactattggaccagaggaagttcgtatttcttaccatatgaccacgtcaatggctgattaaact

SEQ ID NO: 30375 - DNA, 1952 bp, Glycine max
  Clone ID: PAT_MRT3847_127430C.1
aattcggctcgaggatttttctttcgtacaagaaacaaccaccagactgcgatctccattatttgagtactactactttgcataaagggttcaacaattcgtgcgtgcacagtgccaaatcgtgatcacatgaacttaatcttaatctgttagctagcttcaaatgcgttattgggtctcacaaaaaggagctagctaggaagtgaatactactattatttacctgccacacacacagaaacaacatagatctagaagcaaaggcaaagaaggatttcaagctcaattgtttagcttaattaatttccttcaagcaaatgatgattcagaagatgtttgaccccacccgttctggtatgacaagaagctcctcccatgtagcctccatttatgacaatgatttccttgagttggtgtgggaaaacggtgagattgttgtacgaggaggttcatcaaacagatcacgaaagacaaacgacgaaagaatacatgaagatgccagcattaacaaaagaacaaggttaaacccattattatactcacttgaagatcactttccacctcaaagggactctgacatgagcacttcacaccaaagcaataatggccaagattcgtgtcaatcctcccaaagcaagaattcctgcaagcttcatgaagaatttgcaaacttacttaagcccgttagcacaggcaatagtcacttacaacagtgcttaccttcatctccgctcaagaaacaaagaaccgattcaactcaaacaccaagaccagcaaaagtgaacttctccaacttttcaatacctgcagtgtttctcaaatctactactactactactactaataattatcagggaaacagtgcaactcaacagacaaaaaatcattcatctccagcaagagtggaggagattgaagcgctcaaggttgacaaatcagcgaaagaaacacagtgttttcagaagcaaacatcattaactgttgaaagaagcacaaaattaccaaccccagcggttgatgaacactccggctgcgagaagacgacagaaggggttcttggaattcacagatcccaaggtcaaacctcaacctcagaagcacttagagccaaagcaaaagcttataataataataatattaacatgtgtcatgaaccgttgctagcatcttcttctgtgtgctctcttggagcctccaacgacccaaaccttggtttcaggaaacatgaggacactgatgactcaacgtatttaagtgataatgatggagagcctgaagatatggtaaagcaagatagggagggtaacagagtcaagagaagcaggaaccctgaggttcataacttatctgagaagaagcgaagagaaaaaatcaacaagaagatgcgtacattgaaagacctcattcccaactgtaataaggtggacaaagcatcaatgctagacgatgccatcgactatctgaagaccctaaagcttcagttacaggcaaattttcagataatgtcaatgggaagtgggttatggccactcatgatgggattcaggccaccacagctacctattccaccactttctgctatcacagacaacagacttattcagatgtttggttccccaaaccaaataccacccatgccaatgcctcatgcacctttcttccctatcattggaaattctgccacacaatcacacttggctaataacaccaccaccacagctgcagctaccaccaacttggcagaacatttagctaattctctacatggaaatgcaacaaagctagcgccaccaagtcagatttcctttcaacaccaccacacctctactagtactcctacactagctacccctttcatttttccacaaaaatagataaaaatgtatatgaagggaaaactattcctgtaacaaaattagattagagatgttaattaaagacgagtgtaaagt

SEQ ID NO: 30376 - DNA, 613 bp, Glycine max
  Clone ID: PAT_MRT3847_127431C.1
gaattgaggctatattgtttagcttaattaatttccttcaatcaaatgattcagaagatgtttgaccccagccgttctggtatgacaagaagctcctcccatgtagcctccatttatgacaatgatttccttgagttggtgtgggaaaacggtgaggttgttgtacgaggaggttcatcaaacagatcacgaaagacaaacgacgaaagaatacatgaagatgccagcattaacaaaagaacaaggttaaacccattattatactcacttgaagatcactttccacctcaaagggactctgacatgagcacttcacaccaaagcaatggccaagattcgtgtggtcaatcctcccaaagcaagcttcatgaagaatttgcaaacttacttaagcccgttagcataggcaataatcacttacaacagtgcttaccttcatctccgctcaagaaacaaagaacagtagattcaactcaaacaccaccaacaccaaaagtgaacttctccaacttttcaatacctgcagtgtttctcaaatctactactcatcagggaaacagtgcaacccagcagacaaacaatcattcgtcttcagcaagaatggaagagatca

SEQ ID NO: 30377 - DNA, 2384 bp, Glycine max
  Clone ID: PAT_MRT3847_127432C.1
ctagttgtgtccgctttctttctatcaacgaaaaacaacaatggaatatttgcaggacgctgggatccgcgtttctcgatcacacagaacaattcaattcatcagcgtgtctccacattttcgcgcgtgaaacctcatcgccattttccctcttcttcttcttcttcttcactgattggattaattgcacgtaaaggaggtttaaagcttcgcagcacgtgttgttgttgttgttcgtataattgttgttgttgtggcggcagtggtagtatttggaaattgaggattgagtggggtgtgtgaaaaatggctgccaggagtgatcaccaaacggttcctctttcggtgctcctgaggcgcgaattggcgaacgagaaaattgagaagcctgagattgctcatggtcaagcgtgccagagcaagaaaggcgaggatttgacgctgctcaagacggaatgccagagggtggtgggcgatggggtctctacatactcagtttttgggctatttgatggacacaatggatctgctgctgctatttattctaaggagaatcttctaaataatgttttaagcgcgattcctccagatcttaacagagatgagtggatagcagccttgcccagggctttggttgctggttttgtaaaaactgataaagattttcaagagaaaggccaaaaatctggaacaactgtcacctttgtcattatagaaggatgggttgtaacagttgcatcagttggtgattcccgttgcgtccttgaatcttctgatggtgagctttattacttgtccgcagatcacaggctagaaacgaatgaagaagagagggtgcggatcacctctagcggtggtgaagttggtcggctaaatacagggggaggtgcagaggttggtcctttgagatgttggcctggtggtttgtgtctctcacgatctattggagatatggatattggtgaatttattgtacctgtcccgtatgtaaagcaagtgaagatgtccactgctggaggccggcttgttatctgcagtgatggtgtttgggattctctacctgcagaagtagcccttgattgttgtcgtggaatgccagccgatgctgctgcaccacatattgttaaagaagctgtacaagcaaagggacttagagatgatacaacctgcattgtagttgatatattacctcaggagaaaccacctgtttctgcgccacaaacaaagaggccagtaaagggaatgctcaagtccatgtttcgtaaaaaatcttctgaatcatcttcttatattgacaaagagtacatggagccagatgtagtagaagaattgtacgaggaaggatctgccatgctttcagagaggttagatactaaatatccagtctgcaacatgttcaagttgtttatgtgtgcagtatgtcaagtagagataaaacctggagagggtatttcaatacacgagggtgcacccgactctcgaaaatttcgtccctgggacggacctttcctgtgctcaagttgccaagagaagaaagaagccatggaagggaaaagatcatcaggtagaattagcagtggaagtgatgaatgaactctcgtgtaaatttgcattttgagagtgataaaaattgttcatatgatgggaaagtcaaacaattcaatcaacaaagactcccttctaattttcactggggctttatggatataattttgaattccacatgaaaagacatatgaaaagtaaaccaatagcagcctgttagaagatttctgacttggaagtatgaaatagcaacaagtattgtgaagggttgtgttaaatgtggaagtacacaacaagatatcagaggtaatgcattctttttatatacttttttttgtgggatccgttcatttgtatacgggtcatttggaatcactatagacctttaatgaaagtggtctttgttattgtaatgtaatatagggagtttaattagaattcatagaatcaattctactgtaggttagatgtgtgttaagccttctgaatgattttttcctctaacattcgattttgacaattccttttgccatacgagcattaggtcttttgtaaaagatgttaggtggaattatcccccgcaccccgtctcaaaagtctcacagaaaaaagaggggaaaaaaatacatagtagtttattacacatttacatcccacctaactttgctgtttttccgtatgttatttgtaaattacaccccacccttgaaaattgctgaaccgtttcacccaatatgcatgctgtaatgtctttgtttttattactgtatttttttttacaactattccttcttggagaattggaccagaattcaagaataaaaaataagatgttatcc

SEQ ID NO: 30378 - DNA, 718 bp, Glycine max
  Clone ID: PAT_MRT3847_127433C.1
aggccacagcattggatatgcacggtgtgttacatttagagaccatatctacaatgactccaacatcgatgccaactttgcaaaacaacttaaatacatttgcccaacaaatggtggtgactccaatctttctcctttggactcaacagccgcgaactttgacgtaacctattactctaatttggttcaaaagaaagggcttcttcactctgatcaagaactcttcaatggtggttctactgatgaactggtcaaagagtacagcgacgataccgaagatttctacgaggacttcgcaaactcgatgattaagatgggaaatattcagcccctcactgggaatcaaggtgaaattcgggttaactgcaggaatgtgaactaattcattgcaaaaattatgcaataagtatgtattatatatacatacagaataattcttgagtggtgcacgatttagaatttattatttatatatgtaatggtatgtattctttactataaattgtgtgttttcaaattccttttgtgttgatttttacgtgagttttttttttatgatctttttttgaagaaaaaaaacactcctctgcgttagagatattatatcaactaatgatatatccaaatgaaagtttattagaagaggaacaatctttattttaaaagatgattttgtaaagttacgttaatcttaaactcaaatttttattatttattt

SEQ ID NO: 30379 - DNA, 2103 bp, Glycine max
  Clone ID: PAT_MRT3847_127434C.1
cagtagctcacaggataccaactgtgatggattgcactaaggttcttgccatcaggggggggaaacttgtggagggtgaggagcctatcaacttgataaatagagaatgatcactgtttgggaggctcgataggatatatatacttctctgtggctgctctttctcacctgacattaatggttgtcgaactctttaaaaactcattgatggaagatggtattgacgatccttaagacgtgactgtgcagttgattcatggataagtactgattggagttatacttataaagttcttctggtggagaagtctgtttgcagaagctttgggagttcgaccattaatgtctttgctttttcagttgatgaagtacctttttggtgaatgaacatagttttatgactcgtcttctataagatgggaacctagtagggtctcctcggatctcagcattgtagaccttgatgtcccattcggctttgtttttgctgtgggagctactatgaattgctatgctaatctaaccgttttagctgttgttacttggcaagtcttgtttgtctccataccgatgatttattttgcaatccgcctgcagagatattactttgcctctgcaaaagaactgatgcggttgaatggcacaacaaaatcctttgttgccaaccatcttgctgaatctgttgctggagctgtgacaataagggcttttgaggaggaagatcgtttttttgagaaaaatctttatctaattgatgtcaatgcgagcccttacttccatagttttgctgcgaatgagtggctgattcaacgattagaaacggtcagtgctgttgttcttgcatctgcggcactgtgcatggttgtacttccacccggaactttctcctctggatttattggcatggctctctcttatggcctttcacttaacatgtccttagtattttcaattcaaaatcaatgcaacatagcgaattatataatatcagtagagaggctaaatcagtacatgcatataccaagtgaggctccagaagtaatagaaggaaatcgtcctcctgcgaattggccagctgctggtagagtacaaataaatgaattgcagatacgttacaggcctgatgcaccactagtacttcgtggaatcacatgcacatttgaaggaggtcacaaaattggtattgttggcagaacaggcagtggaaagtctactcttataggcgccttattccgtctagtggagccagcaggtggaaaaatcattgttgatggaatagacatttgttctattggacttcatgacttgaggtcacgctttggtattatacctcaggatcctactctttttaatgggacagtcagatacaatttggaccctttatctcaacactctgatcaagagatatgggaggttctagggaagtgtcagttgcaagaggctgtccaagagaaagaagagggattagactcttcagttgttgaagctggagcaaactggagcatgggacaacgacagctattctgtttggggcgtgctcttctcaggcgaagtcggatattggtgcttgatgaagcaactgcgtcaattgataatgcaactgatttgattctgcagaaaacaattaggactgaatttgcggattgtacagtgattacagtagctcacaggataccaactgtgatggattgcaccaaagttcttgccatcagtgatgggaaactggtggagtatgatgaaccgatgaacttgataaagagagaaggatcactctttgggaagcttgttaaggaatactggtctcattttcagtctgcagaatctcattgaagctgaacatgtttttttagcatagctcttatatttttctctgtggattgagaagaagccaagaaagagtacttagaagtaggatgcaaagtgtattttactattatatttggaaaaccctgaggtctgagaagtgggaaggaattagagggactaagaagtaaaaagaaaatggtgcaaaggtattctaatgtaccattttctagaatgagtttgtcactttgagctgttttacagtggaaaggtccattatttatcaatctttgtttataa

SEQ ID NO: 30380 - DNA, 480 bp, Glycine max
  Clone ID: PAT_MRT3847_127435C.1
gaaaacacggacactgcttgtattatgctagggcgttaggcagggcgtctatctgtcatacaaagcgcattcctcagatacagagatgctccgtttccggagaagtgtaaacagtgctatactgttgtctccaactagcaaattgattaattatggcaacgtctggacacacactgagcttgtgacacgctggaggtatgacggagtacatagaaggagaggttatgtacctcgaagatggtgaagaaagcatgaacaagcttgcacgtacacctccaaatgctgctgacatatgaaagactccatcggtagatgtataagcgcaattaggagagcctaaagatttctcatgaacgatcgtgatgagggtgaatgcctaaggatttaccaactcgtgctatatgtgtgagatatacgtggcttttctaccttcgggattggtgtcggtggtggcggttgggggtagggtggtgtgaccgc

SEQ ID NO: 30381 - DNA, 523 bp, Glycine max
  unsure (1)..(523): unsure at all n locations
  Clone ID: PAT_MRT3847_127436C.1
aattcggctcgagacggctgcgagaagacgacagaagggacagacagtctcaaataaatgtaaatgtgctactacttttacagcctacctgtgactctttcccattaattaatcctgctctgggaatgaccatagccgagcagcaatatctcattttgaacaaccccattacattgaattcatgattttttttaacttttgtacagcttacaaacgtttggtatttgggatgggagttttgatacttctcaggacttaaattcagtgatggtatgagaaaaggtcacgaatggtaatagccaaacacatttatcagaaaaacaaaagaaacttgataatattcagttaaagagggaagttgggatgtgtttgggttaattgtggggaggttccaattcttttggacaattttggacttgctctgaaatatggatttaagttgtaggaattancttcagttttcccataagtaactggggaaaattgataggacaaaactcttccttaatctatggattgaaat

SEQ ID NO: 30382 - DNA, 239 bp, Glycine max
  unsure (1)..(239): unsure at all n locations
  Clone ID: PAT_MRT3847_127437C.1
gtanacncccaagagtactanctccatctcttctgcctgaacaaaccgatctcanttgggnnaatccannaactcgacaagncatntacaagtccgctatgganttttngctanagcgtggtgtcgttggntncccgagttganncngtcaacatnnacagtaagggtgngatgtagacgccccagtccatgntnccaggttgncgaatggcattngntgnacaccagtcnctggaggg

SEQ ID NO: 30383 - DNA, 1147 bp, Glycine max
  Clone ID: PAT_MRT3847_127438C.1
ggctcgcgccggcctcataactcatcagttatcatctcaacaaaataactgcatacatcttccatccaactatatatcaaaacactctatggcgaggtgtgaatccgtttccacgacaatgcccctgaatgcaaaaatattaatagcacttatattccttgcattcgcaatcacggctaccacttcaactcgaatccttgatgaaatagaaacaccagaagaacccaacagtgctgccgaatcccctgttgtctctccacttccacttgttgcagaatccccagttgcggaagtcaaaggagttgaccaacaacatcacacgctctcatttttcatgcacgacattctgggaggctccaaccccacggccagagctgtaacaggcgtggtgacgaatccagctctgaacgctcaagtggcattcgcgaaacccaacggagcaaaccttcctctgaacaacggagttccacagaacaacaacaacggaggaattctcaacaacaacaaccttcctttcctcaccggactggggggtaccacggccagcgtcttcaacaacaacaacttgctcaacggtggggccggtttcccggtcactaacaccaaccagctcccagagggaatgacactgcagaaggtcatgtttgggacaatgactgtcttcgacgatgagctcactgaagggcaagagttgggttcgggtttggtagggaaggcgcagggattttacattgccagcgctgtcgatggagcaagtcagcttatggctttcaccgctaagtttgaagagaatggttacgtggacagtcttagtttctttggcgttcatctaacgcaggtttcggagtctcaaattgccatcgttggaggcaccggaaagtttctcaacgcagaaggctttgccattattaagacttttcctgttatcggcggtcagcaacataacactgacggtgtccagactctgttgcagctcactgcctatctggcatactagcctctctctctctctctctctctcttatatgctgtgctgttaacttctttcttgttgcaaaaatgtttgtatttcgtgttgtaatgagttattaactgtgtgagaatattttacttttgaaaaaaaaaaaaattgctataaaaaaaaaaa

SEQ ID NO: 30384 - DNA, 333 bp, Glycine max
  Clone ID: PAT_MRT3847_127439C.1
gacatgaacacctaaacaaacccactaagatagcttcctttgtatccttcctagtgctacttcttgcagaccttatactcatgcctcaaaggcttgctacttactacaaaccaattaagaagccaccaatgtacaagccttcaatgtacaaaccaacaaatgtcaaaccaccggtttataaaccaaaatcaccggtttacaagcctaaaccaaccgtttacaaaccaccatatatgaagcccccatactagaaaccaccttattgaaagtaccctccactacaagacaacacccatgcctaaagcaagctatgacgtctattatctacttaat

SEQ ID NO: 30385 - DNA, 765 bp, Glycine max
  Clone ID: PAT_MRT3847_12743C.1
gagtaggggataaaatacaaggggagtgtctcagcgtgagattttgaaagaaaaaggtcatttacgtaatttgacttttgaaaaagggaaagggaagtgtacttggcaaaaaaaaaggggagtggatataacaaaaacttttcttcataggttagaaaagttcaggttgacagaatggtccaaacccgcgtctacaaaataataattttttttcgttaactttctaaaaaaataaaaaaaaactctttaataagtaatgatttctctcaaaataattaaatctagtccataaccagcaaacaaaattgaatttcttaagcacgttaaacatggtgcacaccaaaaatgtaaacatgtactgatccaagctaagaaagtgagtattttttgttttatattactttttaacttttatttatattgttgcacaataaataacaaataaactttaattagtactccgtctctcttcgagctatattgatggatatttaagaagaactcgtcttacaggtgagcataatccattacaatgttttaatttttaactcccctgtctctcttcaagttatgagggaaatattgactttcttcctgaaatctatacaagaatcaaatatacgccatctataaagccgtagacctaactcacttatactgtatcgtatatacttttagttgttgtttttaaccaaatcgatcagataaaaggaaaaggagaaaataaatattttgcaaccacatttaaaatatcttttttgaaca

SEQ ID NO: 30386 - DNA, 284 bp, Glycine max
  Clone ID: PAT_MRT3847_127440C.1
ctacaattaaggtctctcatacagtagtattttatctgcactacgaactggctactttatttatgtaagcagaggcaggtgagtgagtgtgtgagctagagtgaagaccgtctatgatggctcccaagggtttaatctttttggctgtgttatgcttctcagcactgtcactgagtcgttgtcttgcggaggatactggccttgttatgaacttctactaggaatcatgccctcaggcttaagacgtcatctttgtacacgtcaggcttctctatttgcgcgat

SEQ ID NO: 30387 - DNA, 747 bp, Glycine max
  Clone ID: PAT_MRT3847_127441C.1
tccgggaaaccagtgcggccatggatgtcgaggagcaaccttcacccaacgcaagcgacgttaaacgcttcggccttaaaaactctattcaaaccaacttcggcgacgactatgttttttttgtcaattaaaacgatgattggagtgcaatggcggtgtcactgtcaacgaacgcagtgaaactgtattcacctgtggcgggtcagtattatggagaatgcaagggtcactctgaaaccatcaatcagattttgttttcgggtccttcaaatccccatgttttgtgttcctgttcttctgatggcaccattagagcttgggacataaggacttttcagcaggtttcttccatcaatgccggtccttctcaagaggttttcagcttctgtattggagggactggtggaaatttagtagccgccgggtgtaaatcgcagatactgttctgggattggagaaatatgaagcaagttgcatgcctggaggactctcatgtggatgatgtcactcaggttcattttgtccctaatgaacaaggcaagctgatttctgcttcagtagatgggttgatctgcacatttgatgctactggagatatcaatgatgatgatcatctagaatcagtgattaacatggggacttcaattgcaaaggtgggggattttttggagagaattatcagaagctttggtgcttaacacatattgaaaccctgggtatctggaactggaaagatggtagaaatga

SEQ ID NO: 30388 - DNA, 317 bp, Glycine max
  Clone ID: PAT_MRT3847_127442C.1
accacgcgtggcgtattagctagacattgagttatgaacaacgggttgaaaagctgagatgggtcttggatcacacatgaattgagcactacgtccttcaggggtagccgactgcgaagatggcaagcaaaaactagacgaaaaggatggaacaccaggatcaacaagagaacatgaaaagagatattatcgtgtaccgtgggtatcgtgcgggatatataccagcgggataaatatagccacacagaataatgtgcacggagcgactactgtcaaacgagactacagcacatacttgatccatgtgaacataggga

SEQ ID NO: 30389 - DNA, 1610 bp, Glycine max
  Clone ID: PAT_MRT3847_127443C.1
agaaacccaacttctgttcatatggaaaccattgcggccatggatgtcgaggaccaggcttcacccaactgcaagaacgttaaacgcttcggccttaaaaactctatccaaaccaatttcggtgatgactatgttttccaaatcgtcccaaagtacgcacgttcttttaattccccgattaagctgagaatttatgctcaaactcgaatgggaaaagtaaagttccatttttttagttcctaaatgtgacttgggttcgaattgtttttgtgaattaaaagggaagattggagtgcaatggcggtgtcactgtcaacgaacgcagtgaaactctattcacctgtggcgggtcagtattttggagagttcaagggtcactctgaaaccgtcaatcagatttcgttttcgggtccttcaaatccccatattttgtgttcgtgttcttctgatggcaccattagagcttgggacgctcggacatttcagcaggtttcttctatcaatgctggtccttctcaggagcacgcgtccgcccacgcgtccgggactggtggaaatttagtagccgccgggtgtaaatcgcagatactgttctgggattggagaaatatgaagcaagttgcatgcctggaggactctcatgtggatgatgtcactcaggttcattttgtccctaatgaacaaggcaagctgatttctgcttcagtagatgggttgatctgcacatttgatgctactggagatatcaatgatgatgatcatctagaatcagtgattaacatggggacttcaattgcaaaggtggggatttttggagagaattatcagaagctttggtgcttaacacatattgaaaccctgggtatctggaactggaaagatggtagaaatgaaggaaacttctcagatgctcgtactatagcttctgaaagttggaacttggatcatgttgactatttcattgattgccactattccagagaagctgaaaaactatgggtgattggtggcactaatgctggtactatgggctactttcctgtaaattacgaaggagtggcaacaattggagctgcagaagcaattcttgaaggaggccacgcaagtgttattaggagtgttttacccatgtcaacaattcctagtggacctactaatagtcctagccaaggcattttcggttggacgggtggggaagatggtcggctatgttgttggctctctgatgattcctctgaatcaaatcaatcttggatttcaagcactttgactatgaagccagaaagaacatgtaagaaacaccgtcatcacccctactagcaaatagcatgccgagccattaacttagatggttcaaagcccgaggagcattttttgttttatttgccaatagtttgttttatttttcatcacaacatgggttgagatgtgttggatttttattataaaaaaaaattgtatttgtacgtgagcatttttcatagccctttttgtttttccaaaatataggacacttgagtcattttgtaatcttgtatttgtatggagtgtcaatattatgtgatgattttctaggtaatcagtaactttctagaccgctttgacaatta

SEQ ID NO: 30390 - DNA, 531 bp, Glycine max
  unsure (1)..(531): unsure at all n locations
  Clone ID: PAT_MRT3847_127444C.1
agagaaactactttctgaagaatcatttttgcgtctcaaagaatctggaactggtcttcacacaaagtcagtagacgagcttatcagcatggcgcacaagttttatgatgaagttgccttgccaaagctggctatggactttggatcacttgaactttctccagtcgatggtcgtacactgactgactttatgcatttaagaggattacagatgcgatctttgggtaaagtggttaaacttgcggagaatctgccacacatacaatccctttgtattcatgagagctttcaagcatctaccaagcgcagttacaaagcatgttgacactctgttgaaaacgatctgcatctattgcatcaacactgaatttcttacttgttgggtctcgaacagaagatggcgctgaccaaattttgattgatgatcataatctcagattcaatggtacatctgtttttgtccaaagatttggctggcactaaatgatgaatttcacatttanggaagttgtcgattctcagagggctctg

SEQ ID NO: 30391 - DNA, 221 bp, Glycine max
  Clone ID: PAT_MRT3847_127445C.1
ttctaccataccttaccaacttaagctaccgagcttaattgactgggtttcggacctctgcttttaacttcgatcacttgaaataactcattcgatagccatatgtcacgatggactggcacatgcagctatgttccctctcatgtcttcgcctactacttctgattctctcagggaacatgggtatgcaattaagcgaggatcgcttgcaacgccatgag

SEQ ID NO: 30392 - DNA, 603 bp, Glycine max
  Clone ID: PAT_MRT3847_127446C.1
ttgcgtgctacatcgttagtagtaccgccttcttggggggggggggggggggggctgatgaaacagcgaatgcggcaatcaatcagcgcagattgaatgaataaaccagcataaggggggggggggatggcagctgctagggtaactaaaaaaaaaaaaggctttcccacataacattatgcgcctaaaataagacacggtaatagcgggtaacaggacttcgttaaattacgtaaataaaactaaagcctcataggtaaacaatataacataatacaggtagaggtgatatgagttatacgaaagcagttgcagccacgcattgtggcgaatgggctaggaggctagaggaattagacaccggcattaagttaaaccccagcacccacagcaaaaaacacgccatatgcggggctgtgaaggaagtaataataagcaagtaataaatattggggttagggtaaggacacgagtgcacatgcgaacaaaagaatgtcgttggtgcgcgtgttacgcagtaccatgtgccagttctaggagcttagtttgggctctatccaccaagctgtagagatgtagtaaaggtggggatagcaagagtat

SEQ ID NO: 30393 - DNA, 812 bp, Glycine max
  Clone ID: PAT_MRT3847_127447C.1
atacggctgcaaaaaaacaacagaagtctcgatccgaatgatggttaggctcgagaaaaagcatttggttgcgtgttggacctgggtattcggcatgtggcttacatcttcagttacaggaagaaagcagacaagggatgagaatgaacatagagaaagaaagttcagaagggatgaggatgatcgggagggaagaaagttcagaagggatgaggatgtttatggagaaagaaagaacttaagggatgaggatgtgcatggagaacgaaagaacttgaggggggaggatgatgatagggaaagaaagcattcaaaggataaagatggtcgtggagaaagaaagcacagaagggatgatgatgatgatgttagtcatgaaagaaagcagtgcagaagggatgaagatgatcgtgaagaaagaaagcagcacagaagggatgatgatggtcgtggagagagaaagcacagaagggaggaggaagagcggggaaagaaaggttatgagagggaaagccgctccaagagagccagatactaaggttctccttcgagtgaggcgtgaaagtaactcatgaactgtgatccaggcatattgagaatgcttacttgctgctttaatatttgaattagatgtgtcagttgtcttatacatttgctttttagaggatgtaatttgtgtttgaactatgtttaatgcgtgcttttttcaaattctgtattatgttttttttttctaccaaaattctttattttgttgtgactggtagttttttttaaaaataaaatacaaaatctactgcaggtgttgtatt

SEQ ID NO: 30394 - DNA, 358 bp, Glycine max
  Clone ID: PAT_MRT3847_127448C.1
gggtaaaaaaaaatccaaccgggggtttcattcagcaaatttactaccaatcgaacagcacaaagggaaaattttgtcccaaaaatatgatgcaccttgaattcatttttttattttcaaattataaaacaaaatttaaggggcctcatttcctttgtgttcaagggatctgtttaaataaatcacaacctgttggggtgatttttaaggggccataactccttcaaagcaaaattacaatccactttattttttttaaaaattgggacgggaaaaggtttttctttaatgtacttgttctgaagaaactcctttgttgttgccctcttgccaggcttctaaaaaatcaatcttttgg

SEQ ID NO: 30395 - DNA, 346 bp, Glycine max
  Clone ID: PAT_MRT3847_127449C.1
aaaatgcaaacaaaagggcaaacctaatctttgttaaattatttaaacaaacaagtttaatcctgatttcccctaccagtcttaacaaatgatttaatggattcctacaggggtacctccggtttttaaaatttacctacacttcccttttgggaggggttattctgatttctacacaccaagcctttcccaaatgaatttcctcgttgaagcaccatgttgatcccgtaatcaacttacttgctggtggggtcccccctaaatagggtaagccccattttctcccacatttatgcccgggtcgccagaacgtggccaagcttcttcataacccttataaaccggc

SEQ ID NO: 30396 - DNA, 439 bp, Glycine max
  Clone ID: PAT_MRT3847_12744C.1
aattcggctcgagctcgagccgggttgactttgtttgaaatcaacgttcagtagtataattaaatttgtgttcaaaaaaaaagaggggaaaaaaaaaaagggggggagggaaaaaaaaaaaaaaaaaaaaaaaaaaaaaaacaaaaaaaaaaaaaaaaaaaaaaaaaaaaaaaaaaaaaaaaaggggcggcccccaaatagagaactgggtcccccggaaataaatttcggaacgggccccgaaggaggaccaattttgccataagagagtggaataaaaacggggcaaaaaaaggggaaaaggagtttccggggggaaaattgtttgcggtaaaaattccaaaaaaaaaaagaaccggaaacttaaagggtaaaaccggggggggccaagggggggaccaaccaaaattaattgggggggcctaaatgccccgtttcc

SEQ ID NO: 30397 - DNA, 180 bp, Glycine max
  Clone ID: PAT_MRT3847_127450C.1
gctcgacatcgagccgaatcggctcgagggtggcggtcgatttggtggaagttatggttgtggtcgattgacctggaaggttgtggttgccactttggtggaagaggtggcggtggaaggggtcttggaaatatacccaaccttgctgcggaacgcacagggaagaagaccaaatttgct

SEQ ID NO: 30398 - DNA, 173 bp, Glycine max
  Clone ID: PAT_MRT3847_127451C.1
aaaaagaacaaacaactatattaaggtgcggcgaactaagacaacagatcggaaaatatcccccctacaattataccaatgcatgcatttccctgttcactccctcacactcattaattcaaccactacacatctttagtcaacacaccctattgtccctataacatgaacag

SEQ ID NO: 30399 - DNA, 437 bp, Glycine max
  unsure (1)..(437): unsure at all n locations
  Clone ID: PAT_MRT3847_127452C.1
caccttttctctactcctcctcttccacctgcctacccccaaccagacagacaccaaaaccaaaccaaaaacaaaacaacctagtgagagtgagtgagtaaatctcaatcttaatggttgttgtccaaggcaccaaggtccctctcccacacccttcctccctctctccctctccacaccccctcccaaccacctccatcctctttgaaccctcctccctttctcttgccctcacccactctgactcctccctctctctctacccttccttctcccccttttccccttcccaaaccctaaccctaaccctaaccatcccctccccctcctcctcctccaccttcctcctcctccaaaaccacacaaaccctacatcctctgtgggtcccaccgtcctctntatagtctcgtccccacatagaaccggcatcctcctc

SEQ ID NO: 30400 - DNA, 1719 bp, Glycine max
  unsure (1)..(1719): unsure at all n locations
  Clone ID: PAT_MRT3847_127453C.1
acccacgcgttatttaatcaggaatctncagataagaagcgaagacttgttgacattgtacaccttgcaatgctacaaagtaaaattggccgagttgatagccttgatgatgatggctttccatatgttggcgctaatctccaaagcggtgatattattattgggaagtgtgctgaatccggtgcagacaatagtgtaaagttaaagcacactgaaaggggttatgtgcaaaaggttgtgctgtcttcaaatgacgaggggaaaaattttgacgcgtgggcattaagacaggttcgtagtccacgtcttggagacaagttctccagtatgcatggacaaaagggaggtttgggatttctggagtctcaggaaaattttcctttcacaagacaaggcattgttcctgatattgtcataaatccgcatgcatttccctcacgacaaactcctgggcaactcctagaggctgctttaggaaaggggattgcttgtggtggtatactgaaacaagctacgcctttatccactccttctgttgatgccattactgaacagcttcacagagctgggttttcaagatggggaaatgagagggtatacaatggaaggactggtgagatggttcgatcactcatttttatgggaccaacattttaccaacgtctgcaccatatgtctgaagacaaagtgaaattccggaacactggtccagttcacccgttgacccgacagcctgtagctgacagaaaacgatttggaggtatcaagttcggtgagatggagcgtgattgcctaatagctcatggtgcatcagccaacctgtatgaacgcctgtttacactcagtgactcctctcagattcatatctgcagcaaatgcaaaaatgttgcaaatgtgatcttgcggcctgtctctggtggccggaaaatacgaggaccttattgccgccactgtgaatctgcggatgacattgtggtggctcatgtcccgtatggagcaaagttattatgccaggagctctttagcatgggcataaatcttaaatttgaaacccaactttgctagacaaacactaatggtctcttttgttcatttctcccttaaatgaatttcagtgtagatattactttcgttcgccgatgtttctttgaatgcctggcaattagaagtactggatctcttttatcttgttcatatgtctgaagacaaagtgaaattccggaacactggtccagttcacccgttgacccgacagcctgtagctgacagaaaacgatttggaggtatcaagttcggtgagatggagcgtgattgcctaatagctcatggtgcatcagccaacctgtatgaacgcctgtttacactcagtgactcctctcagattcacatctgcagcaaatgcaaaaaagttgcaaatgtgatcttgcggccagtgtctggtggacggaaaatacgaggaccttattgccgtcactgtgaatctgcggatgacattgtggtggcccatgtcccgtatggggcaaagttattatgccaggagctctttagcatgggcataaatcttaaatttgaaacccaactttgttagacaacactattagtgtctcttttgtacatttcctttaacttaatgaattcagtgtagatatcactctcgttcgtggatgtttctttgaatgccagcgagttaggagtactgcatgatatcctgagcttaac

SEQ ID NO: 30401 - DNA, 367 bp, Glycine max
  Clone ID: PAT_MRT3847_127454C.1
gcaaaaaaacaacagaaggggataccaaaaccatttaaaaacaatgaccttgaaaaccaaaatgttggtgcaaaaggtgtgtttgttgcttctttcccttgtgggggtaacagctgcacccatggaactaacctccttcaaaattgttaattcatcaagtgataagcataataattatccaaaacaatgctgtaatttctgcatttgcaaaccctcattgctccttcaatgaacctgtaagaatattaggctaaatccatccaactcaaattgtaaaagctgtatttgcacacactcacagccaagacagtgtcgttgtcttgacacaacgacttctgctacaaaccttgcaagtccacacatgact

SEQ ID NO: 30402 - DNA, 212 bp, Glycine max
  unsure (1)..(212): unsure at all n locations
  Clone ID: PAT_MRT3847_127455C.1
gagccattttttccttccttcacnncnacacncagcaacngggacgggacactttaatgatgagggcaggcccacccaaaaccctaaccaatctttgcccctctttcccattcccaaccaaaccccaaaaccaatctaccactagccacgctttcccttccactcgcctccgccaccgcgccatttacgcggtggctaacgctgcgcatcct

SEQ ID NO: 30403 - DNA, 344 bp, Glycine max
  unsure (1)..(344): unsure at all n locations
  Clone ID: PAT_MRT3847_127456C.1
gctcattccaccacgtgatgccttctgtggtcctgccccccgcaaggccagactgatatgcgaggccaccaacttgagtcccaaacagatcacagtatgctggcttcaggacgggaagcctgtgcaatccggcttcaccacagagccagtgactggcgagggcactggatccagaccccaaacctacaaggccatcagcacactgaccatcactgaaagcgactggctgaacctgaatgtgctcacctgccgcgtggatcacaggggtctcaccttgtggatgaacgtgtactgcacatgcgctgccagtccatctacagacatnctagcctttcccatacccc

SEQ ID NO: 30404 - DNA, 323 bp, Glycine max
  Clone ID: PAT_MRT3847_127457C.1
ggctcgagaggctacccaataaaccttcaacacctatcccttccacataccataccctctataagcctcaccgtttgcaccgtggtctgtctcccttgctcctctcactacctatgcttcaaatgcatctcctcctcaaacacgccaaaaatcatccctaaaaactcgaattcttcaaagttcagtttctgcaccaaccctaaattctcctgggtcttctgcccatacattaaatcccattgtttcattcattacaaatcttcttttaataataattcccatacatgcccttcctacacctttctatatcttctttatcttca

SEQ ID NO: 30405 - DNA, 346 bp, Glycine max
  Clone ID: PAT_MRT3847_127458C.1
tattcggctcgagctcgagccgactcaggctaaggtatcttgctcctaatagttctggaaaaggactgtccaactgtgtagctgagtcctagaaactgtggcttctacagcggctgaatctgactatttatatgcttcttgaattatggatcttaccttgcgtggagagatgtcctggacatgctcaagtccacttcagagtggtccggcgtggagccagaagattcatgacctcgggatgtgcccagaactggtgaggcaagacgattctaacatggctgttggggtcccatctttgcactactgggaggaactaccgggaggagaggcagattcaacttgtata

SEQ ID NO: 30406 - DNA, 454 bp, Glycine max
  Clone ID: PAT_MRT3847_127459C.1
cttaagcagggtattggtatggaccaaaaaaagttatggggggaaaaactataaactatatcatgctttgaacaaaatcagagttgcattagggaaaaaaaattatcttttctcaaaattgggggggaaacctaccatggggaaaaataaggagcagtaacgcgcgttcacaaaatctggggaaagccttcccttttgttttcaacagtaaaatgggaatcagcttcaaccctcctaaaactagcttttgggggggaagttgaccattggcaaaaaccgggacttcggggtcaacaaaaatgggggcttcttccttgaactctcctttaaaaaaacccttaacaagttcattctccacgtttgggtgaaaaactcgcttgacgggcctaacaccggagttgggatcataccccaaactaccaaaaagtgggatggcagcttctggaactgggat

SEQ ID NO: 30407 - DNA, 690 bp, Glycine max
  Clone ID: PAT_MRT3847_12745C.1
caacggaattcccggcgcgacccacgcgtccggaaatatcttttcctcctcgttgtccccactggtccatttcacaattgagattttgcgttcagcttcctcccatgcttatcaccattcaccattcaccaccatgttgccatgcgattactgccattccaaacccgccatactcttctgcagaccagattccgctaaactatgcttgctatgcgaccagcacgtgcacgccgccaacgccctctccctcaagcacgtgcgcttccagatttgcgactcctgcaagaccgacaccgctgtcctccgctgctccaccgacaacctcgtcctctgccaccactgcgatgttgaaacccacggtgctgccgcttcctcccaccaccaacgtcaccgcctccacggcctctccggctgcccctccgtcacggagatcgcctccgcgctgtgcctcgatttccgggcccaggatcccgtggtccccaccgccgcctccggcggtcgcgatgaggtgtacgagcaggtgctggaaatcgcgcggcagaggaacgacgacctcggcgccgaacaactcaagttcgacgaatcccccataaacgacgtcgttgttgttgacgagatgctgatgcagcaaacgccgttcacgtctttgctttatgtgccgaattccgaatctgaattccactcccgaaa

SEQ ID NO: 30408 - DNA, 521 bp, Glycine max
  Clone ID: PAT_MRT3847_127460C.1
ggctaccaggggttccagcaatattattattattctctttctgatctccaccagttatgagcctagtgatgaactctggcatgaccttaatagcaacccttccatcagagcccttcaagtactcgaaagggcatgcaccaaacttgataggggacttgttagggcaagatccaagggaagaaatggaagccacggtgaggttgttgcatgcaaagagatcaatggggagaataaagtaggtttggccgggcatgagtttatcatcaattgatagaacaggaattggttgtccaatgaagaaagagtctgcatggcacaccatcatttcaggaaactcaaacatgatctcaccggctatgtgttttccctttagggatcttgatgttccttcccaaaatatgagcttcacggattttgatgatgatgatgaattggtgttgagttgaaagcatggagtcttcaatgagtttcccatttgaagagagaaaaattaagggagagagagaagtggtgttagctag

SEQ ID NO: 30409 - DNA, 822 bp, Glycine max
  unsure (1)..(822): unsure at all n locations
  Clone ID: PAT_MRT3847_127461C.1
ggctcgaggtgcgagtgatgattttgaattcaaatacctaagcggtggtcgaggccggcctgggccactgcttagtccccgtcggcgaggtggtcttcatcaaaatcatccgcaacgagctcacgggccagcccgagggctacggatacgacgagttcgtctcccacgccacagcggaaagggttctccagacctacaacgccaccgaccagaccttcaggctcaattgggcctccttcgatatcgtcgagcgcaagcccgatgccgacctggaacactccattttagacggagatctcgactttgacataaccgattatcctatccaggatatgtatcacaagcattaccctccacgcgtccggccggttatgcacaataccctcagaatgttgaaggtgctcaagacatgtcagcagtgtctatgcctatggaggaattgtatgaccccctggcaatgcctgatgtcgataaattaaatgctgcatatctttcaatacacggaagttccattttagggcggtccctttggcagagaacttcacaatctttacagcaagcctaggatctatatgtattgtcaggtcaattttaggcattaaggcttcaaaatatggctgtcttacaattttgcgtttgtttcaacatgagtggaagagcatgttaattagatcaatggtagtattttatgatgtaatactgaatatcaatgattttattttagtttaggatttgagttttaatagtaatcttgtattaaaatttagatatgatgtcataaggatattgtgtcgtaaattttcaaannnannaaaannnngg

SEQ ID NO: 30410 - DNA, 958 bp, Glycine max
  Clone ID: PAT_MRT3847_127462C.1
caagatttgatatccattgttccaagattggagctcagatggccaattagtaggactacttcagaatctaaaggaaaaaaatatttttttaattgatgaacactaaataccaattgttacgccaatgtggtggtaaccttaggctaggtttagaagatataaaatgagtgtggtagtaaccttaggctatgccaatgaatgattttgtctctaaactaaaatgtcactgggtccttgttcttgtaaaattgttgtaattgaatccctaaaaatctaaaattagtttatagcggcatagtaccatcagaaaatgacaatgtgacaattttaaaaatcttaagagactcaattaaaaaaaattacaagatcaaagacccaattacaaaattttagtttaggaacctaactaaaaactcaaatagtttagaaacctaataattaattaaccttatttataaaaagcttatttgtattttaaacatgaaatgatgatgaattaaaattattatttttttacataatgtccattttaatgtaacatttgtgagaaacagttattatatgtatttttgggtgggcatacccgtatatttttgaacgtggtttatacgtgaaagcaggcttgaatcagcatccaatgcaatcacccttgttccaaaatctgtttttggttggaggtcccgataatataatttcaattgacttccggaaggatctgcatctagacatacaagagggtcaaaagttgaaggagtatctatgttcagggaagtccataggatgtagttgtccaaaaccctaatgcgagtgctcctaattgaaacgacgactgacaccctgaattacagttttgagttaaccatggttgctactggtgatctaatggtgagtttgtatttgtgatcgattcttacccttgttgataaataaaaaatgttgtgtccaattttacttagcc

SEQ ID NO: 30411 - DNA, 522 bp, Glycine max
  Clone ID: PAT_MRT3847_127463C.1
ggtcttcaggcccagcaccgagtctctgccttcagtggatgatgatgtgggggttgcagaagaggagaattgttgcagagggattgaaaatttggagctttggggtgatgctgtgaaatggggttctgaatttaggttgaattcctcggaggaatgttgcatggcttgtaagagaatgtgtagcggcgagggagggccttgtatgtgtaattcatgggtgtattgtggagatagagaggcttgtggacctagatttggcgagtgttggttaaaaaaacaaaaggatgctttaaatcctgatcgacgagactcgggagatctagtaatgtggacttctgggtttgtctttgataagggagagggaattgttggtatggaaactgaccatggaattcttcgaataaaacttttgcctgaatgtgctccacattctgtttcctacattctggagctgttggcattgccacattgtgttggttgccagcttcatcgtgctgaaagccgaggaagcttttgggattc

SEQ ID NO: 30412 - DNA, 255 bp, Glycine max
  Clone ID: PAT_MRT3847_127464C.1
ctcgatctttaagtaaaattctcggatttgagggtagtcgataactctctacacaatgattttaaataataataaaaaaacaaaactcaagagccaagaggtcagaagtgacatgtgtacctgccctgcactgcactacaaactacaaacctgagaaacagcaccacccttccttccttccttcgagaaaagaaatggaagacgtgataacagaagcagcacccccatcaaggttgctggaagaagacctaaaca

SEQ ID NO: 30413 - DNA, 806 bp, Glycine max
  Clone ID: PAT_MRT3847_127465C.1
cggtccggttcccattctgcatctcacggcaattttataggtcctccaagaaagagagagagagagaggaaaacgaaaccaagggagaaaaacaaccaccgtccaaaccaccaccaacaacgtacgtcttacgttgttacatggccactcgtgttatcccaccaagaatcctaaggaagcttcgctacaacaccgccacaaaacccctcaactcctctcaccctcctctctccccgtctctctctccttctccctgcctcctacctgctccgctgccgtcccccgccgtgctccgtccctccgccgccgcctccgacgacctcagcttccgcgacgtcgaaaagctcttctcctctgtctccaccaccagcctcctccgctcctccgccgtgctgcacgccaccgccgtcgagcccatggttgacttcggcacatggctcttgcgatcaaatctcatgcacgtgcatggcatccgcgacctcatcctcgccaccgtccgcaacaccttcttcgaccacttttgcgccggcgaggacgccatcaccaccgctgccagcatccgccacctaaaccgtgccggcctccgcggcatgctcgtctacggcgtcgaagacgcaaacgacaacgacgcctgccaccgcaacttcaagggctttcttcacaccatcgacgtcagcagatcgcttcccccttcttcggtgagctttgtgatagtgaaaatcaccgcaatatgtcctatgagcctgttggaacgaatgagtgaccttcttagatggcaacacaaggacccttgtttcagtttgcca

SEQ ID NO: 30414 - DNA, 780 bp, Glycine max
  unsure (1)..(780): unsure at all n locations
  Clone ID: PAT_MRT3847_127466C.1
ccacgcgtccgcgcccccaacaattctaacaccgccgccaccaacaacgtacgtcttacgttgttacatggccactcgtgttatcccaccaagaattctaaggaaccttcgctacaacaccgccacaaagcccctcaactcctcccaccctcctctctccccgtctctctctccttctctctgcatcccagctcccccgccgatctccgccgtgcttcctccctccgacgacctcagcttccgcgacgtcgaaaagctcttctcctccgtccccaccaccaccctcctccgctccaccgccgtgctccacgccactgccctcgagcccatggttgacttcggcacgtggctcatgcgatccaacctcatgcaagtgcctggcctcagtgacctcatcctcgccaccgtccgcaacaccttctttgaccacttctgcgccggcgaggacgccaccaccaccgccgacagcgtccgccacctcaacaaggccggcctccgcggcatgctcgtctacggcgtcgaagacgccaacaacaacgacgcgtgccaccgcaacttcaagggctttcttcacaccatcgacgtcagcagatcgcttcccccttcttcggtaaccccttcctcatccttctccccctntacttttctaaatcaaaatcccttctcagaaagaatatataaaaaataaaatgttatcacatgtgtatgatctttaccaatcntcacttgacatcttaaactctgncatgtttgcatgatctcaataatctcacatgacat

SEQ ID NO: 30415 - DNA, 124 bp, Glycine max
  Clone ID: PAT_MRT3847_127467C.1
ccggaattccgagggtacgacccacgcgtacgcacacgtgcaaaagtaccaaagacgtgggaggggctatttgctctatcacacatagggggttttatggtggatgcctaaaaacacagcacca

SEQ ID NO: 30416 - DNA, 200 bp, Glycine max
  Clone ID: PAT_MRT3847_127468C.1
gggaaaaagggtaggggtcacactttattcataatggaggactacttttacatacacacttaaaaagtttttagggttgatcctccaaaccagcatcaaggaaattgcttccttgaattcaaataccccccagaaaaaaaaaaaacccccaaccttgggcttgggtccttttaataatacccaaattaactagtaatctt

SEQ ID NO: 30417 - DNA, 409 bp, Glycine max
  Clone ID: PAT_MRT3847_127469C.1
cgcccgatacgtaaatcctggaaacttcgcaatcggtcttgctataggcacggaaagacctacgcaaacaccaaaacaacagttacccacacgatgaatcggtcactctcagtccgctcgaagaagggcagtggtagcggcagtggggaaaagtccgcgcccaagcaccgtttcacgatggcttccctaagaggtacgcagtagccggagctttcgaagaaactgttcatgatcatcaaatttggaaaccatgcgattggcgcctacgaggctgcggctcgagaacgggttggcattgcttatcagctttcggaacggggtgaggtctcataggacgagacgatctctgtgatcttcagataagcttggagttgctgctcgttgagattgccgagcaagatgatattta

SEQ ID NO: 30418 - DNA, 321 bp, Glycine max
  Clone ID: PAT_MRT3847_12746C.1
gagcggccgataaattttttttttttttttttttttttttaaaaacaaatgcgtaaagtaaaaaatcgggcggtttcaacggagcgccttattaaaccactacatcttttaacatattgacttaaaactataaaaaccaacctcccctaaatttacacatcaaaagataattttctttttttagggaaatcaccctatattacaaaaattttccaaacctataaagatttcggccattctttttatactaacatggaaaattgacttaattaacagcaaaatttttttacaaaattttttcccaaatttcaaaaatttttc

SEQ ID NO: 30419 - DNA, 683 bp, Glycine max
  Clone ID: PAT_MRT3847_127470C.1
cggaattcccgggtcgacaagttgccttcgttgacttaagctctctcttctcctcgacccttcttctctctcaaaaccctttctctgcattttcagctaaacctgagcacacccaactgagattttagcttcagattccgaggtaagagcagaaagaagagaacttggagctacccagagttcgattttgggttgttcaacaaggtcaagatgtttctgagcttgatggatattatgtagatcaagaggggtgtgtggattggggaagcaattgtttatgaggttgaagaagcatggagagagtgacttcatcttttatgggttccttttttttttgggcaattttggtgcttgatttggtacttaaggcttctggcaatcaggaaggtgatgccctgaatgcattgaagagcaacttgcaagatcctaacaacgttcttcaaagctgggatgctacccttgtcaatccctgcacgtggtttcatgttacatgcaacagtgataacagtgtgacccgtgttgatcttggaaatgtggatctttctggtcaactggtttcacaacttgaaattcttacaacttggaacttcttggaactttatagtaataagataactggaaaaattccagatgagcttgggaacttacaaaattggtgagcttggatctttacttggacactt

SEQ ID NO: 30420 - DNA, 433 bp, Glycine max
  unsure (1)..(433): unsure at all n locations
  Clone ID: PAT_MRT3847_127471C.1
gcttagagaaagttgctgaaacaattcatctgctcgtacaacctggagagtcatttttgcttctactaacaggtgaagtgcagaaagaaacggcagcagagatcttgggcttgcatccttgtggttttaggcctcaacactctagcaaacttggaaatgagtttcggctgttctctaactatgaccctggtacaagactaggagggtgggaaaaataggttcttttcctttggttgtccttccttcaatgtctccaattaggttagatatctgtataaagttcgggataaatagtattttatgtatcttaatttggtcaaaattaattttaatccctatatttgaaaacgatggttttgattcttgtatttcattttgacttgacgagaaaaaaaaaaaaaaaaaaaaaaaaaaaaaaaaaaaaaaaaaanaa

SEQ ID NO: 30421 - DNA, 311 bp, Glycine max
  Clone ID: PAT_MRT3847_127472C.1
gaaaaagacccccaactggtttattcttaaaatctcggaaaaaaaaaaatttttagggctggggtgccagggaaacaaattaaagggccccacgttataaggtttttcccattaaaaaattttcctcgccccggggggggaatccctttaaaaaaaagcgtttttgccccccatattttttcctggtgtgtgggtcccaaagccccccacatgttttttaaaaaaggagttcgggtctatgccaaattttcctggttcaggggcgcctttttgccctcaaaaagttccaaccctgaaaaggattttttttt

SEQ ID NO: 30422 - DNA, 271 bp, Glycine max
  Clone ID: PAT_MRT3847_127473C.1
cctggctccggcttcaccaacaccatgcgtgttgttcctgtgccgtgatggaccccagagcccctcctccagcccctgtcccacccccttcccccagcccatccattaggccagcaacgcttgtagaactcactctgggctgtaacgtggcactggtaggttgggacaccagggaagaagatcaacgcctcactgaaacatggctgtgtttgcagcctgctctagtgggacagcccagagcctggctgcccatcatgtggccccacccaat

SEQ ID NO: 30423 - DNA, 522 bp, Glycine max
  Clone ID: PAT_MRT3847_127474C.1
gtggaatgatatcataacttctgtttccatttttttttcttttctatggccgaatttaccgattttgtcaaatttctgcaggtcatacagagtagagagcaaggttatccaattatagtgtcttcaattccaagagaaactaacgctttatactctttgcgtgacccatctgaagtactaatctttttgtcacggttggcaaaatggaggaaaacctcttactaaagcatgcctttaaattttggttaaggcatgtggatcatcaccagagggagaattttgaagtgcatatagttacttaattcccacgatggatttggagaagtgggatgaatgttaatttcttttttagtagttggtttgtaaaataaccacgatgtatatgtatatttccagcttgtaaaaagggttccaagaaagaataacttcttatcttttgacatcaagacattcatgataacatttcaaaggcagtaaaagcagaagtttaaataaagtctttcataacatttgacaaggaaa

SEQ ID NO: 30424 - DNA, 1913 bp, Glycine max
  Clone ID: PAT_MRT3847_127475C.1
cgacccacgcgtccgtacggctgcgagaagacgacagaagggaaacggacctcggccgtgaacaagagggctttaagagaagacggcggcggtggtggcggcggcggagcgatgaggtaccgcggcgtgaggcgcaggccgtgggggcgttacgcggcggagataagggaccctcaatcgaaggagcggcgatggctgggaaccttcgacacggcggaggaagccgcttgcgcctacgactgcgctgctagagccatgaggggtctcaaagctcgcaccaacttcgtttacccaacttctccgcaaccttcttccgccaccaccgaacacttgttccctaacttcaacaacaacaacaactttcacaaacactcactcttcaatcaccaccgtaaccgccacataaccggttccaacacttgttttgaccaccctcactccgttgacttttcagcccctcgaaacccttcttctctcaacatgcttctctttcgtgaccttattcactctaacccttctttgctttcttcttcttccactcagaacttccacgaccagttttacaacaagagtacttctactttttcatcgttacctgtttctccttctcttgctccccctagttattcgatgaataattcttgtggaggctctttgtctgttaagatgaacacgtttcccacttgtggaactaattttgctgaaaaaggtgatgatggtgatggttttttctctcgtgagtcttcggattcggggttgttggaggagatagttaacaagttcttgcctagaacgaagcctagtaaatgcgagactacttttgcaaatcctcaggaggagtcgcttcttctccctccgcttgtttctgaatcaacgcttgtttccaccgggcaacaatactatgatgatgacatgaaaaaagggtttccaaagaacgagggtctaggtgttttttattctgatcaaggttttcccatgcagcaattcgacacctctaatgggtttaatagcatggctatggagaatgatcaaaacattattaataatgcagagaactgtgtcgttgaagatgtttttcagtaccaagagcttcttaatgctttcgcaatcagaatgcaaaatgcttaattagttaacatttccagtgtctgcatctcaatgctagttgtgtatgtagtcatgttgaatctgtcacttctcaatgttggtctggcctttcaattagaaacttattaatcattagggcctttgttcctaggtttaattaaccaggttattttgttcgtgcttactatgtagtattatgcccctctggcttccttccagtagtattatgtatggaactatggataatttgaaagcaatatatttttagtattggtattttgggtaacctttgaaattgtcatgtttataattgtttttggttaagcacgcctttgcccttttcactatatgttttctttatgatatatggacattcattttttaaacacctaataactattttttattttttatacgtgaaatcatattatctataacatttatgttttttttttatttctgagtgttaggtattcattaacatattgggtatttatcgataatttttgttttgtttttctactctgaaaaagggattaatgagaaccacgcactcagagtgaatttgtttttgctagatgacgatagcttttgcgttgactttggaaatagaaaattagtcttgcgttgcacaataccttttttctgctttgtatggatctatatattcttccttctgtttggagaacgtattggtctggtttcaatagtgcctggttggtgttgtccttttcttcttagtattttgttgtggtattgtgaaaaaaaaaaaaaaaaaaaaaaaaaaaagcggccgctctagagga

SEQ ID NO: 30425 - DNA, 272 bp, Glycine max
  Clone ID: PAT_MRT3847_127476C.1
ggtactggttcatccccggttattcagatgaagatatacgaaaggtgacagctctacaagggcctgactaaccctcaaaacctgactttggatccccaataggtcttctgacagctatatatatccacatctggtaccaaaagtcatggggctccttcaacaaccctatacttaatcctctaaaacaatgtaccggtaattaaatgtgcccccctcacaattcatctgacatgacacctggaatgatgtctggttaattttaattttttttt

SEQ ID NO: 30426 - DNA, 465 bp, Glycine max
  Clone ID: PAT_MRT3847_127477C.1
ggctgcggatgatatgtaagtgtctatggttactgaatttgaaaaacgtcaatggtggtttgtgtttatacatgcagatattgatcaaaatcgtaattggtaagagtgtaagacctaccattagattttatggtctcacttataggcttccaaaattattggggaattggaaatttaagtgctctttgatcatagaatgatccatgttaattgttatgtttcacatcatttaagacttgaccgcatcttttaatatactcgatttacataataaatcattatgatagaactagaaggatgccatgtaattcagtcaagggtttggtttatgatagcatcagcagcaggaagaaggaggaagactctttggatgcatgcatggctattagttagttgccgagaccgttagttagttacaagctgttagttagttgcaacggcatttgaactactgcaacaagttag

SEQ ID NO: 30427 - DNA, 438 bp, Glycine max
  Clone ID: PAT_MRT3847_127478C.1
ggctcgagatttcttggaagcttaccgtcctgtcagtaaaggagatctatttcttgtccggggagggatgagaagtgtcaatttcaaggtggttgaaacccatcctgtagaatattgtgttgttgctccagacactgctattttctgtgaggcggagccttttataagagatgatgaacagatactggatgaactcggatgtgattatgtgggtggtgtcacgaaacaaatggctcatatatgtgagttgtttgagcttacattgacgcatctcacattttctataataatcggcgcgacaccacccaacggaattttactttatacgacccccaagatttgggtagacattaatagcgcgagctcgagctaatgaaacttgagctttattctgtctgcttaactgaccatacattatttccacacttgctggagaga

SEQ ID NO: 30428 - DNA, 263 bp, Glycine max
  Clone ID: PAT_MRT3847_127479C.1
taaaaaatgaaaaatatggtccatatactgtttactctcacagctgttccctatcgttgaaaaaaaaagaagatgttatactataaaaaaaggaaaaaaaaactttgtcaattgtttgttcatggggatccctgcattgagcaatccgaataatgggcagcacatattacgcataactgatcccatttcattggctggaccaactgaggatgatgtgatcaagacgcgtgaacttgagaagtacttgcaaggtgttggattgt

SEQ ID NO: 30429 - DNA, 377 bp, Glycine max
  Clone ID: PAT_MRT3847_12747C.1
cttcccgcctcgcactagcttccccacttcgtacatagacaaagcctgcacaatggctacgaaagcgatagagcagcccgccggcgtcggcttcgacttctccaactatgcgaggaaccagttcctcggtgaccggttgaatggtcaacccaaagctacctcaaccggtaccacgattgtcggcctgaagtttggcggcggtaattctggcgaggaggagggtatctgtctcggtgccgacacgagggctaccggcgggcctatcgtggcagacaagaactgtgaaaagatccactacctcgctccccacatgcgatgctgcggtgctggtacagcagcagacaccgaattcgtcacgaacctgatctcgtccaacc

SEQ ID NO: 30430 - DNA, 388 bp, Glycine max
  Clone ID: PAT_MRT3847_127480C.1
tagaagagaccaaactaattagcgttgaagaaacagagacgctgtgtgggcgtgggtgtgggtgctggagatagagggagagataaagcatataaaatcacctaccaccttatcacacttctggatccggaactttcattctattgtcatatctccccctccattcggtccttacattgttatcgtgactggctgaccagcgaagggtcacagtctgatccgtcgccggaatggaccgtggccgcctactcctacaccggcctctaagagttcgcatggcaactctgatcaccctgtgctgaatcttaccctatgcaggcctcattacgccgattgcaactaccatttgagaacggtaattttgccgctacagcacacgcttgccttt

SEQ ID NO: 30431 - DNA, 374 bp, Glycine max
  Clone ID: PAT_MRT3847_127481C.1
ttgttaagacaatgattaggcaacggaggaagttaaaaagctaattggtactgcgtgaagcactaagagagagatttcaagctagagaaaggatagctggccctctgggaacagattcctcataacttattaactcgtaatgatcccgcataagtgctaggatctttgcaaatctgtagaggacatctgggagcacccaaatttagaaggcatcaacactgaagataggaataaaagctggccctacctagaggacatggaaaggattatgtctagtaaaaaatcccctgcgaaatgaccggatctatggtggacactggacaaaattataaacactttgacagaaccatccacattaaaatcaggggataatt

SEQ ID NO: 30432 - DNA, 422 bp, Glycine max
  Clone ID: PAT_MRT3847_127482C.1
cccaaacaccccacaggtgcactaacaccaccgtaacacaaggcagaaagaaggctcaggctagatctttaaaaaagaagacaaccgtactgcacggctttctctaagcccacactaaggctgccaaggccataaaactacacccagcaacccttgaagtaatgaggcatcagcgtgaggaagacccacaccgcacaggccttctgaggaagcccatggacatggctataccggaataagtacttgagccatttctcaggagagccctcgtcctatctgactggcctgattccaattaactacagcttgtacactgctaagctttcggccgacccatcaaccttagccagaaaccgttagatcgtacagatccactcataggggggccatgctcattgccttggaccacagtttaccctaac

SEQ ID NO: 30433 - DNA, 479 bp, Glycine max
  Clone ID: PAT_MRT3847_127483C.1
cggtcgactcgagccgaatcggctcgagcggctcgagagtatagtatcaacttggccaagttcttcattcaaattcgaggtacgagcatgtgctggccggtcagcttcctcataatacatgtgcaaatcctggttgatgaaaatgctttgaagaactttcacaacttcaatggaaacgtacaaagaaattggaatcaagtaactatacaacataagtgcagtcaggaagtgcagcatggctgcgactggtgctttctttggatcaaagtaaattgtggtgtcatctggtctgaggtaccatcgcttcataactccattttcaaggtccttcctcgttgcaatcccgaagaaaattgaaccaataaaagaaattaaaaataagactaagaacagaaagtagatgatcttatccatccgcttctcaactgtgcttctcttggatggagggtctgttgaattctgcataacctttgtatcat

SEQ ID NO: 30434 - DNA, 684 bp, Glycine max
  Clone ID: PAT_MRT3847_127484C.1
tgtgaacagaaattatgcattttaattatagcataagaagaagaaaaaactagtattaatattaataattaaatcgtatttagaccataaaatgatcaattttatacagattctactgcatcaactatttttcacaaactcccctcgctatctctgcgtgcgtaaatacataaggtgagttgtctttgtctcacacaaaccaccatcaatggcggcaagcgcactgtataatgcccatatgttccttcttcctcccctctcgcacaaaacccgtaaaccttttcactccctctgcttcaaccctcctccttccattagcatccccaggtctaagttttatggtgctacagtagcagcaacaaagcttccccgtcggatatttagagggcatgggttggtggctgatgattctgggattgccccagaaccagaatcgccctattctgaagcgggtgctggtattgacttaaatcttccaagaagaagtttgcttgtacagtttacatgtaacttgtgtggtgaaagaacaaagaggcttgtaaatcggttggcttatgaaaggggtgctgtttttgtacagtgtgcaggatgtctacggcttcacaaactagctgacaatcttggccttatcacagaatatgattttcgggagaaaataaacaaagactcagaaaccgatcaagt

SEQ ID NO: 30435 - DNA, 234 bp, Glycine max
  Clone ID: PAT_MRT3847_127485C.1
actaaacatatacctcaccttattttcgctttggcttttcatggttttggttattcggttggtttttattccatggttttttaatattgatggtcctgccgggggccaaaaaaccaattaaggaggtgggggttggaattccttattcttggttggtgaccgggttgatttttacccttaggaaggccatggttccaatgggaaaagggtggttaacccttccattaaaccttt

SEQ ID NO: 30436 - DNA, 253 bp, Glycine max
  Clone ID: PAT_MRT3847_127486C.1
ggcgtattgagtgaaccttatggtgtgtactctatcacgtacaatgatctgtcgggccgcatatcacacttacggtccgcactgaccctgagatgatcacgttaatcacattgtagtcgaggtctcagatatattcctggatctgcagttgggctcgttaagccaaaaactgtgtccttttatctcaccacgaatcttagctcagtacatgaatctcctgcagtatgcccacgcactctttacccttctgcat

SEQ ID NO: 30437 - DNA, 630 bp, Glycine max
  unsure (1)..(630): unsure at all n locations
  Clone ID: PAT_MRT3847_127487C.1
tacggctgcgagaagacgacagaaggggaccatgaactagttttaagtttacttggtaatatagttttttttgtataaaattatctttcaattttgaatagcatagtaacacctattttagaacaccaaaacaaaattttaagaggctactatcgtgtaagtacaaaattttccctgttctgtaaactcaaggtaaaaacacctgctttcatacaaaaaacgaccaaagaatatggcataactagttttaagtttacttggtaatatagtttttttgtataaaattatctttcaattttgaatagcatcgtaacacctattttagaacaccaaaacaaaattttagaaggctactatcgtgtaagtacaaaattttccctgttctgtaaactcaaggtaaaaacacctgctttcatacaaaaaacgaccaaagaatatggcattataatatcaaagaaacaaaaaaactgaatttaattattctaccgtgtctaagcattttatagacaacaatttaataatttaaggcctttcttcttagtactctgaaaccatagttatgttggtaatttatttatttggttgggggttgattatatcttgnattacagcagggtgattaggtgtgaa

SEQ ID NO: 30438 - DNA, 310 bp, Glycine max
  Clone ID: PAT_MRT3847_127488C.1
gatgacggactgagcgagaagacgacagaaggggatccaactaaaattagaatgtgtttttgtatactaaaattaaatagataataatgagattggtaaacaggtagataaaaaaactaaagaatatatagctagttatatacttttgatgcaacttacatggttttcaaactttttatttctccaatgtagtttggaatgggaccagttattaagcaattcctcaattccctgagtaacagagatatgatagaagcctaaatgaattatatagttcttcgcgtaagagcagtgaaggtttcaactcaca

SEQ ID NO: 30439 - DNA, 356 bp, Glycine max
  Clone ID: PAT_MRT3847_127489C.1
aaatgtattatggtgggacattgtttaatgttttatgttttcataaacacatacaagaaatattctattggtcctactttttaaagcacaacaccaatgtaaaggtgtgcacctcctttgaaaaaaaaaaaaacaacacccgccccccccaataatttccaagacaaggaaataaaaagacggaaaagatgtctaagcatcaaaaaggccgggggaagcaaaaaaacctgcagaaaaaacccaaaacgcgagataaacctttgggtcaaaactcaacggaaacagcgtgaaccaaagaaaaagacacgggcaccaggagggggacccctaggtacaaatccttgatctttaccacc

SEQ ID NO: 30440 - DNA, 1132 bp, Glycine max
  Clone ID: PAT_MRT3847_12748C.1
gagtccgggcttcccgggtcgaaccacgcgtccgcccacgcgtccgcccacgcgtccgcccacgcgtccgcccacgcgtccgcccacgcgtccgggggacacaacaattccatggctaaccctaacaccttattctccttgagtccctaactctcactgtcgtcgcaagcttgaagtcgtgaggtctcagggttgccccttgcagtcgcgggctatctgtttatctctctccctgtctaagttccctttaactgtcgccacaagagtgaatcgtgaaatgggttggaaagcagctgagaaactcattaggcactggaaagttctcagaggggataatgttatgataataaggggtaaagataagggagagactgggaatattaagcgtgtcattcgcactcagaatcgtgtcattgttgagggtaaaaatctggtgaaaaagcatatcaagcaagggcaaggtcacgaagggggcatctttactgttgaagctccaatccatgcctccaatgtgcaagttattgacccagtgacaaggaagccttgcaaggttggaactaaatatcttgaagatggttctaaagtcagagtatccagaggaataggagcatctggatccataatccctcgacctgagatcttaaagataagaactaccccacgacctactgtgcttggtcctaaagatactccaatggatcttgtgttagagaagacttatgatgctaaaacaggaaggggcatgcctgagctttaaggagattaggtaccttacaatttaggtagttgctatcccgatgaacaagatagggaatgaggttgtcacatgctttgtctatcgtgattctgttgaattgctttcaaattttcgtgtttaatgtgatcgtatgagttacctatagctaaaaaaagtaataattcttctcctgcataattgatgttatctccttcaaggatggttaccttgttttggtttggtgtttcatgtggacttggaagaattggtgagttttaccttgctccctgatcagggtgcacaggcagtggtggatcatttaagaattgcccttgctcattaaggaaaaaaaaaaaaaaaaaaaaaaaaaaaaaagcggccgctctagaggatcca

SEQ ID NO: 30441 - DNA, 380 bp, Glycine max
  Clone ID: PAT_MRT3847_127490C.1
ggctcgagggccaaaccaactcctgatttttttggcagacgggccttttgctattagacatgggtaggttgaccacagccccggctgccttatggacggatatgaccggcctccccttatgctggatgtttgccaccagatctaggagctaatgcagggggtggtggctaccagacccaaccagacttatacaggtatcaacacggattgactaaccctccttattggtctactacatatggccctgagaacatacactcacagtgtctgtacaactcatatatggggcaccagtatctgtcaatatttggactgcctgaggcagagaatcaactgcatatccttatacgacaagtgggacaggctattcctagatgcac

SEQ ID NO: 30442 - DNA, 828 bp, Glycine max
  Clone ID: PAT_MRT3847_127491C.1
gcaaagagaaacagaagagcaaaatttgaagtgcaaagtgtgtgtgtgtgtagcgatggctgatgtttcagattctcaagaacagcctgttcttgattccgctgaactggaaatgaagaagaagcgactgttggtggagctggaatctgcgctgggcggtgagaaatcggtgacggcgcaggcgtcttcttcttcttcttcctccttaggcttgggtattgaggttatcgacgaaacggcgttgcttgactccgttgcgaagaagaacggaggttcaagaagaaccaagaacaacaacaatggtcacaatcacaagaagtcgaagccctcaaataagattgggaacaaaaagtactctcgtaaggagttggagtctctgagattcgtgaacatggcccgacaacgcaagttctggaaagcaattcacgctgcctttcaaaccaccgtggccatggagtatgatgctttagcctcctcacccctgccgcataacaaaccaatcctcagtgtggctgctactaacggaagatggagatatatgaatgtctttgtccattgaagaatgagcaaaagggccctggaacatatctaatatgcaaccattagttgactatgttctgattgttgtaattaggccctgacttcagttgcatggttacttttgtaaaatcatagtataggaaaagccttgtccagtaggcttcattgtagatttgaaagattgctttggtcattcaaaaatgacgatgctttgttttttagttcattttttactttgtatgttcttgatttttcaataaccaataaaaacttcaattttttgtcttc

SEQ ID NO: 30443 - DNA, 667 bp, Glycine max
  Clone ID: PAT_MRT3847_127492C.1
gctagtcacaggtaaacatgcactgtctctaagctcgattgactggcctagtttcactcggagatagagaccagttaccgagccagtcagatgcttgcctggccttgtctaactccccagtttcacaagcaagccaggcagatcaccttgttcaaggatttcagagcgagtacttccaacaaaacgtctgcctagacagagcttccaaccacttggacccgatgatacacctgcaggtcatcctctgtgaatctgcaagacagggagagaaagacatgccggactcacaagagaaagacagccaactcgagccgaatcggctcgaggggaattctgctaactgaattcggaagacttgctagtctaagagagattggactcatgcttccgggaatctcagtagtataccaggaatgccctattgagcgtcatgcctgaactcatgttccggagagtgcctgtcggatcacttatgcctatgcaaggagagagcaccgctaagggaaagttcaatcattgggaaggtcagacacaagaaacccgaactgcctgaaaggtaactagcttgtcgtcttctttcctcaaccagtgacaggcctcactatctactggatttggtctaccgggcagctagatcggactggtagcatgctgagagtcctgtgag

SEQ ID NO: 30444 - DNA, 526 bp, Glycine max
  Clone ID: PAT_MRT3847_127493C.1
tttgaatttgatgttttctttcgtccacaaaacaactttcatattcatttaacagtgttcacatgtcagggcctcttgatcggtttgcacgtccctgctttgaagggttctctggtcatgatgaaaggagggagaggaaatcagattttgagaactcggaagacgataggcgaacaaggattggtagcttgaaaaagagagcaatcaatgcttcaagcaagttcaggcattctcttaggaagaagagcagcaggagaaagactgcaagccgaagcaattcggtttccattgaggatgttcgagatgttaaggagcttcaagcagtggatgaatttcgacaggcgcttatattggataacttgttgccaccgagacatgatgactatcacacgttactgagattcttgaaagcaaggaaatttgatattgagaaagcaaagcacatgtgggccaacatgatccactggaggaaagaatatggtactgatacaattatggaggattttgaaattcgtgagttgaatga

SEQ ID NO: 30445 - DNA, 271 bp, Glycine max
  unsure (1)..(271): unsure at all n locations
  Clone ID: PAT_MRT3847_127494C.1
tcggtntctttntgtttccaactgctgggatttcgctgggggtttgtggnnttcgaatcnctctaancgngtgtgaagtngctatanttgtngcgantgctgctagtacgcgnggtgantctggngntacgccgacgataatatcagtgcaacccaaatgcaaccttcgtgctgcgcngagatgganaggncccgtgntggagtggacccgnagagntatgttcncccgnnntgnacntctcaagngaggaacagaaacgacgcccnngct

SEQ ID NO: 30446 - DNA, 423 bp, Glycine max
  Clone ID: PAT_MRT3847_127495C.1
ataatttggaccgttaaacacacagaaaggagtattgctgaaactgggctgaccctgttgttggagatgtagaagaagcttcaggcatcacagggctgttatcggacatatcgaccatactctaaagacaattgagcatgagtgatttgctgtgctgacggacacttttatatgcctgggttcaaatttaatgtgtctggggcgaaaacattagttctgactgcagaaactggagccctaccgaccttttgggacgctgtacaatcgatcctgccaactatgcacttttgacgcgagtttactataaacctttgaagcacttcatttcccagcataactggttacgaggttactcaataggcgaatggcctgtgtgagtccacaaacgacctgcccacatttaaaactcatgcgctagattac

SEQ ID NO: 30447 - DNA, 226 bp, Glycine max
  unsure (1)..(226): unsure at all n locations
  Clone ID: PAT_MRT3847_127496C.1
cgccccgcgnccggnngnnngnnccccgngttggaaatctctatgtccattatgggttccaggagcatgcttaatcttctctctggtcacagtacaaaaacgtaaaacagacacaacacaagctgagtttttgtgtgtaagtttcatcatcatcatctttgatccaccacacttgaaagtgaaacaactagaaagcgactttcgtgggcccctctttacaactgga

SEQ ID NO: 30448 - DNA, 594 bp, Glycine max
  Clone ID: PAT_MRT3847_127497C.1
aaaaaaacaaatgaagggggtccccccttcgcttcctaaaataaggggcaattcgaagtttggtaaaaaaacccccatttgggtatttttttaaaccgcattttaggggaatttccaggggcttaaaaaaaatgggcggttcaaaacccctttttatgggagggccaaactaaaatggcccgggccctccccattttttaacgaaaaacccgattgcccaaaatctcggagccccggagattagccttcaaccccttctccttttgaaaactttacaagggggaggttcaaggcctaacaccccgagttgggtttgttaatttttgtcccccgccaccttgggggggggcttttttaattttattggcaccatcaccctgtttgtcaaaggtccaggggggggggttatcacttcctcgtgggttgaacaaagggccttccttgtaggacccctcccccaaggtatccatattaacaatagccctataaaaagcctgttttgcagggttgcccccccctcccggaaagttaaaaattctttatttaaacccggggaagtttaaagcaggcccccccctgtttgggggggggggg

SEQ ID NO: 30449 - DNA, 354 bp, Glycine max
  Clone ID: PAT_MRT3847_127498C.1
agcgaaggtaccctatttttgaagcttggccctgaaggaaagacccaacacatgtgtcggatgtagctggctctgccgctggcggccacagtgaactgcgccgaccacaccggcgcaaacaacctttacatgcatataactgaacgggatcaagggtaggcatgaaccggttgccgccagcttgcgtcagagacatgcttatggccaccgcagagaagggacagccagatctacctccgacggtgctggccgccggcatcaggcgccagcgcacgccttagcagctaagggactgtgactacatgcacttcgaagataacgctggcgttctatttaattccaaaggtgaagtga

SEQ ID NO: 30450 - DNA, 453 bp, Glycine max
  Clone ID: PAT_MRT3847_127499C.1
cagcgctacgccgtgcagtctcgtcgcgatgttttggccctacccatgaaggaatacgcctcgaggagtcagatcaagcacccgctatttaccatgtcggaaggcgacgaggatccgctgaacatcaccgcaagtggtgatctcatcctcgatgtcgcgcacgaagagaatgcacagcgatactcgaatcgcgtggacacaaagacgctacagcataagtcgcggtactttgagaacctgctgatcgatcgttttaatgaggggcaacaactatcgagagacctggaagctatgctgctcatcagctactcacacatagcgcatggatcgtcagaactacttcctcatgtaccgatcgtaaatgtcggcagaatcgggatatccaaaagttctgcgatgcaagctctacttgccgactttcttcgagctctacatggccttgatctaagcgta

SEQ ID NO: 30451 - DNA, 1278 bp, Glycine max
  Clone ID: PAT_MRT3847_12749C.1
tacggctgcgagaagacgacagaaggggataactaataggtagagacaacgccgtgtgagtcgcgtctgataataaaaatacacagtgagctctcgcttctagccctagggcgctgctcccgattttctctcttcggattgagtgaattgtgaaatgggttggaaagctgctgagaaactcattaggcactggaaagttgtcagaggggataatgttatgataataaggggcaaagataagggcgagactgggactattaagcgtgtcattcgctctcagaatcgtgtcattgttgagggtaaaaatctggtgaaaaagcacatcaagcaagggcaaggtcatgaagggggcatctttacagttgaagctccaatccatgcctccaatgtgcaagttcttgacccagtgacagggaagccttgcaagattggacacaaatatcttgaagatggtactaaagtcagagtatcaagaggaataggatcatctgggtccataatccctcggcctgagatcttaatgataagaactaccccacgacctactgtccttggtcccaaagatactccaatggatcttgtcttggagaagacttacgatgctaaaacaggaaggggcatgcctgagctttaaggagattaggtaccttattcaagttaggtagttgctatcatgatgaacaagatatggagtgagtttgtcacaggctttctttatcgtgattctgttaaattgctttcaaatttctgtgtttaatgtgatcatgagtttccaatagctaaaaaactaataatttgtttttatcttttcctgttcaattgatgtgatctccttttaaggacggttacttcaccttcactccataattgttgaagtgagtggtaattgtatgaaataccattccataaatgttatgggtctagtgatttaattaagtgggttcatcccgtttgataacagtaagtatctaacaagcttaattatgctttttcatgtatgagttgttgacaaaacatggccagagccaatagagaatcgagaaaaagtgagacggaaaatgaacttgaattatgagaaaggtgtgtgaaacaaacaagccaataatgtggcttatataatatataatatatagatatagaccagagtgagtaacgaatccctaactaattacatgtgtatatctacctaattagatgactcatcaaacaaagcgaactattgtgatagagactttatttttctcaattaattcaaagatgtactgcttatctccaagg

SEQ ID NO: 30452 - DNA, 488 bp, Glycine max
  Clone ID: PAT_MRT3847_1274C.1
aaccaagccaactttcttctattcacgtctcacctcaccatttattgtgaaagcaaaatgaggggactctgtaaagagagagagaaatgataaaagcacatacatagaatatacttaattgacatagttagcaaaactctctttcacaagacctaaatgatatataaaagcgtgcacacacatatatatatatggatcataatcaagctaaagaccacttgacccaatcaacttggttagcccaaaagtaatagccatggctagccaccccccaagcaagactctcacacaagacctaaatgttggagccttacccaacactgcccccaaccaaccaaacaccacaagagctaaactcactgctcccaaaatcacaccaagcctcaccttatagtcccttataaaagaggctgcaaggagaggcaccaatgcaccaactgaaaatgcaagagctgatgctgctgcagcatgtatagggttctcgagcc

SEQ ID NO: 30453 - DNA, 494 bp, Glycine max
  Clone ID: PAT_MRT3847_127500C.1
ggcgcatctcttccttaactcttgttgagttcttgtgcctctctagcctttagcacagcactaggaattgtctaatctaagggtctacccgctttgaatctcttggagtaagggctttaggtcttgtatctcttgatggcggtgtgatcgtatctgctcttgaataagaattgcttcggtaagccaatcccccactcttccgcttccttatttgcctgaaagcgattccaggaaagcctagcatagagctttcttgtgatgaaatcgcttaccccttcttctctgcatgctaaggctcagtctttctagatattatagttatccattcgtcccctataggctaaacttcactcactttcatcactacccctcccctgcctattcactcttattcttctttcaagccttatgctaagtgataagaaaaaagaagtaggtttctatatcatactcaggtttcgcagctccagctggaccatgccttaccttctttc

SEQ ID NO: 30454 - DNA, 348 bp, Glycine max
  Clone ID: PAT_MRT3847_127501C.1
aactaaaccaaaaccggacacctgaagctggtaggcaccaataggctgggcacatgagtcttatccagagtgatgcagtgtaccagactttatgtgcaccaggtgtctacccatgagaacctgaataacatgaaagaactgagagagatgacagccaaacactcatggacacctcagccaacctgtccagacaaggggcgattattgaacatgctctttaagcttatcaatgccaagaacaccatggctattgctgattacactgcatatgcacttctagccaccgatctcgctgttcctgcagatggaaagatctcggccatggctattaacagggagaattatgaa

SEQ ID NO: 30455 - DNA, 755 bp, Glycine max
  unsure (1)..(755): unsure at all n locations
  Clone ID: PAT_MRT3847_127502C.1
aattcggctcgagctcaattatcacttccatgtatttatctacaccattgaaactataaggcaaaggttgtcgaagttaaaggcaatggaatggttcagatgccccgtttctgggcttttactccccctgtttttctttcttgctttcttcatcttctttccccggaaggaacaaaattatgttacccacttgcctcctccttcgttcctttccactatcaaactcaaccacacaaatataaccactttttctccctctcccttaccacaaccaccaccaccaccaccacttgagcttctttccatctttgctcctgcaaatgaaagctacaataacactagtactgttttaagtggcgttattaagaaatatcctagtttggataaaatagaagaaggtttagctcgagcacgggcatcaattcgggaatctgcccgatttatcaactatacttcaccaacgagggagaaaattgtccccaaaagatccatttactggaatgcacgcgcgtttcatcagagccagaaagagatgttaaagagattcaaggtgtgggtgtatgaggagggagaacaaccattagtgcactatggaccagtaaacaatatatactcaattgaaggccaatttattgatgaaatggataactatcataagtggagtcacttcagggctagaaatcctaaccaggcacacgtttttctcattcccttcagtatagttaatattgntcagtatgtttacaaccgtaatc

SEQ ID NO: 30456 - DNA, 476 bp, Glycine max
  unsure (1)..(476): unsure at all n locations
  Clone ID: PAT_MRT3847_127503C.1
ccttgcgagctcgacttattannctgatcgggacatactgtttcnnnnacaaagaaaacatcaaatatatnngtcttgttgtcaccactctgaggacgaattacccattcattaacgcttactcatcttgnntcgtttgtcagtttctgcagtttgagggcatagactaatagagtcgccaacatattatactcnnnnannatgtcnctgtagacttgattctggcgacaatttgatcttgctcagatggttgatggcttgagtgggttacanntctgaggtttacgactagaatggagcccaaataatgacaaaaatttgatgccttagctgaatttttgttgtgtatagtacatgttaactacgacttgcacattgatatcttcccataatagctgatgaggatcaatgttatgttgaatactcattatatcgctgatactgctgacctatagaggaatagatcgatgtacgag

SEQ ID NO: 30457 - DNA, 433 bp, Glycine max
  Clone ID: PAT_MRT3847_127504C.1
aaaaagatcacttttaaaattacagagactaaaagagaattaaaatataaattataagaattaaaaaggttattggtaaggtatagaaactaaaaagggaaaaattatgaaattataagaattaaatgaataattttaatttttttttgggtagttttgaatttaccttgggatgtggatataagggaaaccgcgagagagaaaaaaatggtgggaaagtaaagtaagttgtggtagtgattagtcaaactttgactttttcctttgtcttgaacgaagaaattggggttgttttagtatacgtgtttgaagttttatagtaggattctagaaaatggagggaaactttatgtaaggggctgaagtggcttcaaatgcataagcccgcagctatgtttcttatattataggatatttatatatatattggatg

SEQ ID NO: 30458 - DNA, 272 bp, Glycine max
  Clone ID: PAT_MRT3847_127505C.1
accaattatgaggctttttcctgaatctctgcaaactgtaaaagcattcggggttacccccccacccacatcaacaaacccgcacactctcactactgactgaatcaagcatatccaaccgccagcgaacatgacacaacttcctttataagaagaggtgacactcaatggacatcccttacgggcgcctggctcgaaaataatcactctcaaccaggcaaaccctaaaaaaatccaactagactcaggaaatccaacggaaatccccaatc

SEQ ID NO: 30459 - DNA, 433 bp, Glycine max
  Clone ID: PAT_MRT3847_127506C.1
gatatttgtttgttttttttttgtttttcaaggacttcccggtttacaaaaaccctgatttatttcttgaccgggtatcaaaacttactgttggaaaattgcacttttgccggggaattcgataacatgaggggccatttttatccttgcctaagaaaaaaaaagaacctaaatcatttgaaacattgctccctccccaaaataattttttataaacctccccaaaaccttggcttgaattcaaatggttcacccaataaccttgggagggaaatacttcctaatgagtgacaccaaatatgggttaaccttctccaccaaaactaaaactttggtcttgctggaaaaaccatatttgttaaaaattttggacacacttaaatcttccacgtttttttggttcacgaagggaatttatgccccgttcttgggg

SEQ ID NO: 30460 - DNA, 584 bp, Glycine max
  unsure (1)..(584): unsure at all n locations
  Clone ID: PAT_MRT3847_127508C.1
actttctctctctgcgctctctctctctctctctcgctgtgtctcatggattcggagtgagtaaaagaaagcaagcattgcgccatagtacctcatagtaattaataaaccttcactcgtcccatttggatttggattttggatttggatttggatttgaatccgtaatggcacccaacaacaacagaacaaagggatcccattttccgcttctggccttcctcttcctctgcctcctcgcgcccctcctcttctttttcttcgcatcgccccttcacgatcaaggtgatgactcagctgtttcgagcgaaaaggttgccagatcgaaagaatggcaggcattgcaggatcttaaattgcttttttcaaaagaggttcttgatgttattgtgtccaacacaaatgatgtggggcctttgagccttgagaatnttagaaaaaataatctgtctgcttcatggagagttgctggattaaggacttcaaatgctatgaatcagctcaaccaaccagcagacaatgttagagaagagaagcacaatgggaaggaaagaagattttcagttgatcgtgctcagtggact

SEQ ID NO: 30461 - DNA, 237 bp, Glycine max
  Clone ID: PAT_MRT3847_127509C.1
attgtcacaagtcagaaggcagaagatcagagttgagaattcagatctctctcttccaccaggaaaacccactgagaagcaaaactgaaaacccaactattctcatgtggcttcttccaccagtacgcccaaacagtcctcatccgcaccggcaccacccctcgcctccctcagcgccccctggcttccaatgcgaatcctccacctcctcctcctcttgctccacgagttcggaaa

SEQ ID NO: 30462 - DNA, 1445 bp, Glycine max
  Clone ID: PAT_MRT3847_12750C.1
gttatttttagagctagtataagcttgtaacctattatgactttgatgaagagcaacgcataaccaatggccactgaatttttttccttatcttccagtgctgcctttactcttaggccttggccaaaagaatgagagagatcatcatcaattgacatggaatcatgtgtgcctccaggatttagatttcatcccacagaagacgagcttgtggggtattacctcaagaggaagataaactcgctaaaaatcgatctagatgttattgttgagattgatctctacaaaatggaaccatgggacatacaagataggtgcaagctaggatatgagcagcagaatgagtggtactttttcagccataaagacaagaagtatccaacagggacaagaactaacagggcaactgctgctggattctggaaagcaacgggaagagacaaggctgttatgtccaaaaatagaatcataggaatgaggaagaccttggtgttctacaaaggacgtgctcctaatggaaggaaaacagactggattatgcatgaatataggcatcaaacttctgaacatggccctccacaggaagaaggatgggttgtgtgccgagcatttcgaaagcctagtccaagtcacaggccaggctttgaccacccatggtgcagtactagtagtcaacaacaacactttttcagagaccaaattcaaagctattcatcaagacccttatcaattgctgacattttggatgaaacaaataatgtgcctcaccctaatgctgaaggtacaagttttagtcaccccttcagctcggatcatcagcaacacctgaataatcttctatcaaaccaaactgtggctattatggacaaacaactcattgagcttccacagctagatagtcccactgcaagtttggcaatcaaagaatgtaaccaacaacaacataatggcttaacaaatgaggaatattgcagtgatgaaaggagtaacaatagcaatgcacaagggatcgattggaagagcttggacaacttgtttgggtctcaattgagtgataatgcagcttatttttcacatccaaacttgcccttgatgatgccccataaccatgatcaagctagtcatatccttggatgcttccctgattcttcataattaacttgtgtgtcacgtaccaaccataatccatagccaaattaataaataaagtctctaagtaagatatgatggatatataatattcattatatcatagttttccatttatcttaccataagctaatttagaagttgttgctgggagattgaatattaccaaaaagctttttaggtgatgatgatattatatatatttttacgtgataaaggagatttgcttgaagagtgaatctctgatcctttgtattagagttcagaagatcataagccttttctttttttctttt

SEQ ID NO: 30463 - DNA, 364 bp, Glycine max
  Clone ID: PAT_MRT3847_127510C.1
gttacgcgttggtgcgaataatgcttttctcataactatgccaaatgctgctgcttcaatgtaccgatatcttgtgggagatctcctcgatgaagataataacatgacttctacctacattgaacgtacagcctatgtaaagataacacatggaaactttgctgatgacaccaactaattcgaggattttcctcacaagtctgagcagcttggcgagactcaggacaataaggtattgaaattatcacaagaggaatgccttacctgtcggtcaactaatgtgcgtgctgcaacaactctcgttgttgaaaggcgtgcatatgtgcgtgctatagtacatgatagttgagagtctacaagtacc

SEQ ID NO: 30464 - DNA, 498 bp, Glycine max
  Clone ID: PAT_MRT3847_127511C.1
aattcggcaccagtaggaatgtgttgagtggagatggttcattagtattgaaaaataaaaaactcagatagtggcaaatagagcagaatgtgatgtccatggatgaggcatataaaatgatgcagatcaggttggtaagatttgttttattttctgttcagagaggcaaaaaaatatccatgcaaaaactctttagtcttttcttagacactctcgagttacagctctgccatattctatattttttagtttttacctttcagttttgtttgaagggatgcggtcaattcttgccaataatatcttttgcaattgtcttctatccagaaaacagtttatctttgaatcattgaattagctttatttttagcttaacttgtatgaaaataattcaattattcaagtacttgaagcctttcttcttgattctttgtgctatgattactaaaagctttgtgctattaatgacaggtaatggaaaatgttaaactgttggag

SEQ ID NO: 30465 - DNA, 1291 bp, Glycine max
  unsure (1)..(1291): unsure at all n locations
  Clone ID: PAT_MRT3847_127512C.1
ggctactccagctctggagaagtattaaattgcaatgcctatgaagttgcgacagcttgtgccttggctgtacgagctgacaagcttatatgcattacagatggtccaatactggatgaaagtggacaccttattcgtttcttgcctcttcaagaggcagacatgctaattcgtaaacaggttgaggaaagtgaaacagctgctaactatgtgaaagctgttgctgaagaaagtttcaagtctcttaaaaattttaatggggcagtccattctccacggaacggaaaacctttttcagaatgtcataattcaacctttcataatggtgttggttttgacaatgggaatggcctatctgggaagcatggttttgctattggaggtcaagagtcactaagtcgaacgaatggttacctgtcagaactggctgctgcagccttcgtttgcagaggtggtgttcaaagagttcatttgctggatggcactattagtggagttctgttgctggaactgttcaagagagatgggatgggaacaatggtggctagtgacctttatgaaggcacccggatggctcaggtaacagatttttctggaatacggcaagacgacagaagggtggaggcatctggcatattggttaagcggactgatgaagagctgttaaaaacattggattcgttcattgttgtggaaagagaaggtcacataattgcttgtgctgccctttttcctcactttgaggagaagtgcggagaggttgcttgtattgcagtatctcctgattgccgtggccaaggacagggtgacaaattgcttgattatatggagaagaaagcatcatctcttggattgaatatgcttttccttcttacaacacgtacagcagattggtttgtaaggcgtggattttcggaatgttcaattgattatcttcctgaaaagaaaaggagaatgatcaatctttctcgcaattctaagtattatatgaagaagcttctgccaaatattagtcggctcgaggttggtgtaaaatctgcttcaagttagtactattttatgttgtttccacctaccaggaatggagggtgattggaagcaatattatgaggcacttctatagataattacttcgtaacagtatggcctctagaattattactatctctggcaggtcttccacgtgtaagcattaagtttctaactttctactgttaatatattgttagtatttaatttcctcaaaaaaaaaaaaaaaaaaaaaaaaaaaaaaaactnaactaaannnngg

SEQ ID NO: 30466 - DNA, 894 bp, Glycine max
  Clone ID: PAT_MRT3847_127513C.1
tggcgtcgcagcggaggccgcagacgcaatttcggagggggatgtgcctgcggcctaggggggaaacaagaaggcaaaaaatggaaggaaagaagccaaattaagtaaggtgctaattattagcggctagctaagtaaccaagtaattaatggagaaaatgagggtgatagtaattactgtattcctatttataggtgcagcaattgcagaagatgttggtattggtctccttagcgaagctgaggcgcatgtgtctcctaagttaaaaaagttcatcacaccttgcacttcgcatgttggtgaaacatgcagtactactagtagtagtggaagtgaagcattaatgcagaaccagggtgggttggctctttgccttttcgattctatggagagatgcttggtagaccatggtgcccaactttatcaaacaagtgttactaaccttcaagttgaaccttctgaagtatttccaaggaagaataatccacaaggtggacgtaagtccaaattagatgaccatcaagttcaacccttatcatttcgattaccaccatttcgattaccaccaatgccaaaactaggaccaacaagtccgattataagaacgattccatcaccacccatagctcctcgagatttgtcactcattgagactatacaattacgaactgccttgagaacctgtactcatgtcactgcacgaacttgtctcactgctccaaatgttgccacatctgatttagaggcttgtctcactccatccatgaatcaatgcatctatcctcgtggagctgaatatggcataaacgacaatatgttggaagtattgctagtagaagaatagccagacatgcgtcaactagatttaagctagctagcttgctttatgatga

SEQ ID NO: 30467 - DNA, 1815 bp, Glycine max
  Clone ID: PAT_MRT3847_127514C.1
tgctcggaattcggctcgtgctcgtgccgcattgtcttttcttgtgaggttctaaccgaggcgcgtctattgctggttgaaaactatttccaaaccccctcttgggcctgagtttatcttaggccttcgagaatttctggaagggctccctttggggtaaagccctgcaatctctagttcaaaattttgtccaaggctcgggcttttgcctcatctggaagggcttctttcacccttaaaaattcttcgctttttgagtggttattgattctgtttatgtgaagcacatttgctttaactgtttgtaaatctgagaaagtggtgaatccttgacttaattctcacgcacgggctttgtattcggcagctgttattcaattcgatggcagcggcagggccgctcgaggcggcgaccggggaactgaaccgcttttagtaagatcaagaacccatctgttcttatcagtttaatatctgatatgtgggccattggtccacacgatattaaattacttttttggtggggagagtccaacacagtagcttgctactgggcctctcaagtgtcgcccaagcgttgcactatagcatgggcctggcacaccctataaaaaaaaaaaaaaaaaaaaaaaaaaaaaaaaaaatcaaattaagtaaggtgctaattattagcggctagctaagtaaccaagtaattaatggagaaaatgagggtgatagtaattactgtattcctatttataggtgcagcaattgcagaagatgttggtattggtctccttagcgaagctgaggcgtatgtgtctcctaagttaaaaaagttcatcacaccttgcacttcgcatgttggtgaaacatgcagtactactagtagtagtggaagtgaagcattaatgcagaaccagggtgggttggctctttgccttttcgattctatggagagatgcttggtagaccatggtgcccaactttatcaaacaagtgttactaaccttcaagttgaaccttctgaagtatttccaaggaagaataatccacaaggtggacgtaagtccaaattagatgaccatcaagttcaacccttatcatttcgattaccaccatttcgattaccaccaatgccaaaactaggaccaacaagtccgattataagaacgattccatcaccacccatagctcctcgagatttgtcactcattgagactatacaattacgaactgccttgagaacctgtactcatgtcactgcacgaacttgtctcactgctccaaatgttgccacatctgatttagaggcttgtctcactccatccatgaatcaatgcatctatcctcgtggagctgaatatggtagcccgcctattagggcgtaaattatttcaggcataaaggaaaatatgttggaagtattgctagtagaagaatagccagacatgcgtcaactagatttaagctagctagcttgttttatgatgaaggatttgttataccttcaaaattccaagtagctactacattgacatgcataaataaacattgaatgtcacgaacgatatggtgttcctactaaataataataaaacatgctttatttctattaaaaaaaaaaaaaagaaaaaaaaaaaaaaaaaaaaaaaaaaaaaaaaaaaaaaaaaaaaaaaaaaaaaaaaaaaaaaaaaaaacccttggccccaacccttttttaaaattacccaaaattttaaaaaaaatttgggtttttttccttaaaaaaaaaaattttttgggggaaaccctttttaaaatttttgggggaaattttccccaaaacggggg

SEQ ID NO: 30468 - DNA, 448 bp, Glycine max
  Clone ID: PAT_MRT3847_127515C.1
gataccacaccatttcaaacaattgtgtgttgaggtgaatagctgtgctagatagaaaatgaagaggggttataattatctttcagtggctatttatgtgatgatgtttttggccttggtctcgtactcctccatcaagattgagggaatgagaccgctgaaagctgatccatccttcataagtttgataatcaaccgggcttattctgggccaagccacagaggacgcggtcattgaacttacaaacttgccctcttttttgtccatagagatcatgatttatactcttgtcaaatcacatttgacacatgcagatcccacacactatgtaatttattttttgtatacctttctgacaataccgtttctccttgcatttgaacatgtaaaaatacatggaataacacgaggttatcaaagcagtaccgattctattgaatctgttga

SEQ ID NO: 30469 - DNA, 471 bp, Glycine max
  Clone ID: PAT_MRT3847_127516C.1
ctgcacgtacccttccgggaatcccgggtcgacccacgcgtacgcccacgcgttcgcttttattaaatacagggttatgtcgtaatttatcttggaaacgggtcggatattcacttttacataattaatgataaaatctacagaaagctctaccgtaaacgtgaaccactgttacctagtctgccacctgggacacactgtttcatgtgaatagaaagaatgcttatttatcaatgggggtctgcatggagaggtaaaagagctgctaatagtcacaatggaagcttaggataggggttattcgactagaagatgctatgatggtgtatattcaatagttctggaaggggaaccgaacgtggtctcttaatgataatataaccataggatgtaaccatgtactgttgaacctctacccatcaaaaattagattgagcccacgcatttacttaaaagtgtcttcatattacc

SEQ ID NO: 30470 - DNA, 344 bp, Glycine max
  Clone ID: PAT_MRT3847_127517C.1
tcgaacagctgactagtcatgcggccccctttattgagtagggctcggcccagaataatcagtgaaatacttgggctaatatacgaggatgatttactatgccacacccaataacaggtcaccagattctgactagtaggaggggacaaatgaatgataaccatacacagtggatgatatcggagaaattctttaacacacggtgtgtatggttatacttcctttgtgccctctttcctgcagaactgggagactggttctgtgtgtggatgattaatacatccttaagatataatcccagctatttcactggatctactgggccggacctataataaaggggc

SEQ ID NO: 30471 - DNA, 510 bp, Glycine max
  unsure (1)..(510): unsure at all n locations
  Clone ID: PAT_MRT3847_127518C.1
cccacgcgtccgtacggctgcgagaagacgacagaaggggaggacgtacaatagcatcatagtctcaattttgatatgcataaaaagagagaatctcataagatcaaagcgataggatttaccttcataggcttcatttggtgtccaaaggttcgagtcttggcagaagaggcatcctcatttaacatttcgatcgcgtttcccgaaggattgagaagagaaaaaaagaaagaaggaaaggataggtttgatgggtcaaaacgcatcacgtacaacacataatagaggagagtttagcggtggtggatgccctgttcattcaaaacggcaagggcgctttgccatcataaaggagcacaaatccagattgtatattgtcagaagatgtatactgatgctaatttgttggcacaaatacaaaattagtgagtaattagagaggagctgacaattaattagctttgttcttctaaggttgcctaaaaaaaaaaaannnnnnnnnnnnnnnnn

SEQ ID NO: 30472 - DNA, 326 bp, Glycine max
  unsure (1)..(326): unsure at all n locations
  Clone ID: PAT_MRT3847_127519C.1
nntcgcangcacgcnnactnaancncngaatncntctcgatnacnncagcnataatacnacanaannnnangnaancacaaccaagctacncnggntaaaaaaaaannanncngctaaanngccaaancctanaaatttnaanctnttnttgnnnagganaaattnaaannntnncaagnaaaatcttannnctnangacntnaacttgggcntcaanaagcaanatgncgnccngnanngnnaacagngataaaggnntnaaccnaagggnnnngcgagcaccgagcgnaanganataccctannanccnccgaancnaaaacnt

SEQ ID NO: 30473 - DNA, 466 bp, Glycine max
  unsure (1)..(466): unsure at all n locations
  Clone ID: PAT_MRT3847_12751C.1
tccctttaatanttttccccaanannacttgcagctcatcctttgaaactacagcttgttgtcttcccaagggattaaggttagccaagaagattgtaaatagaatgttgaacaaaattgtgtatccaaccattgccccaagaccaatccaataccaataactttctgcatacaaacttcgctcttttaatactgcctcacccaatgaataggtggtctgatttccagctttcttatcccaagaatgtccaaggaactcgttcacagaagctgaattttgggcatacatcaaaggagaaatccaaaaaccccatacccaccaaacaggtatacggtctcttgaaattatatatccgccaagagccattacaaccaacatggcaaaggatccaaaggtattggatactatcatattccggcccaaggatcctatcaaacgaaacagacctatagacatctggtgcag

SEQ ID NO: 30474 - DNA, 382 bp, Glycine max
  Clone ID: PAT_MRT3847_127520C.1
agctcggaattcggctcgagcttatagattttttagttgccccttattctacctctactgtgttacttgcagaaaaagagaagccttttaagggaacaaagcgcaagcctgttgctataaggtgttaatgacgatctgggacaatgttaataatttctgcgatgactcaggacaacactgaagaatctaccgccttgcgggtaaagacagcctaatgcatacatgactcaggctaggactggacacattaatatatccaagaaaacgaaaccggaggcgctaacacgtctgttgatgacacgaccgacatatctgaaagatgaggacaaaacctacacttgcacgccagtggcgggccgttctacccaacccacggttcaac

SEQ ID NO: 30475 - DNA, 319 bp, Glycine max
  unsure (1)..(319): unsure at all n locations
  Clone ID: PAT_MRT3847_127521C.1
tttgttaacgccgggcaccgcgacaccgaggacgggtgccatccgaggaccacccccaaaaccccccgccnnggacaaaaaacccacaggagcaccccaggaggacaaaggccgaaaaggcggaaagggaaacagggaacgggcgggagcgagacgaaaccaaggaccgcgggggaaccaacgaaacagccaaaccgaggacgaaaaagcagaaggcgcaggcaggcgcgcgggacccggagaaaaagaggacgaacggcgccaacaacggcagcaggaagagaacaccaaacggggccacaaacggggccgcagaagc

SEQ ID NO: 30476 - DNA, 453 bp, Glycine max
  Clone ID: PAT_MRT3847_127522C.1
tacggctgcgagaagcgacagaaggggactcaacaaagaatttgatcagtgataaaaaaaaaaaagaaagacgaatagagagaacccaatatgtctaaactagccactctcttgactttggctcttctactgagcttcaatttaatctatgcctcccgtccaaacccttcacttatcagtgtctcttctttgcatggggatgttgcgactacaaaggcagaagagatagatggtgagagttgtgaagaagggacagaggaatgtttggcaagaaggacacttgctgcgcatctcgattatatctacactcagaaggataaactgggtcagcatttttaacggcattacaggcatatgaattgcaatactataaataaattaatgtaccacacatatatgtatgtgtgtacttatttcattaacaaacaaatgctttgcttgaatgttcgcata

SEQ ID NO: 30477 - DNA, 266 bp, Glycine max
  unsure (1)..(266): unsure at all n locations
  Clone ID: PAT_MRT3847_127523C.1
caacgcaaggcaaggctgttctttcttctttgttacaactctaattttccattccaattgcaatcnctaaacgttgattttataataaatttgctcctctgcaatcaggaattatgtcttttggatggaattgcaagcacccggacatgatttacatggtgtttattggtccacctgtgatggaaacaacttcaacaatggcaaccggaaacgaagcaggatcagctattatcatgggaattctaacattcataataattactggg

SEQ ID NO: 30478 - DNA, 207 bp, Glycine max
  Clone ID: PAT_MRT3847_127524C.1
gcggctttcaatttttcgaaccctcaaaaccctagtgtcagttcgatttatactctaataattacactcgcgcatagttttacgcgacttaccattgatgatcctattaatttatttggtttgaaagaaattacgtaagacaaagtgggttgtgactgggtggggtaagagagacaagtaataatggaggaatcgatagggcagaaa

SEQ ID NO: 30479 - DNA, 1274 bp, Glycine max
  Clone ID: PAT_MRT3847_127525C.1
gcgcgacatgctgcacctgggggtcccctgggtcctggtcgcagtcagtgtggtgcactccattgcccatgcggtggaggggggggttccgccattgagcgatggcatcaccctgtctgcgccatgcgcagctctcatcgttcccccctccggcgcgtctccgctctggtgcgtatgggggcgccgccaggcttgtggcacttcccggccgtcgtgctggtgatattgtggatttggagatcacaaaggaggtggtcacagagaataaagaggactccaatgccaatgctgagaaagatgttgttgtgtcaaagaaggatgacaataaccaatcttcaccaaacacaaaagtcattgaaggatcatccaaggcaactccgaagaggagcgaaaagggtgtcaaaaaagcaaatggcacttaccgtacgaggaggaataggagggagcttggtttgaaggggatcgaggagcgtattgctgcaggtttagataatcctgaattgggaccatttttgctcaagcaaacaagagatatgatctcctcgggtgagaatcctcgaaaagcgcttgatttggctgttagagctttgaaatcatttgagatttgtgcagatgggaaaccgagtttggacatggtcatgtgtctgcatgtcttggcaacaatatactgtaatttaggacagtacaatgaggccattcccgttcttgagcgttccattgatattccggtgttggaggatggccaagagcatgcactggctaagtttgcagggtgcatgcaattgggtgacacttatgcaatgatggggcagattgagaattctctgctgttttatgcagcaggtcttgagattcaagggcaggtcttgggggaaacagacccgagattcggtgagacgtgtcgctatgtggccgaggcacatgttcaggcactgcagtttgatgaggctgagaagctgtgccagatggctcttgacattcacaggggaaatggagctcctgcttccatcgaggaagctgctgataggagactaatggggcttatctgtgactcaaagggtgattatgaagctgctctagagcattatgttttggcaagcatggctatggctgcaaatgatcatgaagtagatgtggcttcagttgattgcagcatacgtgatgcctatttggcgttggcgcgctacgatgaggcagtgttttcttattcaaaagcactcactgtgttcaaatcaacgaaaggagagaatcatacaacagttgcttcagtctat

SEQ ID NO: 30480 - DNA, 103 bp, Glycine max
  Clone ID: PAT_MRT3847_127526C.1
gtctccacgatttgactacatcctaacccatcatgccatggtggttgcggacaatggaactcatgttaacaggcacttaatcagcaactctcttggcaaaccc

SEQ ID NO: 30481 - DNA, 284 bp, Glycine max
  Clone ID: PAT_MRT3847_127527C.1
cggaggggggcacatgtgagttttagatcaagagagtgggggcatggtgaggaaaatccatttccttgatttattacacgctactatttaggtagcatggcgccgccatgcgtacgaatacgtttactcttcgaatgaacactggctatggtgtccttactagggaagtgacatgctctagcaggaggctagctgtggaagcacacaacagcgattccgattttataccatgaagtgaagagttgcgttgtagcaacattaggtttacatgtcagtggcgaaca

SEQ ID NO: 30482 - DNA, 223 bp, Glycine max
  Clone ID: PAT_MRT3847_127528C.1
ctggttcaatagaattttacgattaggatcatgcaatcgaggtattacttggaagaagggttcaggagtgggagttcttgagcgaagtgatggatcatgtgggtgatgttaatcgtactgtagtgttttaggattagagccttggactggatgtgtatggtacaggagatgattatgattagatgacgttcagagcagttgttgggtatggtactgaagatgc

SEQ ID NO: 30483 - DNA, 600 bp, Glycine max
  Clone ID: PAT_MRT3847_127529C.1
cttctcttctcactctcacacaacacacaaaaacatatcttttcctcttgtgtccctcaacggaagtatcaggatccggtggggttacagtgtacggcaacggcgccatcacctagaccaaaaagccccttttctccgtcaaagtgggcttggcctagatgcttcgcggcgacatcatcatcgatgctgagcacggtgatgtcacccttgctgacgacgccaaccacatcaacaatgagactagatctgcattcaagtgggagtggtgtttgccaattcaaaactgctcttctttggcgtctagagaacgaaaatctcacaacacatgtccgaaggaaaaccagcgatgctcgtgaaatgcaaactttttatgggcagtactatgaaaagtatattcaagcgttagataaggctgctgataaggtccgtgcccagctcacaaaagcatatcaaactgctgttgttttatttgagggattgaaggaagttaatcgaacagaatatattccagtatctgatgagattatggaagctcatataaaggttgattgaggaaatgaagcaattatatgccccttataatatttgccacttgatccc

SEQ ID NO: 30484 - DNA, 346 bp, Glycine max
  Clone ID: PAT_MRT3847_12752C.1
gtccctttgggcatctttgaggctcgttaaataaaaattatgggatcgtgtgagaacagccttttttgcaggcgttggtactaaaaagcaacctacttcccggaacttgtaaactgacgatggggattcgggagacaggaccactataacatacctttgcattgaccgatgatagcacccgggaatggctggtgagactgattaatggcacctggttggtccggcatggggacaattccatggggatttcgcctctctcttagcgtaggcttcttttggagagaatctatttctagtgcggcaccaaccctaataaatgatccacctgctcgggatgccacctttg

SEQ ID NO: 30485 - DNA, 271 bp, Glycine max
  Clone ID: PAT_MRT3847_127530C.1
cacagagaggggggacagcagccctggaatagggcacagcattgaaacgacatggcccctcatatttgggcgccaaggacgacactgaccgcaagcacgacgaatgctcatcaagcgtcagacaggcagacggggaggataatatggaacctaagacaaggcctgcgtgcgatgatcgtgagccagaggagatcccgtgcttacagagacaccggtatccatcacatgaggacgaagctggacctgagcgcggagcaccactatgaaagac

SEQ ID NO: 30486 - DNA, 280 bp, Glycine max
  Clone ID: PAT_MRT3847_127531C.1
gccggcccccaacgctggctttaaatttaaatggattcttttcataacaaataggcaaaccgattccccactcttgtcttaaaccacacagtatcctacattgtattacacacagcaaccttgcattattcccttattcagcccacttatttaaaaaaaaatggttaatcgggcttttgacccaccctcctctttatgctttttcccaaatgggaacaaaaaaaaaaaaccaatttttggggctttcactttgctattaccttgtgggccaacataaaac

SEQ ID NO: 30487 - DNA, 672 bp, Glycine max
  unsure (1)..(672): unsure at all n locations
  Clone ID: PAT_MRT3847_127532C.1
gatagaatatctatctatatagatatagatagataatatatcctctgaataattcaaatcgaaccaattggatgtccgactcgggcctatatgacatgaccaatcaataaaaagactctaacactctacctttgtcatatattccatacatcacactagatagatatcatattcatggaatacgattcgctttcaagatgccttggtggtgaaatggtagacacgcgagactcaaaatctcgtgctaaagagcgtggaggttcgagtcctcttcaaggcataatattgagatctcttattgaattggaataagttcggcagcgaatcacgaaatcttggtgatcttctctatcgaatgaatgggtaatctgttttgaaatcgtccgccctgcaccctccccgaggagtatatgcttcaacaaaaatcacacaggggtagatttgatacaatcaaaacctctggtaaaatacccacccgtaacccagcgggcggataaagtacattaaatagtccgttttaggaattggcgacttacccattcaatgactntggcacccggacgttcccaaactggaatgtgtattatcgatataagggatctttcaattgagaaagaccatcgacctgagacgaagaggaaggaaaggtctatctatttttttttttttttt

SEQ ID NO: 30488 - DNA, 184 bp, Glycine max
  Clone ID: PAT_MRT3847_127533C.1
tgtaagataagaaaataaagaagtgaaataaataagtgttctaaattagttgaaatcaggttatgtgtaacctttgaagaagttagaagaggaaacttttaaagaaacctaggtgcataaattgactttaacttatgagagaagtttgattcattggaactccttattttcttcttctataaga

SEQ ID NO: 30489 - DNA, 222 bp, Glycine max
  unsure (1)..(222): unsure at all n locations
  Clone ID: PAT_MRT3847_127534C.1
taaaattcttccacccagttatcgagtcccntgtgttgcttcttttctccctcttaggtctctcttctagacccagcataacaactcatcgttccatattggaccttgacctaaccaagtttaccacacagcatcaggttccatnantgttnnaantatggaagagtgagnatggangtgtatangataangaagaagaagaggtaaagagnattgagattt

SEQ ID NO: 30490 - DNA, 267 bp, Glycine max
  unsure (1)..(267): unsure at all n locations
  Clone ID: PAT_MRT3847_127535C.1
gtgtgagagaganagtgagagagtgantgngntagaganagacgcntcgcanattctcaatcgnatctcanaaaaatgnnaganantcatcagcattcacatnggtcggccgggatccaggtcgganatgctgctgggaatctactgactcgaacatggcatccagaccgacggcatgatgcntctgactccaacttcgnngtagcccacgacgcntcaacacttcttcagcgaaacggattggcagcactccccgtgcngtttcnt

SEQ ID NO: 30491 - DNA, 770 bp, Glycine max
  unsure (1)..(770): unsure at all n locations
  Clone ID: PAT_MRT3847_127536C.1
cccggctcgacccagcgtccgattttttttctcgagacaaaaaaaaagtgtggctacaaaacaacactctcatagagagagaacggttcatcgttcagttcaattcaactacccgccggcgccgctagcgatggtggactccggcagtgacttcgccggcatcatttgttcgatctgctacgaacccctcaaccccattaacgaggatcttcaatcggtctccatctgtggccacgtttttcacgagctttgtctacagcagtggttcgagtactcttcgaaagggaagaagcacacttgccccatttgcaaacagggttgcagggccagtgacgcgtgcaggctctattttcagtcagtgggagatgcgaacaatagtgtgaagccttcgaagtgctttgaacttgaggaagatgctggggttctgcgtagggaagtgaagagattggaggtgaaagtttcggggcttaattctcaggttgaagggcaaacaaaggaattagaaggactcaatgaggagctttgtacttgcaaggagcaggcaaagatagagacagctntaaagaatgaggctttaaatcaaaaagcatctatacaattccagcttcaaatgaaatcagaggagcttgagaagtcaactntggagtgttttagattaaaagaaaggaatatggctttggctaaagaacttgcagcattaaaatagtatctgatctggacattgatgaaagaagagttntgaagcttgccactttgggtaatggggccac

SEQ ID NO: 30492 - DNA, 386 bp, Glycine max
  Clone ID: PAT_MRT3847_127537C.1
acccatttcgacatccgactgtaataagctcaatttcaatacaatagaatttctagaaccatagctcacctatcgacaccagtacgcttgggagctctcaaaacccacacaccatcattgactctcagatctacatgctcatgaagcttgctgttcacaggtgcaagcacgtgcacattcttggcacacagctggatataccgaagagcggctgactaagacttagtaacagctggagaccctgtcactgcctaagagcccctagcataggactaccattatgcttggagactgtatacagatgcaatacctgaacaccctcgcaaggcgtacttcggtttgatgatatctacccgttcacatataagcggactggatcccgtgac

SEQ ID NO: 30493 - DNA, 408 bp, Glycine max
  Clone ID: PAT_MRT3847_127538C.1
cgtctggcgatttaatagaaaagacacacacttcgcacttacatacgacttactgatggtgtggacaaatctagtgcgacttggcagtttataaagttagcagattgtgattttctcaagagaaactttaagcagatggctaatgttttgttggtggcttctgaggacaaggcaatgtttatggtcacaactttattatgttacgagttataatctgaaaatgcaagatgcttatcttgtcaacctagtaaatttgttacgagaattgtatatgcgcaatccagacgaagctccccaattgagaaggaaagctgtatctcgtgttgaatggctgcaaacatctgatgtgcctaccatagcacagattgaagagttccattcgatgcatatgatgatgaatgctcctga

SEQ ID NO: 30494 - DNA, 162 bp, Glycine max
  Clone ID: PAT_MRT3847_127539C.1
attctataaggagtattcttcagtgatatctagtgaagaatattctataaggagtattcttcactagatatcactgaagcctgtctctaaatcatagaattgaatagcacggaaatgtcagtatgtaatttcacagaagatgatattattaaaggaaattcc

SEQ ID NO: 30495 - DNA, 375 bp, Glycine max
  Clone ID: PAT_MRT3847_12753C.1
acccacaggaattcggagtatttatttaaacgaaaacttccattttcttcttacaaacatattacattttctaattaacctataataaaaaacattcctacataccctagatgttgaaaataaacgtctaacatatcttaattaaacagctggtaaacttgtttacctacttttacaattgataaacctcttgttaccacaatttactacataacactaaatgcacgaaattatcgatcttcctccaggagatggtggaattcttgctctaataagccaaactccaccatcaattgctaccttgtataaaaaccagggattaatcttttcataatacccatgatcttgctggaaataccaaagtcttggttaacc

SEQ ID NO: 30496 - DNA, 133 bp, Glycine max
  Clone ID: PAT_MRT3847_127540C.1
tgctgcacaagttctggtagcatggacatgccaaggcgcaggctaccaaaggttccctccccgaatgaaaagtggctatggtgcgcgtccttcgcaggtaaaatgcgcccgttctaagcccgctgccgaagca

SEQ ID NO: 30497 - DNA, 655 bp, Glycine max
  Clone ID: PAT_MRT3847_127541C.1
gattcagtttgaccagagtggtagaatataggagctgctatcaggacttatctgcttgaaagatcacgtgtttgccaggtgtcagatccagagaggaactatcattgtttctacatgctctgtgctgcacctccggaggtactgaagctattttgcttacattaatttgtttctggattgaatcataaatgtggtaacttaccattggaaaaaactgtctgaaaatgaacttgtagagaactttgatggtaaataagagttgatttcctttcctcttgtaatatctatgtatgcttagctataatatttttttgttgttgtaagatgtgtctgtattggcaaaattctttggaagttctttattggtaaatttgtgcttaactcttttttattttatttacttctaattatctggttctcttttttaaacaggatgttaaaaagtacaaattaggagatccaagaatgtttcattatctgaatcaatcaaattgctttgagttggaaggggttgatgaatctaaagaatatagggatacaaggagagcaatggatattgttggaataagttctgaggagcaggtattttgtagtgattttatatgttcattttctggttcttcaagcttgacttatgattaaatgctttgttttt

SEQ ID NO: 30498 - DNA, 227 bp, Glycine max
  Clone ID: PAT_MRT3847_127542C.1
tgatacgctcactagatatattattgctgttaatatatgaccatacctacttttccaatgcaagaattaaatttactctatggttaacctaaaaaacattaacaaacacaaaaaaaaaaatatcaaaaaaaaaattacataattctcaaacactaaataaaatcttacaaaacttacaactaaaaaacaattctctctaacatatacttcatccaaacataagtaaa

SEQ ID NO: 30499 - DNA, 1495 bp, Glycine max
  Clone ID: PAT_MRT3847_127543C.1
taagaatgaaaagatgtaaagtcaacgtggaaaattagagattaaacataaaaggagattacagtcattcaacccccatcccatccgttttttcttccttcccaacaatatataagaaagaaaaatctgaattccaatgcctcaccaaaagccataaataaaaatccaaaacaaaaacttgaatggcatgaaagtttttcaaatatactttcccacaaatcaatgtgtgaatttcctatccgatatcaaatcttacaagtgcgtaacagacggctcaactaagaaattgacaaccctatttaagaaatttaagccaaatacagtctcttcacagttaacttttacagaaacaatcaatgggtcggagcatttaccttcaacagtaactgtaattaagcatggcatggaattgctcaagatctcactgctgaaacgcaaacacagaccagatgcatcatcaaggttggcagcaaccggcatatccacagatacaagagaaagatttgcattgctcagcatctgtagtgctaacgtttcacatatcacaaggaatttgtcctctgtcaaagagttgctgcgcttgttcagctctagaatgtgatcggtaaaggtgcaacttctcacatattcaaacatccctggaaggcgagattccttatctctgaaatcttcaatactgaggggaaggggttttataaagtatcctatgtcaggctttaacttgacagggaatttcttgtcattgcaaaataaagccagatgcagtggcaaaaggtggtgatggaaacgaacaagcagagtccggtttgttgtctcaccaggctccagagaaggaatctcctccatggaaaccagtgctggtttattgacatgaaattttaaggtattttcagttggtgatgatgttcgatcagtagaatcagagcttttgctataatcttcttctattaagactatatcgaacatgggctccagagaacaattttcaaataatacttccaaacatacaaggtgagaggatatgcttgaagtctcagatgaaaatgaataattcacctttaacccatttccatttacaggatctaagagagtgtagcatttaggttttaacccgcgccctccaatatttccaatggttattcttgctgaagatctacgaactcggctttgctctatctcacttcctttagatgacctggctggttcatctaaccaagactcaagagactttgttgacatcaagtcccgaaaaccagctgcgccagagggagccccaccattctgattttcacagacattgacagtgtctgaaatttgaatcaatggatcagcattatcttctccttcattgccagaaacagattcatcactgccagtgacttcgcctgaagcagtaatagattgttcagaactataatcagaagcactttcctcatccaaagaaccagatgtgccagtattatcctcctcatctgaatcactcttagaagctccc

SEQ ID NO: 30500 - DNA, 333 bp, Glycine max
  Clone ID: PAT_MRT3847_127544C.1
cccacgcgtccgacggctggtacgagcacacatacggggacatgtcccatcagacttcaaaaagacgacgacacgtgattattacatactaccactcttgacccttcaacttggagtctatgtcgttacaaatttaacatggcgggtagctaggattggcagcacattatgcgtgtgctgaacaccatcgtggatggggatgcgtatatgctgataatggtgacctgcttctcgggtatgggagaggagatggagcacatgttttgcatcatggctgacgagagggacaacaacgcgactggtgtgttgactgctgctgagtcgaacatcgag

SEQ ID NO: 30501 - DNA, 274 bp, Glycine max
  Clone ID: PAT_MRT3847_127545C.1
ctagatcgcgggcggccgttcgctatctacactgacgcttgtgtctctccggcgtccccggatggtgaccctgcggcgtcattgcgaatgttaatatgtggcctttccaagcatattctgtatgggtgttgcaattgaaaaatcagctctagatgttgcctgtggtctgaacctctgttttatggggaacactctaaattatgattacgatgttcaaagatgttaagcttttgctgttcatctgttataccaaataatggattaattgctatgc

SEQ ID NO: 30502 - DNA, 184 bp, Glycine max
  Clone ID: PAT_MRT3847_127546C.1
ggtgtaactgttccatcttaactagaaaagccaccaaaaaaacggtgaggggggagcctggccctaaaggacccctccacctgagacacaggcagagccggctcatcccggcgttgaggggaggatatggccagctgggtgtgagcacatttacaaaggcctccttctataaaaaaggatgccg

SEQ ID NO: 30503 - DNA, 291 bp, Glycine max
  Clone ID: PAT_MRT3847_127547C.1
attatttcttttttgaaatgaacttatgcacttctacttcaacatttactatgaattgatcagtgggagcaatacaggtgggcgggccacaaatctcatattccctgaccacattcaattccgacacacttaaacaatacctaactctatgcacgaagatcactaaatcatgtactgccaccctatccagtacacctgagacatgcatctactgctttcatcaacaagttgaccaataatataatcctcaattaaaagtgtggttcaagatccaatgacatgacaactgag

SEQ ID NO: 30504 - DNA, 1198 bp, Glycine max
  Clone ID: PAT_MRT3847_127548C.1
catgatcaccggaggtgccctgcaggagcttgtgtcgttgctggaatctgtgtatgcgagaggacataaggaatcttggtcgtcgaactctcacttctatcccgccattcaaatctgaattccggcgattacatatagaggtatagtatatatagattgttgattcttggtctttctgaggatgaaacggttcgcagagtagcagcaggggcaattgccaatcttgccatgcatgaagcaaatcaagaacttataatggccgaagggggaatcactctgttgtcaatgactgcatctgatgctgaagaaccacaaactcttcgaatggttgctggtgccatagctaacctatgtggaaatgataaaatattgatgaagttgagatcccaaggagatgtcaaggccttactgggaggtgtaagatgtggacagattgcccgaaatgacatggttgcacgaggaattgccaactttgccaaatgcgagtctcgagcttctagtcaagggataaaaagtggtacgtcgtttttgatagaagacggtgcacttccatggatagtacataatgctaacaatgaagctgcaccaatcaggcgtcacattgaacttgcactctgccacatggctcaacaagaagtgaatgcaaaagacatgatcaatggaggtgccctttgggagcttgtccggatttcaagggattgtacacgagaggacataaggaatcttgctcgtcggactctcacttctatcctgccattcaaatctgaattgcggcgattacgtatagacgtatagtgcagactgttgatggcatgtctttcctggggttcatattttgttcatgttctactgatggtgaaactgatctactgaatactgatgctacaaaatccttataaatggagcatttggcgtgtagttgtataccttgctagttttgggtaagagaagcagggtttggttggtaattctcgtggtttcttgtcaacactgacctagaatgtagtagatgtaaatagagggggaagagatgaagaaaagtgaggtttttgggcgggggagagatgttgaagaaatgttatgatcagtcatgcatagtgtaatcaaactctgattgccagaaatgacatggagctgccaatattgtattcgacttgtgcaagtaatgaaaatccttacaatttctttttttatagcc

SEQ ID NO: 30505 - DNA, 338 bp, Glycine max
  Clone ID: PAT_MRT3847_127549C.1
attgtttgacagagttcaattctagagcaagtgttgatgtgcggcgcactcatcggattggaggaatgattaaaatggtggccacagttggtatttctgagaatacaggtatatcattggcctgtgctatgaatagatcttttagggggcgcgccagttctgatatttacaccatctgttctcaagactgtgaattgaggaatcctgcttgcacaaaatcaatgactatgtcatttaatccaaacccgtgttctgatgcatggagtttggaattcttggagcgtacttggttatcattgcgatgttatatgtgacactggatggactgcctccccaat

SEQ ID NO: 30506 - DNA, 932 bp, Glycine max
  unsure (1)..(932): unsure at all n locations
  Clone ID: PAT_MRT3847_12754C.1
gaggagccatgacgncggtggccaagtttgccaccgccgggatcaggggcgtgccgtctgttcggagagcttcgtcgcagacagcggcggcttctgaagtgtcgcccangcaggcagcggcgtgggacgacgtggacgactgggaagtggcggacggcggcgagggtacgccgccacgcgtccggggcggtgtccctagctttcaggaggccacgtcagccaccactgaactgaaacatgctattgataagatatacctatcttcaaattcttccgaatgcgacggttgttctctcagtggtcatgtctctgttatgtcaccttctcattctgagttagagaacaaatctcgtgtcaccgaggctatcttaaatccttcagagtcaaaccgtgctttacaggcttttcaattgcttagtgaatgtcctgaggcccagagtgtggtagcttcgattgcttgtgacccgaatatatggaacgcaatcgtgcaaaatcctgcgctacaagatttcttccagtcacaacagacagctgattttgaagtagaggaaactcatgatcaaagactgggaaacttaccttattctgattcagtgtatgcatttattgattcgctgaatgttctccaaaatgtaaagttcactgtatctgaaatgttgagcagagtgccaaattaccttcagaatatgttcgggttcttatctggtcagacatcttctgcggttattgatgctagaggaaacacaaaagcaaacttcatcgatcctatcactatgggaggaactttcatggggttggcagtgttggttgtgatggtgataatgctgaagcgagcttaaactctaggcagaaattagttaattatagtttgctatttactatgatcaggttttatcttttgcattaagagaagggtgagctaaatatgaaag

SEQ ID NO: 30507 - DNA, 1477 bp, Glycine max
  Clone ID: PAT_MRT3847_127550C.1
cgaattgggattgtgggttttgagctgggaaacggggaatactttgttccccgaggatgctgcaaaggttttaagggaagtgaatgttccatggtcaggataaagcgtgtagaaacatgtcggcaacctaatctcaaacttgtaaggtaataaatttttttattcccatgtattagggtcaagcttttttgttacaatttttatatcctgagcctcctaatggagggagttgtggctctcaagtgtctttaatatcggtcctgacaccatgaatgaattatccttattgaaaggttcattcagtgtgttagggaattgcgcaaaatgtgttgataactacaagttgtgtaatttgtcatgcattgcttgcggcttatatgctctacctttgtttatcaaagtgatccaaggatgggatcctcttcaaaatccatctcatgggttggagttggtatcagagtggaaggcattgcttcaagaagaattagattctgttgatatgtgggatgtgttaacaccttatactcaattggtttcagaggttgtgttgattgctatcagaaaatcttgtatcaatacttggcaggtacaggatcctgagccaatgttgtggtttctggaatcttggaaaaagttacttcctgcttctgtccttgctaccatattagacaatatagtcatgccaaaactatcaagtgctgtagatacttgggaaccacaccgtgagaccattcctattcacacttgggtgcatccatggctaacctctattggggcactagttggaggactatttgattctgcaagttgggaacaacttatgcttcgttttattgtaccgaagttgcagcttgtcttgcaagagttccaagtgaattcggaaagtaagaatgttgataagttttgttgggtaatgaactgggcttctgttattcctattcatctgatggttggtatgatggacaaattcttcaagcttaaaccaggtagaatgcacaatggtcatcaaatatatgggtttggtaatgtcggcacaacaatagactttctaaatcaaaaggtatatgcccagaatgaagaaacgtggtctttggaatcacttcaaggcttgctagagttgcataataaatcccttagtaaaagatgctgaattcagcatttgccaaatgtgaagtatctcaattttcaggcagttcaacttggaggtttgttgaaactaatgctcaggaagatgtctttgcagttgaaaaatccgccattcgactccaaattggttgctggtcccaatggagggtctgctgggaagctcactgtcaaatacgaaacaaaaggagatgctgagcccaaccaagacgaactcaaaactggaaaagccaaggctgatgctctcttcaaggccattgaggcttaccttttggcccatcccgattacaactaatcctcttcaacttacttggtatcactttcttgctttttc

SEQ ID NO: 30508 - DNA, 391 bp, Glycine max
  unsure (1)..(391): unsure at all n locations
  Clone ID: PAT_MRT3847_127551C.1
tgggaaaggctcgtttataagactaccaagaagagggccagcggacccaagtgccccgncaatggcaagaggattaaggggaatccacacttgaggcctgcagagtacaagaggtcaaggctacccagaaaacgcagcaatgttatctgtggatatcctggagtattattgggtagcgccgccagggagaggctcactcgagccctcttagccgaagaagaaaagatcgtcgacaaaggtcctgaaagacccagaagggtcaagggaaaagcaggtcctcacaagggttgnaaattcgaaaaaacaccatgaagaaanaatttattttgggaggaaatgccacagggtttgaagtgggctaatagtaaaattcaacaaatttttaaattaa

SEQ ID NO: 30509 - DNA, 2071 bp, Glycine max
  Clone ID: PAT_MRT3847_127552C.1
ggctcgagcttgaagagtgtgtctatgtcttctaggaggggttgcatttaccaccacttaaggccaacggattatcgttgctccaaagagtcattcccaagttgatcaaggctgctaatgatactcagaatattttatcgcctttgatggccccagctcggattcgattggagcgagcctgacatgccttgttagccaacgaaggtggttcggttggtaagaatacgatcaaaacacttgtgtaaacatggcttaaggggataagttcttttggttttcagatgtggaatttgctagggagactttggcaggtgtcaacccatatagcatccaattggttaaggaatggcctttaacaagtaaactagacccgcaaatctatggtccacaggaatcaacaataactagggaagtcattgagccacaaattatcacttatggaacaattgaagaggcccttaaagaaaagaagttgttcatgctggattaccatgatttattcttaccatatgtaagcaaagtgagaaaaattaagggcaccacattatatggatcacgaacattattcttcctcactgatcaagggatattaaagccattagctattgagctcactagaccacctatggatggaaatccacaatggaaacaagtcttccaaccttcttgtgattcaaccaatctctggctttggaggcttgctaaagctcatgttctggcccatgattctggttatcatgaacttataagtcattggttgaggactcactgtgtcgtggaaccttttgtaattgcaacacataggcaacttagttccatgcatccaatttatagattattacatcctcatttgagatataccatgcagattaattcccttgcacgtgaggcacttattagtgcaaatggggtcattgaaatttcattccttactaataaatattcaatggaattaagctctgtggcatacgatcaactttggcaatttgattcgcaagcacttcccaatgatcttatttccaggggaatggctgtggcagatcctaatgcaccacatggcctaaagctaacaattgaagattatccttttgccaatgatggtcttctcatatgggatgccatcaaacaatgggtcaccgactatgtcaaccattactatccaaccccaagcatcatagaatctgaccaagagctccaagcatggtggaaagaaatcaaaacagtgggtcatggagacaaatctgaagaaccatggtggccaaatcttaacacatcaaaagatcttattgacatcataaccacaatagcttgggtagcatctggtcatcatgcagctgtgaacttttctcaatatgcttatggaggctatttccctaaccgacccacaattgcaagaaacaaaatgccaacagaagacccttctgaagaagaatggggaaattttctaaacaaacctgagcaaactcttttggagtgtttcccatcacaaattcaagcaacattagtgatggtagtcttgaacttattgtcagatcattcacttgatgaacagtacattgggaaatacatggagccatcatgggctgagaatccaactataaaggtagcctttgaaaggtttaataggagattgaaggagattgaaggtattatagactcaaggaatggaaatagtaatttgaagaacagacatggagctggaataatgccttatgagttattgaagccattttcagggcctggagtcactggaaaaggggttccatatagcatatctatttaaagtttggtaatttaattaaggccaaattagaacaatttatttttattgttatgtgcctcatagggtcctaaataataaaatataatggcacaatgtattcttcatattttacattttatgtacacggattatgttatggcacaggaaaattccatatctagttcttcatttagtaaagaactagtctgcaacccgtgcacatgcacgggttgtttggtaagcattttctaaatgttgatggacaccaaaataacaaaattgtttaacaggaaaatggagattaatagc

SEQ ID NO: 30510 - DNA, 377 bp, Glycine max
  Clone ID: PAT_MRT3847_127553C.1
ggggttttatgtaggcgtatactttttattatttttacaggagttcatggatagattctttttatcctaataaagatacttacttttaagatttgcacaactttatcttggagaggggtgttccttgtttcaagagactagcaaaggaggcttcttaaacgcagaggaatgtttttcgtgagaaccgaaataggtctagaaactctcttgggcctattacgggatgaacattaattatgattggctccaacatgctacgagcccttggttcccatggtcgatcgaattttttctgcttatgctgggcacatcattaaactaggggggggtgcaggcccataaggggtgtgaaccttgtgaaattttggaggcctatg

SEQ ID NO: 30511 - DNA, 710 bp, Glycine max
  unsure (1)..(710): unsure at all n locations
  Clone ID: PAT_MRT3847_127554C.1
ggactcactgtgtcgtggaaccttttgtaattgcaacacataggcaacttagttccatgcatccaatttatagattattacatcctcatttgagatataccatgcagattaattcccttgcacgtgaggcacttattagtgcaaatggggtcattgaaatttcattccttactaataaatattcaatggaattaagctctgtggcatacgatcaactttggcaatttgattcgcaagcacttcccaatgatcttatttccaggtaaagttatcagaaaggttttaagtttgatgagaaatactaataatatactcttaaataaacttttttaaacacatctttatgattattaaaatttattagaaattaaaaaattcagtcaacaatctcaattcttatttaattaattctactgatgattttgtaattttgaattgtactcaacaattgaatattctgaaaaagagtgtgttacaaattgtttcctaaccctccttagtttaattatgttttcttctttttcaaaaccacattaagcattcaattgttgatcttaattntattctatctatcaggggaatggctgtggcagatcctaatgcanccacatgcctanagctaacaattgaagattatccttttgccaatgatggtcttctcatatgggatgccatcaaacaatgggtcaccgactatgtcaccattacta

SEQ ID NO: 30512 - DNA, 210 bp, Glycine max
  unsure (1)..(210): unsure at all n locations
  Clone ID: PAT_MRT3847_127555C.1
cgaaaaanggattgcccacaaccaccaataactttgccattcgtataggtgaatatttacactccttggctgtaaccggtaccaggatagtgcattaccacaaaatcggcgtactaacctggggagaaaaagcttcaccatttcatttatacacagacggctctacactcgtttataacaagcacaaactcttctaactaacccatttat

SEQ ID NO: 30513 - DNA, 446 bp, Glycine max
  Clone ID: PAT_MRT3847_127556C.1
tcgggctttgattatcacacaagataagtgcctatatgtgttaggataactaatcttggtgtttggagtgcataacagagagcagaacctctctggtcatgctctctgatcaggggatttctgtatgatacccctactataacccttgtacacctcttatgctttaggactgttgccctattttggtacccgaaagcttacatccctctttagagaccattatttgtcactatcatcaattttggaatactttctatatgggaacataccatttctaactcttgtgatgctttctacggtcctgatggatttattcttaatcttattcaaagttccatgggtctgcatatttttccacaaaagaataaataagtgctagttctaggctaactcaaaccatcatctttaaattatcctgggaacaccagcacgacccaactgcttga

SEQ ID NO: 30514 - DNA, 419 bp, Glycine max
  Clone ID: PAT_MRT3847_127557C.1
caagtgtgttgatgctaccaaaattgcaggctttgcccttgccacctctgctctcgttgtttctgtatgttgccttgcttttcttccaaattccaatttcatactataatctattatcattaactatcacatgaactcacaaatattaaggttaggttaggcctaggagcacccatgtcccttcaccttctttgtttaattttgattttttttttctctttttctttttcgttattgtaggatttgttctatgaaggatcttctggtttgtaagtggtaaccgtcaatttgattaaggatgccaatgacatatgttgtattagaattatcaaatgatactaatatcattaattaaattttgtcttataacatcccactaacaaaaactagcaactaatatttgtgaataaaaaaaaatt

SEQ ID NO: 30515 - DNA, 450 bp, Glycine max
  Clone ID: PAT_MRT3847_127558C.1
agagtctaggtgccctccttataccacgaaacgttcgattccagattccactgcaattcttacccgccatgcctatttgagatcagcaaagaggcttattgaaactagaggaacatatgatgatgtaactcatatgaaaaaagcgagtgacgatgagaaccccgtggctaatcactcagttcaaatggaaaagcacaatgcattggaagcccaagttatccgttttgagcacgaacattcggaagaggatattgcagcatctaactctggggagaagttcagacacgaacactgactagtacatttcactgggtggacattcatccttgcgcctcaatgcactgaattgatgcatatgaggaacaatgaggataattgtgatggacaaagatcatggattgacactgctgtaggatactaactgaagaatccagaattcatacccatatt

SEQ ID NO: 30516 - DNA, 224 bp, Glycine max
  unsure (1)..(224): unsure at all n locations
  Clone ID: PAT_MRT3847_127559C.1
aagcacggaacccggctcgagcggcgcccaaacggaataaaaccgcgagggagagagaaaacaaaacgggggagggagaagnggaacgcgcgcgcccgccccgggggaaaagacgcaaggcgaaagacgacgacacaaagcacaagcggcgcaagaccgacacgagacgagccaacgcacggcggcgggggaagaagggggaggggaccacagccggcaccgac

SEQ ID NO: 30517 - DNA, 692 bp, Glycine max
  Clone ID: PAT_MRT3847_12755C.1
gtacatgctcggtctatgtatggaactggcatgcggagacgcctcagctgcttcatcgtggcgctgcaggagatgagggagcccaaaagcctcacataacgtgaacaaggagcatgaagaggttctacgctccaaaccctctatccttgccctcagcgatgagctcgataagctccggcaacctctcgccaccgctctctccgaagagctccaaatcaacgacacatcttctcaaaaccctcaccatgagactgagatcgaaaacgaaaccctagtcgagagctccggctcgattgagccgaactcgaactcgaggaatgatgtcgttgtggaggacctgcttaattttctctattttggttcacttttcgatgtgaagagtgactttgtgtccacgatgcttaccagaacgcatgagcgtggctgctgcttgacctacgactacgtcatcgacgacgccaccgatctgctcggcgagaaggacttggattcgatctctgcactgagagggttgcttgtttcgcggcccgcggattcaagcttttcacacaagagtgtgctgcactgctgcgtggaacatgccaagctgtggcttgctaagtcggagcaaccccataggcctgatgctgatgttacttatgctgcattaagggagaaagtgaacaatattatgtcttcggagtactttacta

SEQ ID NO: 30518 - DNA, 353 bp, Glycine max
  Clone ID: PAT_MRT3847_127560C.1
aaccaaataaatcccttttcattggttggattggtcttaatttaaccatggtggttacctgaaaaccttccaattaataaaaggggggaaagaatggaaaaattaaaaaaccccaaggaaggggccccgattttaccaattttcccaccttttaccattaaaaccacccaaagtgaccaaaggttaactttttgtccaccttgcccttggttattcaaattatttaaggtattaacccccattgccagtggtaacccttaattcacccaccaaactttaaaaggggttaggggttaataatcttcctaatcttacctgattgtgaaaccttttttttttgtattccaagggcc

SEQ ID NO: 30519 - DNA, 266 bp, Glycine max
  Clone ID: PAT_MRT3847_127561C.1
cgttcgcgagggaggaagctcaggcctgtatggaaaccatacatgctaaattggctccagttgatgaagacactcctactctgtttcatgttgcatcttataatttcttaattagtaattgcactctcctacatcacagtttgaggaaccactcagcgctatgatctactggctaatttttagacagagggtaaccttagagcaagcgtttatttgctgcgcactcatagcattatgggaatggttaaaatggtgccgacagtttg

SEQ ID NO: 30520 - DNA, 291 bp, Glycine max
  unsure (1)..(291): unsure at all n locations
  Clone ID: PAT_MRT3847_127562C.1
ggaagcttccataagtaagtatcaatggctttcggagaatcccagaccaagctcgccatcgagcattccactaccggactcatcacgagcgccaagctggcggcagacgcggcgcattctgctctgaagagcgacagcgacaaactggacaaggccaatgtggctgacactgccggcgatcttaatgacgcggtactgaagtatgggaaacttgatgacgtacacggcatanggcagtatgttgacaaggctgctgattatacgcatgattaccaaggtgataataccact

SEQ ID NO: 30521 - DNA, 453 bp, Glycine max
  Clone ID: PAT_MRT3847_127563C.1
tacggctgcgagaagacgacagaaggggtcttcataacatttccaagccatatccaacattccacctagctccccaatcacatcttcaccacaccataaaccttcttaatttctctcttcattttctcctctattgtcataatcatggggaccttccctcgcttcgacccaatcaccacccaagaccggtccaaccagaccgtggcctccgaccttgacggcaccctcctcgtctcccggagcgccttcccctactacctcctcgttgccctcgaagccggcagcgtcctccgcgccctcctcctcctaacctccgccccctttgtctactttacctacctcgtcctctccgaaaccctcgccatcaagacgttaatcttcataaccttcgcaggtctcaaactaaaagacgtcgagctcgtgtcccgctcggtgctaccgaggttctacgcc

SEQ ID NO: 30522 - DNA, 332 bp, Glycine max
  Clone ID: PAT_MRT3847_127564C.1
ctccctctgcgcatacactgtgctcgcagggtttatacaccaagagggaaatgggtgccgagccgactatttcgggtgggtgggttggactggacaaaggttacgtcgtcaccaacaaagaattgccttcacacccctcacatcgttaggggaaaacaagcaatatggtgcactatgtgcggaaccttatatgagatggagccggatttgcaccctatgaatagcgtctaactcagttggtgaatgatgagaacgataaaacggcactcgacgttgcaaaaagaaagctcggtacacacacacgcgcaaataataagcatgaggaaatgtcc

SEQ ID NO: 30523 - DNA, 559 bp, Glycine max
  Clone ID: PAT_MRT3847_127565C.1
tactgctgggcttacagccgaccccgaaaccttcgccataatctgtgagctcaatgctatccactctaggtgggccatgctcgtggtcttgggcttgtatgttcctctaactgttgctcctcatccgaggtaaagttggtacaagcattgtggatgaaggcctgctccacatcttaattatgctggtctggactaattgtccatccctagccttgtcctcgctgatagcctcctcttcgtttatgccactctgtttatcctattgagtgctgttgaagtttatcgtcttgatggtatgcacatctataaggtcactgtcccaatctaccctggtgggagctgcgacccattgagccttgctgatgacccatatgcttttgctgaacttaatgtgaacgaactgactaacggccgattgtacatgttatatatatttaggatctatgtgcaagccatcgtcactgttaaggactccatatgtagaaccattgctgatcaccttgcatgcgccatcaacaacaatgtattggcttacacctccgacgtcggacacggaaag

SEQ ID NO: 30524 - DNA, 543 bp, Glycine max
  Clone ID: PAT_MRT3847_127566C.1
ggctcgagcggatttttcttttactatagcacctgtagatggtattggcttcccagagaatgaatttgtactagaagctctgtccctccttcagcagcttattgtgcaaaatagtagtttgttagttagcttgataattgatgatgaggatgtcaactctattttcagcaccattgcctcttatgagacttatgatgctattcctgtgcaagaaaagaagaaactacatgctattggtcgtattctgaatattactgccaagactaccatttcttcttgtaatgctgtgtttgaaagtcttttctccagactgatggataatttgggattttctgttaggtttccaaacagtgatattcccccctctcagagagtcaagttcggattcctttatgtctgcattgaactacttgcagggtgcagggaattaattgttgggtctgatgaaccagctctgcaatatgtttttgagcatgagacatgttgcactatgcttcatcgtttttcaaccccattatttaatgcctttggttcagtcttggc

SEQ ID NO: 30525 - DNA, 273 bp, Glycine max
  Clone ID: PAT_MRT3847_127567C.1
ggaaaaaatagttatatgaatgatataactgtacatagtattatggaattttagttgtattagtagtttgcatcttcaagcttgcaattcatgtatattgcaaatgattgatagcagaaatctccccctgcccaatcttttgcaggcgagaaaacttgaagctcagttggatgagcacatgaattcttatcgtaaattggtttctgctaatgtttctacaaaagctgacattgcagagagtgatctatggtcttggattgagcgtttactaaa

SEQ ID NO: 30526 - DNA, 280 bp, Glycine max
  Clone ID: PAT_MRT3847_127568C.1
gtttcgaaagcttcccgaaagtcaatttctcgcgcaacgccaaatcaacaaacaaactcccgccaataccaagcgacatcagcccgcggaggctcttacgaaaacaactaagccaataccattacaaataagcaataatgggtctcatgtggactaaaggcttcggcggaaagcacgctggtaagacatcctcttccttcaatgcacaactgccatgtttaatggcgggcttgatgattgtgctctcgatacatcacacgaacttttccattgaaagcac

SEQ ID NO: 30527 - DNA, 361 bp, Glycine max
  Clone ID: PAT_MRT3847_127569C.1
aattcggctcgagatagtgccaaaaacagagggtttcttgttagggacggtgggattcctcctctcgatgctctttcttaaactgggaatgttcgaactaaacacaaggcttggacacttcttacatatttgaaggaatcaagacaagaagcgagattttcttcaagttcttaaaccagagattacattgctacttgggaagatggtaattatacaatggaattgggtggtgtatatataacggttttgatgggttgcaccatgtgggtaagatacttggaattggaaccgtgtttattgaaattagaaaaactaacaatcttttaactggccctttaaaaggaaaaaattaacttgggtt

SEQ ID NO: 30528 - DNA, 227 bp, Glycine max
  Clone ID: PAT_MRT3847_12756C.1
gtgtgatctttccgagaatgatcctcaagaacatccgttacaacaccgcaacaaagccactcaaaaccactcacccatccctctctcctgtcaccgctaccgcatcactcgacaagaagccgtcgtctcctgctacggatgcttgggcgatatatgcccaagcattcgtaacaacggagacggcggtcctgaaacaggaggacactgagcatatgatcgcgacggag

SEQ ID NO: 30529 - DNA, 432 bp, Glycine max
  unsure (1)..(432): unsure at all n locations
  Clone ID: PAT_MRT3847_127570C.1
ttgggaaatttgatttttaggattaggagtttgtaggttcctgtttacccaatggcatctgatttttttcaagtaatagttgttaaagatctagatgtgagatttgacgagtgattatttaagtattgttggaaattgctatttaaattttctctctttgctcccctctattattttgccttttatttacattctgattgggaaagtatgttctgttagttactgttcaatcccatagaacagctgttgaatgtgtcctttttcttttttgttatcttcaacaatataattttatgaagtatgctgagaccctaatgttgtttacagtgataatattgtgatgctattcagtactcatttcataatatagctgncttttcttttctttttctatactgataattgcttgctatggttgtggtgcaagtgcag

SEQ ID NO: 30530 - DNA, 648 bp, Glycine max
  Clone ID: PAT_MRT3847_127571C.1
acgtgatcaataactaaattgatattccgtagagctttcattctgtgtgaacactctagttgctaacagatgcattaagttgtaggtatttaattgtccccagttgagagaggtttccttggagttttcttgccaagagaatgatagtacggatctcaaaactatgattgaaggtttgggaagaagttgtctgagattgcaaaacatacatatagcttcaatatggctttcacactctgccgtgcttgctcttacagctgctcagttgagggggctgcgaatgctttctctcgttcttggatccgaaatcactgatgcatctgttgctgccattgcctcaagctatccaaatcttgaattgcttgatctcagtggatctggcattagtgacagtggcattagtatgatttgcaatgtgttccctgatacattgacaagactccttcttgctctttgccctaatgtgacttcaagtggtattcaatttgctacgtttcagttgccacacctttgaattatggactgtggcatgaccatatgtgatcctaatatgcaaaatccaactgcggatgaaaacaactgcaaattgcaagaaacatctgcctctaatgtacactttaccaaccaaaagctaatcatcaagcatag

SEQ ID NO: 30531 - DNA, 402 bp, Glycine max
  unsure (1)..(402): unsure at all n locations
  Clone ID: PAT_MRT3847_127572C.1
aaaagctcatcgccattgcaattggcgagacctgttgcaatttgctctgaaaagccgctgctcccgctgctgctatgctgttctgctgctctgctacgctgctgctctgcaaggctgaccctggcctggccaactcgtgaccagctggcacgaaatcgccattggtgctggcctgtccactgccacgtggaccatccatggaggactcgccattgctgctggcgggttgccttcatcctggaaatacttttagaacagacccatcctggtaatctgttgcaaaaccaaccttattagggcaatttgccggtttcttagctttttccttttccaggcatattcctattcccctttcctttactcattacaatgcttgctctnttgctatgactaacgacctta

SEQ ID NO: 30532 - DNA, 762 bp, Glycine max
  unsure (1)..(762): unsure at all n locations
  Clone ID: PAT_MRT3847_127573C.1
ccacgcgtccgacgcaaaacaaggcccacccctctctctcttcattctaacttctttaattcctttccatgactcgcctcaggcgactcggagccgccgtcggagcggccatggccactgcatacggcggcgccatcctcgtctccactccggtctctgccagcgaccacagcgtcggagggtcgcacctcgccgccgttcgggagaagatccacgaccccttcgccgtcgtgccggcgagagaggtccagcggtcggcgctgaccggcgccagcgccgcgaaccctctagacatgctcgtcatcggcggcggcgccaccggctccggcgtggcgctcgatgctgtcacccgagggctccgtgtcggtctcgtcgagagggaggatttctcctccggaacttcctctcgctccaccaagctcattcatggaggtgttcgttacctggagaaagctgtctttaaacttgactatggccaactgaagttagtattccatgcacttgaggagcgcaaacagcttattgacaatgcaccacacctatgccatgctttgccttgcatgacaccttgttttgactggtttgaagtagtgtactactggatgggcttganaatgtacgatttgntcgcaggagcacgactcttgcacttatcgagatattattcctgcaaagagtctgttgagctttttcccactctgggcaaaggaggaaaaggtagaagcctgaggggcacagttgtgtattatgatggggcagatg

SEQ ID NO: 30533 - DNA, 202 bp, Glycine max
  Clone ID: PAT_MRT3847_127574C.1
tgccttaacacgaagaccgagggaacacatgcaatacagaagcgcgaataacactcttcaccagagatcaacctgcattgaacagctatagcgatgataaggctcttgacgaaaccatgctaagatggctggccaacggacacaaagacccagactggcaagggaggacgattcttgctcaaaatggtcacggagtgggctt

SEQ ID NO: 30534 - DNA, 202 bp, Glycine max
  Clone ID: PAT_MRT3847_127575C.1
tcttcgattaatcccgagagcagaccccactatcggcggtcgctccttttttattttctttttaccaccaaaagctttattattaaacaaaggggccattaatttaatagttccttacttacaatatcaatattcaattcccacccattctatgcaattttaatttaactacacatacaaattttaactatcgatttattta

SEQ ID NO: 30535 - DNA, 874 bp, Glycine max
  Clone ID: PAT_MRT3847_127576C.1
cagctgacaatgtattgcaagcagcaaaaattcaaaacaatcaagcagcacaaggcaccatattgatgagcagtacagactctggattctctcaacagtttattgatcggcaaagtaatcatggagtcaacagaaaatgccagttcttatttcaatcccattactcaaaagtctacttcgtatgcagcatttaatggtgcatccaatgacttttcagagcagtttatacctggagctaaacctctaggattgagctctcaattagtggtactacctacacctggcaattttagtcactcgactcatgtaaccaatggtgagctgaatgacaggaacaaaaatccccatgttacaaaatcagcctttggatttcctttcttgcagccaactgtgaatgaacaggccaaaacatcttggtatagtccctacagaagttcaccatcgtggttgtcaatctcaacagatgaaatgctaccagggaccttttctcggcaattttctgcttcaagtagtcaaaactttcctcaaaatctgtggggaaataatttcactacgccatttgtgaatcattcagcagaagttcgctttccttctaatcatctgacttcttctctaggtcccatgcagacgactcctctttctcgagtatcaattggtcatcctctacatgttccggttacaccctctaccataaatagtgataatataaacataaataaggtcgctgacagattgaagttcgatgaccatcagctgtgcacaaataccagaaagagacctgcaggaccagcaaatcttgatgattccagaaaacctaccaagttactgaatatgcgagtgcaagaaaacttcagtcgtatgactaggttgcctg

SEQ ID NO: 30536 - DNA, 890 bp, Glycine max
  unsure (1)..(890): unsure at all n locations
  Clone ID: PAT_MRT3847_127577C.1
tccatttccacatcatccaacccgattacctgtcactgagttacaatctagagagagagaagatatccaccgacctaattcttcagatatgtgttccagtcactatgtcccgccacttaattcagagttgaactgtaagaaaaactcgttcgttgaacagaatcaatgtgaccgagtctggaatcacaatggaaatggggtggtttctctgaaagaaggttcacatcatatctcaccaagttccagccaaccaacaatgaggttgatgggtaaagatgttccaattggtagaagcagccaagagatgcaacaatttgcgggagatgtttggcctgatgaggaatccagaagaaggaattattctgaatatgctgctttagatcactctttattgggaagaagttctaagcagaattgggcatctggttcacctttacaaatatcagctgacaatgtattgcaatcagcaaaaattcaaagcaatcaagcagcacaaagcaccatattgatgagcagtacatactctggattctctcaacagtttattgatcggctaggtaatcatgtatctcaaaatggaagtcttggagtcaacagaaatgccagttcttatttcaatcccattactcaaaagtctagttcgtattcagtatttaatggtgcatccaatgacttttcagagcagtttatacctggagctaaacctctaggattgatctctcaatcagtggtactacctactcctggncattttagtcactcgcctcatgtaaccaatggtgagctgaatgacnagaacacaaatccncatgttacaaaatcagnctttggattttctttcttgcagccaactgtgaatgaacaggccaaaacatcttggttcatagtcc

SEQ ID NO: 30537 - DNA, 1370 bp, Glycine max
  Clone ID: PAT_MRT3847_127578C.1
cttatattacggacgctctgagggacgcgtgggcggccgcatgggctgatcataaatcacatagctagttgtttaaagtgagagaaaaagaaagaagaaaatggcaaactttccagttgttgacatggggaaacttaacaccgaagagagagcagcagccatggagattataaaagatgcctgtgagaactggggtttctttgagttggtgaaccatgggatatccattgagttgatggacactgtggagaggctcacaaaagagcactacaagaagactatggagcaaaggttcaaagaaatggtggccagcaaagggcttgagtcagttcaatcagaaatcaatgacttggactgggaaagcacctttttcctgcgccatcttccagtctccaacgtttcagacaactcagatcttgatgaagaatacaggaagacaatgaagaaatttgcactggaattggagaaacttgcagagcagcttctggacttgctgtgcgagaatctcgggctggagaaagggtacctgaagaaggtgttctatggatcaaagggtccaaattttgggactaaagtgagcaactaccctccttgtcccacccctgatctcatcaagggcctaagagctcacactgatgctggtggcataattctactcttccaagatgacaaggtcagtggattgcagctcctcaaggatgatcactggatcgatgtccccccaatgcgtcactccattgtcatcaaccttggagaccaacttgaggtcatcaccaatggcaaatacaagagtgtgatgcaccgtgtgattactcaaacggatggtaacagaatgtccatagcctcgttttacaatccaggcaatgatgcattgatcgctccagcaccagccttggtgaaggaagatgagactagccaagtttatcccaagtttgtttttgatgattacatgaagctctatgctggccttaaatttcaggccaaagaaccaagatttcaagctatgaaggccacggagtcatccaacattaatttaggccccatagcaacggtctaagcctcagattgaagcattatattaattataatatatatgttaactgagattaccggtatctttctttgctatggatgcgccgttatgcagcatgtgtatttcacaaggaactctctctctccctctccctctccctcatgattcttctttggcttattatggtagtttaaaaataaaacattagcttgatatggtagtttatttgtgtaatgtatgtatgtgatggttaagttggtgtcatgtattgatgcacttcttttatcagaaagtaacccgatcttagccatttttcaaaaaaaaaaaaaaaaggagg

SEQ ID NO: 30538 - DNA, 1918 bp, Glycine max
  unsure (1)..(1918): unsure at all n locations
  Clone ID: PAT_MRT3847_127579C.1
gaaaaaagaaaaaagaaaaaagacacgcagcgcacaagttaaaaccttctcaaactctctttcgtcaaaacgcgtccattggatccatcaacgcacgccaaacatctcgtcttttcgcgtttccgttggtggtttttcgttttcctcagtgttccttcagtgattttcttctgggtctgtgaaaagctcggtgctttgtttcggaagcaccgacattggggaactgtgtgatggtgaaagcggagattgagaaaaagggttgcagcacaagacgatggctttggcttgtgatggctctcgtcgccgtgtttgttgccatggtcatgtcttccagaacctctccaaaagctctgtttggagccattgatagagcttgtccgtgtgctcggggcacaccgaagtacagtggcatggtggaagattgttgttgtgattatgagaccgtggatcgtcttaatgaagaagtgttgcacccctccctccaggagctcgtgaagacccctttctttcgatattttaaggtgaagttatggtgtgactgccctttctggcctgatgatggcatgtgccggttgcgggactgtagtgtgtgtgaatgccctgaaagcgagttccccgaatcatttaagaagcctgaccatcgcctttcaatgactgatcttgtttgtcaagaaggaaaacctcaggcagctgttgaccgtactttagacagtaaagctttcagaggatggacagaaatagacaatccatggacaaatgacgatgagactgacaatgatgagatgacatacgtgaatcttcaactgaatcccgaaagatatactggttatactggtccatcagcaagaaggatatgggatgctgtctactcagagaactgccccaaatatccatctcaagagttatgccatgaggaaaagattttgtataaattgatatccggtcttcactcctccatatcaattcacatagcttctgattatctacttgatgaagccacaaatttgtggggccaaaatcttactttgatgtatgatcgagtcctaagataccctgatcgtgtcagaaatttgtatttcacttttctctttgttctgcgagcagtaaccaaagcttcagattatctggaacaggcagagtatgataccggtaaccccaatgaggaccttacgacacaatccttgataaaacagctactttacaaccccaagcttcaagctgcatgtccaattccgtttgatgaagctaatttgtggaaaggccaaagtggacctgagctaaaacagaaaattcaacaacaattcagaaacatcagtgcaatgatggattgtgtaggatgtgagaaatgtcgattatggggcaaacttcaggttcttggtctcggaactgcattaaagattctcttctctgttgatggtcaagaaaactcaagtcatacactgcagctgcaaaggaatgaggtaattgcattgacgaaccttctcaatcgactctcagaatctgtcaaattcatccaagaaatgggacctacagctgaaagaatcatggaaggaggacatttttctgctcatacaagaacattgattagctcatggaaaaaaatttggtcctatgtatctaaaacttaggctataattggtgacagttctgtttttaattattcaaattactagagagactagacataggaaaaccaccgtcgtggtttggaaattttctgagggatgtgaaacaaatgtacttagaatgtctcaaaattaaaaataaacacaaggagaaaatttactgagagtaatagaagatatatttttacttgggaatgagatgtaatccccttatccccactaattntggtgaacagttctttttgtacaatttttttttttttgtattcaattagcacactcctttccccttg

SEQ ID NO: 30539 - DNA, 234 bp, Glycine max
  Clone ID: PAT_MRT3847_12757C.1
aacatgctctgctttcattcacccttggtgtgaaacagatgatttgttgctgtaacaaggtaaattatgtgttgaattttaaggcccttatgtctcctttacatcacacaatatcttcattccttttgtgtgttcatatgagattaattagtgttctcttctcattttgaaacagatggatgctactacaccaaagtactccaaggccaggtatgatgaaattgtgaaggaagt

SEQ ID NO: 30540 - DNA, 166 bp, Glycine max
  Clone ID: PAT_MRT3847_127580C.1
tgtcttgtgtatttgaaattaacaagtagcaaagatgtttgtaatcttcggtggaaataagggtcacaatataaagggtaacttggtgattatgctaaagaatgtgaatgatatctataacattaccagtgtcaatgctaccattggaatcggcatatacatcatt

SEQ ID NO: 30541 - DNA, 489 bp, Glycine max
  unsure (1)..(489): unsure at all n locations
  Clone ID: PAT_MRT3847_127581C.1
atttttcatgtgtgagtcgaactcgagtggtgatggagacaattttacaagcaacgtgaaaaggctcataattgatttggtcaccatttgaaggaagagagtgtgaaagagtgaggtcagagttgccagtagatgaagacaatcgtcatcagttgcagctgcaaaggaatgaggtaattgcattgacgaaccttctcaatcgactctcggaatttgtcaaattcgtccacgaagtgggacctacagctgaaaggatcatggaaggaggacatttttctgctcatacaagaacactgattagctcatggaaaaaaatttggtcctatgtatctaaaacttaggtaacatgctctcttatgagtatttgtcatatttctcatttgttgtaccaaactgagtattacatgtttgcaatttgcaagctataaataagaaccaaattttaccgattaaaaaaaaaaaaaaaaaaaaaaaaaaaaaaaanaaaaa

SEQ ID NO: 30542 - DNA, 1897 bp, Glycine max
  Clone ID: PAT_MRT3847_127583C.1
ggctcgaggaaaaaaaaaaaacgcagcacacaagttaaaaccttctcaaactctttcgtcatcagcgtcaaaacgcgtccattggatccatcaacgcacgccaaaaatctcgtctttttgcgtttccgttggtgggttttcgttttcctcagtgttcttcagcgatcttcttctgggtctgtgaaaagctcggtgctttgtttcggaagcaccgacattgggtaacagtgtgatggtgaaatcggagattgagaagaagggttgcagcacaagacaatggctttggctggtgatggctctcgtcgctgtttttgttgccatggccatgtcttccaaaacctctccaaaagctctgtttggagccattgatagagcttgtccgtgtgctcggggcacaccgaagtacagtggcatggtggaggattgttgttgtgattatgaaactgtggatcgtcttaatgaagaagtgttgcacccttccctccaggagctcgtgaagacccctttctttcgatattttaaggtgaagttatggtgtgactgccctttctggcctgatgatggcatgtgtcggttgcgggactgtagtgtgtgtgaatgccctgaaaatgaattccccgaatcatttaagaagcctgaccgtcgcctttcaatgactgatcttgtttgtcaagaaggaaaacctcaggcagccgttgaccgtactttagacagtaaagctttcagaggatggacagaaatagacaatccatggacaaatgatgatgagactgacaatgatgagatgacatacgtgaatcttcaactgaatccggaaagatatactggttacactggtccatctgcaagaaggatatgggatgctgtctactctgagaactgccccaaatatccgtctcaagagttatgccaagaggaaaagattttgtataaattgatatctggtcttcactcctccatatcaattcatatagcttctgattatctacttgaggaagctacaaatttgtggggacaaaatcttactttgatgtatgaccgagtcctaagataccctgatcgtgtcagaaatttgtatttcacttttctctttgttctgcgagcagtaaccaaagcttcagattatctggaacaggcagagtatgatactggtaaccccaatgaggaccttacaacacaatccttgataaaacagctactttacaaccccaagcttcaagctgcatgtccaattccatttgatgaagctaatttgtggaaagggcaaagtggacctgagctaaaacagaaaattcaacaacaattcagaaacatcagtgcattgatggattgtgtaggatgtgagaaatgtcgattatggggtaagcttcaggttcttggtcttggaactgcattaaagattctcttctctgttgatggtcaagaaaactcgagtcatacactgcagctgcaaaggaatgaggtaattgcattgacgaaccttcttaatcgactctcggaatccgtcaaattcgtccacgaagtgggacctacagctgaaagaatcatggaaggaggacatttttctgctcatacaagaacactgattagctcatggaaaaaaatttggtcctatgtatctaaaacttaggtaacatgctctcttctgagtatttgtcatatttcccgtttgttgtaccaaactgagtattacatgtttgcaatctgcaagctataattggttacagttctgtttttaatgattcagattactagagagactagacataggaaaaccactgtcgtggtttggaaattttctgagggatgtgaaactaatgtacgtagaatgtctcaaaattaaaaataaacacaagtaaaaaattaacagagtaatagaagatatattttacttggg

SEQ ID NO: 30543 - DNA, 368 bp, Glycine max
  Clone ID: PAT_MRT3847_127584C.1
ctctcatcacttttatctgtcctcttttattttgtgccgtttcccaggtcttcttggaaaagaaaagtcgttgtgcaggtaccttcatgctccaactacttccccttgcttcctcgtcattatcatcatctgtaatttcgtattagcgtacactacacacactcctcttcctagctgccttcacagcaaaatactgaccccagtggaggaagtgatggaagcagtttacaggttgaaacctcttttgccttgtctagaggaggaagtggttagagttgggaacgctactacttctgagatgcgtgttggatcaacggctaattgttgttacctgcagctggaagctcctcaacagaataatgtaaccg

SEQ ID NO: 30544 - DNA, 502 bp, Glycine max
  Clone ID: PAT_MRT3847_127585C.1
ctttttttttttttttttttttttttttttttttttttttttttttttttttttttaaaaaaaaagggggctattctggctaaaagaaaaaaaaaccgcggccttccccagggtaaacataaaaaaattcttttaaagggagaaaggggaaaaaaaaaaaaaattctacgggggcccactttggaaaagaacccaaaaccataagttttttttttcaagttcccacccgagggccaatttttttttcttttttccctttttggccccttttttttccttaatctctaagggcccccaccgaaaacaaccagtgggccgccgggggagtttttcccccttcccttttttcttaaacccaaacccaacacctccgggcaccaccatggttggccaccaccggaacccacggttcctccgtaatctccattttttgccacggaaaaacccatggtttctccagggccataaagggttttaaggtaaccaccaaccaatccacctt

SEQ ID NO: 30545 - DNA, 1039 bp, Glycine max
  Clone ID: PAT_MRT3847_127586C.1
acgagagaaaattcaacaacaatttagaaacatcagtgcattgatggattgtgtaggatgtgagaaatgttgattatggggtaagctatattatatatcttcatatgtccttttacttgtatctgcacaatgcatacaattcatttctatattattatatatctttctagcttcctccatattccacaataccttttgtgtaatattattgaaggaaagcattttcaattttttaaggacacctgcactttttataatattgtttcaatacttccttatccttttcaatttatttaattattgaatggtttcagttcaaattatttaattaattcctttcacccattttttcttaattctttttcaaaataatttcttgatatttttttgttaacttaatatttttcatgtgtgattcgaactcgagtggtaatggagacgattttacaagcaacgtgaaaaggctcataattgatttggtcaccatttgaaggaagagaatgtgaaagagtgaggtcagagttgccagtagacgaagacaatcgtcatcagttgcagctgcaaaggaatgaggtaattgcattgacgaaccttctcaatcgactctcggaatccttcaaattcgtccacgaagtgggacctacagttgaaagaatcatggaaggaggacatttttctgctcatacaagaactgattagctcatggaaaaaaatttggtcctatgtatctaaaacttaggtgagccagtctatgatgatgatcatgctggagatggagaggcttaacctttcttaaggaaatgctttgatagatgtgacattggggcatgagacttttaattcacttgttataattccatgaaaagtgtagttttatgatttccattgttagttgaattctttttcataagcttgggcgatcttgttttgagttaagacaattcgattttcttatttatgctagttctatttcgatacttgagaagtgaatgtgaaccttttagccttgaaaatatttttataaaaaaaaaaaaaaaaa

SEQ ID NO: 30546 - DNA, 1637 bp, Glycine max
  Clone ID: PAT_MRT3847_127588C.1
cagaatccttacacaccatgtgacacatcttttttgcattttgaaactggagaaaaccctagaaaccaaatcctctctcgcattgccatctgcctccataatgataacactatgcttgctacaatcatggcagacatcatggtaacaaaggagatcgaggacaccgcgctacgtctatgcgtcgatctctccactctcgatctcgacgccattcgcctccctcccggcgaagattgcggcctcttgagccaccttttctcatgcttgcagcctcttgagcaagttctcgaaggagaaacgtgcttatgctgattccaccgttggaattggtggaaaaatagaacctaaaaaagcgagtaccaaggatttgttagcaagcttacaaaactcatatggggccttaaagctaagcgcttctgccatggaatttcttccccagcttgtggaaaacccctgaattaagaattggagatggtgagggatcctctggatctgaggcggtatgcgaaaactgaggacggtgatgacctaactcaagcattggtggaggaaatcatagagaaatgtcttggtttcgaagttgagcagaggagtttggtgattcgtatcaagagttatgccaagaggaaaagattttgtataaattgatatctggtcttcactcctccatatcaattcatatagcttttgattatctacttgatgaagctacaaatttgtggggacaaaatcttactttgatgtatgaccgagtcctaagataccctgatcatgtcagaaatttgtatttcacttttctctttgttctgcgagcagtaaccaaagctttagattatctggaacaggcagagtatgatactggtaaccccaatgaggaccttacaacacaatccttgataaaatagctactttacaaccccaagcttcaagctgcatgtccaattccatttgatgaagctatttgtggaaagggcaaagtggacctgagctaaaacagaaaattcaacaacaattcagaaacatcagtgcattgatggattgtgtaggatgtgagaaatgtcgattatggggtaagcttcaggttcttggtcttggaactgcattaaagattctcttctctgttgatggtcaagaaaactcgagtcatacactgcaaaggaatgaggtaattgcattgacgaaccttcttaatcgactctcggaatccgtcaaattcgtccacgaagtgggacctacagctgaaagaatcatggaaggaggacatttttctgctcatacaagaacactgattagctcatggaaaaaaatttggtcctatgtatctaaaacttaggtaacatgctctcttctgagtatttgtcatatttcccgtttgttgtaccaaactgagtattacatgtttgcaatctgcaagctataattggttacagttctgtttttaatgattcagattactagagagactagacataggaaaaccactgtcgtggtttggaaattttctgagggatgtgaaacctaatgtacgtagaatgtctcaaaattaaaaataaacacaagtaaaaaattaacagcgtaatagaagatatattttacttgggaatgagatgtaatcccttatccccactaattttgtc

SEQ ID NO: 30547 - DNA, 478 bp, Glycine max
  Clone ID: PAT_MRT3847_127589C.1
aaatgacttgacttcacacacttgatcactgttcagcattcacacttcgcagttcacatacagacacactgacttcacttacaaattcccaatccgacacacccccaccttcctttctctttctttcattctactgttcactctctcatcacttttatctgtcctcttttattttgttccttttcccaggtcttcttggaaaagaaaagtcgttgtgcaggtaccttcatgctccaactacttccccttgcttcctcgtcattatcatcatctgtaatttcgtattagcgtacactacacaccttccttttctagctttcttcacagcgaaatactgaaaactatattgactatatatacagacccgagttgaggaagtgatggaagcagtttacaggttgaaacctcttttggatggggtaggagttgaagtggttagagttgggaacgctactacttctgagatgcgtgttggatc

SEQ ID NO: 30548 - DNA, 666 bp, Glycine max
  Clone ID: PAT_MRT3847_12758C.1
cgcccccaaacccaaactacactctccacacacacacacacactcaccgccgtatcgttcacactgaaccaatccaaaccccactctctctctctccgccgcaaacgacccttctccggggcggcgccaccgtacaacccccgatttaactaaaggagcaacagaaggagctgcttggttacaaatggcggccaccgcaagcaacaatgacgtcgccgccgccaacgacggtcccgtgatgagccttatcaacaagcgcctccgcgctctccgcaagaagctgaaccgcatcctcgccatggaagaggccgtcaccttgggcaagcccttgaacaaggagcaggaagaggttctacgctccaaaccctccgtcctcgccctcatcgatgagctcgataagctccggcaacctctcgccaccgctctctccgaagagctccaaatcaacggcacgtcttctcaaaaccctcgccacgagaccgagaccgaaaacgaaaccctagctgagagctccggctcgactgagccgaactcgaactcgaggaacgacgtcgttgtggaggacctgcttaatttgctctattttggttcacttttcgatgtgaagagtgactttgcgtccacgatgcttaccaggacgcacgagcgtggctgctgcttgaccta

SEQ ID NO: 30549 - DNA, 134 bp, Glycine max
  unsure (1)..(134): unsure at all n locations
  Clone ID: PAT_MRT3847_127590C.1
acagccangacaacgcgcaagcacagcncacgnattcggctcgaggctctngnncaacctgaangggtctggacctngngnctcagcncacaggncatngttacnntggngancagctngaagaangttantng

SEQ ID NO: 30550 - DNA, 763 bp, Glycine max
  unsure (1)..(763): unsure at all n locations
  Clone ID: PAT_MRT3847_127591C.1
acacaagctcggaagctcattcggctccggctttttctctagtgttcttgtgctaaatccagcataggcaacatgatcttcaggacactcctattcctcctggcctttatggtgacaaattcagttgctgtgatggacaagaagacatacataatacacatggacaagaccaagatcaaagcctcaatccattcccaagacaacacaaaaccttggttcaaatcagtcgttgatttcatctctgaagcgtcattagaagaagacatagcccctcagcttctttatgtttatgaaaccagcatgtttggttttgctgcccaactttcaaataaacagcttgagtacttgaaccaaatagatggtttcctttcagccatacctgatgaactattaaaccttcacacaacatacagctcccattttcttggcctacagaatggaaaaggactttggagtgcttctaacttggcctcagatgtgatcataggagtccttgatacaggaatatggcctgaacacatcagtttccaagacacaggtttgtccaaagtaccctctcgttggaaaggtgcttgtgaagcaagcaccaacttctcttnctcaagttgtaacaagaagcttgtaagtgcaagattctttctacaagggtatgaaaaatttgctggaagaatcaatgaaacattggactatcgttccgcgagagatgcgcaaggacatggaacacacacagcctcaactgcagctggtaacatggtgagcaatg

SEQ ID NO: 30551 - DNA, 301 bp, Glycine max
  Clone ID: PAT_MRT3847_127592C.1
ccctaccttgacattaagactttctttaagaagaaaaaagaggactaggggtttagagcccgaaattttcctacttgaccattgggatggggaacacctaatttaatacaggatcatcctccccacttaccagtgtgggttctttaaagggagtgatccgtgctcataactggtgacttaaaaactagttattctatgtcccaacactagacgctgccaagaacaatggagatactactcttgttgtcggagatagaaattatctaaatacaaccattggatcgttggatgttaaaccatt

SEQ ID NO: 30552 - DNA, 541 bp, Glycine max
  unsure (1)..(541): unsure at all n locations
  Clone ID: PAT_MRT3847_127593C.1
cactgtattaaattgagttaactcttaattaagtagtctccattatttcttttattgaagaccaagttttatcagtttctaatatcttcaatttatttaatttatagtaatagtaaaaaacatgtttgcatagtgacaacttgacaagtattaagagatttacaaagtatctacatatttatctgatgtctacaatgattttgaagctgtcatacctgtatggataagaatcccaccacatcccatgcacagatgtatcattgattggtaaaagttgaactaaatggaaaccagttgctacagcccagtcaactagcaacttaaggtcaagaaactctccaacacccagatcagattccgacctaatagaaaacattgggattgctacgccagcaccacgccaaggtatttcctagcaaagaaaaccaacaacttagaactgtaatactcaaaaataaaaaacacaatacactgataatgtaatttcagcaacttacccgcatcatgccatctgaaagaaaatatattntgcctcactcct

SEQ ID NO: 30553 - DNA, 483 bp, Glycine max
  Clone ID: PAT_MRT3847_127594C.1
ggctgtcgcccttttttttttttttttaaaggttttggctcggagtgaatttcttggggattcagtaactaaaatcttgtatcccatctagctaaaattggcttcttgccattgtggagaaattttctcaactcatcttaatcgccaatagtcatcatgatcatgaatgagccttgaaagccttgttttgggagcaagggatcgtatggcttggaatcattagaagattgggaacatgtcctttggtgggcgaaagaagaaacaacgttgtaatggaccaaactaggattttttttgaggaaaccacaatgcattcatccacaccattatgaactcccgaaatattgtcgagggggcatgagtcaatgcatctatttcttgccagccttttgggcggtcttggtaaccttgccggtacccttgttagccttggcgacggacttgatgacaccgacggcgacggtcttgctcatgtcacggacg

SEQ ID NO: 30554 - DNA, 413 bp, Glycine max
  Clone ID: PAT_MRT3847_127595C.1
tctgtgtagaatgcctctattattgtctgtcggctacacacagcgatagatagatagttgagaagagaagcattcataggcgccaattgtgagtgagagagaaggtgatggagaagctactgttccatttacttgggagagatagagagagagagatctggtgcttgaccataactgtcattgctacggttatctcactgagcacatgtcgacacgaagggcatcgccattggaatcgcatacaaaatgcactcaccccagttcaccaccattttcataaagcttcactctaagctctgctaagagatgagagcaggaaagaaagcgccaaagtggttgaatctcaggccaagttcttgatcccggactcaatcaacggcttgaatttcgacgtaacggcgcacattaagatg

SEQ ID NO: 30555 - DNA, 1747 bp, Glycine max
  Clone ID: PAT_MRT3847_127596C.1
gtttggagactgccgtgttgctggctttgattggtgccaattccactgttgtggcggcggggctcttgcatgactctctggatgatgcttttctgacttatgattatatagttgggatgtttggcgctggtgttgctgatttggttgaaggggtttctaaactgagtcacttaagcaagctggctcgagaaaataatacggctagcaagtcagttgaagcagaccgcttgcatactatgttccttggcatggcagatgcaagagctgtcctcgttaaattggcagatcggttgcataatatgatgacactagatgcattgccaggggccaagcaacagaggtttgcaaaggagactttggagatttttgcacctttggccaatcgcttgggaatttctacttggaaggaacaattagaaaatttgtgttttaagcatctcaacccaagccagcatgaggagctttcatccaagcttgtggaatcgtacgatgatgcaatgattacttctgcaatagagagattagagcaagcacttaaagatgaaggcatttcttataatgtcatttctgggcgacataagagcttgtatagcatttattgcaaaatgttaaagaagaaacttaccatagatgatatccatgacatttatgggctgcgcttgattgttgacaaggaagaagactgttacaaggccttgacagtagttcatcgattgtggtctgaggtgcctggaaagctgaaagattacatatgtcgtcccaagttcaatggatatcaatctctgcatactgtggtgatgggtgaaggcaaggttccccttgaagtacaaattcggaccaaagatatgcatttgcaagcagattttggatttgctgctcattggagatacaaggaagatgattgtcagcattcttcgtttgtgcttcagatggttgagtgggctcgatgggttgtcacctggcagtgtgaagcaatgagtagagattgttcatctgttggatatgctgattcagtcaagcccccatgcaagttcccttcacatgctgaggattgcccatattcttacaagcctgattgtggtcagaatggccctgtgtttgttatcatgattgagaatgataagatgtctgtccaagaattcagtgcaaactcaacagtattggatttgttgaaaagatctgggagagcaagctctaggttgacaacatataggttcccattgaaggaagagttgaggccaaggctgaatcataaacccgttagtgaccccaatagcaagttgaagatgggagatgtgattgaacttacgccagccatacctgacaagtctcttacagaatatagggaagaaatccagcgtatgtacgatcgtgggctaactgtgtcaagcatgggaaccgctgcaagcaccatggttggctcaagaagttgacccgtgcttttggatttcacttccattccaacatgaaattatttagtgacagttatgtatatagaaaatatttgtacagaacaactgtgttactactttgaacttggctaacttgattcaattatgtgctgaatgattgattttatgtagttgatccaatggtcctgataaattaattacatcccacccactatgattctggagttctagttttatcctgagtcttgccgtcgtcaaatagttttatctataaggttggtatatgtctgatcttctcattatcgtctataaggtggtgattatgaacgcatgga

SEQ ID NO: 30556 - DNA, 1053 bp, Glycine max
  Clone ID: PAT_MRT3847_127597C.1
ttgtcgcgtgggcggacgcgtggggcaagacccatatggtatctttaacacagaagagtccattccaagggacattggtccttataagaacttggtcatattcacctctagctctatggatcccaagttcatctcaagtccatcctctataccattactaaggaagttaaggatcttgatgagcaatcttcaaacagttgacttgaaaagccttacaaaccaacagaaattagcattctggatcaatgtgtgcaatgcttgcatcatgcatggatttatccaatatggagtgccatctaccccagaaaaattacttgcattgatgaacaaggcaactctcaacgtaggaggcaacataataaacgctcaagcaatagagcatttcatattgaggaaacgagatatttctaatgtgaaagaggtacagcgaaagggtgaatgggaggagaaagaatcgtttgtccgtgaactttatggacttgagtttaatgatcctaatgtcacatttgctctgtgttgtggaactcgttcttctccagctgtgaggatatacacagcagatggtgttacagctgaattggagaaatcaaagctagactatctacaggcttcaattctggcaactagcaccaaaagaataggattcccagagctccttctcagaaacatgcttgatttttctgtggacacagactcactggtggagtgggtatgcagccagttacctacatctgggactctaaggaaatcaatggtggattgctttagaagccacagtaatgtgaagccttctaccattgttgaaaagataccctatgactatgaattccagtatttgttaacaatataaatgtacatttcttcttgctcttaatcccccataaaactttttcagtatacaaaatatagaagggcagaattgccatggtcccatgttgaggtataattattttgttacatagaatttaaagccttattgttattataatatcaatttgactttttattcgaacaaaagtcatatgctatgaatattgatccacttcttttcaa

SEQ ID NO: 30557 - DNA, 368 bp, Glycine max
  Clone ID: PAT_MRT3847_127598C.1
atgatccatggccagcttacatgggtgaaagcacaaacgcctaatatctaatctgtactctgaagcggtgatgctttattctgtcaaacaccacattacctgtatctttggacactagcacccaacaacatctatgagactataacggcaatggtagatggttgaaacgatcctacgtggtacatgctggcgcatgttgcaacatcaggggccaagcataacgacctgctatgacttgaatacccataccaagctctctctttgttgcttacttcttgtaccaaaaatatcatcgggtgcaatgactactctaaggtgtatctaaacaatgtcattaggctgcactcaacagtgccatttgatcttag

SEQ ID NO: 30558 - DNA, 565 bp, Glycine max
  Clone ID: PAT_MRT3847_127599C.1
ggtttatttacatgaaagtgagaattatgttttgaatggattgcttttggaaataaaaaaattcaaaatgttagcttggaatttgtaaaatttgaaatgatacatattttatctatttatagattaattgtgtaagaggcaaatcaaatctaagtggcttaagaatttttgttacagtattttgtttactttggtaacatcatagttacttgagaaaagagattcacagcagtataatgatgtctaacggacttgaattcattaaatatcttttatggcataatttctatcacttcccttatagcatcttatggatgaacaatatttatttgaagactcagccatgacatcgccagctatcaaatccaaagtttgctttgtatctatttaaaactaacctgaattactattgtttatcttttcacttcaacctaaacaatgattgttcaaggtctcattctattcaccagttcttataattgagccattccattactcaagaaaatatctcattgcaatggggagggttatttttcttacaatagtctgaccaactgaaaattat

SEQ ID NO: 30559 - DNA, 332 bp, Glycine max
  Clone ID: PAT_MRT3847_12759C.1
aatcccaactaggctaggcgacaaagaaagaaatacgtggatcataggggggctaaacccaacctagaagcaaaaacctgtaatgataacaatgtaaacctaaaaatccaagatcttaatgctttgcttccaaaaggaggggtggaaagcttgaaccccttaaaaataaaggataatccccctcccgaagaaaaaataaaaaaaagcaaagtcctcttaaatttattccaccacacccataaaaggccacatgaatttcccccccccggctcatgggggaaggagccccccctattaagcatgtgttccccttaaaaaaaaatctccttttt

SEQ ID NO: 30560 - DNA, 113 bp, Glycine max
  unsure (1)..(113): unsure at all n locations
  Clone ID: PAT_MRT3847_1275C.1
ccggtccggaattncgggtcgaccccgcgtccggttcctttaacacttagttatgtgtgacaaataacatttgagcataagggatatatgaggtagatttatttttacacggg

SEQ ID NO: 30561 - DNA, 252 bp, Glycine max
  Clone ID: PAT_MRT3847_127600C.1
cgttctttttttttttttttgccacaccaacgaacacaagttgtattatgatgtcaagggaaacaattccttggacaataatgctacagcgattggatgctaaaaccggctgagacatcaaacactaaatatgtgtagacccacgcaaacggctaaaaaataccgtgacctataacatcacgtgtatactacctctctcctgtggctcattactgctgagcgcactgaactatctgagcaccaccatgcctt

SEQ ID NO: 30562 - DNA, 568 bp, Glycine max
  Clone ID: PAT_MRT3847_127601C.1
ggaattcccgggtacgacccacgcgtccggttggttcatcacagaacataatggaataccaacaacagaaacaacaatggaagaggtcacaaaggacaaaaccctcttcttcttcttcttctcacatcaacaatctcgatgatggttgtcttatgcacattttcaacttccttcctcctattccaggtatgaccccttttttctctctctctctctcttatttattctttgcccttcaatttttttctttaaaatctcaatctttttgcctaattcaaccataccctgatgtttgttttgtttaattttgctactttcatgtgtatttgtgggatttatggagcttaacctgcttttaagcaggtaatttgcaacatgaactaagttttgctttgattccccccccccccccccctccctcccctatttgtaaggattgtgactaattgctatttattattttatttttctgcattttgttgagttatgagagtgaaaagcttaaaatttgatgcttgaatcaagcgtatgtgtgttggggtatgatgtcaaaaattggagcctaaag

SEQ ID NO: 30563 - DNA, 191 bp, Glycine max
  Clone ID: PAT_MRT3847_127602C.1
gactgataagatcatgccacctctgtctacacctgtcggaggctctcgacactagagagcgcatatgtcatcgaacgctaacgattctcgttagacctctgcgagaaagaccctacttggcgaacgtacattgctgcgaaggaccttacgatcgagtacgaccggcaccattgactgcatatttgccggtg

SEQ ID NO: 30564 - DNA, 350 bp, Glycine max
  Clone ID: PAT_MRT3847_127603C.1
ttttctgctgtcagcccactgccgggggaccttgtggtcttaggtgcttgttatatccgcaacccctatgtttatgggggtaagcctatgcactttttaccctttttagaccccacaatgttgggatgcacagggccgccaaagaaatgatttgttttgtgtatgaattgttctgtacatttaatgttgctttaagagaagctgtaatctcggtgcttattatatagccttttttatatatgctataatgttaaatgcatacattatttgttaataatttacgcactgcctgccgtaccatgaaggaccaatactttgaattttctatattatgttttagatcaagtcca

SEQ ID NO: 30565 - DNA, 273 bp, Glycine max
  Clone ID: PAT_MRT3847_127604C.1
acggcgatgacagggggcccgcgctcgaaacctggatcaaccgcgatcacaggttgcctcaacgtataacccgatacataagcacttgttgctggacgataagaaaagggcaagaaaatcccactctgtggtggcccaagacttaagggatcgaaaattactccatgcgctggtcacaggctgcacgctgtactatttgttacacgactgggtgattggttgaaccctcttctgtttgatttataactctgtgctaaatttcaacttcaagcg

SEQ ID NO: 30566 - DNA, 522 bp, Glycine max
  Clone ID: PAT_MRT3847_127605C.1
gcgcgttgttgttttctgttggtgaggtgagtttctgttctttctctctcgcaaattcagttgagttgattaacactcgtttgttaatgtagtttgtttgtttttgtttagggtttaaaattaaggatttagggttagggtttaagatttagggtttaagaagtagccataagaaggctctattataagagtcaacagcaggggcttatttcaatggccacctgactgccgcttagagccaaaacggaaaaaaccagttgaagatccttgaaatcaaaccccctttttttcaagacacaatctctggtcaaattattattatgtttgttataattatgtagttacttgttggcactttagtcagacacgggtgtttgttgcttttttctcaaaacaaacaaccttttgcatggtgcctatatatattccggctattgattcacgattggaggaacctttctcttttgtggttctttcaaatttcaagcagctatatgttgttgttttgcaggaaccaaaaca

SEQ ID NO: 30567 - DNA, 269 bp, Glycine max
  Clone ID: PAT_MRT3847_127606C.1
gccatgtcacttgcactttttttgtgcatcaactcattcctcatgctgagccttacgcacgagccgtggggggagaattcattccatcccaattcgttaactaagttaattaacactacacactaaaccttggactttgattcgtttgcctccctccccaacaaacaccctcaaacaattccccacactattaacggttagcggctgagattgtaatctccgaaggcactaccgtccatggagcaagatgttgcattaataccattaac

SEQ ID NO: 30568 - DNA, 189 bp, Glycine max
  Clone ID: PAT_MRT3847_127607C.1
aaaatatatctcttacacatatacatatataactgatgttaatataacttaatacttccctcaaaacaaaataaattataaacaaaaacaacctattaaccttcttcatttcatatattacatctataatcactaaaatctaccttatcaaaaaatttaacacatatcaaaataaaaatcattcatatt

SEQ ID NO: 30569 - DNA, 949 bp, Glycine max
  Clone ID: PAT_MRT3847_127608C.1
cattggaccaacaacataaagtgattcctctgctgctgcttcttttccaagttctgcttgtagcatcacagacagatagtcaagattattctggcctaaattctcttacggaatcctggagtaacaagccacaaaattgggtgggtccagatccttgtggcagtggatgggatggaattcgttgcagcaattcaaaaattacccaattgagactaccaggcttgaatttggcaggacaactgtcttcggcaattcagtctttatccgaactagatactttggatctttcttacaacacaggcttgacaggaacaattccacaagaaattgggaacttgaaaaagctaaaatccctatcattggttggttgtggtttctctggtcctattccggattcaatagggtctttaaagcagctgacatttctagcacttaattctaataggttcagtggaactataccacgctctcttggcaatctatcaaatattgattggcttgatcttgctgaaaaccagcttgaagggactattcctgtctctgatgaccaaggaagaccaggccttgaccttctccttaaggcacaacactttcatatggggagcaataagctcactggtacaataccagaagaactctttaactccagtatgcatctaaaacacctgcttttcgaccacaatcaactagagggtggtattcctgtctcccttagtactgtgagcacattggaagtagtgcgctttgataagaatgcattaactgggggagtgcctgcaaacttaagcaaactcggaaatctaagtgagatctatttatctcacaataacctgaatgtgattctgcccgattttactggaatgaatagtctcacctatgtggacctgagtgacacatgattgaatgcttctaatattccttcatgggttacaactctgccaggactgac

SEQ ID NO: 30570 - DNA, 1101 bp, Glycine max
  Clone ID: PAT_MRT3847_127609C.1
tcctcggcgtccgtacggctgcgagaagacgacagaaggggaaaaggattaggggatagtggcaagcgaggaaggaagtgaagtttcaaggttgacgcaaagaattgaattgaagtgataagtattatatagcatgcaaagaaaatggtaaggtaaggtaagatcgatagcagaaaaggaaaaaatgacgatggacgatgatagctccatatatgtagggggtcttccctacgacgccaccgaagaaaccattcgcaccgtcttcaatttgtatggcgctatccttgatgttaagataatcaacgacccacgcaccaggggcaagtgctattgttttgttactttcacaaatcctaggtctgcaattgatgccatcaacgacatgaatggcagaaccattgacggccgtgtggttaaagttaacggggtgaggactcgtgggggcaggtcaaattttggcagagaacgttattactatcataatgatgagaggaatggagattgggatcgcagtagggatcgagaccgagattatgatcatgatagtaatgatagggatggatataggaatcggagcagtgattggggtcgagaccgtgacaggtctcgagatcgtgatcaggacagggatagaaggtttgagcatatgcatgattatgatcaagccagagaagctatgctagaaaatgactggatccgagaggatgatagagttgaaaatgaacaagaacatagcaggggacatggtggagatgttgatagagatcacaacatagatttgaatgtagacaggaaaatggataggaccagtgatcctgatagaagttttggtgaggatagaaaagatcagtcaaggagaaacaatgacttgaatgttacaaatcaacatatcatggatctttcatcagattcagctggtactcacaatgagcagttagaagctcaattagagaggtcaactcaacagcttgatcaactaaaaaaggaggtttctcagatggaagggggatttgaagagaaaagactccatgtttaggaattacaaaagcaatctaagaaacctgggggtgcagtgatcaatgcaaagaaaaactctttata

SEQ ID NO: 30571 - DNA, 396 bp, Glycine max
  Clone ID: PAT_MRT3847_12760C.1
gcgcaaagtgtatctcttttagcgggccacacaaacaaggttccaataggggcacaggaagaaaaaatactcagcggggcctaccacgcatgcatcggcacctgggggcacagagggacaaaccagactcctcatccacttcaccggcggaagccgccaccaagaacagagcccacagcagaccgacgacaccgaacacggaacaacccagaaggatgccgccccccccaaagagaagcccgcgcccccccccgctgagacacacatccaccaaagccacggctgggccccacatgaacgcggcgaccgccgccgccaccaaggaagcccccagccatatatccgagctagctgcggacgcaggagcgaacgcaaagcagacgcgcgggcggacgc

SEQ ID NO: 30572 - DNA, 325 bp, Glycine max
  Clone ID: PAT_MRT3847_127610C.1
cccactcttccgtccacgcgttcggcaagatctctattgactctaaggatgtcgatgtgacggaatggaaaggggacattctggcagtgggcgttacggagaaagatttgtctagagatactaactcgaacttcgagaatgcgattctgagaaagatcgactcactgttggatggtttattaactgaatcctcttatgaagaggatttctctggcaaagttggtcagtcaactgatcttagaattacatgacttggatcaaagaaggttgtattgattggtcttggtcaatcaccttgcactccttcaccctttaagggtcttgt

SEQ ID NO: 30573 - DNA, 2336 bp, Glycine max
  Clone ID: PAT_MRT3847_127611C.1
tccttttcctttctttcttccggacctatctgatttgcctttggtgactggaaactagaaccaaccatccgatgaagatgatctcccctatcataattctgagattcaaaatcaagttgtgcaacaagcctcatattcggaccagcaggaaggagcatgtagaaccatgacagaaaacagtttgtccctagagactccagtatctagaccagttgatgatctcatggagcctctagaacaagtgcaaccattatcatctgtagagtctccacctgaccgtgatactgctagagaaatgcagaacattttggtatctagttctgttgattttgtaccagacaatcaatccattaatgattcactggtcatggagcctccagagcaggaggggcaattaccttctgccggtatcctttcttccaaccaggacctagctaacttgcctttggtgactcgaactgaagaccagccatccaatgaagatggtattcccaaccacattcccgagacatcaattgagattcaaaaccaagctgttgggcaatgtgcctcaaatgtggaacttgactcatgttctcgtcaagttgtacatccagcctcaaatatggaccttgattcacttcttcctggtggattcagacggcagtcttcagacacaagaaatttgtcaactctcacagagaataatagccatcctgtacaacctgctagccaatcagcttccaggattattcgacatttgtgccttgatccacttaccaatgaattagaaagactgcgtagctgggcagagacgacagaaggggaatatgaaaacaagaaattgcagttgaaatatgattttgagaaggaactcgaggaactttacaggaagtatgacattaaacgtaaggaggttgaggttgaatttcagaatataaggaagaacctggatacacaacataatatagttcttgtaaataagatattggctgaggctttcagggctaaatccatggatcttaaagtatctggtgcatcaagaatgcagcaagatgcaagtgttccaatgcaactatttcagcttgcaagtcagcaaaatgccactcagccctgtctggttggtgcatcatcttgtgggcctcctgcagccagcgtgcagagttcctacgccacaactaccactcagactatggtatcaccaatacaggccacttacagtacaccaggaactttctccagtgtttctccaagactacctcatatcaactccctctcttcacccttgggaaatgttcaaactgctggggagatacgtgcccctgcaccacatctccagccttatagacccccaacatccatcccagcctccagtccatgtacagttcccgcatgggaggccaggtcagcctacacccggtaatattccggtaacttctcccccattttctcaccggacaccccggccaatgccggcaaactttcagtctgttcctcatggggggcattggcccgtaagtacaggtgggttatccacacctaatttatctgctgccatgaattctcgtggtgatgctaatagtcaacctggtataaatctggcaaatgttcggccacatatgccagatttgcctacattgatgaacttgaacctatccaaatttggctgtaatagctcgccggctaactcagcacatcaagctacatcacctgatgtagtctgtttatcagatgatgaatgaccagaagaagtatttaaatatcttatgcgtatctgtcctaacactaggcaattttttcttttccctcgttgaggggcttctaacaataatttaggagggcagatattgttgctgtggtggtggtggcagcggcagtgccggtgccgtcctcacctgtttttgttgtgttgtaattattatttattttataatgtatattcaatgtaaattagttggtatggttctcctctggcttgcaatgaatggatgtgctagtttggtgggggagatgaatgagtgttagttgaaatgaaagcatgttgctgttcgtatcaaaaaaaaaaaaaaaaaaaaaaaaaaaaaaaaaaaaaaaaaaaaggggcggccgttttaaaagaaaccaagttaactaacgggggcaggcaacagaatagctttcttatatggccacctaatttaatttcacggcccttgtttttacaccgtagtgattggaaaaaccctgggtttcccaacttaattggctttgaaaacatccccttttcaccagatggggtaataccaaaaaggccctcacgtatggcctttccaaacagtggcgcacctctaaatggcgattggaaccccccttgtacg

SEQ ID NO: 30574 - DNA, 484 bp, Glycine max
  Clone ID: PAT_MRT3847_127612C.1
ccacgcgtccggttcatgccgcagccaagacatgattgcgttggatgactgtgtcctatgcaatacaggatgagacaactcaagttggcttatagtgttgtataagatgatgctacacgtgctcgtactcaggtgaaatcttgactgctactacacatatatggaacaagcccagtggctgaatatattgttcgtcagatgctcacatatggtccaagattccccttagctgaagtgttggctagaaaagatgctggtgatgccaggacaattaaacgtgtggcgaaccgatttatctatgacaaggatgctgttattgctgacacgggtgctattcagcggttgcctgagtacgactgattccgacgcacaacctagtgtaaccggtagtagctcattatagttcttatgactgactcaaacttcattggaagtcggggaaatgttgtattcacattgacactatttatgtgtctggatggct

SEQ ID NO: 30575 - DNA, 647 bp, Glycine max
  Clone ID: PAT_MRT3847_127613C.1
aaattccaaatttgtccctacatgaagtcccttttctaccctcacgctcccaatatttcccggacatgccccgtctttaacgtcctcagaactgtcaaccgccaccgccggttccgcatcggaagcgaattccctcaccaccacccaaccttctgtttcccaatttacccttaccctcatcgccagttttccaattctactcctcgcaaaattttcattttcaattctcgtttcttcttcttcttcttcttcttggtcgaactcggcgaactccgtgtcaactcggtcgagaacacaccgcggcgacgattccgcaatctcgccacacggtaacaaaaacggatgctgcagcagctgatcgcagctccaccgccgccacggttcccttctcaaacacttctccagaaaatcccttccgagctccgacaaccgccttggaaattcgggcacctcgccggagaacccgatccgactcagcgcgtggaaggagtttccctcccacggcggttttccggtgagcatctcgatcaccgtgcattccaacgaccacacgttcgacgccggacccttccactcccgggcaaatcacctttccggcgccattccaacaggggaacttccccgcggcggcacccacccgtccggga

SEQ ID NO: 30576 - DNA, 714 bp, Glycine max
  Clone ID: PAT_MRT3847_127614C.1
ggggttgttttttttttttttttttttttttttttttttttttttttttttttttttttttttttttttttttttttttttttttttttttttaaaaaaacgggggggggggaaaaaaaacaccccttcccaaggggacaaaagggggggggttgggggggggggagatagttgggggccccagccagcccccaaaaaacggggttttaaaaaccccggccttggcaggggggccccccctattaacggggccggccccggaaattttaaacccgccctggggggaaagggggcccccaaacctgggggggggaagtgggttcacccccaggcccctttggggaaaaaagggcggttccggggggccgggggggggtaaaactttaaaaagttaacaccccaggggggggaaagcggggggcagggccgggctaaaaacggggggggcccccccccgggacaaggttttctatcctcaaaaccgcggggggtgggtccccggggcggcgggctttttaaaggggggggtggggggcccaaaaaaacaaatttctgggggggggaccccgcgaaggggggggtcgaggggggccccccccgggtaaagggacacccaggggccggggggggaagagccggggggggcccttaagaaaccgggggggaacctgcgggaaaaagagttccctgttatacgggcccggggggcccccc

SEQ ID NO: 30577 - DNA, 2276 bp, Glycine max
  Clone ID: PAT_MRT3847_127615C.1
ctgatacaacaaagagtctgagaaatgaaggtagacaataatggcgcggttcatgattctctccatttactattattatgatcctctctcttgctatacctatggtccactagtccccatttgctttttcagtttctttttcttgtctcttttgcctttccccttctctttttcctttcacacaccacactctccaaacccactgtttcagtttctgctaacacctctcctttctcagtgtgcccccatttctccaatctcaataatgttttagggttttccctcctttctcagagcttgcatttcccaggatcaatggcaaagctccattttgcgttcagtttctcacttttgtttctactcagcaatgcctcagctgcaccatccaccactttacccgccaagattgttagtgggtttctctcaaatgccgttcctgcgttcaccaaatgggtctggtcactcaaagcacccaccaaaaccgcgattggtgcgaagtcgatgatgaagttcgagagtgggtacactgtggaaactgtgtttgatggaagcaagcttggaattgagccttatgcagttgaggtgttggccaatggggagcttcttattctggattcggctaatagtaacatttataggatttcgtcctcgctttctttgaataccagaccaaagctggtggcaggatctgctgaaggatattctggacatgttgatggaaggcttagggaggccaggatgaatcacccaaaggggatagcggttgataaccgaggaaatatctatattgcagatataatgaatatggcaattaggaaaattagtgattcaggggtcacaacaattgctggcggaaaatggagccggggagggggccatattgatggtccaagtgaagaagctaaattttctaatgattttgatgtggtttatattggaagtagttgttccctacttgtcatagacagggggaaccaagccatcagggagatccaactacactttgatgattgtgcttatcaatacgaaaatggacttacacttggaattgcaatgcttgttggggctggcttctttggctatatgcttgcattattacagcatagacttggtacaactgtagcatctcaggatcttgagggtgcagcaatgtctggcatttcaccaagtccatatcaaaagcccttgaagtctgtcaggcctcctttaattccatcagaagatgagtcggataagcaagaagaaagtttcattcgatccattgggaagcttcttaccaatgctggggcatcagttgtggaaataatgggagcgttatttcctggtttcagaaaaaaaccacagagctatgaatttcaaagccaaccgctgttccagcaacctcaaaagcaagtaaacgcttggcctgtgcaagaaagttttgtgattccagatgaagatgagcctccttcaattgaccctagatccccaacaccacggaaaacgtatgctttcatgtcccaggatgcagaaaagatgccacaactttggcaaagccatgcattctatagtggatggggcggagatcttcagcagcagcaacaactaaaacttcaacagcagcagcagcagcaacagcaacaacaactaaaacatcatcgccatctatatcattcatcagtccctcacacatactatgagcaaagccatgaggaaatcaatgagatagtatttggggcagtgcaagagcaggaagggaagaaggaaactgtagttatcaagcctgtggattatggtcaatctctctatgatcatcactatattcgacctcgaaacagttctatgggtcatatcaacaagtactaagtatatacaaccacaaagactaggagtaatgaatccccaatccagctttaattagagatgggaggatgaaattaagtacaggaagtataattaatattttccttttaacagtgagatccttataaggataagctgatcatcagaatattagttgttcaatcagttttgccagattgtaggtcgctctggccacatttgagggtaagataaaaaaattttggcatgctgtttcttctagtgatgatgcttaatgtacagcagaagttctctgccataagatatattacatatattctcagctctttttgtccttgttccactgaaaagttctgacacgttatgagtatttcttcttctagaagtataaacaccgttagataactttactctgtatttgttatgtgggtaccatacaaacatctcatgtttgc

SEQ ID NO: 30578 - DNA, 402 bp, Glycine max
  Clone ID: PAT_MRT3847_127616C.1
cgacacatctcactaggtttgcggccgcgcacttttttttttttttttacattcaaaaaacgtactttttccttcctgggaagccaaaaacatcagactaaatactgcattttggaacttttgcatgtgctacttctaaaacagggcaccaccaatgatgggaagctggtataacgctgctgggtccgccaaacctcgtggggtcggtggcttcaattgatgaaatcgtaaaaggtgtgccgtcttaagcccacagcgctggacaaatggcatctcatgtgtatgactcaaggaagctgcagggctcacaccacctatctcatctgaatgccattagtggctgctgcggtacataacctggagagaccacagctgccagatcttggactagaagaaattgct

SEQ ID NO: 30579 - DNA, 1480 bp, Glycine max
  unsure (1)..(1480): unsure at all n locations
  Clone ID: PAT_MRT3847_127617C.1
cctgcgggaccggtccggattccggtcgccacgcgtccgttttctattatttgactctctctctcttgctatgctatgggccactagtccccattggctttgtccgtttctttttcttggctcttttgcctttccccttctccttttccattcacacaccacactcttccaaacccactgtttcagtttctgctaacacccctctctcagtgcccccatttcttcaagctcaatgtgttagggtttccctccttttctcagagcttgcatttcccagctacacaagaagaaccctctctgggtgcttcattacgctccaggatcaatggcaaagctccattttgcgttgagtttcacacttttgcttctactctgcaatgcctcagctgcaccatccactactttacccgccaagattgttagtgggtttctctcaaatgccgtgcctgcattcaccaaatgggtgtggtcactcaaagcacccaccaaaaccgcgattggtgcgaagtcgatgatgaagttcgagagtgggtacactgtggaaaccgtgtttgatggaagcaagcttggaattgagccttatgcagttgaggtgttgcctaatggggagcttctcattctggattcggctaatagtaacatttataggatttcgtcctcgctttctttgaatagcagaccgaagctggtggcaggatctgctgaaggatattctggacatgttgatggaaggtttagggaggcgaggatgaatcaccccaaagggataacggttgataaccgaggaaatatctatgttgcagatataatgaacatgacaattaggaaatttagtgattcaggggtgacaacaattgctggaggaaaatggagccggggagggggccatattgatgatccaagtgaagaagctaaatttcctaatgagttggatgtggtttatgttggaagtagttgttccctacttgtcatagacagggggaaccaagccatcaggtagatccaactacactttgatgattgtgcttatcaatgcgaaaatggatttacacttggaattgcaatgcttgttggggctgccttctttggctatatgcttgcattattacaacgtagactcggtacaattgtagcatctcaagatgtgagtgcctagtattgtcttctgccttctgattcattgtagtaaatctgatatagacctcaaataaatatcattgtccattgatagaacttcaattaatctagatgtagtagatatctggagttattttgggaagttcaactgttctcaactttccaatatatctctcatttcatgctatgctatacaggttccaaattatcatttttttttctttntaactcaagattacctatagatacacttgccacagaatttaaacttgtcctttgttctctaaactgtctagtctaatgttgctaaattattgtgtgaatatatgagaaatcttgagtc

SEQ ID NO: 30580 - DNA, 256 bp, Glycine max
  Clone ID: PAT_MRT3847_127618C.1
tacggctgcgagaagacgacagaagggcttgatacaagcatgttcatttttttaaaatagaaagaaaataatgataaacaaaatgcaaactcacaaatcacagaggggttcatggatggtcagacgcacaacaaataacagaggacgaaggttttccttcttgccgttgacgggacatggtatcgccggcggcggccaatattgaatgatgacagcataggaataagaatgtgtgttgctttcattagggtttaga

SEQ ID NO: 30581 - DNA, 318 bp, Glycine max
  Clone ID: PAT_MRT3847_127619C.1
ctaacttctctctctctctctttggcggctctcaattctccaacccccaaccctagttccatttttttttaatcctaaatcatgcatactccagacacctagtttcatttcatcattacacgcacaccttatttatttatatggaaaaaaaatcaaatcaatagagccagacaagtgttgtgttgttgaggttgaggttgatgttggagggaggagcgataatggaggattcggcggcgcagaagaggaagcagcaagagtttgctctagcgtcggtttccgaggtgtcttcggctccttttttttgttcggcggggg

SEQ ID NO: 30582 - DNA, 397 bp, Glycine max
  Clone ID: PAT_MRT3847_12761C.1
tacggctgcggaagacgacagaagggaccttaccttaagagagaagaaatgggggtatgaagcgtgggaaagaatgagaatgtttaaactgatgaaaaatatatataaaaaaatctttaaattataaagaagaaattatacatattctaattataattcaagtgtgcgacttaacttcatgcatatgtattgctagattttgattctttgacgtatcatatgatgctacctggatattgctatatgcaattatattaaagttagcattagtttaaattaatgttactaaaataaagctaaagtaacattagtttcttttttcctaactattgaggaaagatcgagtgctggttaacattcataatttttttttaagtttaagaagctaagtgtaaag

SEQ ID NO: 30583 - DNA, 638 bp, Glycine max
  Clone ID: PAT_MRT3847_127620C.1
aaaattccaatacaagacaaaaggaaaattgttcatttatgaatccgaatttcccgctgtcggcagcttttccactcattcacacgttacgttgtccaaaactattgaatgaataatggactgtgtgaatgcgtgaaaaaataaattttgagcatggagtaactgaaagggggagtgataaattttcaaaatttgtctataaaaaataatggggtgttactgtttatttttaaaaaatttgttctaattaatttgtggtgtggatttgagcagactgagaaagtgagaatggagttggaggaacaaagaatgaggcaatcaaggatgttggtgagcgcaatccaagaggcaatggtgaataagctgaaggaaaaagacgaagagattcagcgtatggagaagctgaattgggcccttcaagaaagagtcaaaagcatgtgcatggagaaccaaatttggagggaattggcacaaacgaacgaagccacagccaactacctaagaagcaatttggaacaagtcttggcacatgtcggcgaggaacgcgccaccgcggccgaggtggccgatgatgctcaatctagctgtggcagcaatgatgcggcagatgccggagatgacacggcggcatccgcggc

SEQ ID NO: 30584 - DNA, 926 bp, Glycine max
  Clone ID: PAT_MRT3847_127621C.1
gaaaaagaaaaagaagaacaaaggggaaaacggtggttctgcatctgcaactcctaataataatggaggaggagaagaaattagtaaagttgaagcattagtcccttcaaatttggacacttccttcactcccaaggatcttattagtcctccaattcagcatgcttacccatatccaccacaggtgtattatccacctcctccagcatatggattaagctataacacagcatatcctgtctccagtactgcttcatattatgttggtgctcctatcatgcccatgcatgcttacactactccatactctagactgccaccacctcctccaccatctgatccaatcaagcactatgttgaggatgagtatgaaagtgatggatattgctccattatgtgacaaacacacaccaaagtggaggatgatgtactagctagctagtgttattacttattaatgatagtactcaggttaagtggaggggttgaattttgtaatatgctcaacaaaattagaaatattaaatatggggacaaaaataaaaaaaagagggcatgtgcaggtatggggggggtcttgaatactttgtctttgtttagcatgatctctctctttcctcttctttttttttcttcacttgttaagagtacaaagcttttggggtttgccaaagaaaggccagtagccttgtaatgctctgcaatttgtaggtccggaaatcttcctttccctctctatcttatgtgtaaagtatctttataagtaccaacttttttttttctcttttcatatttggttagtagttacaggctggtaaatgattttgttaattctcatgcatgcaaatcagctagccaggcaactagtcttagctttgcagtcaccgaacactgaatcttatatataaataattacttcctatggg

SEQ ID NO: 30585 - DNA, 265 bp, Glycine max
  Clone ID: PAT_MRT3847_127622C.1
ttccgtccatttcatacttcatcctattatttctttcccattctacattccactaggtccgcgtcttatttttattcatctctcgccaaccactcttacccacactcaaacaactactcatactaccacaataccattaactacacacattcctatactcactattttattattctctaacactttccctataccatccaaaaactgtttcaatttctaacagattctgcacatcttcttcttttaaataaaactattatttact

SEQ ID NO: 30586 - DNA, 269 bp, Glycine max
  Clone ID: PAT_MRT3847_127623C.1
gtcacaactagctgctgttgtgacggttctccttcccgatcatacctcagtgcaagcctgtcaagatatgatcgggaaggagatacgtcacaactagctgctgtagacattggtgtcagtactgttgatccattaaaggagcctccacttgtgactgccaataccgtactatcttttcttgcagttgactatccagtggataaggtctcctgctatgtgtctgatgatggtgctgcgaggttcacatttgaagcactgctgagacatcg

SEQ ID NO: 30587 - DNA, 822 bp, Glycine max
  Clone ID: PAT_MRT3847_127624C.1
attcacaacctgtgtcaaatcctaagtacactctccaaccaacaacaacacagccttagtttcattcacttaacactccttttaagagagaaggatcaaacatgggagctggaagtttcctcaaggtggttctaaaaaattttgatgttcttgctgggcctgtgcttagtcttgcctatcctctatatgcctcagttagggcaattgagagcaagtctcctgttgatgaccagcaatggctcacttattgggttctctattccttgatcaccctctttgaacttacttttgccaaagttcttgaatggattcccatctggccatatgcaaagctgatccttaccagctggttggtcattccttacttcagcggcgcggcctacgtttatgagcactatgtgagacctttgtttgtcaatcctcagaacgttaacatgtggtatgtccctagcaagaaggactctttgggcaagccagaggacgttttcactgccgcggagaagtacattgaagagcatggaactgaagcatttgagaatctgcttagcaaggctggtaaatctaggaaaagtggcaggcatgcaaattgaagctattgaatgcaatatattagcctagcttgtgtcatgtttgggataaaggggtgcatatacatgtgttgggttatcttttgttaaggtgtgtaactatatcagtgttagtcatctatgtttcggctcaaggctatacaactatggtatgtgcccatctgtagtacatagaattatagaatatagatcatagataacggagtacaatacaaatctgtttggtgactttttt

SEQ ID NO: 30588 - DNA, 484 bp, Glycine max
  unsure (1)..(484): unsure at all n locations
  Clone ID: PAT_MRT3847_127625C.1
gccgtgtttgatttgctaaaatcataacgaaaaatatacttgagttagctctgaattgtaactctcttgttagttttaaaaactcaaaactcgattggtataaacagttggcaacaatacacgtttctagatattgttttcaagttgatcttaactggctctagattctgggaaagtattctttgctatttttatttaattataaagatggctgctaacgtgactcaacatgtccacgagtcatgaattgatcctataacaatatatggagtgctgcctcctgattttttggctctttaaaaaattacgaaaattctgcttaaccaaccaaccactctatcgtggtttttgtctctgatttgagcccactggatttgattgaaatagaaaataaagaataattttgacctaggcccaccaatagttcaaaatatgtaaagaattgtccaccanaagatgttggatggaagcttcatattccaat

SEQ ID NO: 30589 - DNA, 273 bp, Glycine max
  unsure (1)..(273): unsure at all n locations
  Clone ID: PAT_MRT3847_127626C.1
aaagttaatgaagatggccggttcggttagaactggaggaaagggtactgtgagaagtctcatatggacatatgaatattttagcttttctccccctccccgctcttccactatgcactcggttgtgggttttcactcaatttgttggctttttagtttttttggattgaacacaaaatgcatctgttgtgttgaatgctctctttanttttgtcttatgtttgttctagaaagaagaaggctgtccacaagacaacaaccacagatgacaaa

SEQ ID NO: 30590 - DNA, 819 bp, Glycine max
  Clone ID: PAT_MRT3847_127627C.1
atggggacaatgggtattgcaatgatattagcacctgcaatcggtccaacactttcaggttacattgtgcaaaattatgattggaatgtaatgttttacgaagctggtaataaaggatggggctcaactgagattgtaacaatgtttattgttggtacggttttcattattttctttattttaagagaactaagaatgaaagcgccaatgttgagcttggaagtattaaaatatccaacttatacacttacaactgttatcaatatgattgtgatgatgagtttatacggaggaatgattttacttccattatatttacaaaatcttagaggattttcagcattagactctggattattactattgccaggtgcattagtcatgggagcattaggtccggtggcaggtatgaacgctttaccaccacgcttaatttctcatggtaatgcgtttgttaatacaatgagacaattagctggttcaattggtacagctattttggttacggtcatgacgacacaacaaacaaatcatctttctgcttttagtgaagagttagataaaacgaatcctgtcattcaagaccatatgcgtgaacttgcccaacagtatggtggtgagtcagcagcaatgaaattattactcgaacatgtcaataaacttgcatctgtagaaggtgtaaatgatgcatttattgttgctacaattattagtgcgattgcactgatattaagcttgttcttacagggcaagaaaaaggctcaattatcagctgaaaaagcaaatgctgaagattatccttcgcaacaagataaataa

SEQ ID NO: 30591 - DNA, 260 bp, Glycine max
  unsure (1)..(260): unsure at all n locations
  Clone ID: PAT_MRT3847_127628C.1
ccttcttatctccgactatcatattcagcatcctctttcggctatctcatccgttccatgatacattttgcgcgcactctctcggatccgtcctaagtgttcccatttctctctagctccgctatcacactgcatacaattgaaaaaattatgatgataaatcatcatgttgtgatccttctaatttgctccctccaactcctcctatctactcagataatgattacaaaannnnnnncagcaaacacatcaaagctgaa

SEQ ID NO: 30592 - DNA, 710 bp, Glycine max
  Clone ID: PAT_MRT3847_127629C.1
ttaaaatattaactgttacagtaagggaaacccattcttaattctaaaaaaaaaaaaaaaaaaaaaaaaaaaaaaaaaaaaaaaaaaaaaaaaaaaaaaaaaaaaaaaaaaaaaaaaaaaaaaaaaaaaaaaaaaaaaaaaaaaaaaaaaaaaaaaaaaaaaaaaaaaaaaaaaggggggcccctttaaaaaaaacaaatttaaaaaccccggatttgaaaaaaaaaaattttttaaaaggggcccaaaaaaaaaataaatgggccctttttaaaaaaatcggaaaaggaaaaaaccttgggttacccaaaaaaaatccctttgaaaaaaaaccccttttcccaaatgggaaaaaaaaaaaaaaacccccaccaaaacccctttccaaaaaatttccacccctaaagggaaaaaggaacccccccttaaaaggccaataaaccccgggtggtttggggaataccccaaagggaaccgtaaaattttaaaagccctataaaccccctttttttagttttattccttttttttttccaaaaattgacggtttttccccaaaaaaattaaaaaaagggggcctcccttttaggggtccaaaaaaaagggttttaaagggaaccttaacccccaaaaaaaaatttaaataagggggaaagggtaaaaaaaaaaggggaccaacccccccctaaaaaaaacgagtttttcccccc

SEQ ID NO: 30593 - DNA, 499 bp, Glycine max
  Clone ID: PAT_MRT3847_12762C.1
ctcgagttttttttttttttttttttttttttttttaaaaaagcaaggtcaatcggttgatataaatcacaaaggcattattacattgcaatgtttcagttagcacaaactcaagagctgtaaacgccaaaaaaaaaaaaatacaaaccaaatatgctattccacaggaacacaaagaatgcttgaccatgaaccaaaaagtcacaacaccgagatccacaaaagaaaaaaaaacaaaaactaaaggggattacttcaccaatccacaagctagaatttactagaatggattcagccttacctgtttaggtagtttctagaatttgaacatgggactttcaggcagccacaagtcaaatccacgctttccattgatctgaattttctagatcctggagaactagtctcgagggggggcccggtacccaattcgccctatagtgagtcgtattacgcgcgctcactggccgtcgttttacaacgtcgtgactgggaaaac

SEQ ID NO: 30594 - DNA, 342 bp, Glycine max
  unsure (1)..(342): unsure at all n locations
  Clone ID: PAT_MRT3847_127630C.1
cttaacttcaaagacgtataatatcaactgcgtctatggataaacataatagtacttatgtcagcctatgggcttaaccattgatatgatgcgctatcttgggtttctgaactaccagaaaacgagcttttgaacacttatcactgattttatgcctagaaacgcaccatccccaccgctgctactccattgctagagcactgactccggttgacctacantcttctactatgtgctcactgactcttannnnnnngagaactccccttcggaccctgtagacctctttacctttcttaccatcttgatctctatnncgatcaanntagtgcgcaaaagaca

SEQ ID NO: 30595 - DNA, 303 bp, Glycine max
  Clone ID: PAT_MRT3847_127631C.1
tgaaaattcagcatacaccgattgggaacaagatcagattctcttatcgtggctccaatcgacgctttcaattttcatcctatctcgaattatcagatgtgttcattcatatcagctttaggagcaaatccatgagtactttcaaaagcaaacacgtgcgaaagctaggattctttgaacagaactcagaactacaatgcttgagtagaaaacaatgcgtgagtttcttctatgcattaaattcatagtcgatgtgcttggatcgtgtggaattcttgttctttcgcgtgaacaccttgacgc

SEQ ID NO: 30596 - DNA, 162 bp, Glycine max
  unsure (1)..(162): unsure at all n locations
  Clone ID: PAT_MRT3847_127632C.1
cncaannnacnaanagtcgcatgcacgcgtacgtaagctcgggncgncnanngagcncgtcgacccnggaattaatnccggaccggtacctncangcgtaccagcntctcccnatantgagtcgtattagaattngngtaatcatggncatagctntttcct

SEQ ID NO: 30597 - DNA, 304 bp, Glycine max
  Clone ID: PAT_MRT3847_127633C.1
tcttttggatttggggtcgaatcgttggttttctagaagtttgacatggcgaggtgctggcagaaactggtgaggaggagtatgtgctctgtgttgactgtgaatgcaagcactacccaagaaaactggctgaacttctgagactaatagcttgttggggtgctagatattctattggacgacccaagttctttgacaatatgcttaacttagacggctctgcctgagagtgccaaattgaacaccatcgaaagagcatgcagcttaaatgagatcgtgttcattaactctgtggcggcagtgg

SEQ ID NO: 30598 - DNA, 373 bp, Glycine max
  unsure (1)..(373): unsure at all n locations
  Clone ID: PAT_MRT3847_127634C.1
gacgagcacaagatccagttacatactatgtgcctgccttgtctactcgagtaatgtgtaactggatctggggctcgaatanacaaggcatgcacatagtttgtctgcgccttttgagctgtgtttatctctgaagaaaccacaatatttctcgtacgatttactcacttttaatgctttaaatatacaaagctacatgcaaattatttattacattcgaacatttttaattataaatagtgaatatttatatttgtaattttttgttttataagctttgaaaggatttgaatttactttcctacttataattgtaacttcacttgtgtcttatttcaatgccagattttcaattcacttcttacttaatctc

SEQ ID NO: 30599 - DNA, 284 bp, Glycine max
  Clone ID: PAT_MRT3847_127635C.1
catagagccgcttaaggagtaactggctaggaacagataggcggagggtgacagtaaaggatctggtagtagtggttgaggaccatgtaaaacaggaccaggtgggcttggccggccaaaatcctcagctgctccatcagggtccgctgaactatatgggttggcaggtgaaaccacaacatctggttatgcctgcaatgcagagccatgaatggttaggatgcttctaggcatctaattaatttcccttaaatgcttgtacgcatggcatgggtggaacaatt

SEQ ID NO: 30600 - DNA, 425 bp, Glycine max
  Clone ID: PAT_MRT3847_127636C.1
cttagtattattgcgcactatcatccatcgtttggtttagtatatgtttaaggtttgtagtgtaagttatgaagtaggtaattgtgtacttaaagagacatgcaatatgggttaaaccagctgggtaggtttaacaaactcattataactgcgcttattagttactattattaactgctgcaaaagcattaataaggtatgaatttgatcttttacactaatgaattataaggaattaataggttttttttatcacactgttatggattggaaaacaataggagatataaagagaaggcggggaaaaaagtgaaaattactatacaatacatgaacgtttttctattctaagtacttcattgacattcatcatttcaggtaatccctctttcacttgttagttataccacatttctctcttatta

SEQ ID NO: 30601 - DNA, 371 bp, Glycine max
  Clone ID: PAT_MRT3847_127637C.1
ccacgcgtccgaatttttttcaataatatatgagtatattgtctaatgtaaagagaagttagacttatataaagctttaatataaaataggttttaagcaactagactttcaaatccaccaaaaaaaatctaacaatgaagcctacaacaagtaatcagtcaggctcaggccttatcaattatatttattttattttattttcttaaagtgatttagataatattttaaacaatgaaaaaatattatctaaactgtgttttttttgtgtgtggagtatctaagctgctttaagaaaaaaataaaataaacataatttgtaagaaataaaaaaattctttaaaaaacaaaataatttttttacaaggacaag

SEQ ID NO: 30602 - DNA, 360 bp, Glycine max
  Clone ID: PAT_MRT3847_127638C.1
ggctcgagcgcgggccgttttggttctaggaggaatacccactttaaagctgcttcttacgagccgtctactaagagcacggctggacacgctcttgttgcgggatttactattaccttagcagcgggggctgcttgacacagtctgggaccaagatcgctccaatgctccatttggcttatccagaaaagccttgtggactgtaaggcagctgctgccccctctgcaggcgtggaccagacagaccatggctgatggataataggaactctttggttactcctaaggctgccttcacagagactattgatgagaccctgtgtgactgtcacacccttatggaacatgacggttcattgc

SEQ ID NO: 30603 - DNA, 362 bp, Glycine max
  Clone ID: PAT_MRT3847_127639C.1
ctccttcttgataggcttcaaaagtggagtggaatgaatagttccaccaatgccgctgcagcaatgaacgaccagctcttcaaccccacctccatcttcggcctccgcctatgggtggttctcggcgtatgcgttggcgccgccattgccctaatcctcttactcatgttcgtctgggtagccttcaagcgctgcagaaccgaccccgattccatccccgacgtctcctaggagattcaagaaatcaggctccaccactcgcccatccttagccccgctcttcaacccgaagcttctttatggcgaacctgaccccgttccttccaccgacaaggaaaccacccccctggggtaccaacgga

SEQ ID NO: 30604 - DNA, 323 bp, Glycine max
  Clone ID: PAT_MRT3847_12763C.1
cgcagaacgctcgaacccgaaggaagtttgtgaaatgaatccaaggagtttcttgcctataaacaaatgcaagatgatgacggccatataagccaatactgcaaactcgacaacgagctccttacactatctacctcttctctgcatatcgctgcattagtagctactttctttgcttctcccaccacaaggatgatgggacacaaggcctctcatgtttttaggaggcttgattttccttgcgggcgcattgatgaacggtattgccgacaacatcgaaatgctcatcataggccgtctctcgcttggttacggtgaaacga

SEQ ID NO: 30605 - DNA, 702 bp, Glycine max
  unsure (1)..(702): unsure at all n locations
  Clone ID: PAT_MRT3847_127640C.1
gaacgatttcataccatcttcaagtactccctgacttctatacaagattggtagaagataagggtcacaagtttggtccatgttttattaatgccacccctggatcctactatgggaggctttttcccagtaatttcataaatttttttcattcctccaccagtttacactggctttctcaggatccattattggggttgactagggaggcagaatcactcaactagggcaactgttacatagttagcacaagccctccagaggtatacaaagcttaccttaaacaatctcaagaaggctttaaattgtttttgaaatcacgttgggaggaacttatgcctggaggagcaatggtcttggtgtttcctggcagaaatgaaactcctagaagaagccttcgggaagtaattagcctaacactcaatgacatgctcttggaggtaaatagcttttatttttaccaataggtgtaccttgaaattaattattgctttaaaacatatcacatcatatgtaattaactaggtatacactgtaggttttgattgaagacgaaaaactggactcatttaacataccagtgtatgaacctacagtngnnnnaattaggcatgtcattctggaagannngtcattnnnncnnnnnagactagatatttncaccatgtcttnnnatgannntntaaatgattcttttctana

SEQ ID NO: 30606 - DNA, 1799 bp, Glycine max
  Clone ID: PAT_MRT3847_127641C.1
ctgtgaggaagctatgaatttccctctcccggctcgagcggctcgagtataccttccttgctatgacatactccgcaattggttggaggaattcacagctaaaaaggcaccaaccacaactacttatgtacctctagtagctggttcattggcacgctctctagcttgcactacttgctaccctattgaacttgctaaaactcgtatgcaggcatttaaagagactcaaattggtaaaaagcctcctggagtgatccagactctgctaggtgttgtttcaaatgtcaagagcacaaacactccacagaacagcttgcaaggttatcgtgttttgtggactggcatgggagctcaacttgcccgtgatgtacccttctctgctatttgttggtcgacacttgaaccgactagaagaaaacttcttggtttgattggaggtgatgatgccaatgcattgagtgttcttggggcaaattttggagctgggtttgttgcaggaaccttagcagctggagccacatgtccgctagatgttgtaaaaactcgaaggcagatagagagggatcctgttagggcattgaaaatgactacaagacagacactgatggaggtgtggagagatggaggcttgaaaggattgtttacaggtgttggtccacgagttggtcgagcaggcccctctgttggaattgtgatttcattttatgaagttgtaaagtttgttctacatcatcagtacacataatcatgattttctgcacactttttttgctgccaaagcagttattcagaacctctggagattgcagaacattttttttttggaatgggaatcattccaatccatcctgaccataaactaacataattgaacaggaaaatgaccggcataggacacacttaggttttttgagctgtgcattgtttttaattttttttgctgcttttgacaagcagaaattttgttacacttggggttctcccctgaactataatcgattaaataaaatatgaaaaattgagtttttttcctcccaaaacacaaacacgccacagaacagcttgcaaggttatcgtgttttgtggacgggcatgggggctcaacttgcccgtgatgtacccttctctgccatatgttggtcaacacttgaaccaactagaagaaaacttcttggtttgattggaggtgatgatgccaatgcattgagtgttcttggggcaaattttggagctgggtttgttgcaggaactttagcagctggagccacatgtccactagatgttgcaaaaactcgaaggcagatagagagggatcctgttagggcattgaaaatgactacaagacagacactgatggaggtgtggagagatggaggtttgaaaggattgtttacgggtgttggtccacgagttggtcgagcaggcccctccgttggaattgtgatttcattttatgaagttgtaaagtttgttctacatcattagtacacagcatcatcatgattttctgcacactttttttgctgacaaagcagtttttattcagaacctctggagattgcgagcaattttttttggaatgggaatcattccaatccatcctggccataaactaacataattgaataggaaaatgaccggcataggacacacttaggttttatgagctgtttgttattattaatgttttttctttttgctgcttttgacaagcagaaattttgttacacttgggatgctcccctgaactataactgaataaataaaaatatgaataaattgagttctttacctcccaa

SEQ ID NO: 30607 - DNA, 474 bp, Glycine max
  Clone ID: PAT_MRT3847_127642C.1
aaaaccaaaaacaggtaaaaaaacttcgttaaaaataaaaggccacttaaaacacccctcagcggcaaggggagggggctaaacccctaggggggggggggaaattcaaaaaatctaaaactttttttaccatcaaaacaaaaaacgggcctcatcaaaaacaaaccggagggaaaattgccccccgccgatcaaaaacctatttttgaaaggtccgggtacatgaaatcgggaaaaacttaaaaatataacttaaacaaaacccctaagacttgggggggggaaaactcctttagggggggacccccgggggggatccccggggctaacaaaatggcccaaaggcaatcacttttttttgggaggggccttggggaccttggctccggggggggtcttttttctaaacacttttgaggactccgacagccacaggttgacccatgtccctcacagaaaaacgaccaggggggg

SEQ ID NO: 30608 - DNA, 215 bp, Glycine max
  Clone ID: PAT_MRT3847_127643C.1
ataattatgaggctcactttaattactctgaaagaatggctaaataagtgtacccaaaaataaaggacccatatatcattgtatagtcgtatacatggatcttacattattgttctcacttctcatttgattccaatgtcatagatcggtctttatcgtgggacagtaggaggaatagtcatgtagttgagaatgcttcaacgttcattttcaaa

SEQ ID NO: 30609 - DNA, 679 bp, Glycine max
  Clone ID: PAT_MRT3847_127644C.1
ccacgcgtccggcattgaaataataccacacttaccagcttccaccctcagcctgtgctgtgcctctccgtatggcggccataacccgactcgtaagagcgcacctaccccctctcttgcgtggcgcgtgggttcatatctcacgcgctttcgtacatggaggataggaatgctcacagggtgtaccctgagttgccctggcgttggaaaaggcacctatgccagccgactctgcaacctcctagacgtgcctcacatcttcactggctatcttgttcgccacgatctgcatctgcaacggtctcatttgttcccagctatcacaaagtgtaaaacaaggcaaaatggtgtaagattaaatgataatgagcttacttgacaaagaggtctgtctgatggggaatctaaaggcgaatcatgattcattcttgatggttgctctcgaacaataaatcactgcctaaatattgcacagtgtaactgacatgtgactaggagggcaatctgaagctccaagagagaccactgcttgcataatgccttggtagaagaatttgtaatctatgtggaagacatgttaatattgcctccattaccgtgaatggtgagaatgtgcgtcctgtaatggacatggctccacttattactactacacactggatgtaacagctcattactc

SEQ ID NO: 30610 - DNA, 2436 bp, Glycine max
  Clone ID: PAT_MRT3847_127645C.1
cgtgcaaacgcaccgggtcgacccgtccgtcacattcattattcctggttccgtttcttcccaccaaacgaacaacgatgacgacggcgtttgagcgtcacgcgcttcctctgtttctgtttctgtttctgactccgattatcaatgcctccattcacgactactccaacgaacccttcactcatcgctccgacgccttcttcttccacggcggcagcgaggccctcttcgccaaatccttcatcaggttcgaaacggtgacgtttgcgcgtcctcgcgagtccgcgagcgtgcatggtaggatgcagtcgaacacgggtttggtggaggcgataatccttgaggttcgggatcggaaccggatcggaggctcgtacctgaaatccgatctgatttgctgcgatccgaagctggccaaagaccgcaactgcaacctcggcgaggtcatcatccagaagaaccccgacaaccatgaactccccaaacgcatcaaaaccttcttccaaggtaccgatgagcaggtccagatggacgctgtaaccctcgagatcaacgccaccggcatgtactacctctacttcatgttctgcgacccttcccttaagggcaccaccattcagggaaggaccgtgtggcgaaaccctaatggctacttacctggcaaaatggcccctcttatgaccctctatgggttcatgtcactggcttatctgttgcttggtcttgcttggtttctgaggtttgttcagttttggaaggatattatacagctgcattatcatatcactgctgttattgctcttggaatgtgtgagatggctgtgtggtactttgagtatgccaattttaactccaccgggactaggcccatggggattacactctgggccgttacttttacctctgtgaagaagacgctgtcgcggcttctactgttggttgtctctatgggttatggggttgtccgccccacgctaggcgggaacgtgattgcctacagagtgctgcttcttgggctgctgtatttcagcgcctccgaggcgcttgagctcgtcgagcatttggggaacatcaatgacttctccgggaagactaagctgcttttggtgctccctgtggtttgcctcgactcgtgcttcattctttggattttctcgtccttgtccaagaccttggagaaactgcagacaaggagaaacttggctaaactggagctctaccgaaagtttacaaacacgctcgcggtgtctgtgttgctgtccattgcgtggattggctttgagctatacttcaatgccactgatccattgagtgaattgtggcaaattgcttggattattccagctttctggtgtctgctttcatatgctctcttggtggtgatatgcattctttgggctccatcacggaaccctactagatatgcatacatggaggaaacgggagatgactttgatgaggagggtatctctctgacaagcagtgtagcgaagataagtggggatgtggcagccaagcttgatcggaaggccattgatcacgccttcggagaagatcttgaggaagataagcgagaataatgtcaaacttgtgtagtatagtagtgtttcatatgacatcatttctcccaagatgtctgtgatgtccatatatacatatggttttgttgtatgctgcaggtgtctgtcagttgttgatgatggggaaacaaggaggcaatatcattctcatcattagatcaaaatcgtttaatcgcaagaaattagaatagtttttcataacagaacagatggtgtgataaaatcatcccccagcttgatttcaaatgaccatcatccgtatgtatttactgatttacatttccttttcttatgggctctttcatagtataatttccggaagccctatctacaattagcaagacgagttttaaaaaaaaaaaaaaaaaaaacggacgcgtgggagcacggctagcgggccactcgtttttatatcatttcattattttcttctcccttcgatttctccagaacagcaagggagaatcaattcctcatcgttgcaattcttccctctctagattctcatctttcctctcttctatctccttcagaaaaaaaaaaacaaaaaaaccacagcttcatattatatatctagctcttcattttctcttgttcaatcaaggttatgctttaaaattctgaaactcacagtttcaggcaaattttagcctaaagatctgtgcgttgacccttggcaggttcagcttttggaggggttggagttgttcttccacataagccattgattattccaagtttctcttttctctctctcaagttcaaaaaatagtttttttacattctgtctctacggcggacttgtggattgctagggtcagagatttttgctacatgttctagcttgacttatggt

SEQ ID NO: 30611 - DNA, 359 bp, Glycine max
  Clone ID: PAT_MRT3847_127646C.1
acacacttattgttcttttttatgtgctttatataattgaataaaatatttcatactaggtcccatatgcggaaggacattcattagcccaaacttccagactataacacttatcaagaaggcgacgcagcctatggtgagaggaataagaactcacaattccatgtctaactgcacatagaacaggccagatagctaccgaaaaaggatcaactcataattagaaaagccggaaagaaacctatccccagagctgtgcgaatgctttcgaaaacatgtgaggagcgactgttaaccgcccaacaaagccagaacaactgggggtaaacccccccatactctatctcgaggaacattta

SEQ ID NO: 30612 - DNA, 372 bp, Glycine max
  unsure (1)..(372): unsure at all n locations
  Clone ID: PAT_MRT3847_127647C.1
tcgctctcgacgaaaaaagcgccgccgcaggccggacaagcagacacccggacacgaccggggggcccacgaggcaggcaagaagaaccccaaaacccgagacaaaaaccagggaggacccgccccgcggaacgaaaaacacgcggcagcccgaccagagaaagaagccagaagggaaaaaaacacacccaccagaaaggcgcaagacactgggaaaagaaaccggaaccaaagccaaaanaaaacggggacaaacccccaaaangagacaaaaccgaagcgggagcacaaacaggagaagaccnggccgaaagcgaccaccaagaaacaaggaaaaagagcgaaaagccagggagacagaccccacacccc

SEQ ID NO: 30613 - DNA, 317 bp, Glycine max
  unsure (1)..(317): unsure at all n locations
  Clone ID: PAT_MRT3847_127648C.1
tacgactgcgagaagacgacagaagggactcgtaagtatcttagtcatgtgatgagaaatttatgtagtaacataataacatgtcaaacttcaactaacaagttttcaagctatgattatgaatttgctctcttcctttttgtttaatactttgttggttttgtttcaacatgtggtttcacagacctttataactggatataattgtggtaagtgtcataaagtgtttcattatagaaaagttataacaagtaaattcttggcacaaatatttttttaggaacaattaataactcanacagttaataagtcaataa

SEQ ID NO: 30614 - DNA, 337 bp, Glycine max
  Clone ID: PAT_MRT3847_127649C.1
ctcaaacgttggactgttcatacgtgcgtgaatgctgatgatgcacacaacttgtatcggtgaagtttaaatagcagaggggatgcttccattgactgcttacatggattaaccctcggagcacttgctttgactattaaagtgctacacagaagacctttatgaacctgttatgcatggagtgacctactgtagagtatggaaatgctcatgctgcaatcgaattaattaatcattgcactgattgctgcagattttgcaaagcctatccaaggtcaacgttgcatttacagagatacagaagaatatactcagtatgtacttaaagttcgtgatg

SEQ ID NO: 30615 - DNA, 1306 bp, Glycine max
  Clone ID: PAT_MRT3847_12764C.1
cgtgattcggctcgagctttggagtccatttcttcacttatagtgaacttgaagaggccaccaacttctttgatcctgccagagaactaggagatggaggatttggaactgtgtattttggcaaacttcacgatggacgtgtagttgcagtgaagagaatgtacgagaacagttatagaagagtggagcaattcgtgaatgaagtagagatcctaacaggcctacaccaccaaaacctcgtgtcactgtacggatgcacatctcgacacagcagagaacttctgctcgtatacgaatacattccaaatggaaccgttgctgatcacctccacggccaaagagcgaaacctggcacacttgcttggcacacaagaatgaacattgccatagagactgctagtgcactggtgtatctccacgcctctgaaatcatccacagggacgtgaaaacgaataacattctcctcgacaatcacttcagtgtgaaagtagcggattttggcctctcgcgtctcttgccaacgcacgccacacacgtttccaccgcgccacaagggactccaggttatgtggatcctgagtacaatgagtattaccaactcactgataagagtgatgtttatagctttggagttgtgttgattgagctcatatcatcgatgcctgcggttgatatctcgaggcgtaggcatgagataaacctgtccaatatggccattaagaagatacaaagtggggcattgcatgagattgtggacactactcttgggtttgagacggatttcaaggtgaggaaaatgatcagtgctgtggctgagttggcctttcagtgcttgcagagttcaaaagatgtgaggccctctatggcagaagtgttggataggctagaggatattagaagtgatgggagtcataggagcaagcatgaggtgctagatatatcagaagatgatgctgctttgctcaagaatgtgcctcctccaccttcacctgattcacatttggtgaccatttctaattctacaccaccaaatgatagccagtgatttaatgtgtgtttgggaaacagttgaatccaatgccaacggacaaggctacaacatagttgctttgaaaagtgtgattttcccgttcaacgtggatctaacccgtatccaaacacacccttaaattattgggtgtccttagaatgatagaactgattttgttatgacttgtaaattgtattttttttttattgtgaattcttttatgcaagtccataacattagtaaacaacacagatatgtgttaactgttgtaaaaa

SEQ ID NO: 30616 - DNA, 796 bp, Glycine max
  unsure (1)..(796): unsure at all n locations
  Clone ID: PAT_MRT3847_127650C.1
ctccttctcaaaccaattgaactctctccatcactcattactactactcttcctccaaacaattaaggcctcaataatcttcttccttccaaaaaaaaaactatgcaaaccaaggaagtagtctcaagcctcagttacttactcccttcaaacccttgttcctaccctcctagcaacaactacacctccatgatccaaaacagcattcccacatttcagttccaaagattctctaaccaaatatatggctgcaacaacagccacaacactacctatcaagttcctgacttcagtcctcaatcctcatgcatcagcagcaactccacttctgatgaggctgatgaccaaaacctaagcctcatcaacgagaggaagcacaggagaatgttatcgaaccgcgaatcggcgcgtaggtcacgcatgaggaagcagaagcaccttgatgagctctggtcacaagtggtgtggctcaggaatgagaaccaccagctcatagacaagctgaaccatgtctcagagacccatgaccaagtgctccaagagaattctcagctcaaagaagaagcctcggaacttcgccaaatgattagggacatgcagatacacagtccttgcggtggcccaaactccttcataacccctttggaagatcatgatgttgatcatgtgccttcagcatatctcagatctgatgattcttcaaaccaattcaattcgtgtaacaacaacatggacctccttggctgaatttgatcaagcaaggngaagccaaatttttaattatcatcatcttcat

SEQ ID NO: 30617 - DNA, 232 bp, Glycine max
  Clone ID: PAT_MRT3847_127651C.1
tttgtatgttcttgatttagagttaagggggaatgctagaggcccttgtatactaaaattggactttgtatataacaatgttgatagcatgcaggttattaattcaattaaagtcaaaaaaaaaaaaaaaaaaaaaaaaaaaaaaaaaaaaaaaaaaaaaaaaaaaaaaaaaaaaaaagaagtaaataaaaaaaataaaaaagcaaagataagagggttgcactgtaagtgc

SEQ ID NO: 30618 - DNA, 273 bp, Glycine max
  Clone ID: PAT_MRT3847_127652C.1
tagctcggatcggatcgacggctcgagcggctcgagcggctcgagacggctgcgagaagacgacagaagggaaattaattatttttgtgtatcaaaattattgggatatatctctatgatccattaatgcacaagaaataatgtctcattaataaggctcttaaatgattcattaatactactccattatgcctccatccattaatgcacgggatagaatctttagtttcagtgtataaaaaaaaaagaagataaaaaaaaaaaaaaggggcc

SEQ ID NO: 30619 - DNA, 663 bp, Glycine max
  unsure (1)..(663): unsure at all n locations
  Clone ID: PAT_MRT3847_127653C.1
cattaattaatatctctatcttccaattcttcccctccaaatggcagactccacccctctcctctcccaacccgactcatcatcatctccggacacacaaaaaccacaaccaccaccaccgccacgaaaccaacagcatccctctctggggtccacagtcgaactctgcataggcgagttcaactggtcccagttcctccagtcgatcctcgtctccctcgcgtggatctttgacgcccagcagaccttcatcagcgtcttcaccgacgccccgccggcgtggcgctgcaccgagcaggccggcaatgcatgcaagactgccaacaccaacacagtctgcaacctcccagaaggctcgtgggcctgggacgggcccacacaggcctccatggtgtcggactggggcctggagtgcgccaactcctccatcacgggccttcccgcttcgatgttcttcgctggctgtttgcttggcggcttcctgctggcctcgctggctgattcgtcgctcggccgcaagaacatgctgttcttctcctgcctcgtcatggccatcacttcctttctcgtcactttttcgcccaacgtctccatctattctgccctcaagtttctctgtggctttgctcgtgctaccattgggacctncgcgcttgtgctggc

SEQ ID NO: 30620 - DNA, 716 bp, Glycine max
  Clone ID: PAT_MRT3847_127654C.1
taggcatggtgcttcagaggtgaggggtgatacttttaccccatcatatgcgcaggatttcaaaccagcatacatggagggatttgaacaggctaagggggataccccatcatatgcaggatttccagcatacatggagggatttgaacaggctaagctggggacatcctgccaaagaacaggcagggtcacaacaaaggtatccaccttctggcccaggctttactggagagggaagatagtgatagtaattgagttagtgggcggcttgtattaaagtactaatcacattctaagatgattgtttgcccttgccatttggtggaacattgatttattgagctgtcgttgtgtatccatcaatttttagttgcactattctgtgacaaagttggatgtggtatgtaaagttagtactggctgcaggcttgttgtttgaacatgcttgaactatgaatttcacgtggctctttcctgtcttactccgctcccattctccttctcattgtaacggatagaacaatgaataatgtggatttgcgttctttaagtcatgtaacaatgtaatcagtttccgtaagggccattaatgctacagcccacaatcatgtctttctctttttgcttgatttccttatacttcatttgggattgtatttcaagttttggaagttctaatacttcaaatgttaaaagtacttagtgcggttgaagtc

SEQ ID NO: 30621 - DNA, 241 bp, Glycine max
  Clone ID: PAT_MRT3847_127655C.1
ctctgcaatagcttcaccatcaacaacccctgcattctttgctaaaccccattacccaagcctaggtcctctgctcaacttaagcactctctattggatcatcacacattcaatgtcattatattcaaaaatgacacttcagaagcttttatagttgccaaaaaacactcttacagagacttttgaaccatttgtcaccaacagatttcaaacgctttcgtgccaaatttgtaagctgctc

SEQ ID NO: 30622 - DNA, 534 bp, Glycine max
  Clone ID: PAT_MRT3847_127656C.1
acgtaggatgttcgcggccctcagccgtgaattcggatttcggctcggggccgaactggcagaggctaacgaattgaatggagctataaggctatgggcttggtgagaaagtgaacatatacctttgtgatggagtggatggagaagagatggttgggattggggtggaagtgggaccaaagacgttcacgaagggagtgtgcacggtgggttgcatgatcttcactggccaatggacgtgcacaactcttgatgatggtcatacttgggatgcgtataatcacatagcagggcatcacgccaaggcaggaccagaccatgctttgaactaagggggtctttgttgactacgagatggatcacttggacttggtcgagtgtactgtgcgttgctgatgtgagagaatcacaaatgcacgatggtgctattgagtgtatagactggatggtaatagccttatcctcttgctatgacctaaaaggtgtatagatgacgatctgtaagaaaaacaaaaaagggcctgcggctgctag

SEQ ID NO: 30623 - DNA, 194 bp, Glycine max
  unsure (1)..(194): unsure at all n locations
  Clone ID: PAT_MRT3847_127657C.1
tttctacacatccntagnttnnatngttccgtcgttgacgatggcgtttcgggtgcgtagcctganntncgctatnctctttctntctctntctcttgtnaatcgcttncgnaaatgtcttcntnncagagngttncgatgangggtgggaanatcgatgggttaaatcagattggaacgcaagatgagaacgt

SEQ ID NO: 30624 - DNA, 752 bp, Glycine max
  Clone ID: PAT_MRT3847_127658C.1
ccagcgtccgcattattagttagtcttccttatcccaaatgaacgccacactcttacaacccccactctctcccttccaacgcgccaccaccacaaactccccggaaccccgcgaccagaagcttctctccctccttcgagaccgcaaaaccgaagaagcctggctcgcttactcccactccacgcacctccctaaccccacctgcctcagtcgcttggtctctcagctctcttaccagaacacactctcttctctcacgcgcgcccagtccatcgtcacccgcctccgcaatgagcgccagcttcaccgcctcgacgccaactgcctcggcctcctcgccgtctccgccaccaaggccaaccacacgctctacgccgcctccctcctccgctccatgctccgctccggctacctcccccacgttaaggcctggaccgccgtcgtcgcctgcctcgcctcctcccctgaccgcggcgatggccccgccgaggccctccagctcttccgctccgtcacgcgccggctccgccggctccccgaccccgccatggccgccgcgtcgcgccccgacacggccgccgtcaatgccgcgctcaacgcctgcgccaatttgggtgatcccagggccttcttgcaggtgttcgatgaaatgccgcagttcaatgttgcccctgatgcgttgagttataacactatgattaagctgtgttgtagaattggtagaaaggacttgcttgtgtttgttctggag

SEQ ID NO: 30625 - DNA, 805 bp, Glycine max
  Clone ID: PAT_MRT3847_127659C.1
ggtccggattcccgggtcgacccacgcgtccgctctttctcattttctctatctactggtcactttctagttgcacttatattcaaggatgagatagtaactaatctaaatcatcatcttaacccaactaactactttctaactaattggctatctccaacaccctcccaagttggtagttgtttattaacatttacagcttgagataaatactagaaaccgaaataacgtagtcagaaggatggaagaaagaagaggggagaatggtgagttcacctcaaatctgcaggaggcaaaacaatttaacaactttattgaagggatgatgcttgtggaaccaccatttgctggtagaatgtatacttggttcagatgggggtgggcgcttgtagtaagctagacaaatttcttctttctcgtgtctggatgcatggcatctgagggtgaatggatttatgcctgttagagggttcaaagactttgttaaggagaggtataatcagggttggcccaagggtaagatattcagccttaataatttttttactattaacatctatatattagacgtatgcgttattaagagccgtcacactcagtgataatattctacgtgttgctatgcgtgaggtcctgtggtgcaagcttggagatcctttgtcttgaaagagaagctcaatagattgaaagcatacataaaggtgtggagcaaagagaattatgatgatctggaggggacgtgcaatgaatgtcgtgctcgaattgaatcgctggacctcaaggcagaacaaacaggtctgtctga

SEQ ID NO: 30626 - DNA, 367 bp, Glycine max
  Clone ID: PAT_MRT3847_12765C.1
accgctcgtagaaacacgcgagcgtgtatttttttgactcgttgcgacacgactatagaaggggtccacaaacgatcgacatagtatctaattttctctgtacactcttagaaatatcatttttaattgtgtaattgcggcatttattactatgcttgactcagattatggtgagaacgtgcttatggatttccatcaccctattccggatcatgagcttcgatcccacatatccacaaaatttgccttgatcatgagacttcatccgttgggcaaatgatacatttctggtcaatatatgggcgagtagactatttttgccttttagatactgaaactcacttaaaagatcactttctccgatcga

SEQ ID NO: 30627 - DNA, 336 bp, Glycine max
  Clone ID: PAT_MRT3847_127660C.1
cacgtctctatacgctgcgagaacaccacagagggagaactcatcctatctaagcaacttatttcacattctgtttgaccttccttcattccccgttctgtatatatcttcacactaatgtggctatcagccccttcaacacctcaaaaatctctctctctacaccattctctacatctgtagaatcccaccataaacgtaccaatttcttccgtacaacatctgtaaattccaatcctatctgactagtttgatgtatcggggaatgcctattccattctctcgaactgatgatccaacacgttttctagaactgatatccaatacgggtccttg

SEQ ID NO: 30628 - DNA, 524 bp, Glycine max
  unsure (1)..(524): unsure at all n locations
  Clone ID: PAT_MRT3847_127661C.1
catgacagctcgactatcgtagcaatgtaccaagtccgtcacagacgtaatcttctatgcggtgtttgttaaaacaaggaaccgataacaaataggttaggggatgtttagtgggtgggttgactaggaatgataacaatagtgatgggcctagtggtacagatagcgcaaagggcctaccgaagccagagcggcggcagaggagcgcggtgtggccggctaggcttaaattgcctgcgacgacacacgtctaccctgttgcggtgccatgatgggcacgaggcgctgagcactgctacactggatacgcttgtaggccaacaagggccaccccggccgcagccaataatgggcaatataaaactggggtacctacttagacagtagtgcacgtacgagctagtaacgccgccggtgcaatgngagcggtttttaccaaaagccggaatgcctacgggtaagtgtattacttagggtatgggaggttgatataaccagctgcgcaggtggcttgtgtaccagca

SEQ ID NO: 30629 - DNA, 308 bp, Glycine max
  Clone ID: PAT_MRT3847_127662C.1
ttgactcttcctctgttccgcttctctttcaatccagccctcattcctaatccttcaatccaaccacctcatccttacactcacatatacacatatcttaacccctatcgtccctcctattgcttcaaaactcatcctcaaagaactcaaagactttcataaagacccaccaacttttttcaacgcttgtccattttctgaagacattttccattttccatcaacaattaattatccttcttatattccttattcttgaagtttattcctaatcactatttactttccttccgattatccttttaaac

SEQ ID NO: 30630 - DNA, 1173 bp, Glycine max
  Clone ID: PAT_MRT3847_127663C.1
gagaatttgttcggatttctacagaggaagctgaaggataccgcaaaattgttaaactaagaagaagtttgatgtcatctatattgaagtccagggaggacaaactgacactttcaaagaaagaggaaaagctttctggagatgtgaaattgtttcaacaggaggtttctgccgcaagagcttccttgcaggaactatcttcaagaaagtcaagcatccaacaagatatagcatcctttaagcagaggattgttttcatagataaaagagtcccagaattagaagcggaaaagaaagttgctactactgcaagaaatttcaaggaggctgcacgaatagctactgaggcaaagtcactgtgtgttgaaaaagagagcatccaaataaacatggatatggctacattaaatcttgagaagcttgaagaagaaatcaatgacacccttaataaattacaggagactgaggggatgattttattgaaggagaaagagttggcaatggtcagataccaaaagctacttttggcagctgctactgctagagctgaaaaagctgctgctgtagaaatgggtgatgtggaagaagctaatctcctacttgctgaagccgaggcagcagactgtgatgctgagaaacttaaatcaacttacaaatttgaggcagaagacttcactgatctacaaagacatttaatttcaatggatcttgtttcgcatcttgatcagaagcaactggaagaattagctgtgtcacttcgtctatttactggctgattgttgaaaacaggattttaatggaattggtgattgataatcaaagatatgaaagcttagttactggaagtactgaagtacgacatgagtggccaacccttgggatacaatgtttgtactcttcatgcatctctacattttaacgactactgagtatgtcatttgttcaattttcctttttttccttcactttttctgtttttgaggggtttgggtcgatactgagtatgagatttgtgttttcttttttcaattcttaagggttctgcccgaaccctgaccaaaaatataatggaaggactcagaacaacaaaaagtgttataagcaactatgcttatgaggatattgatctgctgtgaggattgtgtttattttcaaccagaaatatattctagg

SEQ ID NO: 30631 - DNA, 685 bp, Glycine max
  Clone ID: PAT_MRT3847_127664C.1
attgatgtgaaaggagattcaaattgtggttatcgtgctgttgcagctcaacttggtatgggtgaggagtcatgggctctagtccgtcaggatttaattagagagcttcaacagtggcaagataattatgcgaaactctttggtagcaatgaccgagtggctgaactgaggaaatctttgtatgttggcaagcaggcatctgtcgctagttggatgaccataccagatatgggctatgtaattgcctcaagatataacgtggtcctagtcactttatccttgcaggagtgcatgacctttttccctcttagaggacgaccaccactatctcagtcaagtcaccgtcttatttccattgggtttgtgcataaatgtcactttgtacaggttgttttgaaggctgactcagcaatacctcccaccgctttgcagtggtcaagatactgtaatgctgaatctcgctcttgggaaacttcatatgttagtcgcatgcaacaatttaggtcgttgtttccacaaaaagaaataggttatgtagacattattgaggattagttagtgccaaattcgccacttgtaccctccaggttaggtttcctgtcttcctctcacgtgttctgaaagctggttcatgtcaagcctgtgtaacttttttcatttacttaatgcaatccctgcaacaaga

SEQ ID NO: 30632 - DNA, 496 bp, Glycine max
  Clone ID: PAT_MRT3847_127665C.1
tcgcaagagtggctttttggtgaattgattggtgatcccgagttggttgagttcactgcgcatagacatgttccttaatttccccaaatattaaaacaagattcaaagcacgtcacttacgttcccgctttctgtttaacaagtgaaaaacttgaaccttttgagacctcagttctctgccatggcaaattctcatttatcaacaccttctgagctattttcaagacaacataagccccctagggttccaaatcttattgggggcagttttctggactcaaaatcgttaactttcattgatgttatcaaccctgcaacacaagaggttgtttcacaagttccttgcaccacagatgaagagtttaaagctgcggtatctgcagcaaagaaggcatttccatcatggcgaaaaactccaatcacaaaacgccaacgtgttatgttgaagttgcaggagcttatgcgcagaggtgtgggtaaactggagctgaatggg

SEQ ID NO: 30633 - DNA, 376 bp, Glycine max
  Clone ID: PAT_MRT3847_127666C.1
gggcaagtcctcctcctcgtcctcgtcgtgtttctctctgttctgattcgagatccgccgtgtccatgctcttcagattctctctcctcctccctctcttcctctctacggccttcgcttccgagtcagatcataggtatcaacaagatgacccagttatcctttgggtgaacaaagttggtccttataacaatccacaagaaacgtacaattattacagcctaccattttgccgttcacctggtaatcctgcacacaaatggggtggtcttggtgaggtcctgggtggcaatgaactcattgatagccaacttgagataaagttcctaggaaatgtggagaagaccaccttttgccgtatagaacttgatgaggc

SEQ ID NO: 30634 - DNA, 485 bp, Glycine max
  unsure (1)..(485): unsure at all n locations
  Clone ID: PAT_MRT3847_127667C.1
acgagtatgaggtaaggtnctcacctttgctcagtctttgcttgttcacttttagttcttacaaaaatattaatcagattccatgtaatcatttcttaccttccaatcaggagagtgaaaattagatgaactcctcctcatgacactctttctcttcagttgttgttccagcttagaagcttgatgtactaagttctccaattccacatgattttgccactccacaacatcccttacatcactatttagcccatgtaggaaacgagccatagtagcctctcaatcctccataacattagctctaatcatggaaacctccatctccttgtaatactcatcaacacttctactaccttgtgtgagtctttgtagcttgttatgaagctctctttgataaagagaaggaacaaatcttcttctcatcaaccncttcatnncttcccaactatccaccaagggttctttatatctcgccctctcccttt

SEQ ID NO: 30635 - DNA, 237 bp, Glycine max
  unsure (1)..(237): unsure at all n locations
  Clone ID: PAT_MRT3847_127668C.1
antttttcatgctcaganaaaaaattaaaaaattgagtgtgttaattgttaagttctttcaagcgttgtggatccttttcattcaattttgttggcctttgaaaaccgaagaagaagcactgtgattctgattctttatcggtcgttgcanttggtgcctccgtctttttcatccctaaccccactccacacaacatacgatnnncancgcnnnanggnncganggatcaagacggt

SEQ ID NO: 30636 - DNA, 1475 bp, Glycine max
  Clone ID: PAT_MRT3847_127669C.1
gcgtccggtccgtgttatcctaatatcttgtctccgaccgttttggtaccttataaatcctataaataacactttacttcttacagcgccatcaacaactcctatcttcttcttcttcccaggaactctatattgcctacacaaactacccttctcttatttcttttttcctttcaatctcattattattcttgtctgaggctctggatgatgatgatgatggtactagccccatcctacctgggctgcctgatgatgtttcaaaacactgccttgcactcgtgcctcgttcgaacttcccagccatgggtggtgtctgcaagagatggaggggctttattcgaagcaaagaatttataaccgtgcgaaaattggctgggatgcatgaggaatggctctatatcttgacagcaggcagtgaaggaaaagggagccattgggaggtcatggattgtcttgggcataatcgccgatctcttccaccaatgcctggtccagcaaaggctggctttggggtagtagttcttaatggaaagctccttgttatggctggttattcatccattgatgggactgcttctgtctcagcagaggtttaccaatatgattcttgcctcaacagctggagcagattgtcaagcatgaacgtggctcggtatgactttgcttgtgctgaagtcgacggcttggtttatgccgttggaggctatggcgcaaccggtgacagtctctcaagtgcagaggtgtatgatctggataccgacaagtggacgccaatagagagtctccgtcgcccgagatggggttgctttgcctgtggattcgaggggaagctctatgtcatgggtggaaggtcaagcttcacaattggaaactccaagtttgttgatgtctacaaccctgagaagcacgggtggtgtgagatgaaaaatgggtgtgtcatggtcactgcttatgcagtgctggaaaagaagttgttctgcatggagtggaagaaccagcggaagttggcaatattcaatccagaggacaattcatggaaaatggtaccagtccctttgacagggagttcaagcattggttttcggttcgggatattggatggtaagttgttgcttttctcactggaggaagagccttcatataagactttgttgtatgatccaaatgcagcaccaggatctgagtggcacacctctgatataagaccatctggtttgtgtttatgcagtgtaactattaaggcctgaaaagttggctgattcagaatttagagaccttgaggaactaaggacctttgttggtttactaggatggatgatgttaatttagtgtttttgcctgttcttgttggttttatcatggcatgtcatctctctgatctatggttggattgtttctacagttattcacgtaaccattgactttgaccaagcactacttcaaaatattgtgggcaagtttctttttccttt

SEQ ID NO: 30637 - DNA, 263 bp, Glycine max
  unsure (1)..(263): unsure at all n locations
  Clone ID: PAT_MRT3847_12766C.1
aaagaaaacacccgggcggcgngcagagccgccganggaggcanaaaaaaaaacacaaaacacacnggagcncaacacagccaaacgcggcgacaacgaagacgagcaacagaaannccaacaacacccaacaacgctggggggggggcgannaannaannnanaannannacaaaaaaaaaaacagagaggaaagcaccacgccaagagccaagagcagncgcagcggccagaacgagaggcaccgaaggggaaggacgaaa

SEQ ID NO: 30638 - DNA, 196 bp, Glycine max
  Clone ID: PAT_MRT3847_127670C.1
gatgacagtaatcaaattccactgggatagagaagatagacttacaacatagcagcgtagattgagtactactcacaaggcgaggcatggacaacagtcatctcctaccatactagagtgagtcaatagccctcaccagtccaaaaggaagaggggactggcagtcctaaaaaggtgcgcattcttgctgaaggag

SEQ ID NO: 30639 - DNA, 1739 bp, Glycine max
  Clone ID: PAT_MRT3847_127671C.1
ggtgaatgggaatcctcctctttgcatgtcgtaatcgatcgcatcaacatttcaattctctttcctttccttttcctccttttctcgatctctccgtcgggcatcatcatcatacccaaacaaattctctacgcagatcgaatcaaagctcctccatccatttccgagatgagcacgcgaccgtctcagcatcgaacctctcgaacttaattccttttttgagctctttgttattcggtgtgtgcgtgtccaactttgaacgcactttgatactgccactttctccaccacaaagagaaaaaagagagaagaaaagcgaatcccctgtgatctctcacacaattccaattcctctggatctcgtctcgatcgatagatctcgaacatgagcactggggagcttctcaacatcgaacctctcgaactcaagttcccctttgagctgaagaagcagatctcatgttctcttcaattgtccaataagaccgatagctatgtagccttcaaggtgaaaacaaccaatccgaagaagtattgtgttcgtccgaacactggggttgtcacgcctcgatctacgtgtgatgttatcgttaccatgcaagcgcaaaaagaggctcctgctgatatgcaatgcaaggataagtttcttcttcagagtgtaaaaactgttgatggtaccagtccgaaggatatcactgcagacatgttcaacaaggaggcagggcatgtggttgaggagtgcaaattgagagtgctgtatgtttctccacctcaaccaccgtctccagtcccagaaggttcggaggaaggatcctcacctagaggttctgtttcagagaatggaaatgccaatggttctgacttcacacaagcggcaagaggatttactgagcgacatgaatctcaagccagatctgcagaggctagagctcttatctcaaggctgactgaagaaaagaataatgcaattcaacaaaatagcaagctctgccaggaactggagctactgaagagggaaggcaacaaaagtcgtggtggagtctcatttgtcattgtcgtattaattggcttgcttggcataattatggggtatctcatgaagacaacctaagcatttctgcgattcaatctttcaccatagttttcgatcttagtttctttgttcctgactattcaagcaattatgaggaaagttaaaatagatcaattcagcagatgttggtttttctttttatttttgctatttcttttctttgggtggataacattttggaagtagaaaacattaggggaagttgtgggtctggtggttaatcatattgtgaactgactcatactttcgtaacatgcattctttttgtaacttaagaggggaagcttcttgtttcttctttttgtggttcgtctggtgactacatggtaatgtcaagttgtcaatgatgaccacgaataacatcattcttcaacattaggggaagttgtgggtctgtggttaagcatattgtgaactgactcatgctttcgttaactgcattctttttgtaacttaaagaggggaagcttcttgttttcttctttttgtggttcgtctagtgactacatggtaatgtcaagttgtcaaggacgaccacgaataacatcattcttcatggactctctctctatcgtcttttcatgtcaagaatgacctttagatgacagaatataactctgttaattttttggtctttaaaaaaaaa

SEQ ID NO: 30640 - DNA, 328 bp, Glycine max
  Clone ID: PAT_MRT3847_127672C.1
cgggaaccaagtttgcttgcgtgtatattcattttaccatcaccgttgaatctcacaaataaaggcgcatcgacatgcatgtctcgaagaggaaagggaggcaacggtctcggacagggacgagccacaggacaccgtatggttctgacggataacattcagggaatcatcactcccgcgattcgccatctggccagacatagtggcatccagcgtatcagtggtcatagctatgacgaaactctcggtattctcaagatcattctacagaacgtcagtctcgacgctgtcatctagacttaagactctcgccgcaagatcgtcactg

SEQ ID NO: 30641 - DNA, 1150 bp, Glycine max
  Clone ID: PAT_MRT3847_127673C.1
tcctcacaacaatattgtttcatcactcagatcccttaaagatgacaacagcagaagaaacttcaaacttggatctcatacgccaacacctattaggggaaaatatcatctcagactcctcctttttctccaatctccttcatcatcctatgaaacttgaagcaccctcatcaccagaatttgatttcacctcatatatctcagacaacacaagctttttcactttccttgaaggctatgatttgatggcagacatgaaatttgttgattcagacaacaccatcccttcaaaggaggttaagaaatgcaatatttctcctgaaccattggtgtcatcaaaagagaagccaaagaagttagaatacgataaggcaaagcgttataggggagttagaagaaggccttggggaaaatttgctgctgaaatccgtgaccctacaaggaaagggacaagggtttggcttggaacctttgacagtgaaattgatgcagctaaggcctatgattgtgctgctttcaagatgagggggcagaaggctattctgaacttccctcttgaggctggactgtctgatcctaagcctaacagttgtggcaggaaaaggagaagagagagccatgatcatgaattggagctgccacaagtccaagttcatcatggtgtttcctgagaaaaagtgagaagatataataatagatttagttgttttgtgagtagcattaagtttgttgcctagaaaaataaggttgctttgccttttagtttgtacgtagaagcaaggctaatgtgaaatgtctatatgaatctatgcaaaaagcatgttacgaaagttttactaactttgaggagttttaaaaaaatattaatcatgttatgaaagttttactaacttttaggagttttagaaaaatattaatcagtttatgtttttttttaaccttcaatttatcagaaaattttttttctgactaatccaaaatttgattaggagatcaaataatctgataaaacattattttcactgaagataatcaatttatgtttgaagatacaccgaataaaatgaacaaacacattttcttttttgttgtttgtctctgtttttgagggaaacatgcaaattcttttcagttcaccttcacttttgtc

SEQ ID NO: 30642 - DNA, 588 bp, Glycine max
  unsure (1)..(588): unsure at all n locations
  Clone ID: PAT_MRT3847_127674C.1
accggtccgnattcccggtcgaccccgcgtccggcagcacagaagagggaaaacgggggcggcggcggggaagaaaacaaccatggggcgcgtgtccttttacaggggctatgggaagacattcaagaagccgcgtcgtccgtgcgagaaggggcgtgtcnacgcggagttnaagctgggtggggagtgcgggcttcngtgcaagagagagctggggggggggcantacgcgctcanccgcatccgcgacaacgcgcgggacctcctcaccctcnacgagaagaacccgcgccggatcttcgagggggaggcgctgctccnaaggggtgccgttacgggctcctcnatgagacacagaacaaggttgagtacgtgctcnccctcaccgtggagaactttctcgagcgcgcgctccagacccttggtttcaagtgccggcatggcaagtccatccaccatgcgagggttcttatcaagcanagacatatcaggggttggaggcaaggggtgaacatcccatctttctgtgggaggggtgactcacaggagcacattggcttttcacttacaagtccccttggggggggg

SEQ ID NO: 30643 - DNA, 442 bp, Glycine max
  Clone ID: PAT_MRT3847_127675C.1
cccacccgtccggaaaatcctaaattttttgggttgccaaccactttttttttgtttttggaaaattttaagttggcaaagaaaatttgaatcatgtcggggcaggcgtttgtcgccaaccaccttttgggggccatcgaaggtacccacctaactaacgctgttttaatgggccaagacggcggcgttggggctcaaagtcccgccttccttcagttaaaacctgaggggatacctgccatcatgaatgactttaatgggccgggatcactggttccacctggatggtttctcgggggccccaaatttttggtcttccagggggaacccggggctgccattcgggggaggaagggtcctggtggggttcctgtgaagaagaccggggcggccttgatcatgggcattaatgatgaaccaatgactccaggtcattgcacca

SEQ ID NO: 30644 - DNA, 383 bp, Glycine max
  Clone ID: PAT_MRT3847_127676C.1
gcggctcgaaccactcatcagaccactcgtcagcgcagccatccgtacagatgcggggaagacattgaggtcctggtgttaggaggtaacctacaggtactggtgctatagcagtacacacggtgatcggctcacttcctctgctttcatcatcatctgtctaagttggttacttgcgtcatcgcattcaggcatctctgtcacgatacatctccatcaatttgtgaatacctatactttagtgtcttcacacaccttattctcgtcaatcgattggttgctatctggatgttccgaaatcttctacagtgcatttgatgctgagttaacacaggttatccctgtgatcaagagatccattggtggcactcgtattggaggtc

SEQ ID NO: 30645 - DNA, 433 bp, Glycine max
  Clone ID: PAT_MRT3847_127677C.1
caaattacagtccatgtaagatatgatcatagtaattaaattcaaaataacaccttttgtcatgactgattcaatacttaattcaacactaattacattgcatgcatcaacaaacccgtgctttactcacacaggcaagtaactcctcatctgcttcaaactttgtcatgtcctccacctttaagctaacataagcctcaatgccaccgccattctttgtgtctataaagacaaccagatttttaaaagttaaagcaggtgaacctacccatgttggttctccccatccaaaatcagcgtcgtagagaggaaacctacacaaactagtaatattaaatgggactagttcccccttcagaagcactctatatgagctatccttaaggaaatccaaatggtcgtttccatattgaagttttctcacataatcctt

SEQ ID NO: 30646 - DNA, 660 bp, Glycine max
  Clone ID: PAT_MRT3847_127678C.1
tagacgacagaagggagagttactgaaattaaaaacacaatctttatatgctttaaccacagttcacagagtcattcttatccaagaaacaatgcttcaatccataaataatttgtagaccctgaactcttgcaaacaaaaactagattccgcttattagttagagtaaattataatagttgtgttaaacaaaaagaactgcagcttcaaagttatggtaaaggtactagacaacagtaaaacgcgtgtttcaagtccgatccaccaaaatttttagtcggaggattcgaacacaaacttttaaaaattaaaaaaagaagctatggaaaatgggacccgcaagcgaatatttcggaatctctcttgagcatcgctcatggtgaaagcgcgataagctttgagcttctttagttggacacacagaaaatcgatgagccccagttaccattgtaattatcatctttatttatatatttttccgttgacttgtgatactttgtgaaacatttacaaatcatatcgcaaaaagtaaatttgattttcgttactaatgtgagaattttagaaagaatcttgttattagataagatagcctttaagtatttttttaagcgtttattgaatctgtcccataatataactcacctaaattttgattag

SEQ ID NO: 30647 - DNA, 197 bp, Glycine max
  unsure (1)..(197): unsure at all n locations
  Clone ID: PAT_MRT3847_127679C.1
gggctacccgctgtgtttaagcttatcaataagcggaggaaaaagccaaacaggagaacaaagggaatataaatataaagagtgagaaataggtttattatagggtaaggaagtnaggcacatgcagctatcacgtgcgggcatgtgacgagtagcctgatcaattgcataggttaccttcagaacggaggaacgcc

SEQ ID NO: 30648 - DNA, 371 bp, Glycine max
  Clone ID: PAT_MRT3847_12767C.1
ggctcgagctctagccggttttgttcgggggacccatagataatgactggattgaagctgatctaattgctgaccgaggcgcgggaccacattttacaacggaacatctctagggcaccatggttgggctcatagtcgatcagcacacgaggagcaggggcactagctgactgcataggctgcctgtagtctaccatgaagcaggacatgctgttcgacgatgtctattggagcatgcatagcccttgctgtaagcaactattgatgcacatgctaatggtggtcttgggcttggacaacttgttccgattgagaacctagtcattacacaggttcagctccaccatcttacttgagtgatactagtccgt

SEQ ID NO: 30649 - DNA, 327 bp, Glycine max
  Clone ID: PAT_MRT3847_127680C.1
atggaaggaccttgtttgacgagacttgagatggcagatgcttccttactgatgttgctggcagctgtatccagattcacaaaaaagatgagtggatctggaaaacagagccttggaatactcccattatggtgggaatctatgacatgggtgaaggagcttttccgcagaaaccgtggcagcacttttcccagcatgcattctgtttacatagcagaattcgtcttaaccgatggagaagttggtggttggccctcacatggacagtgtggcagcaccgagataaaatcatcttctaaaatgaaactttggatggtgacaaattaa

SEQ ID NO: 30650 - DNA, 3152 bp, Glycine max
  Clone ID: PAT_MRT3847_127681C.1
gctcggcattcctaatttctttcatatctataacagttacatttcttatagagaaaaacactgtatgaagcagccaatcgagaagacagtgaccaagacagtaacaaaaccagacaaacgacgatccacagtgacggacgataccgcgagaaacgactacgtgctactggctgcttccggccccaacttcgcccccctgatactgcatgagactagacggccctgtcccgtcgtccgcccaccgtcccgtcctccactcccgattcaaacctaaccctcgattccctttccaatcatcccttcctaatagaagtttcatttggtactatgtcggtctacaggagcttccacaatgtgtgtgtgagggcaaactaccaacatcttgttcggttagaaatagtcattgaattaaaccaagagtcttgttgtgtacaagggtgccggggattcggtgatcgatccccttgacccgtttcttgaatcctcatgttattgtgtgtattcggaaattgtccagtgggctatgtgggtgcgtttatcccaatttttcttttaaactagctacagctctctccaaaattattgaggcagcaaaattccacatcaatgtctctttcaaacgagtgtcttctccttttaaatttccactcccaccctttgtccgtttgctgacccatctcctaaatatagttgtgctgttggtctgaaattaggtacagactggggtattttgccagcagcggtgagtttccatatgtccaataatcctcccaaaaattgatttaggctccattccacaatttcgatctaccatcaaaaaagtacgctgacgtgatcatgcgattatgaagggctaatttaagatctgcccaccatagtgaggcgttattatcattcgttgctgcatcaagacccctccaacctccatactttgaatccagaatccttgcccataactctccattgtggtagaataagttccacttccatttagcaagtaacgcaagattcaattttgtgatgtccattattcccaagcctcctttgttcttcggtagacatacgtcgtcccacttgacccaagcaatcttatgttggtcttctccggcaccccaaagaaaccttcgttgtatgctgaccagcctatctgccacccttctaggaatcttgtggctaattaatgacctcttcatactcttgctcaggtttgccaaaaatggtgtggcctgacaatcaaaagaagtggccagaacatgaaaaatgcagttcttagatgttgattacgtctacaaattggtaatactaatagttacaaagctagttttagcaaaattaatttttaactttaaaagctcttcaaaagtactcaatatgatcatgattgctttaatgttctccattgtcccctagccaaagacgatagtatcgtccgcgtactgtacgatattaaaatccacctaatcactcccctcagaaaaacttgtgtagatttttctctcaatggcttccttcatcagcacattaaggcctcctgatacaagattgacaaggatgagattgacagtgacatatttgaagaggatcctattatgcataaattcatagactcagttaaattgtacaaaacaagggattgctttcgagtctacaaataaagttacttcttcttcatcagttcacctaattatcaattaccaaagcagcttaatctcatttaagagtacacaataaggcaagcataaattcgtaacagatgggtcgcagccgaggctgatcgccgcagtttgtgccggcctactccaacgttgatttgcagcggctgtgtgctcgtgcggctgcgagtgtcgcggctgggtgcgcgtgtggggtgcgggaggtacgccattttccgccaccccgccataaccgccacgaccgccatcccaaacccgccacgccaccgctattcggtggcgttttttcaaaaaaccgccatgaaaatccgctatggcgccgccatggccgccatttaacaacactggttgaaatccatccttgaacacaatgcatgacttttgctttctcttagcttcctccaccacctcatttgctacaaggacaccatgtaataagtgtctgccttcaataaaagcagactgtctttcgtcaataatagatggcatcaccttctttaatcttctagctaagatcttactaacaatcttgtaaatacatcctattaacgaaataggtctgtattccgacagctgttgtggatcaggcaccttaggtattaaagctatgaatgaagcattaccacccttcggaaagataccattcacataaaactcatcaaggaaccggaggatgtcgggcttgatgattttccaaaacttcttaatgaacttgaagtttagaccatccgggcccggacttttatcacttccacagtcccaaattgcttttctcacttcctcctcctcaaatctgccaaccaacatagcattctgctgctgattgattttcagaaatggaattccctcaagagttggtctgataggctcaggttcattaaatctttgctggaaaaattctctaactgcctccttcaccctttggggttcagtcacccatgaaccttcaagcatgatgcctttgagcagattttgtcttcgagacgcgttcatcatgagatgaaaatatcttgagttgcagtcatcttctttgatccacctagagcgagacttttgcctaagtaaggattcatgtgagtgggcagccacccacaagtcttcctgtagctgccgcctggtcatcatttcttgtgatgaaagctgtctgtccattgtcgcctgttcaagtctgtttaactcctcttccagctgctttaccttcttgaatgtatccccatattgctctttattccataccttcaatctacttttcagtctttttattttttctttaagtacaaagcctccccatccactttgatgacctgatgtccaacattcattgaccacgtccttaaaggttttgtctaacagccaacaatcaagaacccggaaaggtttgggtccccaatcaatgactttcgatctgagaatgattggacaatggtcagagaaatttctgtccaaaatgctttgagtagtatcaggccatctagtcat

SEQ ID NO: 30651 - DNA, 395 bp, Glycine max
  Clone ID: PAT_MRT3847_127682C.1
ctgctcccccaaggatctactggttcagtgaggagaggtgagaaaaataagaattacaatggatgtaaatatcaaatattacattaagaaatcacatacaatgataaactcatttcaacaaaatctagtcaatggcgttgctttcattcacaatatcatttcagtgcacagtagcatgaagatactcgattgatacatttcacagattagtaatgagatttttcaacaactcgggtatgaaattttagtaaagtgcatcttttaccctcaatctactcataactacggtacagccaaaagccgccatgccaacactgccgtgctccaattatatcacatgccccgtaaggatcgtgtcaacattgtcattttcatcacaattcacaatgcggcag

SEQ ID NO: 30652 - DNA, 381 bp, Glycine max
  Clone ID: PAT_MRT3847_127683C.1
ctttcgctttgggggacagtgagaaaactttgccagcaaaaaaggtcccaagattgatatcttgcatattggctactgttactgtcctatatttttcttggtgggcttcctatttattgcttagttcattgtcagctattttacattacctgtatgatattatgccagactgcatgatgtaagcattgttatttgattcatgttcaatttcaaatgattgtatgttcattggattgtgccaattgtttcaatacacaaacaatttgttgttttccatgttttttgaagccaatgatgactgtgatttttttcattgataccatttgttgagccagtttggcaagcttaaaatgttgtatttttctttgaccttttcccttc

SEQ ID NO: 30653 - DNA, 2958 bp, Glycine max
  Clone ID: PAT_MRT3847_127684C.1
atgactagatggcctgatactactcaaagcattttggacagaaatttctctgaccattgtccaatcattctcagatcgaaagtcattgattggggacccaaacctttccgggttcttgattgttggctgttagacaaaacctttaaggacgtggtcaatgaatgttggacatcaggtcatcaaagtggatggggaggctttgtacttaaagaaaaaataaaaagactgaaaagtagattgaaggtatggaataaagagcaatatggggatacattcaagaaggtaaagcagctggaagaggagttaaacagacttgaacaggcgacaatggacagacagctttcatcacaagaaatgatgaccaggcggcagctacaggaagacttgtgggtggctgcccactcacatgaatccttacttaggcaaaagtctcgctctaggtggatcaaagaagatgactgcaactcaagatattttcatctcatgatgaacgcgtctcgaagacaaaatctgctcaaaggcatcatgcttgaaggttcatgggtgactgaaccccaaagggtgaaggaggcagttagagaatttttccagcaaagatttaatgaacctgagcctatcagaccaactcttgagggaattccatttctgaaaatcaatcagcagcagaatgctatgttggttggcagatttgaggaggaggaagtgagaaaagcaatttgggactgtggaagtgataaaagtccgggcccggatggtctaaacttcaagttcattaagaagttttggaaaatcatcaagcccgacatcctccggttccttgatgagttttatgtgaatggtatctttccgaagggtggtaatgcttcattcatagctttaatacctaaggtgcctgatccacaacagctgtcggaatacagacctatttcgttaataggatgtatttacaagattgttagtaagatcttagctagaagattaaagaaggtgatgccatctattattgacgaaagacagtctgcttttattgaaggcagacacttattacatggtgtccttgtagcaaatgaggtggtggaggaagctaagagaaagcaaaagtcatgcattgtgttcaaggatggatttcaaccagtgttgttaaatggcggccatggcggcgccatggcggattttcatggcggttttttgaaaaaacgccaccgaatagcggtggcgtggcgggtttgggatggcggtcgtggcggttatggcggggtggcggaaaatggcgtccctcccgcaccccacacgcgcacccagccgcgacactcgcagccgcacgagcacacagccgcgacgacctctggcagcgacgcaccggcacaaacggcggcgacgagctccggcagcgacgcatctgtcacgaacgacggcctgcagcgaggagttctcgcagagaagacgaagctgctgtcgcgaagaagaagaaggcgtcgcgaggaagaagaaggcgtaggatgtctagcctctgcatctatctccattctcgtaaatgggagcccgaccaaagagttttccccctatagaggccttaggcaaggggacccccttgcgcctttcctattcaatattgtagcagaaggcctaaatgggctgatgaaggaagccattgagagaaaaatctacacaagtttttctgtggggagagataaggtggatgttaatatcctacagtacgcggacgataccatcttctttggagaggcgacaatggagaacattaaagcaatcaagatcatattgagggctttcgaaatggtgtcagggctaaaaattaattttgccaaaagtagctttggatctattggcatgcctgatgtgtggaagcaatccgcagctgattacttaaattgtagcttattggccaccccttttgtttatctggggattccgataggggcaaacccgagaaagagtcagatgattcctagaagggtggcagataggctggtcagcatacaacgaaggtttctttggggtgccggagaagaccaacataagattgcttgggtcaagtgggacgacgtatgtctaccgaagaacaaaggaggcttgggaataatggacatcacaaaattcaatcttgcgttacttgctaaatggaagtggaacttattctaccacaatggagagttatgggcaaggattctggattcaaagtatggaggttggaggggtctcgatgcagcaacgaatgataataacgcctctttatggtggggagatctaaaattagcccttcaccatccccaacatgagattgtgttaacaggagggctaacatggaaggtggggaatggagccaaaatcaagttttgggaggatgattggagctatggagacacaccgctgctggcaaaataccccagtctgtacctaatttcagaccaacagcacaactatattcaggagatgggtcagcaaacggacaaagggtgggagtggaaatttaaatggagaagacacttgtttgacagagagcttgagatggcagattgcttccttactgatgttgctggcagctgtatccagattcacaaaaaagatgagtggatctggaaaacagagcctactggacaatattcggagagactacaaacgaaggcaaatttgaggaggagaagggtggcaatcaatgacacattatgcccattttgtggtaattctgaggagaatgaagcgcatgtatttttgacatgtgacagaatactcccattatggtgggaatctatgacatgggtgaaggagcttttccgcagaaaccgtggcagcacttttcccagcatgcattctgtttacatagcagaattcgtcttaaccgatggagaagttggtggttggccctcacatggacagtgtggcagcaccggaataaaatcatcttctcaaatgaaacttttgatggtaacaaattaa

SEQ ID NO: 30654 - DNA, 361 bp, Glycine max
  Clone ID: PAT_MRT3847_127685C.1
aaaaaaaaaaaggtggaccaataaaaaacaattgcccacaaaacccccaacaccaaaggcccaaaaaacaaaccgaaaaaccaaaagccaacagcaaacatacaaaagacaaaacccacaaggcacgagagaggataaaaccaaaaaccaacagcaacaaatcactgccacataatgataaaacaatcaacaacaagggcaacaacagagcgaataggaaaaagagcccaagcacaaccggaaatgaaaacaccggacagcaaaacacacgataccaaggcaccagctcaaaactcaaacaaccgtgacactgggagaagagcccaaaaaaaggcaacggcaccgaacacacaatcaacac

SEQ ID NO: 30655 - DNA, 388 bp, Glycine max
  Clone ID: PAT_MRT3847_127686C.1
ctctgacttctcatgcacgcttccctcagccctgaactcggattgagcatcgaggggctggttactcggtttgtgtttatgcaagatggccaacattattggaggggctcagctaccgagaggcctgaaacttgatctatagggggaagatgtgtgctctgtgcgtcaactagcttgatgcaagaacctggtcccattgatcaaaccactcaatacggctgatacaatcagtgggtgaatgccgccctcatgaccattgcatgatatcccgatcaatgagaacttaacatgctatgtataacaaggaagagtattcccgagagctcatcatggaacccggctactagtaatcctcactctacgcgcctcttatccatgatgggagcat

SEQ ID NO: 30656 - DNA, 649 bp, Glycine max
  unsure (1)..(649): unsure at all n locations
  Clone ID: PAT_MRT3847_127687C.1
ggctcgatcttggacccagatcttcttctcttctccctctataaacaaaacatgggttttccccctctacaatcccaaaacagatcaaccgttctcttctctcagcaatgcctggaagcttaaggaatctgtcactttctcccaaaatcttctccttcaccttgcttctctcattaaactcccttctctttttcccatgttgttactcccttgatgagcaaggccaagctcttatagcatggaaaaacagtttaaacatcacttcagatgtgttagcatcatggaacccttcagcctcaagcccatgcaactggtttggggtgtattgcaactcacaaggagaagtgatagagataagcctgaagtcagtgaacttgcaaggctcattgccttcaaattttcaacctctaaggtccttgaagattcttgtcctctcatcaaccaacctcacaggaagtataccaaaagagattggagactatgtagagctcatctttgttgatctcagtggcaattctctctttggtgaaatcccagaagaaatttgcagcctaaggaaactgcagagtttgtctctccatacanactttctccaaggcaacattccttccaacatttgcaatctaacaagcctttgtgaacttgacac

SEQ ID NO: 30657 - DNA, 304 bp, Glycine max
  Clone ID: PAT_MRT3847_127688C.1
tatgttttccctctttcgattcggtctcacttcataaaattccattcaatcaattcccttcactctgcatcgtgttattaattgacatcatgagttcgaatctccgactaacaaaaacccaacaaactaacaactaacatttagctattaaaaaaatgacatcatgcttttgattgagaaaactgttgatgataaaacagccatattctgttatgttttattttattttattgacaaatttgttgttcagggttcctgaataattaaagatgggactggctctgggttgtcttcaagtggagca

SEQ ID NO: 30658 - DNA, 166 bp, Glycine max
  Clone ID: PAT_MRT3847_127689C.1
tggacagacttgtgaacatgctctgatttcattcacccttggtgtgaaacagatgatcagtggatgggacaagatggatgctcctacaccgaatgtctccaaagccaggaatgatgaaatcgtgaatgaagcttattacgatttgaggaaagtcagatactaccct

SEQ ID NO: 30659 - DNA, 217 bp, Glycine max
  Clone ID: PAT_MRT3847_12768C.1
acgacgcaggcacgcccacgcaagcacggaacccggcccgaggcaaccacaccagcaaaagaagttaaaaacaagagagggcaacaaggcgaggcaccagcacccagggcacgagaaccaaaacaagaaccagaacaacaagacgccggaaagccgcaacacgaccgacaaacaaagaaaacgcacagcaagcgcgcaaacaggaacgaccaggaaa

SEQ ID NO: 30660 - DNA, 337 bp, Glycine max
  Clone ID: PAT_MRT3847_127690C.1
ttttcgcgtccgttcctgttgtgcatctctgtgttcattcttgagtgacctttgcctgtatcaattacctttcccttttgaacttatgagataagagaacacaaacgcccccttaaacagagaaggtgtatgtaagccaccctccagagcaatttgtgcatcctcttcaatttattagcagaagacgtggtgcattagattacctaagtctgtgcgctagttacttgcacaacaacttggtccaagcgttgcgaatattcacatatgagaagaacaattgttgtgttcctagaaactcatgatatgctagatcagccatccttaggagcaatatatc

SEQ ID NO: 30661 - DNA, 222 bp, Glycine max
  Clone ID: PAT_MRT3847_127691C.1
cgctacgcaaactgcaggctcagatgaaggactttcaaagagagctggaagatgcccgtgcctccagagatgagatctttgccacagccaaagagaatgagaagaaagccaagagcttggaagcagacctcatgcagcacaagaggacctcgccgccgctgagagggctcgcaaacaagcggacctcgagaaggaggaactggcagaggagctggccagtag

SEQ ID NO: 30662 - DNA, 1283 bp, Glycine max
  Clone ID: PAT_MRT3847_127692C.1
ctcgcgccgctctgcagcatccatggcttcttcactgggtcgaagaagaacccacgctcccaaatcatcctccaccctaaacgacgacgtttcctgcgaggaatgcggcggtggccactctccttcgaagcttcttctctgcgacaaatgcgaccgtggctaccacctcttctgcctccgtccaattcttccctctgtccccaaaggctcttggttctgcccctcttgctccaatcacaaacccaagtctttccctcttgtccagaccaaaatcattgacttctttcgaatccaacgctcccctgaggcattatcaaatcaagacacgcggaggaagcgaaagcggggtgggggcttggtggtatcgaagaagaagaggaagctgttggcgttcgtgccgagtgaggatcccaatagaagattggaacagatggcgtcgctggcgacggcgttgaccacaactaaaacggagttcagcaatcagcttacttacatgcttgggatggcaccaaggtccgctaatcgtcctgctcttgagcgcggtggaatgcaggttttgtcaaaagaagacaccgagaccttaaacctgtgcaagcgtatgatggaaagaggagaatggccaccactcatggttgtttttgatcctctagaaggcttcactgtagaagcagatagatccatcaaagatttaaccataataacagaatatgttggagatgtagactttttaaaaaatagggaaaatgacgatggagatagcataatgacacttctctcagcttctgatccttcgcggacgcttgtcatctgtccagacaaacgaagcaacatagctcgattcattaatggcatcaataatcacacgccggaagggaaaaagaagcagaacttaaaatgcgtgaggtttgatgttggaggtgaatgccgggttcttttaattgccaatagagatattacaaagggggaaaggttatactacgactacaacggagatgaacatgaatatccaactgaacattttgtctgattgcgttcaaatataaattataagcaaatcaccctaacagggagggattgtaagctcgtgattttttcatttctaagttgatttggtcaccccttaatatggttgccttgtcactaccccacatgtatcatgtggatactcaatatatttcacagtagacttgtggtttatatcatattgttcaattatttttttaattgtttattgattagattaattttctcacatatgcaatggccaatgcatatttttagcc

SEQ ID NO: 30663 - DNA, 270 bp, Glycine max
  Clone ID: PAT_MRT3847_127693C.1
aaaatggcggaaccgccgagccccgtgcactgggtcgctgtcgtggcccccaccgccaccggttcggagaaagaaccgtttggcaagctgcaacttttctgccgggaccctacgggttctctgtccgccaagaaggtgcggactgaggagaagaaggcaccgcggagagtgaacggagaagggggcagcggcgggaacagcatgcagctgcagccgactgcagcacctttggctcagagctattgcaggcccgcgtcttggagctttggc

SEQ ID NO: 30664 - DNA, 332 bp, Glycine max
  Clone ID: PAT_MRT3847_127694C.1
ggggaaaaaggcccccctttttttttaaacggggggaattttttttaaagtcaaaaccatataacccgggggtttaaaagagggggggggggttttttaacatttgcttaaacccccttttttcaaacccagggggggaaagagtttccctttaaccaaccgtaaaacttacacctacccccccgtgtgtctttttggggggaaggggggccccttcttttaaaaagtttttgccaatttaccaacgggggggggggttccactcttttttttaaccccaatcggcaaaaaaaagaaagcccgccccccatgggggggatttttatcccttg

SEQ ID NO: 30665 - DNA, 303 bp, Glycine max
  Clone ID: PAT_MRT3847_127695C.1
ctcggaaggaggcgtggagggaaatttgagaaataacttgatgagttcatcccattttatatataatgaataggttggagtccatgagtatgagcatccgcagcggaagcctgcgagctcaaagggtaacgaaaagattgaagaaccttttcgaagaaacggtaaggaaattggggaagatttaaaaaataagggaaaacaaacatgtggaatttgtctatctgaagtagatcaaagtagagtaaagggagttctaaattgttgcactcacttcttttgtttagcttgcattaacgagtgggc

SEQ ID NO: 30666 - DNA, 213 bp, Glycine max
  Clone ID: PAT_MRT3847_127696C.1
cgtaaactcgagaaggcgggtggaggaaagccactaccttcattgaaaaaatacaagcttcatatggttcatgggatgggtcttataaagtgggctggggttacaaagctagggggggggggaaaaatataattacttctataaagagtttcactaattgctcaaacaatcgtaaagcttgggaatgggtggggtgcaatcaaattccttatt

SEQ ID NO: 30667 - DNA, 413 bp, Glycine max
  Clone ID: PAT_MRT3847_127697C.1
ggtttcacgaattttgcataggatgcccagagcaccaggaggacgtgcacactgccacagtcggaatcctgaggccacaacatggcgaagctggaacagagtacagagcccctccagatccaccacgagacagacgacatcccgagggtccaacgaacatggctccaacaactattcacagggacgtcaaccgtgacaacttcatccgctgactgcattcaccgcggctgttacggtagccgactccgggacgccaaacagacggtgaccgggacaaaccatgacctggtcactgaggaccgcccctacgggaacgccacacgcctcatgaaggctgacatgaacagagacagaacctgtgacatgggcaaggccaaggacataaggagcataggccgcactatcgacaaaaa

SEQ ID NO: 30668 - DNA, 130 bp, Glycine max
  Clone ID: PAT_MRT3847_127698C.1
cgtagataccctaacggggatgaccataaccctcgaggcctaatgctgcgtcaccattgacactgactaggctaaaatccaagacaaggaaggcatccatccggatcagcaccgtttgattttcgtcgga

SEQ ID NO: 30669 - DNA, 315 bp, Glycine max
  Clone ID: PAT_MRT3847_127699C.1
gaaatggatctccaccaatgttcaatcgactgtccgttctctccctccaactggtttgactgtggaaacacccttcattgataactctgaatctggtcagcaaaggttcaggacggttagtgaccatttcatacctgtgttccacaaaaaggcctacttgcattggcatactggataacgatacgattaaattgagtttactgaagctgatagcatcatcaatgaccgtgtgtgcgactatcatcactaccaacatgtaactgctgatcatgagggctatgactaccaccatgacgaagaacatcatgaacatca

SEQ ID NO: 30670 - DNA, 337 bp, Glycine max
  Clone ID: PAT_MRT3847_12769C.1
aagaaattgaaaaggagataaagcatatttttttcttttaaaagatcatagatgggtcaagtgatacatgttgcggtggtggcagcatccttgggatgtgtttcaacccttttgatggtttttatatggcgtttgtgtcaccacaagaaagagcacagaaactttgtccaacccaatagtttggccagaatggagaacctccaagcaggaatagcaagacttcatcaacaaccaacaatctatcaccaatttgctgatcacaaaaacaaaaacaaaggcaacttttatgtgtttcataatggagtctctagaaaaggacatttggttaattgggatg

SEQ ID NO: 30671 - DNA, 307 bp, Glycine max
  Clone ID: PAT_MRT3847_1276C.1
atgttataatatttgtctagagttacaagtgcaacacagcaccaacacgtaaaaatagcaagctaaggtaaagaacaaaaatgatcaggaagactccaaaggatttaaggcaaactaactcagcccgtcagtcacagtttgacgctcttaatcacaaccccacccccaagatcaacacccaccagcacggggaacaaacattccaaatcgttgtacagagtaagaggaattcttggtcgaaacgattttcatttcgagccagctggctttgatatagtcttctctggtgcacacgggcactctagga

SEQ ID NO: 30672 - DNA, 506 bp, Glycine max
  Clone ID: PAT_MRT3847_127700C.1
aaaccacgggttcaatcaaaaacttaaaggacccagccataaggcagggggaagggatggcccagaagaaaacaacaaggctactttcagaactaagaggcaaaaatccagctttaccctgaacgcaggggggacaaaatataaaaaaaaaaaagcgataatcgtttagcgaaatttttcaccaactcaggcagggacaggtcaaaaaaacattcctgaaaagggaacttcaggacaaaatcacatcaatattgggaggccctgcaattaccaaaaacaagcattatcgcaaatacttgaaaggggaacaccgaacaggcacgattctaccattttccaaaaaccaaacttccctccccggggccccaactcccttttaaaacaacagaaataacaaagggggggaggggcaacagagggaaaagggacaaaaactttacctgggacagtaggggaacctttttaaaccttcaaaggagttttagggaccaggggttccttgggga

SEQ ID NO: 30673 - DNA, 619 bp, Glycine max
  Clone ID: PAT_MRT3847_127701C.1
ttctttttgttgttgttcttttttttgaataaagaattggtttaatggtttaaagtttgttaaaatgctaaggaagtttatatgtttttttttttttttttaattttttttttttttttttttttttttccccccccaaaaaaggggggggatcaagggcccaagattttttgggtccggggttaaaaacccccgccttgccccaaaacaaaaaaaaacaaagaacccccttgggcccaaaccccccccaggggggggggggcccccttttttcccttttaaaaaaaaaaaagggggggaatagggggcaattaggccccaaaaaaaacaaattttttttttttaaaaacccctaaaaaaaaaaaaacggggcccaaatgggggagtttcggccccccccagaaaagggaaaacaaaaatttttttcaaacccaaaaacccctttttaaaaggggataaacccaaaaaaagggggccctttgttttttggaatccaatggccaaaagacttgggggccctttttttttggggaaacctggaaaaaaaaccctgaccctgtgaaaaacccccacaccgccccccttaagaccctaagggggaattgggttttttcccagg

SEQ ID NO: 30674 - DNA, 738 bp, Glycine max
  Clone ID: PAT_MRT3847_127702C.1
gttcagtaacatgtaagaagaaaatcgtattaacagcaaaaaccgcttgatcagcgcaaaattctatccgacagtgataaaagacgagcgagacatttgtttgaaaaagaaaaaacctactaaaatccaatacagaagaaccatttgggtcacagaacataactctatccgacgaagttcaatgtaccattaactggtgcaaatcaataaacaaacaatttataggattaaacactaaaaacacttttccatcaaaactcaataaaaagcagaaaaaactctaatcaaacagtcccaatcccatatcatcatcggactcttcctccaccttttcttcctttttctcagcagccggggcagcatcagctgcagcagcaccacctgcaggtgcagctgcaacagcaccaccaccacctccaacgaatacagcaccacccactatcacctggaacacagcggaggtaggagacacgggagagaaggaggactggactccaccggaggaatcaacggcgagagcggcttgcacgagcttcctttggagatcgaaggtggagtcggcggaggcctcgatgtcgccggaatgttgcttggcgctccattcggcgccggatttgcgaacgacaaaggtgaagactcccatggtaattggttactctaagcgaaaccctaattagaaattgaagcctcacagagagcaaagttgcagtccccttctgtcgtcttctcgcagccgta

SEQ ID NO: 30675 - DNA, 2377 bp, Glycine max
  Clone ID: PAT_MRT3847_127703C.1
atttttcaaccacacgtcccccaaataatagttacactaacacacagtagtgaacaacaactccaacaacaacaatcaacaacaacaacaacgttgtagtgtgttgttttgttttttagtgcagtttatttttttggcatcaaagtggttgaatccatggattctgattatggtattcccagggaactctcagatcttcaaaagattcggtctttgtaccagccagagctccctccttgtctccagggaaccactgtgagggttgaatttggtgacgcaaccaccactgctgaccccactgatgcactcaccgtctgcagggcttttcctaacacttatggacaccctttggctcactttctcagggccactgccaaagtccctgatgctcagatcataactgagttccctcctattagggtggggattgtcttttgtgggagacaatctcctggagggcataatgtcatttggggtatccacaatgctctcaaaattcacaatcccaacagtgttttgcttggatttcttggtggttcagaaggtctatttgcccagaaaactctggagataactgacgatattctttcgacgtacaaaaatcaaggtggttatgatttgcttgggcggacgaaggatcaaattaggaccacagaacaagttaatgctgcacttgctgcatgcaacaatttgaaacttgatggccttgtcataatcggaggggtgacatcaaacacagatgctgcacagcttgctgaaacatttgttgtagcaaaatgccccacaaaggtggttggtgttcctgtcactctgaatggagatcttaaaaaccagtttgtagaaactaatgttggttttgatacaatttgtaaggttaattctcagctcatcagcaatgtctgcactgatgctctctctgcagagaagtattattatttcatccgtcttatgggacgcaaggcatcacacgttgctttggaatgcaccctccagtcccatccaaatatggtaattcttggtgaggaggttgctgcatcaaagcttaccctttctgaaattgcaaaacagattactgatgcaattcaggctagagcagagcaagacaaataccatggagtcattctccttccagaagggctgatagagagtattcctgaagtgtatgccctcttgaaggaaattcatggtttactcagacaaggtgttgaagttgacaagatatcttctcagctaacaccatgggcatctgctttatttgaatttctgccaccctttattaggagacagttgctcctttaccctgaatccgacgactcagcacagttatcacagattgaaactgagaaattactagcatatcttgtggaagtcgagattaacaagcgtctgaaagaaggcacatacaaggggaagaaattcaatgccatttgccacttttttggttatcaagctcgtggatctctgccatcaaaatttgactgtgattacgcatatgtccttgggcacatctgctaccatatactggccgctggtctaaatggatacatggcaactttaactaacctgaagaatccagtaaacaagtggaaatgtggggctgctccaattgcatctatgatgactgtaaagcgctggtctccaaatccaggagctacatcaattggaaaacctgctattcatccagctactgtggacttgagaggcaaagcatatgagctgttgagacaaaaggcacaaagctttcttatggatgacatctacagaaatccaggtccacttcagtttgatggtcccggcgcagatgccaaggttataactctttctgttgaagaccaggactacatgggccgcattaagaaacttcaggagtaccttgaacaggttcgaaccattgtcaagccaggatgccctcaggaggttttgaaagctgctctaagcgtcatggcgtcggttaccgaagttctagctgcaatgtcaacatcttataccaacaccctggcatccctgtgagagtagcagatggaagttgtattcttccataaaaattctacattttatagccatggaagtagtttttgattggaaataagagttatagctgacatggtgcacgtcaacgtgagatgagatttactgtaatcaaagttttggctctctatgttcccaactgggtaatttttttgttttttgttttttgttttttgttttcaaagacatgtgggatccatgtgaaattgtttgataacttagcttgctgcttgaaattattattgttctttttaggacatctcttttgatattccaaacattatatttgaggtgttttcttcctaactttatttggtatcccataatgaaattccgaccctttaattct

SEQ ID NO: 30676 - DNA, 3723 bp, Glycine max
  Clone ID: PAT_MRT3847_127704C.1
gctaatactatttctcatacaggctgtgttcgttcagtaacatgtaagaagaaaatcgtattaacagcaaaaaccgcttgatcagcgcaaaattctatccgacagtgataaaagacgagcgagacatttgtttgaaatagaaaatacctactaaaatccaatgcagaagaaccatttgggtcacagcacataactttatctgacgaagttcaatgtaccattaactggggcaaagcaataaacaaacaatttattggattaaacactaaaaacacttttccatcaaaacccacgcgtcgtttcttagtgcacttttttttggcatcaaagaggttaaatccatgggttctgattatggtattcgggaccctaaaagattcgtgtaccaacttctttaagctggacatttttatacttcattaaaaccatcaaaaacaaaaattaaacccaatcccatatcatcatcggactcttcctccaccttttcttcctttttctcagcagccggggcagcatcagctgcagcagcaccatagtgccactaaaactcaacacaccaaacagaaatagttacactcagagtagtgaacaacaacagcaacaacaacaacaacgttgcagtgtgttgtattgtttcttagtgcacttttttttggcatcaaagaggttaaatccatggattctgattatggtattcccagggaactctcagatcttcaaaagattcggtcgttgtaccagccagagcttcctccttgtcaccagggaaccactgtgagggttgaatttggtgatgcaacaaccacagctgaacccacttaagcacacacctttcgcagggcatatcataacaccaatcgacatcctttgtttcaccttttcacacaaacttccaagcaccattaaatacagagcagaaaaaagtctcatcaaacagtgccggtgccatatcatcatcggactcttcctcctaccttttattcctttttctcagcagctggggcagcatcagctgcggaagcaccacctgcaggtgcagctgcaacagcaccaccaccacctccaacgaatactgcaccacccactatcacctggaacacagcggaggtaggagacacgggagagaaagaggactgaactccaccggaggaatcaacggcgagagcggcttgcacgagcttccgttggagatcgaaggtggaatcggcggaggcctcgatgtcgccggaatgttgcttggcgctccattcgctgccggatttgcggacgacaaaggtgaagactcccatggttattggttactctaagcgaaaccctaattagaaattgaagcctcacagagagcaaagttgcagtctgacacaatttgtaaggttaattctcagctcatcagcaatgtctgcaccgatgctctctctgcagagaagtattattatttcatccgtcttatgggacgcaaggcatcacatgttgctttggaatgcaccctccagtcccatccaaacatggtaattctgggtgaggaggttgctgcatcaaagcttaccctttctgaaattgcaaaacagattactgatgcagttcaggctagagcagagcaagataaataccatggagtaattctccttccagaagggctgatagagagtattcctgaagtgtatgcactcttgaaggaaattcatggtttactcagacaaggtgttgctgttgacaagatatcttctcagcttaccccatgggcatctgccctatttgaatttctgccaccctttattaggagacagttactcctttaccctgaatccgatgactcagcacagttatcgcagattgaaactgagaaattactggcatatcttgtggaagtagagataaacaagcgtctgaaagaaggcacatacaaggggaagaaattcaatgccatttgccacttttttggttatcaagctcgtggatctctgccatcaaaatttgactgtgattacgcatatgttcttggacacatctgctaccacatacttgccgctggtctaaatggatacatggcaactgtaactaacctgaagaatcctgtaaacaagtggcgatgtggggctgctccaatagcatctatgatgactgtgaagcgctggtctccaaatccaggagccacatcaattggaaaaccagctattcatccagctactgtggacttgagaggcaaagcatatgagctgttgagacaaaaggcacaaagctttcttatggatgatatctacagaaatccaggtccacttcagtttgatggtcctggtgcgggtgcgaaggttataactctttctgttgaagaccaggactacatgggccgcattaagaaacttcaggagtaccttgaacaggttcgaaccattgtgaagccaggatgcccccaggaggttttgaaagctgctctaagtgtcatggcgtcggttactgaagttctagctgcaatgtcaacatcttctactaacaccctgtcagccatgtgagagtaacaaatggatgttgtattctttccaaaattttctggcacgaggttttagtttctacattttattgccatggaagtagttgttgattggaaataagagttatagctgacatggtgcatgtcaacgtgagatgagatttactgtaatcaaagttttggctctctatgttccctactgggtcatttttttttttacaaaacatgagggttccgtgtgacactgataatttagcttggtgcttgagattattattgttgttctatttttaggacatatctttttgtgatatcccgaactttatattagaggtgtttttattcgtaaaaaaattaattatcccacgatgaaattccaaccctttgtttttttttttttttttttttttacgatccaaaaaatgtacatcaatttatatacagaatagtacattagtacacatgcatgtaatccaaatcaagatctcaatttttcttcatgttcgtagaaaagaaaatggaaataaataacaaaacctaggagtcaaacactatgatccaccaatgaactttaaaggggggaaataaaactaaaagaaataaacgtaatacttgattacttttctcaagaccaattaatctctttcaaaaaaattaagccattgtttctcttatttctatagacatagcacgaacaagctgcttattgtcctccctataacattccttcattctcttgcttttaggatgaagcaacttgaaccaaaatccacttttgttggcactcttatcatgaccatgatgatcaaaaccaccaccttcacaatctcttcttcttggaacaatatccaatggcctacacctaccctttatgattccatcgttaccactcagcaggaaaatcgagaccgaagaagaactactcttcccctcggtagtagtgaaacagaaacattgcattggagaagcacatgaagaagaggctgaagctgaggagtaacaagatgatgatgacaaagaagaagaactagaagaacaaatagatgagattcttctatgtgagtcagaagaagaagaagatagttgagaaagcttttcccttaaacaaagagaacacacaccgggtgattggtggtgtttggggtgcttcttgcaatagccattgtgcttgacccggccaataacacaatatgtgtccttttttttctttgagaaatgtcttcgtagggtttcca

SEQ ID NO: 30677 - DNA, 575 bp, Glycine max
  Clone ID: PAT_MRT3847_127705C.1
acggctgcgagaaacgacagaagggcaaagagatagaagcaaataaagcattggagatttcaaggcttgtgttatgcattgtgggaatcatcatgggagtagttagtaatgagtactcaaatggatctgttcaaggctgcaatagtttagaggagaagctcgatgatcttcgtggcctacttggcaaggctgatggtgatcctttgagaattgtgagtgttggtgctggtgcttggggcagtgtttttgctgctttgctgcaagatacttatggccaattccgtgataaggtgcaaatcaggatatggagaaggccaggaaagacagttgatagagccactgcagagcacctcttcgaagttatcaattctagggaggatgtgttgaggaggttgataaggcgctgtgcttatctgaaatacgtcgaagccaggcttggtgataggactcttccggctgatgagattttgaaagatgggttttgcttgaatatgattgacacaccactttgtccattgaaggtggtcacaaacttgcaagaagctgtttgggatgctgatattgtggttaatggt

SEQ ID NO: 30678 - DNA, 200 bp, Glycine max
  Clone ID: PAT_MRT3847_127706C.1
tctcacttttattgctcatttcatttatgtatttgacaaccacctcagacccattatcaccagctacagcctctttcaaaccgccccaacctgttcctaccataccagttgcggttcctaaacaaccattggttacctcatgggcacagccaccaagagattccactcctgaaagtactccattacttgactattgtggg

SEQ ID NO: 30679 - DNA, 392 bp, Glycine max
  Clone ID: PAT_MRT3847_127707C.1
gcttggatcctgtatagcggtcgcgcttttttttttttttttcctatttacaagaaaatattgtcaggggggaaataagatatgattgttcagtgcatataaagcaaagacaggtttacacttggtccaggctaatatttgccggaacaggacagtggatcatgtaagaaaacatcatgtcaggggggggcgggacagcaatgttgatgggtcggccaatcaaaataactcctgtgttatgcaaataacagcacagactcattcacatgattttgaagaaagaggggtccggagagctgatgtcacatacttggatgaagtaattcttatgcctaattaagcaggtatctcacactttaggaaccaagaaagactcttctgacccctgggca

SEQ ID NO: 30680 - DNA, 697 bp, Glycine max
  Clone ID: PAT_MRT3847_127708C.1
agtacatagaataccaattgctaaattctcctttctctgcttttctctctatatttatataccctctttggcctcacaaaggaaccaagacaagaaggtagcatatagatggagggtcttctgcctctggtttacaaagcaatcaagaaacgcaagactcgcaggcaataccagtgtctttcttcaggggctgctctaagctacaacatgaacgtggctgagttctaccctcaaactcatgatcatggccatggctataattacatgcaggagccttcaacttcaatgcaaaaagtggttgatcatgatgatgatgatacagaaaacattggttatctgcgatacaattctgtcagagaattctctaatgggttctcttcgcctcatcaacaaagaacctgtgccgctgactcacccgattcgaagcaactcgtcaggtttaggagtcagaaattattttcatgcctcgctggttaatttacgtacaaggtgcatcctctgtacgtatgactgtgatatatatatatatatatatcgtgtatgttgcaattgtaattaaagacactggtgtggcaacaattcagctaaatttgtgctcgatgtacgtttcatgtgttgattagatattaattaatgaaaaataatgttatttttgtgtgtttaaaacaatattttcttttggaagtggtagcccccc

SEQ ID NO: 30681 - DNA, 132 bp, Glycine max
  unsure (1)..(132): unsure at all n locations
  Clone ID: PAT_MRT3847_127709C.1
taatcaaccaccaccaagtataaaccaacaaacaagtggtacaaaatatctacatnncatacatgtnnnctccaattccccaaagacagtttaataggttgatcttcattaagccaatgtccacttttcact

SEQ ID NO: 30682 - DNA, 256 bp, Glycine max
  Clone ID: PAT_MRT3847_12770C.1
tttttatgtggcaatacaggaacaagtgggaaaatatacaaccaaggacaatgttgcagtgtaatatacaagtgatgtatgtcaagtaattgtaatatacaagatgaaaatggatttttgtaaaagagctgttccgagatgcaaacacacaaaaacaacttcttgctatgccttttaccatcaactatgttaactgctgtggtatcaaacttcataaaacaagtagtaaagtataggcaaagagcttgtccacctt

SEQ ID NO: 30683 - DNA, 466 bp, Glycine max
  Clone ID: PAT_MRT3847_127710C.1
tacggctgcgagaagacgacagaagggggtcaacaacagtgttcccataggagataataaaaatcctctcatcattctgcctcagcctcattgcatcccacaaactataggatcctcacattgctagcaccatgatcaagaccttgaatccttacccaaatccagcaaaaactgctgagatcatgtcgaggtaccggccaatagcaccaaagcctgaaacctctccaaactccatgagtgagggcccttcttcctcttctctctcccagaagatcaagcaatctccttaccttaggaatttatggccacagcttcaagccagacccaccaggaccagaaagagaggtagagctcctttgacactaccctcttcctccctcaagagacacaagacaacacatcatcatgtcctaggattttgtcccccttgtcatcatgttgttacatcatcatcatcatccccatc

SEQ ID NO: 30684 - DNA, 1911 bp, Glycine max
  Clone ID: PAT_MRT3847_127711C.1
gttccaacatattcctcaccaaagacaacaacattcggcttgagaactttggtcttgcaatttgacttaatgcaaaagaccttgcttcctcggttgacggaaccccaaattacatgtgtccggagctcctcgctgatataccttatgggtataaatctgatatgtggtctcttggttgctgcatgtttgagattgctgcacatcaaccagcttttcgtgctccagacatggctggacttatcaataaaataaacagatcctccatttctccactgccaattgtttattcttccacactgaaacaacttatcaagagcatgcttaggaaaaacccagaacataggccaaccgcagctgaattgttaaggcatccgcttttacaaccttatgttctacgctgtcataatgcatcatctaatgttcttcctgtatatcccctagttaatccaaaggataaagcaagaagacctaataaatctagtggtggcaaggaccataaggacaaagaagcaggtttagtaaattgtttggaacggattcatccaattgagggaaatgcagatatacagataagcaatctccctaatgatgtggtaacaatttcaaccagtgcagaagacaatctcgagaccaggatggctgatcttatgagctacatagtggaatcttatactagtattagtggctcaaaagatgggtcaacaacacttcccaaaagtttaatcctgaaacctaaggaggactctataaatctatacattgttgtaagaacatgtgcatttcaaatgtcacatgagtttgttccttccgagattgaattgcttggttgaagattggagactggaagatagcttgaagaagacaacataaatgtggcgaccacagaagttgaagatgcttcttgcaatggaggtttggatagtgctgaagcacagagggaagattcaaaccttgaggactctggtaaatcaacaatgtccagtgaaggcagtagcactgataaagataagtccatcaatgaggaaaggtcatcacttattgtacatcctattagggttgaaaatgacactgaatctggaaaccgcttgaagaaaagtgaaaaccctgatgtatatacagaggtccctcatatgaactgcttaatgtctgttagtaatgatgcacttccagttaaggatgatgacatagcaaacggacacattctttgctccacgcataaagatgataatgtagtggaggttgatcaggcaccgagtggcatttcattgagtgtaataactgaagtagatggtgatgaaacaatcaagactccgttggatagtccctgccagcaaagagctgatgctctggaatctctgctcgaattatgtgctcagctactcaagcaagataaactcgaagagcttgctggggtgctaagaccatttgggaaagaagctgtctcatcaagagaaacagcaatatggctagcaaaaagcctcatatcttcccaaaagtttaatcctgaaacctaaggtctggtcataaatctatacattgttgtaagaaatgtgcatttcaaatgtcacatgagtttgttcctttcgagatttgttgcttggttgaagattggagactggaagatagcatgccacatgttctttcttggtgtgttaaatggttatagtaaatgaattaaattattcttgttaggttggatagtcatttgtgcttgttttccagcagtgtatgggtcattgattgtgtaaatttttttgcttccccttttacgaactaaaaaataaccatgcacttggagctcgatgttttatatatttggtttatttgttaaagcattcatgaccatattaacgtcaaaaaaaaaaaaaaaaaaaaaaaagggcgcccgctctagagaatacaagcttacgt

SEQ ID NO: 30685 - DNA, 260 bp, Glycine max
  unsure (1)..(260): unsure at all n locations
  Clone ID: PAT_MRT3847_127712C.1
atgaacatcatcctcaacaataacacatcctgcatactcgactcggaatggtcntcaatacggttggaccatagtactgtgctcaaggacaaaactttgtnaccatagaatttnaaattcctctgtangtaccagattaattttnaccggtcaaaaatacaaangagtaacntgggcctttcagtaaatttggagttctctctctgaaaaaggaactgctgtagtagttcanggataagtcatgcatattnatgtntgca

SEQ ID NO: 30686 - DNA, 454 bp, Glycine max
  Clone ID: PAT_MRT3847_127713C.1
cccacgttatcgtttgtcgagagataccatgtgcatcagagccgagacaaacttgtatgacttaggatgcacagaactgttttttacgcatgaggctgatggcaccacatctaaaggcagacactcaaccatcatttgggtgcagatacaactactatgccaagggctctacacttgaaaagaagaacatgctacactaccaaagcgattatgtcatacacgagagaagatggcttgaagcatattaaggaacgacgagctgttaagagtatctcacgcttgcacaattttactaaagacaatgttgcctacaatgtgactgctgcaaacaggggtggggcaactttggaggctataacaggtgaccctgagttggctgagcaggccactgactaaactgattgtacagattgcggttcttctgccgatgctggaacatatgcatctggcggtg

SEQ ID NO: 30687 - DNA, 335 bp, Glycine max
  Clone ID: PAT_MRT3847_127715C.1
gcacacacttcgcgattaagaagataaacagagtctactgcatggcgctcgtaccccctgtgtgaatcttaatgtcatgttcttccggagacagggccggtctaaaacaaacctaaattctttcgaataaagtgaacccacaatattcactcattcaaacactacagggtttccctacgcggacacaaaatgggaatgctaactaacacctttgtatactagacggatcaactctctcaccatgctcatggccattgatgtgataatatttggagggtggatgaccactcatcatgatggctgccgaaagcatatcaccgggcctgtgatatgcc

SEQ ID NO: 30688 - DNA, 556 bp, Glycine max
  Clone ID: PAT_MRT3847_127716C.1
tttgttttttttttttttttgaactgacatgatcgcgtttggtacctaggtctagcctagtatgcagacttcactattgtaccaaagctaatttacaaatgccagtttgcgacgccatgcccgctgacggtatcgagggaggaaccgacgtgtgccgagctgggggagcaggtatgggcgcagagcgcgcgtcgtagggggggcggggcggagctggcccgggggatggcgggggtatggccgtgtgcggggggcggggcggggggggaggggggtggggggggggggcggggcgggggggtgggggggagcgggggcgcggggaggcgtggggggggcgggggaggtggggggggggggcgggtggggtggatagagggtgggggagctgggggggcggggggggggggggcggtggtggaggggacgagagggggggtgggaggcggggaggggggtggaggggggggtgggtggggggggtcggggaggggtgggggtggaggggggggggggggggggggtggggggtgtggggggggggggcgtggggggg

SEQ ID NO: 30689 - DNA, 1219 bp, Glycine max
  unsure (1)..(1219): unsure at all n locations
  Clone ID: PAT_MRT3847_127717C.1
ctctcctagtaatgcccctcacatcacacctaaattctactcacaaaataaaaatcctttcacaccaaaaaaccaaacccattgctgttaaaccccgttcccttcaaattatgcccctaccctattaactcaatctttcttcaatctttatattacgttcaagcttcaaccaattcttcaacagtgttcaagtaaaatatctgcaaagccttagaatatatctgtgtttgatttaatgttaggttaaaccgacacactagtttccatacacgttttttaagaaataataattcttatcttttaattcaactgactttcaaggttaaaccaatcacacccatagaaagaaagagccgacacggctcaaaatctgaaacccgaaatcataagcctaaaagactgaatctttgatcaggcccacggatgtcgaacaggataattctccggcaggcgggtgggtcgacgaaccggcggcagccgctgctgctgcagcggcgtccctcgaagatggcgacgcgcgtgggggaggtggtgggcggcacggcggcggagtgcgtggcggtgtgctgctgcttcccctgcggcgtggcgaacttcctcctcctggcaatctacaaggtccctgcggggctgtgccggcgagtgctgaaaaaacggcggcaccagaagatgctgaaggaagggctgaggaagcccacgcgccgccactgctcgtgcgggtgctgcgacgacgttagcgggtccagaatataccccatgtgcgccaacgacgccgttgacgtcaaacggctatgttcgacgacgacggagcttgataacaacgatgacgccacgcgcgcgctcgagaaagagatgtgggaccagttttacggcactgggttttggagaagctcttctaacagagaagtcagagaagaagaagtaaaaccctcccaaacgctcccttcttcaaatattaatgttcttgttcccaatcctcagcctcagctttttgcttcaagttcaagttgaaccctactacatacacaatttgtatgcgcaattttaatttttcattattgagaatgcaattttgagtttttgggtcttgttttaatgttcatcacactcaacttgttcgtatttggttttgatgactttttttccccccttttgtgctggtttttgttgcgttttacaattgggcgcctttgtgtaaaattttatttggcggnggtat

SEQ ID NO: 30690 - DNA, 446 bp, Glycine max
  unsure (1)..(446): unsure at all n locations
  Clone ID: PAT_MRT3847_127718C.1
gcacgtgatacaacataattaacttgaacatgggttcctctgctgcagattcagcatcgtggtactgtgccatggtattgctggccatgatactgttggggtcaataagggaaagcaccatggcagaagaagaaggtgagcctataaaagggaacaacctccgtcaacgaccgtgtgatgaaatatacgttgtgggagaaggggagaccctgcacaccatcagtgacatgtgcaatgacccgtttatcgtggagcggaacccacatatccatgatcccgatgatgttttccccggccttgtcatcaaaatcatccccatccaccaatactaaaaataaaaaaacgattcaagaggtacatggaggttttgtgtttgagattttacattgactagaaaccatcatagtgtatataagtgaggaaaaggangaaaatatattcataat

SEQ ID NO: 30691 - DNA, 470 bp, Glycine max
  unsure (1)..(470): unsure at all n locations
  Clone ID: PAT_MRT3847_127719C.1
aaagctgaatgtttttgataaagcacaaagtaactaaatttgttgttttcaaagaaatcaagacttaagattttaagtttagggattcaatatttgtgagagaaccaacaacatcctcacatagtgaggcttatgttttatatatgagagaagtacatgacatgacaagggcagactacagctctttgttcagcagacaaaagagtgtaatagaagtaaaacataagaaaagacaaagcgatacaagcaaagagaataaataacacatatatctaacatgaagaatgcaactatggatgctcaattctttctctctctctctctctgngttccttttcttttcaaattttcctgtgtcttttaggcttatagggtttcgggtaacaagtagggttgaatttgctgcaacttgctgaagtcgtatcatcattttccattcctttttggttcttgaaaagcgcaatatatgt

SEQ ID NO: 30692 - DNA, 302 bp, Glycine max
  Clone ID: PAT_MRT3847_12771C.1
cccacacgtttgcatttattttacaaagaagaagaacatgtcaaactccatacaaatggaacaggaccccacacggacagcagccatgctgcatccaacttcctcaggtgcatgacgtctactccgagctcgtcaatcgacgacgagtaccagtactcgctaatacgctacaacgcaaacaaagaagcgagaactgtggaagcacatactaaataggatactggggcacatcacgaccgcgctgagattcaagctctggtggccgcaatatgatactgaaacctgctcatataactttgatg

SEQ ID NO: 30693 - DNA, 923 bp, Glycine max
  Clone ID: PAT_MRT3847_127720C.1
ccacgcgtccgcacttgcctgtgttcttctagttctcttagggccaccattatgtctcaattagcaccaaaacaattcatgactgaatcacaaagtaaccaggaccacgagcaagtggtggtgatctcacagaaaaagctaaagaggagaagagtgtgtgtgatggtcacaggagcagtgctgttactgctcattgtgctagtcatagtggcaattatcttggcctttaccttgttcaagaccaaagaaccaagaactcagcttgtgtctgccactttagaaggtatagcacctcgtctcacacttcctgccattgacctacaaatcaatgtcacacttgacctcaaggttcgggttgaaaacagaaatcgtgctagtttgaagcatgaagggggaaagagtgtgttgctgtataaaggaaaagaggttggagatgcttatataaaccctggtcttattccttcaaggggttctactattcttccatgcagactcacccttcaggtggaaaagctagcttccaacttgaccagtttagttggtgatttgatggggggagagatctctatggacacagttactagaattcctgggaaagttaccttccttggattcatcaagaaacatattgttgcagagtccaattgccaattcactattagtgtttctgagttgaagatcacaaaccaaacttgcaagagtaaggccaagttatgaaatcatgtatgaagcagatttgtaggttatagttcatactttagtttctcactgtgaggagtttctgagacattaataatagtgttacatacttacatgtttctacatgctagttttatttgtacgcttgtctattagacgttggtttcagtattgtaaaaaatgagaatattatttccgggagtattatttataatattttgtgc

SEQ ID NO: 30694 - DNA, 510 bp, Glycine max
  Clone ID: PAT_MRT3847_127721C.1
aattcggctcgagccagaacaatggtttctctggtgatttccccattggattgtggtcattacccaaaattaagctcatcagagctgaaaacaacagattctcagggaagatacccgagtcagtttcaggagctggtcagttggagcaagttcaacttgacaacaacacctttgctggtaaaattcctcaaggtcttggccttgtcaagagcttatacagattttctgcttctctcaaccgtttctatggtgaacttcctccgaacttttgtgactctcctgttatgagcatagtgaatctctcccacaattctctttctggacaaattccagagctgaaaaaatgcaggaaacttgtttcattgtctttagctgataacagtctaataggagaaataccatcttcccttgctgagctacctgtgcttacttaccttgatctttcagataacaatctcactggttcaatcccacaagggcttcaaaacttgaagctttgctctttcaatg

SEQ ID NO: 30695 - DNA, 290 bp, Glycine max
  Clone ID: PAT_MRT3847_127722C.1
gattgtcttatctttttattgttttttactgggcaacagaaaacaggtggacataaaaaggggatcttaccccaaaaacagtctcaaacaaacgggacaataaattgctaaggctcaataaagaatctccacaccctgattagccaggtgggaagttagctccaagttcttacaagggatatgcaccatttaagacctagggaacgaacggatttttgtggcaagtaaatcgaaccgccagctttaccatgttgctccccggtgataggtaaaggggcagctggaaatac

SEQ ID NO: 30696 - DNA, 353 bp, Glycine max
  Clone ID: PAT_MRT3847_127723C.1
ggtaaactttgaacaaaaaatggtatgctttttaaggccaaacaagagtgacattcacctagcaggagacgatgaagctcccttagcggctatgaccagagagtactttgatggggtcgcaccataacgccgcacaaagactgatatacagagactatttagatccatatgtcaatgctttgtccaatgcccattactcttctataactataccacaaataacacaattgcaacttctacagaacgatcacctcgacaagtgattgctgtacaatgtgaggcacgtaccggcagaatttgtggagacagagtattaccaagatctcaacagcttggacaaacaccaccatacg

SEQ ID NO: 30697 - DNA, 1138 bp, Glycine max
  Clone ID: PAT_MRT3847_127724C.1
ccccccgcgggcctttttgcccgaatgcgtctttctgcaagcctgtgcggttccacggtctgctccgtctcgcctccgtccatggcaccccgcctcggttctggctcgcgcgccccaaccgcctcgatgtctgtggccccgagctctagttcgtctgccggcaacagagctcggatttgcggcttatcaagggcgcggggctgctcccacgcgtccgcaattggccatgtcctttacttcaaggagcatttttaggtctttgatggctgcaatggaggagttggaacttaatgcacacaatgtcaatatcaaatctgaacatgctcatatgtacctatatatcatacgcgaacaacaaatagatgatcttgtgccctatcccaagagaattaacatagaagctgggaaagaagaaataacagttgaggcagtcttggaagaactggcacgggaaatccattcatctgttggtgtaagaatgcatagattaggggttgttgtgtgggaaatcaagctctggatggcagcctgtggacaggcaaatggtgcttggagggtcattgtaaacaatgtgactggtcatacatgcactgtacatctataccgagaaaaggaggataccatcactcataaagtggtatacagttcagtatcggttaagggtccactgcatggtgtggcagtgaatgaaaattatcaacctttaggagttattgaccgaaagcgtctttcagcaagaaagaacagcaccacatactgctatgattttcctcttgcatttgaaactgccttggaacagtcatgggcaatccaacagccaggatttcaaagagccaaagataaaaatcttttaaaggtaacagagcttaaatttgcagataaagaaggtagctggggtactcctcttgttcctgtggagaattaccctgggctcaatgatgttggcatggtagcctggtttatggaaatgtgtacccctgagttcccatctggaaggacaatattggttgttgcaaatgatgtgaccttcaaggctggttcttttggtccaagagaggatgcattcttccgtgcagtaactgatcttgcatgtacaaaaaaactaccctttaattatttagctgcaaattctggtgcc

SEQ ID NO: 30698 - DNA, 409 bp, Glycine max
  Clone ID: PAT_MRT3847_127725C.1
ggataagtaataatttttttaaaaacaatgcatatctccttgaaagacaacataatgtagagcatttgccatctaagtatatcattacaattgcccatattaggtttacttttttttcatactacacgctttctctctacaaaatccttagaatccacttgtttgaaaacttatttccaaactgctcctgatctctaagattgataaatgaacttcaaacataatcaaagaaatatcatactgcacaactaattgatcttacaataacgagtctaacattaaaatgactaaacttaataattacaatgtccactaaattaatttcagagtttaattagtccaaaagtattttttggtaacaaataacttgcttacttgaaaaattcatattcatttttaaaattactat

SEQ ID NO: 30699 - DNA, 287 bp, Glycine max
  Clone ID: PAT_MRT3847_127726C.1
gcaagaaagatgtaaccagtgtggaatactattaatggttccaccagaggttcatgtctttgagtgtgcagtgtgccatggcatcacccagattcgacctaccgcgggtccatggagtcaagcctacaactcctttcatcacttggcaggtcgttttagaggctttgtaaataccatgatgactatttcggttaacagcaatcccagttattatgggacaactcatgaatttggttattatcctcagcctcctcagtcactaaggccatcataccatgtatatggct

SEQ ID NO: 30700 - DNA, 302 bp, Glycine max
  Clone ID: PAT_MRT3847_127727C.1
aggtactggcccgcctatgtctttacttctgaataacgctctccctaaccttaagcctatcacaccaatcatcagcatcatactctagctttgtagaataaggtcctattctgcttgcgcattatcatctttgcggggaaacatgttgagactgctgcgaacgagaccaaaacgagctgtaatgctatgctcttctcaagccctggtaccaagttgaagtcctttattgaggatggaccagctgtggagcgatggacttcgatgcaaagacaatacgacgcctaagacagtaaacttgtaaa

SEQ ID NO: 30701 - DNA, 221 bp, Glycine max
  Clone ID: PAT_MRT3847_127728C.1
tgttttgacttttgagtcgtggaaccagaggaaaatcgtagtcgttgtttggactttacctcgttttatgttggaaactagtttgaaaggctcctactgtctttaatatttggtaattcagccgtaggtctacattgcctccagagatgttatgaattggtcaggtttcctggctgctcactgttatgttgtcacatgtcgaaatataaaaaattatattt

SEQ ID NO: 30702 - DNA, 181 bp, Glycine max
  Clone ID: PAT_MRT3847_127729C.1
aaaataatgaaaatggcacgcttgccagtgatttttttcccatttttgaccctgctcctgatatctgtctcgacgaatattaatgtacttggggagctaccgttttcagcaatgtttgtgttcggagattcattagtggacatggaaataacaactatctcaactccttggcaagagccaa

SEQ ID NO: 30703 - DNA, 414 bp, Glycine max
  Clone ID: PAT_MRT3847_12772C.1
ttcagcttcagagccatactttctcttccttctatgtccattcagcttctcacttcaaccaaaaataaaaacggcaactttgatccaaacctcaccttccctttcttaattgaagaaccttttaaatcccttcttctttaacactaccctttactcttcttaaatctctatcttgataataacattcacccatttcctcacttgtttcatttcttcacattggaggcttagggttctatttattttgatgcttgagttctgtggtttctaaggcattgacatggggaaaggaagaagtcctgggaaatggttcaagaacttactcttggggaagaaatcgtcgtcaaagtctacttcatcaaagaagaatgatatttttaaaccttctagtgacaaggatgcgctggtgtcgtc

SEQ ID NO: 30704 - DNA, 1534 bp, Glycine max
  Clone ID: PAT_MRT3847_127730C.1
cgtcacggctgcgagaagacgacagaaggggaagggacgaaaacgaaacgcgaacggataacagtagagtaagagtagcaggagcagaaagaaagaaagaacgaaaatggcgagcggcgcctcaccgcaactgcaaatgaggttgaagtcctctttcatcggagatcgtctcttacgctgttcaacttcaaggcaccaacctcttcctcaactattccgttacaaccctggaaccaagcatgtttcgatgcagttatctagaacactttctggcttgaccaatctcttttttaatagaagaaatttggatgaattgcctaacagcaagcgtaaacgtctgagacctgggaaagtttctccgcggcgacaggtgccgaagaatataccgaggcctccgtatgtgaattctatgattcctccagggattgccagtggagctgaagtgcatgacaagaaagggatagaatgcatgagagcttctggaaggcttgcagcgcaggttcttcaatatgctggcaccttagttaagccaggcataacaacagatgaaattgaccaagcagttcaccaaatgataattgataatggtgcatacccatctcctctcggctatggtagttttcctaagagtgtctgcacatctgtaaatgaatgcatttgccatggaataccagattcccgtgcccttgaggatggtgatataatcaacattgatgttactgtttatctaaatggctatcatggggacacatcagcaactttctattgtggagatgttgatgatgaagctaaaaaactagttcaggtaactaaagaatgcctagataaagcaatatcaatatgtgcaccaggagtggagttcaagaaaattggcaaaacaattcatgatcatgcagataaatatcgttatggtgttgtccgacagtttgttggccatggagtaggaagtgtttttcatgctgaacctgttattcttcactatagaaacaatgaaagtggacgaatggtgctaaatcaaacctttacaattgaacctatgctgactattggcagcatcaatcctgtgatgtggaatgacgactggacagttgtaacggaagatggaagcctttcagcacagtttgaacacaccattctgataacacctgacggggctgagattatgactcaatgctgaaagatgcaacacttgttatttatggataaaaccacatcgagaaacttcattatttaaatgcaactgatttaattacttctagttcgtatatagaacatagtttatgctctcttccgtgtctcaattgataatttttttttcattcttatgggggagaaaataagtccggtgtggcttgagcatgttggagagccggaaaaaaataattttctgcttgaggcgcagttcatgaatttcacgcggggccattagcactgcactaattgtaggacactatttatgctaaaaatataaaatgtccccgataaatattatatatttttttccaagattaatattatattattatttactatc

SEQ ID NO: 30705 - DNA, 707 bp, Glycine max
  Clone ID: PAT_MRT3847_127731C.1
ggaagtaattaaatcagttgcatttaaataatgaagtttctcgatgtggttttatccataaataacaagtgttgcatctttcagcattgagtcataatctcagccccgtcaggtgttatcagaatggtgtgttcaaactgtgctgaaaggcttccatcttccgttacaactgtccagtcgtcattccacatcacaggattgatgctgccaatagtcagcataggttctgaaagtcaactgtgagcattatttgaaaaatgttctctatgacaatcttctcttataaatcttgtgatgaaacatagcttaacggtgtcggttcctgtgacgtgctttatcaattgtaaaggtttgatttagcaccattcgtccactttcattgtttctatagtgaagaataacaggatcagcatgaaaaacacttccaactccatggccaacaaactgtcggacaacaccataacgatatttatctgcatgatcatgaattgttttgccaattttcttgaactccactcctggtgcacatattgatattgctttatctaggcattctttagttacctgaactagttttttagcttcatcatcaacatctccacaatagaaagttgctgatgtgtccccatgatagccatttagataaacagtaacatcaatgttgattatatcaccatcctcaaggcacgggaatctggtattccatg

SEQ ID NO: 30706 - DNA, 302 bp, Glycine max
  unsure (1)..(302): unsure at all n locations
  Clone ID: PAT_MRT3847_127732C.1
ttgcnngcangcgtacgtgnagctcggaattcggnctcgannnctancnnngcnttgnnngnnggatcncntnggagnnctgcncagncgtattcnnggagatagcanncnnancatacgnncgnggngcntagatagngacgntagggncgatcgnanagactggaaagatccancggatntgnactngagnagnntnnantgacnangntncaatnagggaagcgatggncgggacannncggtccagaaccnnagattntacgngaatatgagtntggcagaacngnagtccnngcggc

SEQ ID NO: 30707 - DNA, 203 bp, Glycine max
  Clone ID: PAT_MRT3847_127733C.1
ggacaaagggagcgtgttgtacaaagggcaattttttcaaaacctttttctttttcgcaacctcacctttttcttcttcaatctctttcggaatttcccaaaatccttaatgggaagaaaaaatggttctgactcaaaagcttcacgaaaccttcaaaagcaccggcgaaaagattactggccccccgacccgttccgccttt

SEQ ID NO: 30708 - DNA, 249 bp, Glycine max
  unsure (1)..(249): unsure at all n locations
  Clone ID: PAT_MRT3847_127734C.1
cgattcgttccatttcttccaaaagctccacagcctcagcgcgcgctctcgtcactggagctgcagggcaaattgggtatgctcttgtccctatgattgctaggggagtgatgttgggtcctgaccagcccgtgatcctccacttgcttgacatccttccggcagcaccccctccccctggggtnaaaatggaattggtgggtgctgcattccctcttcttaaaggtgttgttgccacaactgatgtgg

SEQ ID NO: 30709 - DNA, 388 bp, Glycine max
  Clone ID: PAT_MRT3847_127735C.1
ggggttgtctttcactaatctgttcatcacgttgtttgcgaagaaggaaatgaggattctgatggtaagtctccatgctgttgttgagacaaccatcttgtacaagctcaagcttggagaaatcgtcaccactatccccaccatcgtatttaatgttgagactgtggagtacaagaacatcatcttcactgtgtgggatgttggtggtcacgacatgatccttccactgtggaagcattatttccagtacactacaggtctcatttttgtggttgatagcgctgatatagatctagtgtgttgatgtctgcataagctcggcataatgttgaatgatcataaacttatagatcctgtattacttgtttatggctacgatcaagatctt

SEQ ID NO: 30710 - DNA, 362 bp, Glycine max
  Clone ID: PAT_MRT3847_127736C.1
gtgagacaaatacaagctagtaaatttttcatttttttcctgcttggatttcatcttgaacgcatgaaaactatggtctttgactttgtatgccccaccaaaaaaaaaaaactagaaaaagagttgagactgcacaagacatgagatttagtcagtgggtttttaagctcccacaacaacccattacaaattgaagaaaacatgtgtccgccgatgaacttgaacccattttaaccaagatcgagtgattcatcctatttatttggaatcccaagttcatgatcaaaagcttgaagaaggagtgtcatgaacccttctttgccatcatgttcctccatcatgcttctagaatacttaagtgc

SEQ ID NO: 30711 - DNA, 858 bp, Glycine max
  Clone ID: PAT_MRT3847_127737C.1
ttcaatataagcgtatctttctatcctctctttctctctctctctctctctctctctcttttccttcggagtgtgtttgcagattgatgacaagcaaccccattacgtggaagcctaagaggagaagacgacgaagaggacaaggttaactggatcgccgcttctgtgtggcttcgttctttcgttttagttttttcatctttttagctttagagggtaatacattctttaaaaaaatggaggttttggtgggtcccgctttcaccatcgacgttccttcgtctccgccgcgggatggcggttccgaaaatcggatcttccttaacgggtcacccgaaaaagatgatgggtcgaactttcggatctcgggcccacccaagttcttcgccggcggcgagtcggagagttcgtcgtcgatcggaacccccgatgacagcgacaacgaggaggaagaagtgcagagccagttgaagatacgaactgggttgggttctttggatgctatggaagattctcttcccatcaagttagttcccttaatttctctctctttttcccacttctttgatttgatgctctcgtattcatcgaatgtttttcttttttcccttagattaggtcttttttattttgggtttgtttaaattaaaaagtatattaattttttcatttattttaggatgtttaaaaaaactagaaactactgactggtaattgcctaatgggtactaggatgtgactacgtgtgatgtgtgggattttttctgttaatttgattctgtattatggtaactaatatgtgttttgggattttatggtaagcgatgcaggaggggattgtctgggccatttttgatg

SEQ ID NO: 30712 - DNA, 1302 bp, Glycine max
  Clone ID: PAT_MRT3847_127738C.1
acaaaatgtcaacataactctaagtgagcctcttaaaaacaaacataactctaagtgagagtggctttcaaatgagatgttttattaatctgctaatggttacacaaatatggctaaataaagaaaaatataaaatatttttttgtattttcatagcgttaaatatacatttttgatttataaaatattaaaaacattattaagagaattttgtcgcagcatatagcttaacatttaagtacactaattgctcgaagtaatcctatttttgatggattaataccatagcccaagtgcgtggcacagaaaggtgaagcaatggctgtgtcctccaccactgccacagtatgtattcctgctaagaacattccaaccactcaagcaccaaaaattggattctcaagtaccatcgcctttgctgcgaaaccgcgaagaagattattacgcatcagaagctcctcagccgaaacatctggcacagaggtagattcagagacttccattgaagttccagaagaaacatcatcactcatttctgctcttaacgtcgaaaagattctccgtggcttaccaattacagatgcagatcattatggtaggctaggtattccaagaggatgtccctttgacttggtggggggtgcatataatatcaaggttcaagaattgaagagtcagaatttagaggaggatgaacttgagaagaaattggaacttctcaaagaatcatacaccatcctgtcatcggaggaagaaagaagaatatatgactggagcttggccagagcagaaaatacagacaaattcgtttggccgttcgaggttgacataacacagtcaaaaatttcaaaagaagatcctccacaactggaccccgaggatgtcggaccaacgagagtagttgggtatttcttattgggatggataatgctatctattgtgttatctattgcactaaacttgtaaagagaaagaccaattctacaatgttttaagtgagtttggagtatggattttttttccttttatatgatatgaaaggtaatttttgtttttcatcggaggaagaaagaagaatatatgactggagcttggccagagcagaaaatacagacaaattcgtttggccgttcgaggttgacataacacagtcaaaaatttcaaaagaagatcctccacaactggaccccgaggatgtcggaccaacgagagtagttgggtatttcttattgggatggataatgctatctattgtgttatctattgcactaaacttgtaaagagaaagaccaattctacaat

SEQ ID NO: 30713 - DNA, 270 bp, Glycine max
  Clone ID: PAT_MRT3847_127739C.1
ggaagactaaatcattaaaaaaagggttaggggatctacacgcggaacagaattatcccacctcgtgaagtaatgcaaaatagtcgcatcccggttcaaaagaacaatactgaaggccccatttggttgccttgaacttacagcaacgatgctattgagattaagaaccaatctgtcattttcataacgcatcaccttggatgaatgacgtttttaagggaaccccacttactacctctagaattgaatacgggttcgacacagcttgaa

SEQ ID NO: 30714 - DNA, 395 bp, Glycine max
  Clone ID: PAT_MRT3847_12773C.1
cgaagagaatggctcccaaggctttaatctttctggctgcgttatgcttttcaccactgccactaaaatcccttcttgctcacgataatgggcggggggtgaacttttacaaggaatcattccctcaagctgaagacatcatcaaagaacaagtgaagcttctctacaagcaccagaagaacactggttttttgagacttagaaacatctttcatgactgtgctgttcagagttgtgatgcttaactgttgctggactccacaacaaggagcttgtctgagaaggaaacatattgaagctttggattgacaaatttcatgtacattgagaccatcacataagctctggaaagggaatgcccatcagtggtttcctgagctgatatactcattctt

SEQ ID NO: 30715 - DNA, 130 bp, Glycine max
  Clone ID: PAT_MRT3847_127740C.1
cgatctataacttgactcggaggtaacacccgttaggggattaccgacccttgaaaactgtaacatctttccctacactgaggtgttttcgatctcggggtggtcttggaagcatccagcccacgtgcgc

SEQ ID NO: 30716 - DNA, 500 bp, Glycine max
  unsure (1)..(500): unsure at all n locations
  Clone ID: PAT_MRT3847_127741C.1
cgttttgaggcaatttctgattggttgatgtatgtttccggttttcccccccccccaacctttattcctcataactttggtaacccccggaaccatggtaaaattttgccccttccgggttttgaattttggccaccttccacccctgaaattctaccaggtggtttttggttgttggtatcttcttaagtcattgcctttggttttgaaggggttttctctcatttctaagttctccttggtggtaccaccggttccttgcacctgtgcctttccctttttttggggcattcactattccaaatgattctcaacaagaattggattctttcttcttgcttgcagtcaagtttcctgatcttgacccctaatgctgnttcttcttccacaaaactgggtgtagcttctccaaatcagaaaaaatttgagcccttcagtagcaaccatgacatcaaatggtgacaccggatggtgaaaaggaaaaggcttttgtggcagca

SEQ ID NO: 30717 - DNA, 199 bp, Glycine max
  Clone ID: PAT_MRT3847_127742C.1
tagtaatttactttcaccacgcgaggggcagccacggggggccggggagacccctcagaggaccgtctaatagttacagcacatgaactcatatgaccataagggaccttgacctaaccaagaacaccacccagggccacgtgtttgcactgaagcaactatgctagcgagatcatacacaagactaccataacctcta

SEQ ID NO: 30718 - DNA, 571 bp, Glycine max
  Clone ID: PAT_MRT3847_127743C.1
gttttttccgaaaacaaatatcatggaattgaacgccagctgaggtatgatgacagtgcgcaactgcaaggacaaacagtgccagatatcacacggggactatttacattgacattgattttacaacatattactaaatactaattcacatttcacagcctattggattgggtactgacttgttgatactttactaaaacaagatcaggaaagcaaccgagaagatggagaggtgtccttacatttccagcagcatgacaagaaacccatgattcctgtttccacagggtgagcaatgtctctttctctatgttgtaacacactaacaaactcctccggactcaaatttccatcctcatttgcatcaaacaaatggaaaacaatctcaaccacattgttctgagagagataagccacaaacatgtgatgcagctcgttgaaaacctctgtagaaaacaggccttgttcttgtgcccaactgatcatgcctgatgaaaatggcgacaattttttcctcacctaagcacaatttttgaactcgtcgaatgttatgcgaacatgcctaaaccgt

SEQ ID NO: 30719 - DNA, 245 bp, Glycine max
  Clone ID: PAT_MRT3847_127744C.1
atcccccgctgagaattcgcagggaaatggtggggaaactgacttctagcacttccaatgtaaaagaatgcctttttgggggaggagctgggcaaatgctttctatgaattccaaatgctgctttatgggaattttgtgaatcttcttgaatttagaactctcctattaaatgtcagctctttttatacttgaaattgctgataccctaatttgaggcttccccactggcatttgaagaccagaa

SEQ ID NO: 30720 - DNA, 282 bp, Glycine max
  Clone ID: PAT_MRT3847_127745C.1
accaacgcggccagtcccactcgctcccaacaacaagccacccaaagcccaagaacaccctcgtcaaggcccagtcccaggcccacctctttctccgacaacccctccacctcctacagcagcaacagcgcaccctacagcggctccacggctatcgcctctcctccgacaccaccatctcaagcttctcctccctcacctccctccgtgacactctccccgaaaaccctcacatctatgacttctccgaaatctgtgccgccaccaacaacttcctcgcca

SEQ ID NO: 30721 - DNA, 1862 bp, Glycine max
  Clone ID: PAT_MRT3847_127746C.1
ctccgaattcgtgattctgaaaatctgaaatttcatttctctctgtataaatatcctagtccttatcagcttcactatttcgattgaaatcgccgaagaaggtattgacgtcgatgatgaaaatgaaattggtgaaaacattactgcttctcctttgtgtgaaactcttctgttatgcagtgattggtgctcctcaaacttgtcctgctaacaatgaggataaatgcggcgattcagatgaatggaaaggggagtttttccctgacattcccaaaattaaatatgagggtccgtcaagtaagaatgtgctttcatttaaatggtataatgcagaggaggaaattcttgggaagaagatgaaggattggttaagatttagtgttgcattttggcatacattccgtggaacaggtgctgacccatttggtgcacctaccaaatactggctatgggaagatggtaccaattcattaaacatggctaaaagacgaatgagagctaactttgagttcataagcaaactcggtgttgacttttggtgtttccacgacagggatatagcccctgatggaaaaactcttgaggaatctaatgcaaacttggatgaagtggttgcccttgctcaagagctccagactaaggctaaaaaaagagtgttatggggaacagctcagttgttcatgcatcctcgttacatgcatggtgctgctactagctctgaattaaaggtctatgcatatgctgctgctcaagtgaagaaagccatagaggtgacacattatttggggggagaaaattatgttttctggggtggtcgtgaaggttatcaatctcttttgaacacagatatggagcgagagcttaatcatttggctaggttttttgaagctgctgttgcatacaaaaagaagattggattcaatgggacatttctaatcgaaccaaagccacaagaacctacaaaacaccagtatgattgggatgctgcaacctcagctaatttcttgcgaaaatatggacttacaggggaattcaaactcaacatagagtgcaaccatgccaccctctctggccacagttgtcatcatgagctcgaaactgcaaggatcaatggattgctgggtaatattgatgcaaacactggtgatcctcaagttggttgggacactgatcagtttcttgtagatattcaagaggcgacactgattatgctcagtgtgatcagaaatggaggacttgcacccggtggattcaacttcgatgcgaaattgcggagagagagcacagatgttgaagacttgttcatagcccacattgttggaatggataccctggcccgtggcctgaggaatgctgccaagttgattgaggatggttctcttgctgagcttgttcgtaagcgttatcagagttttgacactgaaattggggctcaaatagaggctggtaaggctgactttgaactgcttgagaagaaggtcaaggaatggggagaaccaaaggttgcttctgcgaaacaggagctagccgagatgatcctccaatctgttctgtagaaagtagaatctagccgtgtgtggtggctatttttcgtctattatattaggaacaattcggtataattaggtttactaataaaaggaaattaagattgacttatgcctgcttcgttttccttgggaaaatataagtgtgaagctgttatctgctaggtggatacgaagcctggtgaagtgcatgttagcttatgtataaaactacgtgatgcatagcttccctggctttgagcatgcttgagttaattaattttagtttcactccgtatcgatttttattcattcgagactagttctctctctctc

SEQ ID NO: 30722 - DNA, 240 bp, Glycine max
  unsure (1)..(240): unsure at all n locations
  Clone ID: PAT_MRT3847_127747C.1
ncccgggctgcgaggtgctaactgaattaaaagaaaaagcgatgngtaaagcgtncttcgcgatgcactgaaagaaagaagaaaatgggannagcaaagtttccnnngcgttttggtctttcattnnnaaaaaaatgggttaaattatttatttnnttctatgataggggattgnngtttcttggtcttnnttttctctnntgtttaagaaaatttcgggggtattcntttaacagnntt

SEQ ID NO: 30723 - DNA, 590 bp, Glycine max
  Clone ID: PAT_MRT3847_127748C.1
cccgcgcggccgaaagaagaggaatgatgcgaagggtgcaaagatggcgatgcgtttggaactgtattgatcgcccgagtcagcagctgcgtctattgcacgagggccctgacaccgtagaagagcttctggagaggcatctcgttaaaaacaaaaacgaaaaccagttggagaatcagaggcaactcaccagcactcgccgcgaagcgctctgtctctaccgtgacattcttcgggccacccgcctctttatctgacctgattccaggggcatcctctggcgcgacatacttagagataacgcccgaaccgaattcgaacagtcccgttttgaatccctctctgaaatcgtgacccgattgcttattggctgcctgtgagccctccactccgctattgataagctcgccgagaagcacaaacaacgctgatttcattttgttgtccgctgttaggtaatgtaatgcaattgaatttgtctgtagaaagaatcaaatatggtttgccttctaagttacagttactggtaatgttgtatgctattgaatttgtttgtctttattcaaacaagtatgaggtcatgttttgct

SEQ ID NO: 30724 - DNA, 225 bp, Glycine max
  Clone ID: PAT_MRT3847_127749C.1
ggtctcggttcgaatcaacataatgattacgatgcgcgtgtctctgcctaaaaggattgatagatggcatacgcactcatgatctatcatgtagatcagtcgaatgtatctaccaaggagcatatttaaatattcgttgatgcactatatcctggatgtcattgcctgcctaggtgccttgcataccatattgctggtagatcgatactggatgtgcttcaactt

SEQ ID NO: 30725 - DNA, 317 bp, Glycine max
  Clone ID: PAT_MRT3847_12774C.1
aaccgactttggagtgcacgaacactggatggggagcgaggggtgcacaaacgccagccgcccctgttattgtaaactgggcgcctgcggttttataactgaaacacgcgtataacctgaccagcgcgatggacaggatgctgaactttaagacacaataaagtcgatcggaataactgttacgttggaagtgttaatgcacgaacgcacatctggatgctgcttgtcaggtgcggacaaccaaaaccttccatgcacatgcaaatagagcgactacacaattaaaccccttactgtggcaaacaatgccataatat

SEQ ID NO: 30726 - DNA, 453 bp, Glycine max
  Clone ID: PAT_MRT3847_127750C.1
ggagtgtggactttatatgggtactctatcagtttgttgcttgtgctatttgtactttgttcatgtgctgtgcgtctgctgttgttcgactgagcagagctttgcctatagattaatgggactatcaccttgttgtgacctgattggtctgatgatcggaccttggacagctgccgaggatgaaattctttctacttatctcatgaacaatggcggtcatggtagctggcgtcctcttccaaggatggccggtcttgttcgttccggctcgagtcgcaggcttaggtggtcgactatctgacaccagctttaaccgtagtccctttactcttgcaggaatgatatactatgcatacagctccatggtctcctaggtaatgcgtgggctgcagtcgcctctcacttaccagggagatcagacggtgagatctagacctctggaacatcctcttg

SEQ ID NO: 30727 - DNA, 355 bp, Glycine max
  Clone ID: PAT_MRT3847_127751C.1
tgtacttgtgtgagatgatacagatggggaaaaacaaatcggaagccatgcctgactagttgctagttagaccaaatcgtgacatgcatgaatttcgcacgttattgttaggggcccttgcgtagatattacatgagagcgagttccaacttgctagcctttgaatgaggggatgcttttgctaggaagacccttgcccggcaatgacggatgaccattttttaccgagtgctgaactgttagattgcagaaagcaggatcacggttccctgttcttcctggtgggatccctgagggattggcaccaagattaggatgctctcccttattctctacggttggacaaagaccggga

SEQ ID NO: 30728 - DNA, 715 bp, Glycine max
  Clone ID: PAT_MRT3847_127752C.1
ccacgcgtccgtgcacctcttctcggagattcagtgaaatctatagtgcagttctcccttgaggtttgctcaagtcaaaatttagagtctaacacacgtcatcaggcaattcaaatcatttcatggctggcaaagtacaagtccagtactttgaaaaagcataagctgatcacacctattctacaagttttatgccctttgcttgctgaatcaactaatgaaactgaagatgatgatcttgcaccggatcgggctgctgccgaagttattgataccatggctttaaacatcccgaagcatgttttccaaccagtttttgaatttgcttctgtaagctgtcaaaatgcaaacccgaagtttcgggaagcatctgttactgctttgggtgtcatttcagaaggttgtttggaactcatgaaaagtaagctggaacctgttctccatattgtcctgggagctctgagggacccagaacaaatggtcagaggggcagcttcctttgctttgggtcaatttgctgagcacttacagcctgaaattgtatcccattatgagagtgttcttccctgcattttaaatgctcttgaggatgtatctgatgaagtaaaggagaagtcatactatgcgttggctgctttttgcgagaacatgggtgaagacatccttcctttcttagatcctttgatgggaagactgttgacagctctccaaaata

SEQ ID NO: 30729 - DNA, 193 bp, Glycine max
  Clone ID: PAT_MRT3847_127753C.1
ggcagttcacttccaacatattccatacggggggtgtatattcctacctttgccttcaagattcaaattttcatcaagaccctcaccggcaataccatcacccttgatgtggaaagctataacaccatctacaacgtcaacgccaagatccaggacaaggaatgaatccccccggaccaacaacgtctcattt

SEQ ID NO: 30730 - DNA, 548 bp, Glycine max
  Clone ID: PAT_MRT3847_127754C.1
aaataaataatagaagaccgtctattgaaaactccatatgttgggaagaaaatgttcaaccgggactgtcaattgatggggttaacgtggcttcttgcaaagaacaaaacggcgtacatacccaccgtttcggcggtgttgcgtgcgatgatgtacagtgcgcaccctcacgagtcacagtgtagtcccgaccaggagaacatgccgctggccgttgattcgcttcagttcgagagcggccacgcgccatcgcggccgtccaagttttgcgtgacggttttgcccctcttggttctcttattttccgcttttgttgtgtagaaagaaagggtgggcccacttggtggggttagtgtctgtcctcttctctttccctctctctcgctatcacgtgaaacttagctactcgacaaaacatgcaaacaaacgggggtagtttgttttttacttgagagggtttttctggctgtaaattttcagagtccattgacatgtttgtgtgtacagtgtcaccaacttacatagaaagaagtggttctttattttta

SEQ ID NO: 30731 - DNA, 369 bp, Glycine max
  unsure (1)..(369): unsure at all n locations
  Clone ID: PAT_MRT3847_127755C.1
gtgggtggtncctagttattttaccccccggtaccccccccgaacaacgaataaaatggtttaccctcacgtagatcgtgttggacgtttgcaactagcttattgtttgtcatgtccgctaataatttaaagatggcggcttgcgccacatccacagccttacaggggaagtcatgtgtttggcccacacactgaatatcactggccggcagcgaagaatacgccccaagcccctgtgtctagaggattattacccaccatgctatattttgactcttgtgtacatggaactgcgttcgcattttgcgctaatgcatttaacgaacttataaagatgcaaactgaggagcctaagaaaaatggtttttc

SEQ ID NO: 30732 - DNA, 584 bp, Glycine max
  Clone ID: PAT_MRT3847_127756C.1
cataaagatcacacagggtatcaaacttccattcctccctttcaacggcaacaaaaaaatgcgtaacaataatttcactgtctcatcaatgcatggtgacatgcctcataaagaaagagatgctattatgggagaatttcgtgctggaacaacccgtgtactaataacaactgatgtttgggcccgtggtcttgatgtacagcaggcttctctagttatcaattatgaccttccaaagaatcgcgagctttacattcatcgaattggacgatctggacgttttggaagaaagggtgctgcgataaattttgtgaagagcgatgacatcaagatcttgcgagacattgaacaatactacagtactcagattgatgaaatgccaatgaatgttgctgatcttatataattagacacatggcgagccggatggagtggatctgtcatatcttgcggtagggagaagtgtttgaatgtggtttcttggtatggaatgcattcgagatgctcttgtccccttttgactttgggccaaattccaatttttacctttttgttgaccgcgccaggagggagggttttttttt

SEQ ID NO: 30733 - DNA, 188 bp, Glycine max
  unsure (1)..(188): unsure at all n locations
  Clone ID: PAT_MRT3847_127757C.1
nnnnnnngggnnnggggnnnnnnnnnnannnntnnagnnnaaattatcggccagaatattcttagaaatatgctcctggcacaaattcaaattgcgccgatcagagcatgaccacctcaagaaggtttctcatccgacggggcaggcggaggggggggcgcgcttttcgtggcgtcgggggtcaacgg

SEQ ID NO: 30734 - DNA, 239 bp, Glycine max
  Clone ID: PAT_MRT3847_127758C.1
gaagtttgaaaggtccttgccaggatccaggagttttttggccaaattcccaatggtttggggggaaggctttgaaggccgtggttccaatgggatttgggggaagctttttaggtccactgttgtgcacacactgcatcttaaacagaccccgaacctgttgaatctgcaaggggtcgagagctgcgcttttttgcatatgtagatcctatagacgtgtctagaaatctcacgagatt

SEQ ID NO: 30735 - DNA, 2480 bp, Glycine max
  Clone ID: PAT_MRT3847_127759C.1
gtaataacctcaaagcaaccattaagcaaaggttgcttagtggttgtgtgtgtgactcttctctcctcacaatgctgcctcacaagcacactctggtggttgtggccactgtggccacactcgcgctggcggcggtgctcgcagcaccacaagcagatctggcctccgagcgagctgcattactctccctccgttcctccgtgggaggccgtaccctcttctggaacgccaccagggacagcccctgcaactgggccggggtccaatgcgagcacggccacgtcgtcgagctccacctccccggcgtcgctctctccggcgaaatccccgtcggaatattcgggaatctgacccagctccgcaccctcagtctccgtttcaacgccctcagaggttccctcccttcagatctggcctcctgcgtcaacctccgcaacctctacattcagcgcaacttgctcaccggccaaattccaccctttttgtttcatttgccggacctcgttcgcttgaacatgggcttcaacaacttctccggcccctttccgtccgccttcaacaaccttacccgtttgaaaactttgtttctcgaaaacaaccagctctccggcccaatccccgacttgaacaaactcaccctcgaccagttcaacgtctccgacaacctcctcaacggctctgtccctcttaagcttcagacattccctcaggactcttttctaggtaactccctctgtggccgaccactctctctctgtcccggagatgtcgccgatcccctctcggtcgacaacaacgccaagggcaacaacaacgacaacaagaagaacaagctgtccgggggcgccatagcggggattgttgtcggatcggtggtgtttcttctcttgcttgtgttcctcttgattttcctgtgcaggaacaagagtgccaagaataccagcgcggtcgacattgccactgtcaaacatcctgagacggagtctgaggttcttgccgacaagggtgtctccgatgtcgagaacggtggtcatgccaatgtcaaccctgcaatcgcttctgtggcggcggttgcggctgggaatggtggtagcaaggcggaagggaacgcgaagaagttggtgttttttgggaataaagtgaaggtgtttgatttggaggatttgctgagggcttctgctgaggtgttggggaaaggaacttttgggactacctataaggcggttatggaggatgggcccgtggtggctgtgaagaggttgaaggatgtgactgtttcggagaaggagtttaaggagaagattgatgtggtgggagtgatggatcatgagaatttggtgcctctcagggcttactactatagcagggatgagaagcttcttgttcatgattacatgccaatgggaagcctatctgcaattttgcatggaaacaaaggagctggtaggacaccattgaattgggaaatgagatcaagcattgcactaggagctgctcgcggcatcgagtacctacattcacaagggcctagtgtttctcatggaaacataaagtcctccaacatcctcctaaccaagtcctatgatgctagggtatctgattttggcctcacacaccttgttggcccctcctctacccctaaccgtgtggccggctaccgtgcgccggaggtgaccgatcctcgcaaggtgtctcagatggcagatgtgtacagctttggtgtgttgctcttggaacttctgactgggaaggcacctacccatgctctcctgaatgaggaaggagtggacctccccagatgggttcaatccgtggttagagaagagtggacttctgaggtctttgatcttgagctccttaggtatcaaaatgtagaagaggagatggttcagttgttgcaacttgcagttgattgtgcagcacaataccctgacaagcgcccttcaatgtctgaagtggtaaggagcatacaagagttgcgaaggtctagcttgaaagaggaccaggaccaaatccaacatgacaatgatatactattatagaagaacatgtatcttctccctcgactttgctttgtcagagtcggagcccatattttacttgctaaatcctgtgcgtatgttgcttgcattctgttggcttgggccgtcctcaaatttctttctttggcaccaaacttttgaattttcttcctttttttttcctcctcaaatctccattgtgccatctcccccctttttcttcccaatcaatacattgttccattagttattgttgttggattctggttgattgtaattattacttctgctttaacatgccttttacttttgttgaaaccgtattatgtctgttgaaaacttgtaattgagatgtttattgcttggatgaaaagcttcttgttcatgattaccttccaatgggaagcctatctgcaatatttcatttgaacataaagagcttgttatgacaccatttta

SEQ ID NO: 30736 - DNA, 479 bp, Glycine max
  Clone ID: PAT_MRT3847_12775C.1
ttttttttttttttttttttttttttttttttttttttttttttttttttttttttttttttttttttttttttttttttttttttttttttattttttttttttttttttaaaaaaaagggggggaaaaaattgcaattatccctttagacccaagaccttttcaaaggttttaaagccacacgcaagagcgggattaaaaaaaaccaaaagctcagccccccctacaagaaaaaaaatttaaacgccccaaaaaaggtttgggccccccaaaaaagtgcacccagggggtcaaaaaaccagtattctcaaacccatttttttgggctggcgcaaaaaagtaattgggaggcaaaaggacccttcgggcaaaaaggggaaaacggacatttttggagccacccgctaaaaggttttttggggaaaaaatcccaagaaaaaaagggcccggggcatgtacccccacccgggggtgtccc

SEQ ID NO: 30737 - DNA, 1227 bp, Glycine max
  Clone ID: PAT_MRT3847_127760C.1
tatttctgaccagagtagcgagaagattcataggaagcagatcaagcatttgttccttgacctattcgttgcggggccggtggtggccgtgaagaggttgaaggatgtgacaatttccgagaaggaatttaaggagaagattgaggcggtgggagcgatggatcacgagagtttggtgcctctcagggcttactatttcagcagggatgagaagctccttgtctatgattatatgcccatgggaagcttgtctgcccttttacatggaaacaaaggagctggtaggacaccactgaattgggaagtgagatcaggcattgcacttggagctgcccgtggcattgagtacctacattcacgagggcctaatgtttctcatggaaatatcaagtcatcaaacatcctcttaaccaaatcatatgatgccagagtgtctgactttggccttgcacaccttgttggcccctcctctacccctaaccgtgtggccggctaccgtgcgccggaggtgactgatcctcgcaaggtgtctcagatggcagatgtgtacagctttggtgtgttgctcttggaacttctgactgggaaggcacctacccatgctctcctgaatgaggaaggagtggacctccccagatgggttcaatccgtggttagagaagagtggacttctgaggtctttgatcttgagctccttaggtatcaaaatgtagaagaggagatggttcagttgttgcaacttgcagttgattgtgcagcacaataccctgacaagcgcccttcaatgtctgaagtggtaaggagcatacaagagttgcgaaggtctagcttgaaagaggaccaggaccaaatccaacatgacaatgatatactattatagaagaacatgtatcttctccctcgactttgctttgtcagagtcggagcccatattttacttgctaaatcctgtgcgtatgttgcttgcattctgttggcttgggccgtcctcaaatttctttctttggcaccaaacttttgaattttcttcctttttttttcccccccctcctcaaatctccattgtgccatctccccccttttccttcccaatcaatacattggggggaagtggatatctgttccattagttaatgttggattctggttgattgtaatccttacctctgctttaacaaaaaaaaaaaaaaagggcggccactcgcgatctagaaccggacgcgtggg

SEQ ID NO: 30738 - DNA, 3094 bp, Glycine max
  Clone ID: PAT_MRT3847_127761C.1
tcccggctcgacccacgcgtccgctcctccttctccctcagaattcgcaatgctgcctcagaagcacactctggtggcgacactggctgtggtgctcgcagtagcacaagcagtagatctggcttccgagcgagccgcattgctcgctctccgttccgccgtgggaggccgaaccctcttctggaacgccaccagggagagcccctgcaattgggccggggtccaatgcgagcacgaccacgtcgtcgagcttcacctccccggtgtcgctctctccggcgaaatcccggtcggtatattcgggaatctgacccagctccgaacccttagtctccgtttcaacgcactccgaggttccctcccttcagatctggcctcctgcgtcaacctccgcaacctctacattcagcgcaacttgctcagcggccaaatcccaccctttctgtttgattttgcggacctggaccttgttttttacggtacaacgtcatttagctttgttaaagtgtcaccaactaatgcctcgaacactaacactattggcatcaataagcacaatagggtgcagcaacgccaatagctagctattcactatccagacttaacaggaattaacttagacttcgttacactatatgggaaggggatgcagtcatgcagtgtgatgcagaataagaaaatgagctcgtgccaattacagacagtatagttatatcaacctcgacagcagataaagaagctgtcaatatatcaatctagacaatagttataaccgcctagtaaaacactgatgagaatggcatgacttcaaaacaggtcattgatggcaagggcactaatttaggggtcaacattggacttcctgaaactcccgggttcccaataatggtaagaaaataaacacaagttttcacatccgttagagacatccgcgattgacaacatagatacatagaaaacagaatggaagatattacgaatatgcagagcatagatgaagaaatagcagttagtaaatacctaggcaagcaatagtacctcacacgcacatagccactctcgtacaatttcgaattattagttgtatttttgtaaaacacaatctaacaattgagtaataatatagagatgatagcctacataattgcttttgcagttggctacacaaccaaaaattactaatagacaaaaatagcaattacataatcagaagactctactaccaggttatttgtcaagatttttgctcattgttaatcaaacaatctcatcatttcaaatttatctataatcagagtggtgcatacaagaaattggatcaatgcagattcctaaaacagcattaaagtcaaatataataaattggcaaacaatcaatcataatatggatcatgtaccttttgaagaacataaccatcatgtactggtgcaactgtaattgatcctccaccaccatcaacaactaatgacgtagcacgccctgatgcaaaagaagtcagaacagcattcttcgccaaaaacaatgcaggtgctttgtacttctcaaaatcaggtccaaagttcttgccgacaagggggtctccgatgtcgagaacggcgctggtcatgctaatggcaactctgcggtcgcagctgtggcggtggggaatggcggtagcaaggcggcggaagggaacgcgaagaagttggtgttttttgggaatgcggcgagggcgtttgatttggaagatttgcttagggcttcggcggaggttttggggaaagggactttcgggacggcgtacaaggcggtgttggaggcggggccggtggtggccgtgaagaggttgaaggacgtgaccatttcggagaaggaatttagggagaagattgaggcggtgggagcgatggatcacgagagtttggtgcctctcagggcttactatttcagcagggatgagaagctcctcgtctatgattacatgtccatgggaagcttgtctgcgcttttacatggaaacaaaggagctggtaggacaccactgaattgggaagtgagatcaggcattgcacttggagctgcccgtggcattgagtacctacattcacgagggcctaatgtttctcatggaaatatcaagtcatcaaacatcctcttaaccaaatcatatgatgccagagtgtctgactttggccttgcacaccttgttagcccctcctctacccctaaccgtgtggccggctaccgtgcaccggaggtgactgatcctcgcaaggtgtctcagaaggtagatgtgtacagttttggtgtgttgctcttggaacttctgactgggaaggcacctacccatgctctcctgaatgaggaaggagtggacctccccagatgggttcaatctgtggttagagaagagtggacttctgaggtctttgatcttgagctccttaggtatcagaatgtggaagaggagatggttcagttgttgcaacttgcagtagattgtgcagcacaataccctgacatgcgcccttcaatgtctgaagtggtaaggcgcatacaagagttgcgaaggtctagcttgaaagaggaggaccaggaccaaatccaacatgacaatgatatacagttatagaagaacatgtatcttctcccatatttttacttgctaaatcctgtgcgtaagttgcttgtattctgttgttagcttgggccggcctcaaatttctttccttggcaccaaacttttgaattttcttcctcctcaaatctccattgtgccatctccccccttttccttcccaatcaatacattggggggaagtggatatctgttccattagttattgttggattctggttgattgtaattattacttctgctttaacatgccttttacttttgttgaaaccttattatgtctgttgaaaatttgtaattgagatgttatagtagctgtcgttggatggttggttgcgatgtctcgtcggtggtgtgttttattattgccaaaaaagattattgtgaacgtgatcgccaccttcgtgaggatgggcgatttatgccccaaaccaacttttgattaacttgggcttcaacaacttctccgggccctt

SEQ ID NO: 30739 - DNA, 361 bp, Glycine max
  Clone ID: PAT_MRT3847_127762C.1
agagcggccgcttaatgaattggtcaacgcgcggtgtgagggggacaaataacaccgccctaaaacaattaaaaggtgaatacctcgtttggctcaacaaatttgcatgtttcttacgggttggtcacactaccatgtacttgaacacaaaatgacctatttaatgtgctaacaaccagttaccacatgtgaccagtaccgctcaacaacaaggacatcgaacctgatttaacgaacaatggtgttacagtaatttataaatttctgtgaacccaaccttatctttaaaatcaaaaatggacttaaagttgtcataacaaaagatgtccttattaattgctggattctgaagattctagat

SEQ ID NO: 30740 - DNA, 121 bp, Glycine max
  Clone ID: PAT_MRT3847_127763C.1
gcgtgatcaaccgaaaaatctaacatatggtggcttagggatggatataacacaatatcgctatatccatcaccagctcgcactaccgacttattcatggcacccatcggccccaactcca

SEQ ID NO: 30741 - DNA, 387 bp, Glycine max
  Clone ID: PAT_MRT3847_127764C.1
gtaggcgtcggaaccttttccactagtgttcctttgatacatatcccgcaaaccaattaagaaataattaaatcagggtaactggaggccatcccgccggcaagacgacatcctaatacttcacatacaccggaacgactctctccgaaaaacataaatatacgaaattcgcctcaaatacactcgtcgtacgtatctctatagcagtaattcccatatacggactacacaatactacacgtagataccgttcccaccatgataccaaatgaacgtaaacaattaccttacctcctagaaatacaatcacttcgcacataaatctcgcaaccatcaaaaaaatcttatcaggcgtccatctaatctattctccaagaatcttgaact

SEQ ID NO: 30742 - DNA, 165 bp, Glycine max
  Clone ID: PAT_MRT3847_127765C.1
caagaaagggaagtgtgcacctaaaaaaggaagcaggctttattgtataaaatgcttgcagggtcacttcaattatagcaacaatgaagattcatgttcgatcatgaaaaaaaaagaatgacgaaagtctacagcggcctctctagaggatgcaagcttaagtat

SEQ ID NO: 30743 - DNA, 481 bp, Glycine max
  Clone ID: PAT_MRT3847_127766C.1
cgattaatcacttcatttacacatgcaaccccggtgatgccgatgcaacatcctcagggttgttcaccccacccacacggaacgcgacacaagtcgggtgatcgaattttcctggaaattcagcatagctagggggttgttttgggccgatattttgttccatataagttctgcacttggatgttattttgatgcaatagttcagcagtgcgttgacgatgagttgaggtgtcggctctgccatctgcttgatcaacatcttgagctggtctgttctgaattggctctttaattcatcggcgcgtctgtgtgattcaaatgccttccagttgtcaccgtttaactctgcggagacatccctcggcttcaaaccgtgttgttgggggtcaaaattgtcgtgaactccatcagagcagatgaatatgatatctccatggtgtacctcgaaaaagtataacttgaggttgcgaaggtccggagc

SEQ ID NO: 30744 - DNA, 759 bp, Glycine max
  Clone ID: PAT_MRT3847_127768C.1
tttgggggtaccactcgggccgggcgggagcacagtgtcggacatgtcgtattcgagtgggattgtggtgtcgggtggacaaggcgcgacgcagttgtgtgggatggatcgggaagcgagggtgctgcgatacagagagaaaaggaagaaccgaaaatttgagaagacgattcgatacgcatcgcgaaaggcttatgcggaaacccggcccaggataaaaggccggttcgcgaaacgaaccgaaattgactcggatgtggagcgtctctatagccctggcgctgcggcgctcatgctggacactccatacggtgtcgtaccaacgttttagttaattaatcaaaaagaagaagagacgatgggtgcatgaatatagtgttgggaaatcttagaataatgattagtgattctgtgggattattaggggaaaaaaggtgaagaatcgaatcggtacgaacgcgattcttagctggagcgcgatgggaagattattgtgaagatttgtctcgatcgaccagaaaagcccgtttacttttaaagggggcttctgttccatattcacctcgtgtagaattagaacctgtactgtaaactcttttcactgccttgcctgcttctgtctttcttagtattaaagtgtctttttttcgatcagccagatcacggatctctttccccattcctattggctgtcctccccaactatatatatatatcacttttttaatacatgatgatcatcatcaaagcctttgtttt

SEQ ID NO: 30745 - DNA, 364 bp, Glycine max
  Clone ID: PAT_MRT3847_127769C.1
cggtctcgtgcgttgcgttgatggtagatgcgacacatctaggacatatgctcacgccgaccctactggagcctactagaacggtgccgcctataattagacatccttgtagaaggcccatgcaaatcacaccttgagcgttgctatcgtaagacggggcaaggaatatcacctatacggatccatagtgttcacagggagatgcggcgcagcactggatgatggagtcatgactgaagagtgtggagcagctataggtgatgattactgaatcgcaaggatcgcatggagatgtagctggggagccgatggctgcatgaaatgagaaagacacttcgatcatgcctgacatggcctgtgtggc

SEQ ID NO: 30746 - DNA, 424 bp, Glycine max
  Clone ID: PAT_MRT3847_12776C.1
ggagctgcaggcattcgatccactaaaatgctgcacgcacacgaggactgtacacgaaccattatgactcctgtcgacatcgtctcgtcccttagcttcgatcacatcatatgactctctgtgctttgaacacaatccagcattcaaaggggatcgatacatgacatttgatagcatatagtgcgacggaaaaaacgacgctaacggaatccgagcggcttaagagaggtggggagtggactttcagatgacaaatatgctgtggtgaacttaaactcggactggatttaaagctgtgagtccagatctggtcagacgaaaagttggcctacatagtgcataatccctacatttgtttgatggtcttgaatcggacagtgctgaatgacatatcaatgcttcaggtaactggcttaatgcaaat

SEQ ID NO: 30747 - DNA, 445 bp, Glycine max
  Clone ID: PAT_MRT3847_127770C.1
ggggttgtgaggggtttaagaacaaacacaggcttggggtagttttcaggaggattttgttttatcagacaatagcccaagtctctgggtgagaattttttgattgcctttcatcaacaaatttcttgcagacaaccaaaaataagtgttcatttttttggtgcaaacataattcaacacaagaagaaaggggggtatttgtcggcttgattttcaaaccagaagagagtggcctcaacatgggttgaagggttcttctaatgcccacttacctgttctaatcttaggtgtttgcaaacctcaaggaagtcgattagattctatctaatgactttttcttataggagtgattatctgagatatggtgttgcagaagaggttgaactatggttttaatggctatcaggtgcctgtcattcctagagcttcaaggtcagctaggggg

SEQ ID NO: 30748 - DNA, 366 bp, Glycine max
  Clone ID: PAT_MRT3847_127771C.1
aaaagcaaaacttgttctgggatcaaaacaattattactgaaacttaacatgcttccaggattgtaagcttggggacctatctcttaaacctaaatgtgccaaacggatacaaactgaaaaccctaagataatatgggacctccttttgcgttcttttagcagcgagaggcatatgaatttcgtttagatccaacactgctaagagctttttcaggtaacagggcccccatagaaccacaactctatctacttgttcgcacttttaaatgccaaacttacatggataacatttctttcattgtttaaggaacatggaaaacggataggtacatgctcaaacctagctttgtttgagggtcccaaaa

SEQ ID NO: 30749 - DNA, 795 bp, Glycine max
  Clone ID: PAT_MRT3847_127772C.1
catgaactcaacctggacaccacatgccacgcgtccgtgctgcgccaacaacactgaactcaaactcattgtgttgtgagttgtgaaaatggcggttgcactatcgagttgcacttccttatcctccgtgctgttctccacagttaaattccgctactcactcagacacagacccatcgtcgcctctttccattgcaataatcacccactccgagtctcctcctcctcctcctcctcttcttcctccaaatccaatcgaaaaaaggaaggtgcagggcacaagaagcagtcaaaagatgaaagacctgcaagagggaatgtgctcgaatcccaacaaacttcttctaaaccttttggcattcaaaggaaaaataaggaccttatcttcgactccaaggaccagcaggttgaacagagtattttacaagattcggctttccttaatgctgttgtgaaggtatactgcacccatactgccccagattattcacttccttggcaaaaacagagacaatacacaagtactggaagtgcatttatgattggagataggaaactattaacgaatgcacactgtgtggaacatgatacacaggtcaaagtcatgaatcataatatgtgacttatattgtaggtcttgtaatacagcaatattaatgagtttatgacaagctctgctgtcgctaaatggaccttatttataaaatagccaaccaaaagtggattgctaagagaaattatataaaaagggcaagccaacacacgagcttcccacctagtggggtttgggtaggg

SEQ ID NO: 30750 - DNA, 371 bp, Glycine max
  Clone ID: PAT_MRT3847_127773C.1
gtttatctacaactacccctttatctagctcgggtgctagctacattatttcctgcactcatctctaataggccaattaaaagctctcgtttttactcaggatccccattcatagacgactacctggatgatacatagatcactgggccatagatgcacctatggttctctatatgctgataaccagatgcaaacgggtgtgcatcccacgtgtaactttgtgtctatatgtgccatgagacgaacagctgctttcagagcacatctttgccttggactcgctgatctttatgttgtacttgcagagcaggactatccaggatctttaccgtgaggaatatgatgactttcttggtcctaccgacgtatga

SEQ ID NO: 30751 - DNA, 284 bp, Glycine max
  Clone ID: PAT_MRT3847_127774C.1
gaccgacgcgtacggaaaggctaccaaaccttcaactacaactcttatcctcaatcttcgtacaaagttgcactcggttgattttggtagatgtatagctcagacactctcgcttatcatcaagatgtcaactctagtttccgacctgcatctatataatattgctaatgtcaaggcacttgcatgctgatatcactcactgcatcacccactcacaagacatgaataacacttcatcttcttaattacctaattgtttgaatgatttaaatcttgttgacata

SEQ ID NO: 30752 - DNA, 260 bp, Glycine max
  Clone ID: PAT_MRT3847_127775C.1
aatatggattgagctgatacttcttgctggcttcctgttagaacttccactgttaaaaggggtgagtgcctcaggtcaatacagccatacaagagtgcggctccgcccccatggcgcccaacctcctaaccgtttataaagggacggtggctgtattgaaacctggaatccttacaacaaggcatttcagagggccggggctgtcctttcttttatgggcccccgaacagaaaggccttcccataacctttttcgcccac

SEQ ID NO: 30753 - DNA, 368 bp, Glycine max
  Clone ID: PAT_MRT3847_127776C.1
ttttaatcctgcaaagatggaatcttgtgcgcaattcgggtggtgggtggtcttgatcttgtgcttggcgtttcaaattcaacccaattatgggttctaccttccgggcagttacccccacaactatgatgtcacggatgagttgtgggtgaaggtgaattccctcacttccattgacacagaaatgccctttagctattacagcctgcccttttgcaagcccgagggtggcatcaaggacagtgccgagaaccttggggagcttctcatgggagataggatagagaactctccttataggtttaggatgtacaccaatgagtctgagatatacttgtgccagatccaggcgctgtcccgggaccagt

SEQ ID NO: 30754 - DNA, 374 bp, Glycine max
  Clone ID: PAT_MRT3847_127777C.1
tttcaccactacctacggagctttttttcggtcattcgatctctggccaagctggcccttcaccctctctcatcactcaactgcctggctttaacgccaatttgccatccaaacactattcccggtatataagtattgattgaaatgctcaaagggggaagaacctggtctactactttggtagttcacaaagtaggccacagaatgacccatttgggctatcgctgaatggttgacctgggggctccacctttgactgctttatttacgagcatggaccactcaactatcatgctgcatattcaaaaaggaatctacccactttgcatatcaatccttacagcttgtctaagggttccaacattatatatttg

SEQ ID NO: 30755 - DNA, 524 bp, Glycine max
  Clone ID: PAT_MRT3847_127778C.1
gacgcgtacgaaaaaaagtcagaagaaaattaatttgatttaaaagataaggggggcccagctatttatatgcttcattcatgcaacatatatttaattttcttcagaatgcctaggacccctatgtttttgtgccactgccacatgttggataaatagagatttcgttcagtcaagtttgaacatggaaagtaacatctgttgtcgttttggctttctcaaaaacacatgcccttctctgtacgccatcgttagctcctactactaataaccgagtacacttatttaattcttactactaatttctccccctattattagtattatttattagtttataatttgtacattattccatttttttcacaaactttcccataatttatccaaaataaagacaattaaaatatgtagaggaattatattcattttcacaattgtgcttatttgaatagtgaaattaacaattgcttgatcccaaaatcaaattgtactcacactattctttatgagcttgagtatat

SEQ ID NO: 30756 - DNA, 1305 bp, Glycine max
  Clone ID: PAT_MRT3847_127779C.1
cggctcgagcggctcgagctcgagccgaatcggctcgagagttgattgatctctatggttgcacattttggtgctggggttttcctcctaattcaactttgaggctgattctgcctcattagccggctgtcggagtcttttgtctcgggaaaatatgctgtataatgcctattcccggcggcggttggtccatcgatgtcggatggtcccggcctgggggcggtcttgttgatgtacggttggcaggcgctacaaccatcttgcctcctcaacattttcttcatcacttggaccctagtgcttctccaactcatgacaagcgtatctcttcacccaaaagtgaatgctggcattttaagtccagggttgatggggctctatgttgtcttcctttgctggtgtgcaattagaagtgaacctgagggagctgaatgcatcaggaagtcagaatctgcaaacaaaacagactggcaaagcatcattagctttgttgttgcaatactagcacttgttgttgcaacattttctaccggcatagattccaaatgctttcagttcaggaagagtgatccaccagcagaagatgatgttccatatggttatggtttcttccacttcgtttttgccacaggagcaatgtactttgcaatgctattgatcggatggaatagtcatcattctatgagaaaatggacaattgatgtgggatggaccagtgcatgggtcagaatagtaaatgaatggttggcagtttgtgtctacttatggatgctggtagctccaatcatatggaagagtagacatgctgattctacatgagaacttccctgttatctctattctggtttgaaattgtgaggattaagatcttaaaatgccacatatatttgctgcacatgtagtggactcctccagatactgctcttaggaaaaggaattgcaagtttgcaactgcaacaccctgcaaatttgatgtcagaagcaatggttctgccaaaaatgcacataagctgttgggtttgttacttgaagctacacagtacctgttcatttatccctgatcactgaaggagtataaagtaacttagcaaccatttagaggatgctcatcagaaagttcattcatgatttgtcaatttatcggtttaaatgcttaaagtaattttgttgtgagtgaatcatcatatgttcaacataaggtaagcagtgtattaccatttgtcagtgacaaataatatagaagtcacaatcaatgaaacaccgagtctgagttcattgttttttctaataaaaattatttgtacc

SEQ ID NO: 30757 - DNA, 337 bp, Glycine max
  Clone ID: PAT_MRT3847_12777C.1
gtgcgagcagcattaacaacaaaaatgggtctgtcaataacaatccttgtacttttattgctttggttccttggggtgaggcttcctttgttggagctcattcttattggaatttgtatgtatattaaaagaacaaaaatagggctggggattcttcatttgcgggtgtcaaaaaacaaacacaattttctgttttccattcacctaacaataaaaggtatccaatatcccaatggcatatattccaagggtcaatcaacaagatttctttcttaaccgatgggacttacatagcaactggtggacgggatgggtatttaccagtggttgattactt

SEQ ID NO: 30758 - DNA, 263 bp, Glycine max
  Clone ID: PAT_MRT3847_127780C.1
cgacgagaggttcgaacttttatattgtcgactgagtcaataccctaaattcaatgacgctaagatggacagctgatggaacagcaaagtcttgctgcaattccccgtggctcgaattgccaggttcctgaaggctcgaaaagtatgacgagcgcgatgtcgccggagcccctgtgtacctgggcgccggtctagattatctgcgttctgaagttttggaattgtgtggattcgctgtttgatatagccggtgtactggattt

SEQ ID NO: 30759 - DNA, 424 bp, Glycine max
  Clone ID: PAT_MRT3847_127781C.1
gcgtataaaatcccatgtccgaatcccatgctttcaatgcatgtctcaagtccactatagcttgcacttgggtcataatattccattacacctggtgactttcacgtgagctggttgtacactaacactttgactagtcctgggctcctgggctcgtgagctggttgtacactaacactttgactagtcctgggccctaggcaaatactactattctagtatcaccacccttgatgctcatttgcaactaagagatggtggaaagctctaaagctcagtttggatgaacttctcaacaaggaactaatgatgaaaaatttaatctgtagaatgtaaaatgaatataacttttccaatttgttaaaatcaacttatgcgtcgcaacgactgtggaaactttctcatttaactacacaagttgagc

SEQ ID NO: 30760 - DNA, 789 bp, Glycine max
  unsure (1)..(789): unsure at all n locations
  Clone ID: PAT_MRT3847_127782C.1
accggtccggnaattcccggngtcgacccacgcgtctgcgctttctccttccgtcaatcctaaacccaaaaaaagccatcaaatccctccctccctccctctctctttcatttccatttcctcgtttccatcatcatcgcgcttcctttctgtctttttcccccgcaccccttacttgttattatcactgccccgtgcgtgcgtttaatggctccgcgcctcgctataaaaccccccaaacagattcattgagattcaaatgctattggacgacacgccgtatctacgctcaaatgctcggatctctcgctggtgtaaaaccgcttctctctctctctctctctctctcttgcctctctttccacgcctcttccttcttcgtcaacaccttcttcgcttttagtcttcgtgttggcggcaatttgaattccgttactgttctctcgcattcgtgatgctttctttggttacgtggcctccagcttgaagcagttggagctgcaaaagtatgtgtttcgattatttgtggttgtagagctacctttagctttgatatctctcttatgggttaagggagtgtggcgaaatggttntacattccaattttattaaaacatggaagagacacgagaagatgcagggccagcagagcgaaggccatccaacatgtcatggtggccttcagattttgttgaaaaattcgaatctgtttctttgagctctcaagatgagaccttaaataataataagaatcacctagacattctaccggggatgttatgtcacctc

SEQ ID NO: 30761 - DNA, 495 bp, Glycine max
  Clone ID: PAT_MRT3847_127783C.1
agaaaatatcatcatccgacggcttacttgacacaccatcctttgttacctcttctggatctctcttagcaatatcctttgatactctccctgaaaataaaagtttctactaattgttaatctttaacattttaattgtttacataaaattcaaagaaaatttcccaattacgaatagtaactactaaaggagcacttactgtaggagtaccgaaaaattgctccatactttattattggtgagaggtttagacataaaagttaaacatgcatttaaactaacagtatgaaaatactcatgatacattaatcacaagaccaaaacctagttttaggaaaaattagagaaaggcagctgaaaacataaattatacttaaaaatagtccaattccagccaacatatgaacacaataaacaatatgcagccaagttcaattccagccaatcacatcactgcacaataaagtaaacagtagattgcacaacatattttc

SEQ ID NO: 30762 - DNA, 346 bp, Glycine max
  Clone ID: PAT_MRT3847_127784C.1
ttagtagatctatccattatggaactggtcaattttaattctgagaagaactatagtagtagaaagatatgttttgccaatatgcatatttaactgaggttgttataactcgttccttccctcataaaagtagaaataggatagaaaaggatcctactatcctcctccattggatatattacatatatatggagtaaattctactcggtcagaaaatagatgtattatcatgaataatgtgagcagtctcacatctctaattttggtgactgattcaaggggttaaattcgatccataaggttaatatgcaatacaatggctacctgaattgtaatgaatgccaac

SEQ ID NO: 30763 - DNA, 351 bp, Glycine max
  Clone ID: PAT_MRT3847_127785C.1
aaaagcgaagggagtagtatattacatacaacgcatacactaattataaaaacatgcacggggtaaagtcgcaaacacttacgcgccctaacttaatcaccctttatttatatataatcatcataatcataatatataatcatcatcccaatcatgatagggtgtaattaagtacctaattttgaaatgatttaatcgtccaaaacaaaaattaccaaagcctgagaagagacaaaacagcccaagaaaacctaagaacccaaattccaacatagttttatacttccaatttataaaataaaactaaaacttaagaaaacgccatttattaattattttgccttttagaaa

SEQ ID NO: 30764 - DNA, 208 bp, Glycine max
  Clone ID: PAT_MRT3847_127786C.1
ggcttcaagtcaggaagaggtgatccttttgggggttattggaaccccatttctgaacagggtgcagattgctctcacattgaacggagttgaataccaatatttggagaatgatttgaacgacgggagtgatttgctgctcaagcatagcccacgggataacatgactccagggagtgatgacgatgaaaagcccgtatcagactcg

SEQ ID NO: 30765 - DNA, 281 bp, Glycine max
  Clone ID: PAT_MRT3847_127787C.1
gggtttagaacaattaaagtttcactaatatgccaggaacactatcttatagaaagatcacctttcttgggaatcaatttcttataatacataggctcgggaaaaaaaagactttttctttgattcaaagaaaatgtgccacctttcttataatggaaggggcacaaaaggcctcaaatgctacccgtcataaaatgaattaatgctccaccggaagtgatagaagaccctccattaagaaaagctattctagccatcccttccatctgtaaaaacccccc

SEQ ID NO: 30766 - DNA, 199 bp, Glycine max
  Clone ID: PAT_MRT3847_127788C.1
ggtggtggtggtgccaatagtaacacttccaccaccaattattggaacctcacgatgcgccaagaagcgaataatcctgcacaaagggtcccgatcaacgcggctaatcttgataataaaaaggccgtgccggagagtgaggcattaccccctctaagaccctgtctttatggtgtgcctagattgctgcaacacggcc

SEQ ID NO: 30767 - DNA, 151 bp, Glycine max
  Clone ID: PAT_MRT3847_127789C.1
tggtgcagtgcgcgggaggccattatttatagactatttttgtccaagcactactaacacaggccataattctcagtgattcgggggacaaagaattcgtttgatggatttttatgcaataaactacaaaaagaaagaccctcctttggtt

SEQ ID NO: 30768 - DNA, 557 bp, Glycine max
  Clone ID: PAT_MRT3847_12778C.1
tagcgcgaacccggaatccatcgggccgtaatgtcattagctagaaagggttcatgctggatacaattacaagcaaaattacaagcatcgaaagtaacacagaagtatagaacaatgtgaataaatctttaaaacaaggagtatacaagattggatgtaataaaacaactattaggttaaatcagataaatatagaaatttatatgtgaccttaaaaatttaaaagatttagtactatataattcaaaaatgatacataaatgaacgaaaaggacccattaataaaaagttataatataaaaaaattatattaagaataatcgtactacaataaatgaatagggttaagatatttaaagaataactgtggaataaaagggttgtattagaaaaaattaaatagatgtaatcttaaaatataatttataataaaatctttatatgaaaaataataaagaatgggaaaaataataaaaaaaatggatctaaacgtttaaaaaattagaaaaaacatagataaactcaagggataaagtaataatgctagagcacttaca

SEQ ID NO: 30769 - DNA, 1009 bp, Glycine max
  Clone ID: PAT_MRT3847_127790C.1
ctcgagccgattcggctcgaggccatcatagacacaagcatgaacatgaagctgatgatgatagggacattgagcttccacatgtggaccatggctatgtaaagaataggtcattgccactttctaccatcatagacatactcaagcagaaaactgggaaaaatgatatagatgttgggaaattgagactctcgctttatgacatatttggggaagatgctagccctaaagtgaagaagttcatgaaggttatcttgaataaactccaacaaggggatggtggaagtggaaaacaaggtggaatcttggggctagtgggtagtcttgcccaagagtttctcaagcaaaagattgattcaagtgatgatggtggttatgcaaaacctgccatggagacaaaggttgaaagcaaatatgaggcatatgctggaacaagttcagccaagccgcgcctttcagacggcggaattctgatgagtggttgtcaaacagaccaaacttctgctgatgcaagtccagcaggtaactctgccagtgcttatggagcttttagcaatgcaatacaggctgtgattgaggagagtgatggtgctgtcacaaatcaagagattgttttgaaggcaagggagaagctgaagaggggaggtttcaaacaacggccaggactttactgcagtgatgaccatgttgatggtccttttgtgtgctgatgagtgatgagttctgtcatctggtgcagaaaatcagagttatttgtgttgtgtatgatgatatatgcttgtgtattacttgttttggacaattaatgcttgctcaaaagcaatatttactttgactgtgatttcagttattattcattagtgacagaataataactaaaaatgagactgcacaattgtgttgccatagagaatgagtgagtccctcctctaaaaatgtttccgacagttgttgcttcatgcattgggaaacatgtttcatgcctcaatatggaatgttttattctttc

SEQ ID NO: 30770 - DNA, 345 bp, Glycine max
  Clone ID: PAT_MRT3847_127791C.1
ccacgcgtccggggagaatggggtcactaatggcctctgcttctatcactcttgcttttgccataatccttttcagcctcccatctgaaatctcagcaaacaactacatctactcctctcctccacctcccaagaagccttaccactacccatctccacctccaccagttccttcaccacctccacctaaggctccttaccactacaccctccaccattcaaattatttcaaatgctttaagagaaaaatcttgattgtgctagtagatgcaactttttttgacaaattgcaatatcttgtctagttattttctataatctatagtctaaatttaaattgtttga

SEQ ID NO: 30771 - DNA, 663 bp, Glycine max
  unsure (1)..(663): unsure at all n locations
  Clone ID: PAT_MRT3847_127792C.1
tactttgggatgccnctaagaaccaggttttggtttttaattactacccccaccggttgggaataataccagggttgatggttcctgattttggggggggagaaaaagggaaaccgaaaaaccattccggggaccaaacttaattatgggccattggaaaggggatatggcatgggccccttaaaataaatggttggaagaaggtcttcgcttgttggggtttatttgggggacccgatatgacaataatcctggcacttggttccggaccaaggttaagggccacaaccttgggaccccatatttggcttaaaccaacccaaatggttccctttttcccggattccccggccattgtattattaggaacccccatttcttccatcggatttatcaccatagccgatttactttccctggcgacccaaaaaagaaccggtatttaaaattggccggtttgggattttattttaaaaggtaaaccggatattttccttatncttttaaaaaccatggnncnggttacttccatttcacccccaagccagggttttcaatannaaccaatgggccatggccccagggaagccatggccaatccaatngtatataccnagcctgnnnnnnnngncttnnnngggccggtngnanacccattaagna

SEQ ID NO: 30772 - DNA, 444 bp, Glycine max
  Clone ID: PAT_MRT3847_127793C.1
gattgcgggtttatgttttgatggaagagtaactgtgcattactataaggaaaaccacccctgatttttgggacaaattgcgttacgccaaatctttcttaatattttggcagggggaattgcacccaacccttttggcgcgggatgcctgcaacaaaattaaacatagtgatccttaggaaacgcaattttttccttctatattgagaaaaccccttccggcgggggctacaccgcggcattgcagagtttggataatttcaacttgcaatttttccattccggaacgtaaagttgttgagacacatataacacatgttctaattttcatggtagccgtgacaatctacaatgagctcgtactttctgattgagaggaactgtgggcttaggaactggatcttggatgcctccgctatgacaaggacgggattgatgtttggc

SEQ ID NO: 30773 - DNA, 251 bp, Glycine max
  Clone ID: PAT_MRT3847_127794C.1
agttattccgtcaaaacttgtacagacggtcaaaactatacgatgctagaaagtcctcctccattctatctagggatgctcgtacaagacgttgggcaatcaagaaatctgaaagtggctataagaggatggaggaattccttgctttaagactaagggaaattatgaagacaaattcctgcgacttttttgtgtccaaggttgcagaaattgaggctacaatgaatagtggttattacagtagccgtggg

SEQ ID NO: 30774 - DNA, 332 bp, Glycine max
  Clone ID: PAT_MRT3847_127795C.1
cccggggtcgacccacgcgctccggagtgtggtgatacatatcatcgattcaggaggcaacaaaggagttgtatattaaaagcatggaggaacatgctcttggtaatgatgatctattactcttctcagccgaggctacaagacagagtcgtggaccatgatcattccaatgttcatttggcttctcaagaaaagcctaatttcttgtgaaaggagctgctactggcagtgcctagcaaggttcagacagacctttgtgctttgcatgacagcaaagagatctcctgcttggacggcctccttcctggggagcatggaactgagcctttggg

SEQ ID NO: 30775 - DNA, 335 bp, Glycine max
  Clone ID: PAT_MRT3847_127796C.1
ccggtccgtaattagggcggggggagactactacactagtcgccttccttttttttatattttttatacacttggaatacaacatatcatgggtagaagtaataaggggggtgcatatactatcattatctattaacttaatatgatctttcaatgtttatattatcataataattacttgatcaacaactcctttatttactaatacaatatactatgaccaatattaatctaattacaatcctcaatttataatattatgaataattatacttcaaccttaagttctaatggcattcactaacgtcatctttcaaaaacattaaacaaaaata

SEQ ID NO: 30776 - DNA, 355 bp, Glycine max
  Clone ID: PAT_MRT3847_127797C.1
acgtaagctcggatcctctagagcggacggccttctttgtgtcatacgctatccagaccatgttgatatcgcacatcccttactgaaactggagcgttatcgtacgagaggagcatataccaatcccttttgccagaccacggtgaaaagatataaacactgtgggcgacactatacactgggccttatatgaaagagaccattggcataggactgaatgactactgcttcatgcaactgaccgcatatcacaataaattatgagctccagtactttatgagaaggaaactcggatattatccgaatgcattatgcctatcttaatatcaggccattgtacattgacttctaaaa

SEQ ID NO: 30777 - DNA, 2490 bp, Glycine max
  Clone ID: PAT_MRT3847_127798C.1
gaaagcgtccgtgtttccgcagtgttgagcgctcgcgactgttattgtggttgcagcaaatacttcaactcctggcattccctgaaacgatttgttcttagtcacttttttatggctgatggttatgtttttgactgtcatatacacctcaagcccctgtcatggccattctcttattcacaaattccctatcttttaccccttcttcagattcaagtcagtctcaaattcaacccataggacaaagagagctcacactcttccactcaccatcttatgcaagctgaaaaactaactagaaatgaaaaacaaaggtaagcgtgtggcacggaatattgggttatgagtggctttcgataaaccaatcacagaaaataatacgaataatgttgatggcaacaacgtatatgggtgctgatgcaatttggataggctttttcgctaggacattaagatgagaaagaagacaatgcttaatttctttaaactgctaaaggctattagggaaatcttatcgattgcttctttaatggctttaggcacatttattgatcaaggtgaagcccctgacttttatttccagaaataccctgaagatcatcccgtgtttggattttttacttggagatgggttctcacccttggttttgatcacatgtttacatcccctatatttcttggagtgttggctctccttggtgcatccctcatggcctgcacttacacaactcaactccccctcatcaaggtttcaagaagatggtcatttttgcactctgctgaggccatacgtaagcaagaattttcagaatcattgccaagagcatcaatccaagatgttggtactatattgatgggagctggatacgagggtattcttgaaaggaccatctttatatgcttttcaaggacttgctggtcgtctggcccctgttggagtccatatagcattgctactgataatggctggaggaactcttagtgcttgtgggagcttcagaggttcagtcactgtgccccaggggctgaattttgttgtatatgatgttctggctccttctggctttctatcctctccaaccgatgcttttaatacagagattcatgtcaacaaattctacatggattattatgagagtggagaggtttcacagttccacactgatctttcccttcgtaacatggatgggaaagaagtaatgaggaagacaatcagtgtaaatgatcctttaagatacggtggtatcaccatatatcagacagattggagtatttccgctctgcaaattcttaaggataatgaaggaccttataacttagctatggcacctctacagataaatggagataagaaactttttggtacttttctaccggttggagatattaactctcctgacgttaagggaatatctatgcttgctcgtgatctgcagtcaattgtcctttatgacaaggaaggaaaatttgcaggagttagacggcctaattcaaagctcccaatcaatattgatggctcagaaattgtcattgttgatgcaataggaagtagtggcttggaattgaagactgatccaggtgtgccagttgtatatgctggatttggtgctctaatgatcactacttgcatcagctatttgtctcattcacagatatgggctttacaagatgggacaacagtcttcgttggagggaagactaacagggcaaagatggaatttccagaggagatgagccgcttacttgataaggtccctgaaatagttgaatcaaatctacctaagcatgctgatagcattagtggttagcttatggcttttgagaaatcaagataggtaaagaagacacttcaattggatgatagcaacttatatggattatgattcaatttggatacacttatccattagcacctatagaagagataaaaaaaaaattaaatgaatcaaacttctcaaataaattaaaatcaccttatgcatctcaaattctttggaagttttttcatttaacttttgcaaaagctgagatgtataacttggttttaacttaaaggataaatttgaatttttatctccttatttcttctttataagtgcttattgaaaagtttattcaacttatgtgataaagtactttggcatacaaatacaaattgaacttcatcattgaagtgtccagcagttgtcttgctggttgatcatcagggaatttacaaatgctcgaaggatgcctacaagaagtatatcaagaaaacttttgcagctcatattatttgacattatctagatacactgagttcaacatacatgtatatttcctgtatttttttagtaatggggccaaattaatcaaaactcgtatgccttgtgttattttggcccctcgtttaaataattggaaagtgtatcaggtcgaatatgaatttgatgcgtccataatgtacaggtttcaattgcaactgcattaagatgatccatttgcctttac

SEQ ID NO: 30778 - DNA, 471 bp, Glycine max
  Clone ID: PAT_MRT3847_127799C.1
gaaattgtcattgttgatgcaataggaagtagtggcttggacttgaaggtgccaccttaaacttaaacattctgcagttagttcttttatttatacagactgacccaggtgtgccagttgtatatgctggatttggtgctctaatgatcactacttgcatcagttatttgtctcattcacagatttgggctttacaagacggcacagcagtcttcattggagtgaagactaacagagcaaagatggaatttccagaggagatgaaccgtttacttgataaggtccctgaaatagttgagtcaagtctacctaagcaagctgatagcattagtggttagcttatgacttttgagaaatcaagatgggtaaagaagacacttcaattggatgatagcaacatatatggattatgattcaagttggatacacttatcaattagcacctattgaagagataaaaaaaaagaagtt

SEQ ID NO: 30779 - DNA, 411 bp, Glycine max
  Clone ID: PAT_MRT3847_12779C.1
ggaattcggcacgagggaaaggtcaactaacatcaaaccatagtttaagctcttacatggtgtaaatggaattctgaatatcaattgttagtgctcatgacataaatccaatgtggaataaagtattgaatatagatatttaaaatacatttttttatatataaactatataattaacagtattaagaatttatgcaaaatctctttgctcacactcaatccacctttctccatcccctcatcaggtcttaaggccttcatcggaactgaataaaaaggcttttttgctgtctttcaggaccatttttcaggtgctgggatgatttagagaatttgtcttttgttatgtttatgtgtgttgcaagttctgacacggattgaatttaagttcatcgagttctgattgctttc

SEQ ID NO: 30780 - DNA, 478 bp, Glycine max
  Clone ID: PAT_MRT3847_1277C.1
ggctcgagataaattttgcagattattttatcatggagatattacaaaagggtgagacagattctaatcgcattgaagcacaaatttactctttgaggtctgcaatagagagtgctgaaactaagcaccaggaagaacagatcgagtgttctgtgaagattaggaaagcctatgagttgattgaacagataaaatcagaatcaagcaagagggaatctcagctagaggctgaattaaaaagaaagaatgccgatattgaagagttgaaggctaacctaatggacaaggaaactgagttgcagtgcattgtggaggagaatgagaagttgaatttgaagcttgaaaaaaggatgtcatcacaaagagaacatgaacttcaaaaggagcttcgaaaactagatgattgcgtggctggattgaaggccgacctgatggaaaagaaaacaccgttgcaaagcatatttgaagagaatgaaat

SEQ ID NO: 30781 - DNA, 270 bp, Glycine max
  Clone ID: PAT_MRT3847_127800C.1
gaccacgcatccaccatacgatattctatgcatgccatataaccttatatcattattggatctcacaccatggtctaggtcacacactgacttaagcttatcatgtggcaatgctctatgaaggaaccccacatcacactactgtacacgattatacgaggaacctgcttacagcaataggccatttcgtgctctccttgacgatgatcttattaaaactacatccggtaaccgtctcttacttgaccttaatgcaactcaccatgaagc

SEQ ID NO: 30782 - DNA, 775 bp, Glycine max
  unsure (1)..(775): unsure at all n locations
  Clone ID: PAT_MRT3847_127801C.1
cttgcatgcactgcagggtttctcaggcatcttaatttggtgaaatgtcagaaatgaaactgatattaaagcagagaaaatatgtgtgggaaactgttgatngataatatataatagttctccttgtttatagtagtaaagaaatcacacacaatattacaagacacaagacacgaagaaagagagcaaacttggtacaaaagtacgctttgttatggggagaaatggggtatttatagaaatgaaacttcgaaagttgaaagggatttagatatatgccaagaaaagctcatttaattatgttgtttaaaatttaagaattctttcataaaactattgtttaagaataattaatgggaaaattggataatagtagtatttaaaatttagttaataagttggttttatttttataaaagaaatagttatattacttttattaaatgaaattatattccttttccgttttgccatttgaatgctatatatgcgagtaatttacttatattattttttattgataaatgttaataattaatttgttgtcagtgcaagtaaaaattttatgttagaagaaatcaaatcaatctattttgtaatttttacgcttagatagattatctattagtcttcaaccttattagttggtatcacttttagccaaatatcgaccattaacttaataaaaatagtatcttttatttcatcatttttttcttaacaaaaattatnntatgattttntaaaatatgttgtaaaaattatataactttgc

SEQ ID NO: 30783 - DNA, 602 bp, Glycine max
  Clone ID: PAT_MRT3847_127802C.1
caagcaacagatcaaactcctccatattccacgcccaaatcttttaaataaattttctccaaataccattcacacaacaacatcgatttgtaataccatgaagtttttttcagcaatagagtttctaagttcatttcttgtgctgatgttcttctaccctttttgccactcactcgacaacaccataaccataaaccaccccattagagacggcgacgttttggtctccaacggtttaggaaactttgcgctcggtttcttcagcccgcgaaactccacaaaccgttacgttgggatttggtacaacaaaatctcggaacaaacggttgtgtgggttgccaacagagacactcctcttaacgacacttccggtgttctcaaaataagcaacaacggaaaccttgtactccacgacaacagcacccgaagcctcaacccggtttggtcctccaacgtttgcattgaatccacaaataacatttcagccaagcttttggatacaggaaacctagttttgatccaaaccaacaacaacaacattctatggcagagttttgattatcctgggaacactatgcttccgttcatgaaactcgggttga

SEQ ID NO: 30784 - DNA, 290 bp, Glycine max
  Clone ID: PAT_MRT3847_127803C.1
ggttagtccagatggtacgcaattttccattacatggcctgatcggagaatacgtgcgttccggttcagttcaggttaactaaggcgaggttatgatgaatccctggaggctgctcatgatctgcaaagaagtgatgcttcattataccggttggaatccattgaatgtggttgaagaatggctgtcgagaaagaaattgagacgactgaaagtgctcttcttacaaatgcagtttttgactaaagttccgatgttcttatatatgcaaccttgcttgggattaaaattg

SEQ ID NO: 30785 - DNA, 341 bp, Glycine max
  Clone ID: PAT_MRT3847_127804C.1
tgtttgaagccaccgtgcccaggaccaccgaaaacagccctgtaaacaaaaaccagtcccaaaaaaaatatctgttgctttaacttgacagttaaaaccttagacctaatgtataaactccatgccggcctgtgacaatggaaggcccattggaacaaaactaacaatctttttactaacgcccatgcacttctgctctaacaataggaatgagtacccattatccatagaatagcttccacatacccttatatactgatgttatggaagcttggctctccaactgtactgctttcggtccgactccagggtatttaaaacggagcatcttgtaccatgac

SEQ ID NO: 30786 - DNA, 1642 bp, Glycine max
  Clone ID: PAT_MRT3847_127805C.1
tgtgaatagaatacgtgattctattcaattcatcatacattaaaatatcatcgttatcatatcattccagcgtcactctgattgagagtgaagaaggtgggagatggagaagccacaaaacggagaagaaaaggaagaaaccacggcctctttctgcggttacgattctcttcaccgtcttctcaaggataatcttaacccccatcacttccaggaagtcagccgtttgcttactgggcttaattgtggaaaagcacttgaagcagtttctctcccagaatctgcaacttccctctctgcggaacatggttttgacatccaggccttttccttttgtgctgacaaggaactattaagagaacctcggatagtgagagttggtttgattcagaactctattgtccttccaaccactgctcattttgcggaccaaaagaaggctatctttgagaaactaaagccaataattgaagctgctggttcttctggagtcaacgtattatgcttgcaagaagcatggatgatgccatttgccttctgcacaagagagaagagatggtgtgaatttgctgaacctgttgatggggaatcaacaaaatttttgcaaagctttgcactgaaatataacatggtgattgtaagtccaattcttgaaagggatattaaccatggagaggttatatggaacactgccgttgtaattggaaatcatggcaatataattgggaaacacaggaagaaccatataccaagagttggagacttcaatgagagcacatattatatggaaggaaacaccggccaccctgtatttgaaacagcatttggaaaaattgccattaatatatgttatggtaggcaccatcctttaaattggttagcctttggcttgaatggtgcagagattgttttcaacccttctgccactgttggtgaactaagtgaaccaatgtggccaatagaggcacgtaatgctgcaatagctaatagttactttgttgcttcaatcaaccgtgttggaactgagacattccccaatcaatttacttctggcgatggaaagccggcacatgcagatttcgggcacttctatggatccagttatgtttcagcacctgatgcatcgtgcacgccatctctatcccgcaatagggacggcttgttagtaacagacatggatcttaacctgtgcaggcaggtgaaagacaagtggggtttcagaatgacttcacggtacgagttatatgccgacacactcgcccgctatgtgaaaccagactttgagccacaagtcaccagtgaccccttgttgcataggaagtccttgtgaactatgctctcaagtgttggtgttaatatgtgttcattgcttgtggttcagattctggtctgtcgtgggatggccagtggaaacaaccttaaataaagttctttcatgttgagtacatgttcatgtattaaattctgttgtcaatggttcaccgtcatggttggttgatttggtcccattttacatgggagaaataattatttttgttttcaaaggctgtttaagaaaactgtaaaagtattcttttaaagaatgcagttaaaattacactgtgattctatcttataaattaaactcttttattttttttat

SEQ ID NO: 30787 - DNA, 706 bp, Glycine max
  Clone ID: PAT_MRT3847_127806C.1
aacatagcatacttgtaaaaactaaattcagtaattttttacactagtacataaataaagataaaaataatttaacatggcctcgaattgcgaattatttaggcaaagtcattctcctcagcaaaaagttatttccatccaaatttctgacaccgtgtattataacaagaagtcaacaataataataatgttgaataaaaagacatacgcttgccagaaatgcctatgggttttgcatggcagagttgagatcagtttccaatgggataagatacccttccaatgtcacttctaacaacttgtctgttttgactgtacctgcacacaaactttccatcctctcgcaatccattactgtgaattcctccaaggacgggaaacttaaactccctttgtagaagcttctcagctttcctaattctttaagtttcaaacaattgagctgctcaaatattatctcatcctcatgtgattcatccccttcctcagacactatctcttcaattgaattgcagcatcttatcttcattgttttaagctgagtcaaacttatggctgttgaggatgtgaacaaatatagcatgttcttgcaactatctacttcgaaatatgtcaaattggagaaagacacactgcatggtaccaaatttattgaactaaaacagatgaatacttccaagaattctctgaaccattggaagccagc

SEQ ID NO: 30788 - DNA, 309 bp, Glycine max
  Clone ID: PAT_MRT3847_127807C.1
cccgggtggacccaccccagcgcgccgcgacaacacactaacaccaccacgggatgaagctgtacgagacaacaagacccgtaaaactcacaatctacctgcatacttttgtttcttattcttgaaatggctctccaggctgattctcttggtcctgcttctttctcggttcttaaagagggaaagagcggagagactctcaaggactccaccttgttcgggctttcattctcacaacctatcaaagctaacttcacctcttctgcattcaagtgcaagaggtaatccaaacaaatgctctggactgtg

SEQ ID NO: 30789 - DNA, 217 bp, Glycine max
  Clone ID: PAT_MRT3847_127808C.1
cattgggttgttttttttaaaaaaaaaaaaaaaccccgccagggtttctagctccaggaaggcgaatacagacactgcgtgtggcaatttggggggggagtaattctaggtgttgcggggccgtattgaaaattcacggagaaaacacgggaatttgtgttgaacgaaaggagcatcttggtgcccactaaaagagcttttacaaaaggcatttaaa

SEQ ID NO: 30790 - DNA, 378 bp, Glycine max
  Clone ID: PAT_MRT3847_127809C.1
aaaaaaaaaggggaaatttggacatttagtatgaggaaaaaaaggaccctttttaaaaaagggaaaaaggggccaaactggggggggaaaaaatttaagggggggcacctttgaacatgggaccaaaaaggggtgaggttggggcccaaacttttttaggggccacaatggggggaatgtaaggttaaaaacccccaggggggaattgcaaattttgagaaaaacggccaaatttttaatttttccaaaccccctatggggggtgggggggaaaataagaaggttttttgttgacaattgggggtttccccccaaactcgaaaacccggggggggaaaaattcacaaaccggggggaaattagggggacccccaaaaa

SEQ ID NO: 30791 - DNA, 127 bp, Glycine max
  Clone ID: PAT_MRT3847_12780C.1
agagcgagccatagccagagggggaggcacggactgaaaagcccatgaagccaaccatggcacgacgggcgtgcttgatctccgccaattgaagggtgtctttcttctctcgctccgagctcctgcc

SEQ ID NO: 30792 - DNA, 2069 bp, Glycine max
  Clone ID: PAT_MRT3847_127810C.1
acgcagtccatcattggaatacatagaaaaagagaagagcttatggtggaaggttgaagaaagagatgagtggaactggaacattcttctacggttcggtaattcagccgttgattcgctaccactatctatcaccaccaatccctattcgtcccttatgctgcatatcccctctcatcacctccattcactccaacgacgccgtttctccgcaaaacggaacgcttcgcttccagacagagcatcagcagcacagcgaagaaccgcttcccgttccgtcactctctgccgctgaagaaaacaaagcaacaacgaagcttcgaaagaagaaagaagacgacgtcgtttccgataaccgcttcaagctccgcaacggaagagaggtttttgaagaaaaagcgtacctcgtaggcgttgagcgcaagaacgatgttcaggatttcggcatcgaagagtctctgagcgaattgtcgcagttagctgacactgctggattattggttgttggctctacttaccagaagcttacttctccaaatcctaggacgtacattggctctggcaaggtttctgaaattaagagtgcaattcatgcattgggcgttgaaactgttatctttgatgatgagctgtcagctgggcaattgcgcaacttggagaagatttttggtggagatgtgagagtttgtgatcgaactgctctcatccttgatatatttaatcaacgagcagcaacacatgaagcgtctttacaggtttcattagcacaaatggaataccaactacctcgtctaactaaaatgtggactcatcttgagcgtcaagcaggaggaaaggtgaagggaatgggtgaaaaacaaatagaagtggacaaacgtattctgcgcaaccaaattggtattcttaaaaaagagctagaatctgttaggaaacatcgaaagcagtaccgtaacaggcgtttctcagtacctgtggcagttgtatccttggtgggttacacaaatgctggtaagagtacacttttgaatcaactaacaggagcagatgttcttgccgaggataaattatttgcaactttagatcctactacgaggagggtacagatgaagaatggaaaggagtttctcctaacagacactgttggttttattcagaagttacctactacactagttgctgccttcagagctacactggaggagatatcggagtcatcgctcttggtgcatgtggttgatataagtcacccgctggctgagcaacagataaatgctgtggacaaagtcctgtcagaactagatgtatcgtcaattccaaaattgattgtctggaacaaggttgacaaagttagtgatccccagaaactcaggctagaagctgaaaaaagagatgatgttgtatgcatatctgctttaagtggtaatggcttgcaagaattttgtaatgcagttcaagacaagctaaaggactccatggtttgggtggaagctctggtcccatttgaaaatggggaccttctcagcaccatacaccaggttggaatggttgagaaaactgaatatacagagcaaggaacatatatcaaggcacatgtgcccctgcgttttgcaagaatgcttacacccatgaggcaactgtgcgtatcgcaaccttaactttctttaatatatctaattttgcagcataacatgtacatatgtatgtgtaattattgaaatcatgttcgacacgttgggatggcagtgcaaattggtttgtagctacagttagtagccatgcatatccaatccgatttcgatttggattctttcatgttattgataaacatgacagggttatggtgaaagagaaagataaatggatcttataagttattaccaatcacagtgaatcctggtttgataagaaatgaaggtactcctatctgtctttaacgtgatcataatcatatcatgttaccaacatgagggaattcaaatccatcttactctttgtttcaattttagatattatttaggatgaaatacatttttgtcctacaatttaacttttttattttttatttttgt

SEQ ID NO: 30793 - DNA, 285 bp, Glycine max
  Clone ID: PAT_MRT3847_127811C.1
ggttcagcgtcgcctgaatccgataccatttgtttgtggtgtttatcgaaactctcatcgggataagaattgcctaacttgggggagtatacctatcttacgtgactaatttaggttaaaatcttcgatagtatatgtgttcacatttattgcgcaacatttccttactcaagattgttttctaaggatgatatccatcaaaaagcaaaatctagatcctttattaaaaattgttttagaaggattcttttagcttgagtgatactaggttagatttttcaaatt

SEQ ID NO: 30794 - DNA, 480 bp, Glycine max
  Clone ID: PAT_MRT3847_127812C.1
ggggggggttttttttttttttttttttttttttttttttttttttttttttttttttttttttttttttttttttttttttagattaattccctttttacccccacaaaagcccgggcccggtcccccctgaaatcttaaagccttctttacggggggaggtctatcccctttcccctcctccctcccgggttggtccccgaccgcccctcccttgggccggaacccgcctggtgaaaaatttgggaggggattacccaacattcctattctttttcccttgtccccctaaaacccgccccccggatgcctttcccccttttaaaaccgggcggcccggttctccccacccctgtcccccccttttgtgcgccggccccccgaaaggcccttattctgggaaccccgggggcaacccctcccccccaagcatttttaatcccccggtgacccccggtctcccccccttttaacctcccg

SEQ ID NO: 30795 - DNA, 374 bp, Glycine max
  Clone ID: PAT_MRT3847_127813C.1
tcaactcaagacctgagttattaacggtgttacatatgtggctatacaaatgggatctgagagtggatcggcaaagattgggtttgatattgtcctttgcggacatcttaggaaacgtcttaaggcctgtattgaatcctgtggagagcaagaatggaacttaaatatgtaacttcataattccattgacgattgcttactagaaagcgtccttggagttatcgatgcccaaacacttgctgactcgctggctatctacctagaaaatattctacccagtgttgttggtagagcaaccattggatctatgatcatacttgctcgcacacttactttagcattaactctcttacattcacagttaggatttcctg

SEQ ID NO: 30796 - DNA, 252 bp, Glycine max
  Clone ID: PAT_MRT3847_127814C.1
aaataaaacggctgtgcgtgcggggtacaaatttaattaatacactaaccctaaccataagaacaattagctgaaaaaatttcaggatgcttggcaggtacatctatgaaaacgaaaaaatagtgacaatgttacatcaataacccaatcttctttgctttgtcaaaccaaccaacaactgacaaaaaattagttggttaagacaattccaggaatgacgatcttttataaaataaccatcatcaaaggata

SEQ ID NO: 30797 - DNA, 423 bp, Glycine max
  Clone ID: PAT_MRT3847_127815C.1
atccatggatgacaactggattggttttgtcttttgtgttacatttgagcggaacattattcgtcctgcggtttctagtagttctccacattgttcattttcttcgtcacatccgtttcgtctttcttttgaaagtgaatacacagaagaatactttgacatgccacttaatttggagttgaacaagatttatggatcaaaacatctttgggtcatttatatctctcgagaacactgccattttgtgaaaacaggggctcatatcacatttaaagcccactcaagtgttaagatcaatgcatggggcatgaagagtatattcaggcaagatatagatgaccttgaaaggatgcaacaaggagaatctcttccactccatcctaatgatgtagtacaccatgttgactttgatagtgtagaaaa

SEQ ID NO: 30798 - DNA, 226 bp, Glycine max
  Clone ID: PAT_MRT3847_127816C.1
atttatatagataatacatctgatactctgcatctgcacaataaagtattaaagaaaatagaattctagtcctgtatagaataccaaatttgtattaagaggcttgtttattactgatctaggattacactcgttgccttttccatggccaatcatagctgttgagtgattcatttgttctctttgagcacagggcattgtgttcatttaaaaccttttacagttt

SEQ ID NO: 30799 - DNA, 435 bp, Glycine max
  unsure (1)..(435): unsure at all n locations
  Clone ID: PAT_MRT3847_127817C.1
cactttttctttattaacgcnacaagccgcaccacagcaaagactatttaaaacaacaattcccgaaacaccccaaacatattattatatataaccacaaacaccttccagatgccaaattaagaatcaaacacaagaacagcccaggatacaactttgaatgccctactagtacctgaccaaacaaaacacatgaaccaattacaacacacacagtatccaccaccaaaatcaaaaccaatccactgccaacaattacaaacccaccaataccttaaaaaactcaaaaatgccaaccgcaaaaaatcatcccaatgggccaaacacaaatcctcaaagaacacacactcataaataacaaaacaggcgaaatttgattcctcccacttccacactagaacttattcaaaacccacacaacttcaccacaaatcc

SEQ ID NO: 30800 - DNA, 247 bp, Glycine max
  Clone ID: PAT_MRT3847_127818C.1
atagatcgcgagcgtacgcccttttgtagcatggcggacgtattgctttgtaatatttacttatgatatggtacaaggtcatgcttgtatgccaacacatattattgaagtgcgtagaaaccagcaaacaagtgggaaatcgagtttaagtggggaggggggaataatttttttggaagagtttatgaagaaaaaagattgataaatattaatgggggcattgtatttattatttgtaaaagaatgg

SEQ ID NO: 30801 - DNA, 309 bp, Glycine max
  Clone ID: PAT_MRT3847_127819C.1
gcaagacaaagcaacaagtgcttgaaataagacttgttaaagcaaactaagcaactatttattggtgacttcattatctttattttgactaactccagaagttttctatactatcgaagaaattaagcccctctgtatattttctaatcttaatcatcatttaaggttaaaacttacacacttttagaatgaaggcataaatgcttgattcctgataaacatttttaaagatataaccattatagttaaactaagggggagatttgggtcatatacataaagttctagatttcaagcctttttatattc

SEQ ID NO: 30802 - DNA, 581 bp, Glycine max
  Clone ID: PAT_MRT3847_12781C.1
gttgcatcataaggaagcagacattcttggatcatctagttatgatcagggctcaagctgggccatggaggtagggggtcatctgaaagttcattcaatattagtggagaatcttagcaagaatggacaaatgcttgttgagatgctatgtgaggagtgcagccattttcttgaaatagcagaagccataagaagtttgggccttaccattttaaagggtgcaacaaaagctcatggtgaaaagatgtggatatgctttgttgtcgagggtcaaaacaacagaaatgtacacagattggatatcctgtggccgcttgttcaaatactgcaatccaagagcaccgtgtattcacaattaacttgttggttcttggaaactatggccactcattggcaagtgtaactcattcttgatctttgaaatgatgctcacctttatagtgtgttaagacataggttgtggtcgtgtttgtgtgttttcttaaatgattgaaatgtgtgattgtcgttgtttatgtttgacactgaaaatagcacaatacgttgaacatatactagtgttactctcttcacatcccagg

SEQ ID NO: 30803 - DNA, 246 bp, Glycine max
  Clone ID: PAT_MRT3847_127820C.1
gtttaattcattttactttcttaatttcttctccaacaagtatttactgagaacccagtaagagacaacagacaaggcgggaagctaagcataaaaaaacgagcactgtttagcacaacctgcttgcgatacaaactaagccaaaaatttctccttccagagagtgaaaagttcaaattcaaattcaaaatggtagaattgattgaaatgcaattcgattatccagaatgaaagaaagacttggtg

SEQ ID NO: 30804 - DNA, 401 bp, Glycine max
  Clone ID: PAT_MRT3847_127821C.1
aggatttgggtaggttgtctcttgtgaactgtaaaactttctgagtaactgattattaccctcaatatgagccccatgctattgtactagggaggatttaaattcaccaatttttttagggttgaatagaggacggcttggggaatggattgcgcacaatccattatgatttttatgagccctgggagcaatgaatgaacttccccaaatcgcccctgctgagctataaggacaggttgatatccgataagccatcgacagtatccgttgaagaaaatgaatttgattattgctccaatggattggctctcttcttgtgacgggatttgctattagggccagcacacctgttggctttacacgcaccattgcggattttattcaattgagccccactgaac

SEQ ID NO: 30805 - DNA, 650 bp, Glycine max
  Clone ID: PAT_MRT3847_127822C.1
aagattttaggcttatagtgaagttttgatatggcccttgagatacctgtgtggttgtttctttgatcaatcgcaaccatgaaaagggatttcacattcaactctggattggattttaagctttagaaaataatggaaacttggccctattggtgccttcgtttttgtatccttgaacatgggaaagctacacattggtgctgactgtatcagaagaaggagttccatcttcagggcttgtgctttgtctttggatataatattgtattttggcgttagagtgtgactttacttttccatttgaaaacaaaagagaagtttcatcttgggagataatataatacttgtcttgaacggccttacctgcaaggagatagatagttggcttctgtgtcatgagaaatatatgtatgtgcatgcgtatatgtgtgtgttgaatctctaatcctatgtttggattgacaggaagagagaaatcggtgtgaaagaagattttgtagtttagaaaattttctcttgcgtggctgaaaagaagatacagacaaaatagggaagagaactctagaaatacataatctaaatattggcttcatttcaaattttcaaaatttccttgcatgctcattttcttgatcatcattttgcacttc

SEQ ID NO: 30806 - DNA, 353 bp, Glycine max
  Clone ID: PAT_MRT3847_127823C.1
gggaaatactacttatatatcataagagaaaatgggagactaggctattcaacatatatataaaacaagtacagaagatacaagacaaaatttttggaatattatagtctatagattctaaaacttggtagatcttctaattttgatagacattaatttctagttgcttgagatctaaatttctgaataaaggcctctatcctcctattaagatcctcatttgacatcatagaaaactcattttcttcttcaacaacatttgcttataccttcttagtctctgacctttgcaccttgttcaccctctgctcactcaccacatgcttggctctattgggtctatcaaatttact

SEQ ID NO: 30807 - DNA, 182 bp, Glycine max
  Clone ID: PAT_MRT3847_127824C.1
gttgatgcattgtcaacagtcattgagatagttgtaaccaaagagcatacctaagcaggccatagaaagctggcactttttctagggaagcactgcctctaataagcccctcactttttcatttttatccaaacatgaccagagactacagcagctccattcttaaaaagcccttttttttt

SEQ ID NO: 30808 - DNA, 340 bp, Glycine max
  Clone ID: PAT_MRT3847_127825C.1
aaaaaacagcaacaaataattcaccctttaatttcaagttcaagaccaagatcattctttgggaacccttttcccttttttgattcttgctgttagggggggcatggacatagcttcttaaaggcttcaattgaaaattgaagcgggttgcaagagtaaaatttgcccaagatagacctacttcccgtttgaaccaaatgacaaaaaaaaatgtaaaataaataaacctgggagtaaaagaaactttccccataaaagggggggggcttttaaatctaaaaatttcatttttatttaagggggtggggaaagggccttgaattttgaaatcccaaagcaa

SEQ ID NO: 30809 - DNA, 172 bp, Glycine max
  Clone ID: PAT_MRT3847_127826C.1
cgaccacgcgttctccactctttattcttattgttgtacacatagagagaacatacaattaagggcaacccagtgatttccgcaagccccccaaagaacctcaaggctcacttcaccgctccgtctacctttcgtacacgtactgattagcgcacctctctccacccatctt

SEQ ID NO: 30810 - DNA, 462 bp, Glycine max
  Clone ID: PAT_MRT3847_127827C.1
cgactccacgctttcggagatttgcggatagatattgacgctccatcaagaaaggtctttttagggattccatgctcaagacgcgtgccactggtggcgccatacatgcttggagaaggaagagcccgcatgatcttgcccgtcatgcattttacaccaatttatcaagcaacatgaccctcaggaggattcgcgttagaggtggcaactggtaaattgcatggcactgaagctggatacctgtcattacatatgttccattgaaacagttacccgaataactcggaacctagatgttcgcttcaacgcctcttacaacgaccttgcgctaactcaaaccctgcgcaagagtgcttttgcccaggttgatgctgctcctttcaggcagtggttccttcctcactatggtgcgcaaattggtgcataaaataaagtggcagccccgaaggattctactgagga

SEQ ID NO: 30811 - DNA, 233 bp, Glycine max
  Clone ID: PAT_MRT3847_127828C.1
acgcaaaccccgaccaacctctctccccgaccttctcgtgctgatacagctgacagctggacgggctctgcaaaagttagctgcatgagctggcttgggaaactccgcttattctccaaatccaatccctttcactaaattacttcttggttaatttttaccccacatgttgcaccccaaccgtgctttggcctccaacccctgctattgatccacgctaaaaccaatatcaa

SEQ ID NO: 30812 - DNA, 514 bp, Glycine max
  Clone ID: PAT_MRT3847_127829C.1
cttctgtgaagggtttgagtgatagaataccttttgggacccgaaagatgatgaattatgcctaagcagggtgaagctagaggaaactctggtggagtcctgcagcgatactgacgtgtaaatcattcatatgacttgggtataagggcgaaaaagtaatcgaaccatttagtaattggttccctcctttgtttcccttaggatagttggagcttgctgacgagttctatcaggtaaagccaatgattagaggcattgggagcgtaatgccctcgacctattctcaaattttaaataggtaggacggcgtgtttgctctagtgagccgcgccacggaatcatgaactccaagtgggccatttttggtaaacagaactactaatgcaggacaaactggaagttgggttacggtgtccaactgtgtgctaacctagaccccacaaaggatgttggtcgattaagacaacaggaagatacacctctaaagacaaaacttgttaaaattacacattgt

SEQ ID NO: 30813 - DNA, 2749 bp, Glycine max
  Clone ID: PAT_MRT3847_12782C.1
ggctcgaaaaaggtatttcatctctgcttcaatcttcactaagtgggaagttgctgaggtcccacttggtgtcgatcagctgggctctctaaataaagcgattgaagatttggagttggtaactcatatcagaaatctttttttgtctactcaaaattactcaatcctacgtcctagtcaaatacagggtagtttgaagagctcatctgagctggatacattgaaggaaaattgttcttcagatattatgcgtacttgcttttacgatacacagaattctatgaaaagtgaaacagcggatgttttaatgccccctcaatgttccgcgactgcgttgaactatacaccactaaatgctcttgcaagaatgtctgattttgtgatacgaagagaaagtcctgaaatgtagaagcatgaattcttgatttttctagatatgagcaggactatgatgaatgtgtactgtcagtacgtctgcgagaagacgacagaaggggggacaaagtatgaaggaggaagtagtggctgcaaagatatgagattggaatcagaaaaaaatgtctcatcatttttaaatgattttgttacagataatgctggcttcaatgatgtaatatgtccatcagaaaaagtcagagttgattctgcatgctttccttcagtttttcttgatacagttgtttgtgaaagtgataaattgcattatgcagatattaaccaaaaaggggcagtgaattttgcccaaccttcagaagcaaactcccagcaacatattgaaaagtcaaagtttcatactgagccttttttcaaggatatctcagactttcaaactgaaccttgttataaggatgcctcacagatgttgaattttcctgctggctgtgagctacatgaagcacttggaccagctttttcgaaagtgggtaaatgttttgattggccaacacaggttaatcaagaaatgaaacctgttgaaatgtcagatgagattagcactagccaattgacttctgaatcttgtccagaacatcttttggaagcaatgctggtcaacattaaccatagtaataatgatgttaatagtgaattatcattttgtacatcaaagcaatctgcaatggcctctgcaaaaaatcatgaagcttctattcacaatgtgcatactattaattcagaaggctatttgatggatcagctctctcttgtcagagaggacaaacaccattctttgagttcatcatcagggatatgtggtgtgatgtcctcaaaaggtgtttcatctacatttcatagttcaaatagtggacagcttgaaaggtcgtctgaaccatccaagaacagcaaaaaaagggccaggccaggggaaagttgtaggcctcggccacgggatagacaactgatccaagatcgtatcaaggagttgagggagctggtgccaaatggagcaaagtgcagtattgattcactcctggagcgtgcaataaagcacttgctctttctccaaagcataactaaacatgctgacaagctaactgactttgctgatacaaagtcaaagttgcatcacaaggaagcagacattcttggatcctctagttatgatcagggctcaagctgggccatggaggtagggggtcatctgaaagttcattcaatattagtggagaatcttggtaagaatggacaaatgcttgttgaggtgcgcatgacttgaaagtgacattttgatttattctatattagtgattaattaaaaattataacacatgagaaaactcctgatgagaaatggagcttagtggcacttggttgaaggtctaagaaattgctattgttgtcgatacaatcggttattgagtttgtttctatactaactaattatgccttctggtgtagatgctctgtgaggaatgcagccattttcttgaaatagcagaagccataagaagtttgggccttaccattttaaagggtgcaacaaaagctcatggtgaaaagatatggatatgctttgtcgtcgagggtcaaaacaacaaaaatgtacacagattggatatcttgtggccgcttgttcaaatactgcaatccaagagcacggtgtattcacaataataacagtttggtttttggaaactatgtggccactcattggcaagtgtaactcattcttgatctttgaaatgaaatgaccaggaaatgtgtgtgttttaaatgattgaattgagtgattgtcattgttaactaattatgccttctggtgtagatgctctgtgaggaatgcagccattttcttgaaaaagcagaagccataagatcttgtggccgcttgttcaaatactgcaatccaaaagctcatggtgaaaagatatggatatgctttgtcgtcgagggtcaaaacaacaaaaatgtacacagattggatatcttgtggccgcttgttcaaatactgcaatccaagagcacggtgtattcacaataataacagtttggtttttggaaactatgtggccactcattggcaagtgtaactcattcttgatctttgaaatgaaatgatgtggttatgtgtgtgttttaaatgattgaaatgtgtgattgtcattgtttatgtttgacattgaaaatagcacaatacgttgaacatatattagtgtcacccttgccttccaaaaataaataaataatattagtgttactctttttaaaaaaaaaaaaaaaaaaaaaaaaaaaaaaaaacaaaaaaaaaaaa

SEQ ID NO: 30814 - DNA, 516 bp, Glycine max
  Clone ID: PAT_MRT3847_127830C.1
gtgaaataacttgccaggattatcaaactatgagtaaatgtttcccattaggggtataagggctcaaccaaatacaacaagttacctagttttgctccacacaaaagatgatgcactaatctcgtattattggctaccaacaacaatgccaggagcaataattcatgtcatgttaagttagataggaacgacacatcacaagggatagatgtactagcaacaaatcactcaatgaattgttccatttctaacttaactaacaaaaccgcgtaatgacaccatatcttgatagatttatagaccctctctattactcacaaagatcatacacacctgctgaactgcatcaaaacttctgaagccttgatcctcccactcggacgatcattctctaccctgtggcttctgatatctgctgatccaaaaccctacatagacccttccaacgttccaaaactagatctataaaatggcgaagacccttcttcattctcacccaactccttagcatcacca

SEQ ID NO: 30815 - DNA, 393 bp, Glycine max
  Clone ID: PAT_MRT3847_127831C.1
aagataaatgtttgttttgtatcctttcagctaaatatataggggggcaagaaacacacaaagattttgaaaagacggtacaacatttgggaactacaccgttcacgcaacctgttttaatgaaaggaatatctgtcatgaaaaattttaatgaaaagaaaatgatcaggtgatgtgggggttcacggaaatcccatcacccacggggaggtggcccatgtggatccttgatttttgagccagatacttgttgagctccattacatggtcccgaagtaggcttaatgtaatcccataatggtgcatcggagcgtgcagccacatattcagcccatggggtgatattcgatccgaatagtcctcctatcttcacaagctttagaacccttttgt

SEQ ID NO: 30816 - DNA, 1810 bp, Glycine max
  Clone ID: PAT_MRT3847_127832C.1
ggctaaaagcctgacactggacctgtctgttgggccattggtttgtatgtttgacagggttttcagttttggaggagtaggagggtgcttgtggcttcacagcatatgccctgtccaatccaagatgttattctgatattttctttcattggtaaaattgctgcaatatattttgtggcatgcttttcagccatgcccgcctggagacgagggacagcggcccgtgcatctgctgaagacaagggacaacgcgaccagccccgaagaggcgccgcttcgggcagaagaacaaaaggcagcaagcggtagggggagaggtgcaacaagggcatgagcaagcaaggcaaggagtgctgaaccaggaccacagcaggcatagactgcaggggcaccgccccagcaggaagctcgcgccgttgcacggcccccgcaggaagagagaggccgcaccaggttgaagcagattcctgctgccatttcacccccacaagtttatagtgctgttccacccccacagcagttgttgactggagttcagagttctggaattgacctagaggcaggtgccagcctaattgagtttcaagtgtcactattaaacccattgacacctaaaatatccagttgtgtgcttggagttttttgttcttattttacatcaatgctgcattcggtattgggtctcaaaccctattatcaggaaaatttgagctgcagatttacatttatctttacattatctattgggagcttgacaatatattcctatgcacatatcttaatgtattatctatccgtttactccatctggctagctttttttactttcctggtttttattatcatgtatgtaacagtatagtagatcattctagaatgatacactacgaacaagtcactgcccgtttatccccttgtttgttttacctcgttttttgtattcgtttttctcgtttgtagttcagttttaatttgaccttgtagtttgaaatgcagagactgcaacctctaaaacctaatgaacaatctgacggtctggttgtgaggaatatattaacaatgcctgcccctaagaagttggttccgccatcatccaatggaatgccacctcctctactgagaaccatgcccccaccacctccgcctaaattttctgatccatttgaagttaaagtacacaccaagaacaagactttgcttaagacaaaatctgatgcagttcctgatacattggtcaacctaatggaatatggagaggaggatgatgatgatatagacgattctagtgaggaatcacttcctcatgacacccgagcaactggggttcaaaagcctttctgggctttatgagctacaaagtgcatattggacgtagatatgtaaatatttattttttgggttggaactagttcttgctggttacatactcttcttccccggggtggaatgggaagcccttagcatgatttttggagtgaaatagttggtttagtagcattttaaaggttgtaattgctcattctcatatgcttcgcgagagtagatttgtatgttgtaattttttgtccctatttgagtaagcatgtacaccggtagtctcttttcagtggtttagtaggccgctaaagtaacgatgctgtgataagggacagttttttccttcttccccccatttttatagtcagaaccctgttaattgttcatcctgggcccctggctgagtgaaactaagcttccatgttagattgaacaagcaattgcaaagcttgtattattattattattattattattattttttatttgggtt

SEQ ID NO: 30817 - DNA, 400 bp, Glycine max
  Clone ID: PAT_MRT3847_127833C.1
gcggctcgagaagaaaagaaaatcctcattttactgtgcagccaaacactctctctctggggctctaaaattctaaggttgcagagaaaatctgaatcatgtcatagcaagcgtctggccacaatcaacaaccgtgttacatcgattgagaccacctaactcacgctgttgtcatcaggcaagactgcatcgtttgggctcacagaaccatctgtccttagaacaaacccgaggagataactgccgtcatgaatgactataaagagcctgtatcactagctccaactgggatgcagctcgggggcacctaatatatgggcccccatgggggaccccgggctaggattcaacggaagaaaggcactggcggggcaactgggatgaatacccgtgctgacta

SEQ ID NO: 30818 - DNA, 251 bp, Glycine max
  Clone ID: PAT_MRT3847_127834C.1
ctcaaatataatatacctattacagataacacctgttttatatacaactctttgcaacgacatatgcttcttgtcataacctaagtatggtgcacttatctacatatcaactccctccaagcaactacaattaccatactctcttgctctctcaacaaagccagcctcattcattcaattctgcactctactattctcttctggaactacatcttgatccattatacatcttttgatcataacaatggctc

SEQ ID NO: 30819 - DNA, 439 bp, Glycine max
  Clone ID: PAT_MRT3847_127835C.1
gttcttttgcgcccacgcgtccgcccacgcgtacgaccatctcgtggggccacgcgtccgcccacgcgttcgcggacgcgtggggaaattttgataaaccgcgatcacaggttgccgcaccttaaaaccggaaacaaaagcaatcgttacttgatttcaagaatcttgcaatttcttgctacttgttggtgtgcgatttcttaagggaaagaaaatcactctctgtgctggccacagacttcgcgaatcactgtgttttacactcttagttgatgtggtgaacactctcctatttgatataggacttcgcgtcagatttaaactatgtgtgaaaatttcaaaatctctgcttgatttcaagattaagctggtgaaaggttggattagtgctgccactttgctatgtggtataggactttgtgggtagacgtttctattt

SEQ ID NO: 30820 - DNA, 440 bp, Glycine max
  Clone ID: PAT_MRT3847_127836C.1
cttttgtgtttttttttttttttaaaataacacacgctgccacttccttacgacggttaaaagagggggggaaattttcaaattggcatagccttctccacaagaggggcctgcctcatttcctttattgaattagccctccgttccagccatggaaaacacatgggccacattctgcggatgattccgcgtttttagaagatctggcagcatcccgggggacagaaaaagctggcgtaagagttttaccatcaatttcaaaatcttgagagattcccatgacagtattataaactgttcactgtttgggatccgtcctttggaaactctaatgccctgaagtttggtttgcccactcagaactccccatttcataacctttattaggaccccatccctctcttgggaagatcatttcccaccattgtgggtttgatttt

SEQ ID NO: 30821 - DNA, 286 bp, Glycine max
  Clone ID: PAT_MRT3847_127837C.1
ggggacttaattctattcgtgtctttatatttttgaaaatagaaaccatagttattttttgcttaccataacttacacacactaatataccccatagggacgtaggaatacgataaagattgactaccatcaaaacatatttattccgcagccacaccaataggaagaccttttacgcgaaaaaatgcttactcagagatcactacggtgggacttcttactagtgaagtgccaacattccaaaccaacgataaagaaactatacccggattaatgtggccagcaa

SEQ ID NO: 30822 - DNA, 249 bp, Glycine max
  Clone ID: PAT_MRT3847_127838C.1
aaacttggtagcataagcaaaccacaacgagatttcagaaagagcgtgtgtagacgaccaacatgaacgacgatgacataacctctgcgaatcccaatcactctcttcccaaccaccctcttctcctctacctcgtgcggccagctctgcaggggcgtcgtcgccggcgcatccggggcacaccggtaacagggatgctcgccggcggcgcgacatattgaacgctgattcgcacgcggttctcgatcc

SEQ ID NO: 30823 - DNA, 345 bp, Glycine max
  unsure (1)..(345): unsure at all n locations
  Clone ID: PAT_MRT3847_127839C.1
gntcattaccaccannccccttgcccccattcaaacacctnnnnnccttaaataagaagaatatcatcaatccacacacagatgatcttatatatagctgaatttgcacataacacgaacatgacaggaggaagacgacaggacaaatcaataactctataataatccatggcatcataacatgaataatggcacaagagaacaagacaagaggcttgagctaacccatgaatggaaatgaatgacactgttcacataacaatcccaatgctggcttggcggcggcctcannaccgccccacagccttgccnnnccgaataccattgctcggaattgggcactca

SEQ ID NO: 30824 - DNA, 481 bp, Glycine max
  Clone ID: PAT_MRT3847_12783C.1
gaaaaattacaaaaattcgtgcgaaaagtaaaaagaagtttttgtgaatagcatatagcatggccattgttcagttcgcaagcctgttataaaagcccacgacccaagaacccacgaaactaaacgacaccgttttcctgccctaccctcaaaagcgcgggaagattttccgccattcttctactcaactccactgaactaactctttcttagatcccaaaaccccacactctctgcaattccctcactgaaacactcacaccatggacactgaaggcttatccgtaatctgcgccggcatcggaaccatcgaagtcgacgatgaaggcaacgtaatcggttacatcaaaggccaatactgtctcggtacgaatctctcgcacttccaattttccttttttttttttttgttttatccttccgaattcgatttgatgaaaaattcggattcctcattgctcatgttcatcaccgattacca

SEQ ID NO: 30825 - DNA, 201 bp, Glycine max
  unsure (1)..(201): unsure at all n locations
  Clone ID: PAT_MRT3847_127840C.1
nacggcngcgagaagacgacagaagggggangngagcangggaangnggnnagcgcacgggaacaaacaaggccaggcgcagcacaacacagcnncaagnncngccaaggcgggngcacagaagaacaccacacngcacaaaaccaacccccaagacaaacgacccgnnngnggganaaggcgcaacaaaagggacaaccc

SEQ ID NO: 30826 - DNA, 535 bp, Glycine max
  unsure (1)..(535): unsure at all n locations
  Clone ID: PAT_MRT3847_127841C.1
ggcacctgcaacatctggtgctgtgttaaatgggttgggatcttccttcttgagtggaggaaacatgagccaaacccttctggcctctgctattggaggccaagttggtgctgctgttactgttaatcccagaagactcattgtggtagctgctgctgcaccaaagaaatcatggctccctggtgttacaggtggtggcaattctcgtcacccaaaatggcttgatggatcgctaccangtgactatggatttgatccactacgccttgggaaggacccagcattactcacatggtacaaagaagctgagctcattcatggcaggtgcgcaatggctgcacatctaggaactcttgctgagcgggcattgagtcgagtgctatggcttgaggctagacctgacccaaatgcaggtgcctctttctcctttcggtctcttttgggaacccattcatcctcatggtgcgcgttgagaactccatacggacgattctctcaccctctctcgtcaacttgtgattggcgcctcccttgg

SEQ ID NO: 30827 - DNA, 181 bp, Glycine max
  Clone ID: PAT_MRT3847_127842C.1
tgttacctcacctcagctactcacacattcttcgccgactctctcaaaagctctaccatcacgccacaacctgcgccagtatgcgtgccacacgcaaccaagcaagcacaacacacttgaacctcataagtggagcagcatcctgccccaggatactcttcgaagcacctgtcgttataca

SEQ ID NO: 30828 - DNA, 1699 bp, Glycine max
  unsure (1)..(1699): unsure at all n locations
  Clone ID: PAT_MRT3847_127843C.1
ccacgcgtccgagagattatagaagatgctgaaaagcaggagtttagatggcacagtaacacacttcacacctctattagatgtatctcatcataaagaaaacacaagacagtaccgatggtggaacagcaaaatcctggatttggaggaggccaaacatcaattacttttttcactacctatgttccttacaaacttgttctattacttaatcgtgttggtttctgtaattttcgctggccaccttggtgatcttcagcttgctggtgctactcttgcaaactcttggttttctgtcactggtttggctgtcatggtaaattatattcagaatttctttaggaatgtagtgaaatgaattatcatgtatgataagcaatattgttgagttttataataagattggtgctagctactttaacaatgaaaagcaggagtttagatggcacagtaacacacttcacacctctattagatgtatctcatcataaagaaaacacaagacagtaccgatggtggaacagcaaaatcctggatttggaggaggccaaacatcaattactttttttcactacctatgttccttacaaacttgttctattacttaatcgtgttggtttctgtaattttcgctggccaccttggtgatcttcagcttgctggtgctactcttgcaaactcttggttttctgtcactggtttggctggcacgggaaattatattcagaatttctttaggaatgtagtgaaatgaattatcatgtatgataagcaatattgttgagttttataataaagattggtgctagctactttaacaatgatgcaatatgctaggaaaatttaacaccataacatttcctcaaaactagttgacttgaataaatgcaattaacaagattgagtattcttacaagatcaaacacgatcatcttctttcccttgtaataggttggttggagtggggcattggaaacactctgtggacaaggatttggagcagaagaataccaaatgttgggaatttatctacaagcctcttgcatcatctctcttatttgttccatcattatatcaattatttgggtctatacagagccaatcctggtagtgctacatcaatctcaagacattgcgagaacgacttccctctacaccaacgttcttatccctggcttatgtgcacttagcttcttgcaaaatatctcgaggtttcttccaacacaatctgttcgtaaagtcattggtggtcgttctcagctcttccacttctgggtcatattttcattgcataagccttgattttctgcacagatctgagttttataggtgctcctgtagcagtttctatttcattatggatatccataccattgttggtcatgtatatcatgtatgcagaaaggttcaggcagacttggacaggattttcatttgagtcattcaattacattttcacagacttgaaactagctttgctctcagcagcaatggtatggtatgtctctaaaaaccttacacttagctaaacccctttgatgattgaccttagaaagttaaatgaagagcagttttgtttgaaaatctgttttctgtttttcattctctccaataactacaaaattgcacattcttttcactttgtttattattttaatttttaatgattatacaggnnncangtantaaaaaaaggcag

SEQ ID NO: 30829 - DNA, 132 bp, Glycine max
  Clone ID: PAT_MRT3847_127844C.1
ctctcacagtctctaattcgaatgtgacatctctcatctactacaacattatacacattgtgccctcttcttacacccaccatgacccttacactaatcatactcattaccacctcatctatatctctctat

SEQ ID NO: 30830 - DNA, 506 bp, Glycine max
  Clone ID: PAT_MRT3847_127845C.1
ggctcgaggaattgttgaggatcttaaagatgatagtgaaccttataggcgtatggttatggagactattgagaaggtggttactaacctgggggcatctgatattgatgcacggctggaagagcttctgattgatggtattctttatgccttccaagagcagaccagtgacgatgctaatgtgatgcttaatgggtttggtgcagttgtaaactcacttgggcagagagtgaaaccatatcttcctcagatttgtggtactatcaagtggcgattgaacaacaagagtgcaaaggtgagacagcaagcggcagatctcatttcaaggattgctgttgtcatgaagcagtgccatgaggaacaattgatgggtcatcttggtgttgtcttatatgagtatttgggagaagagtatcctgaagtcttaggatcaattctgggagctctcaagtcaattgtcaatgttatcggtatgacaaagatgactccacctattaaggatttac

SEQ ID NO: 30831 - DNA, 526 bp, Glycine max
  unsure (1)..(526): unsure at all n locations
  Clone ID: PAT_MRT3847_127846C.1
cgtaagctaggaattcggctcgagcttcattcattccccttctcttatattcaaaatcacgttcacctttctcccttcactcatctcacaaaccatgagcacaatccaccaaacacacactcgtcgcgaaggtgaagacaaagagttcagtttctggggctcatcaaacatcataccttctgaaaatgattgtgatcaaccacaaggtaatgaatcaaggctcaaaaaggaagcatactttggagaaacacaccaaagaaaaagccttaaatatgagtattcacggttttgttcaacagtttcagacccttcaaggagcaaagctatttcagaaggacaaagggagcttatggagatgatgcaagacatgcctgagtctggttatgaactctctttccaagacatggtggttcatgagaagcaggtgctggaaccagagcaacaaccacaccaaaatgaaacttcactcgagaacactctcatgcaaagtagtagtggcaataaagctcaactcanaagggtaagc

SEQ ID NO: 30832 - DNA, 269 bp, Glycine max
  Clone ID: PAT_MRT3847_127847C.1
aggaagaaaagccatcaaagggacatttattcgatttctcactcttctatcatccgaaagggttctatacactttttcaagggtaaagaaacccccgctaaatatttttttatacatttttttataaacgaagaaacataaggtctaaaaaaatttaaaacagtgaagtggagactgcatccccctcctcttagaatataggaaactccccatgccgggctggaaaggggacagatgaaaaaaaaaaaatgaagaggggccctaacgaa

SEQ ID NO: 30833 - DNA, 553 bp, Glycine max
  Clone ID: PAT_MRT3847_127848C.1
aggagcagctgtcgatctatcgctaggaatgtgccagagtcctgtcacgcttcactgaggctggttgatttaaaccagagtaaaccgacaggtaggagtgatcggaacctgccgcgtgagcatcacgatagcattcggtttaacacggtaaacaataggtgtagcgatgcgcagcctttgctgaacattagtagtattccgtctatcaatggtcgtgagccgcgtaacattagctaaatgcatatgggtcttaatatgctacaacccggtaggcttaagctaagcataggttacaatgtgcttgcgctgcagccatattaagttcggctaggtagcagttagccacatagcgctctgtgtcggccgagcttatagtgtcccggattaacatattggctgtcgctacattaatacctaaggtgattctagtgctcgtagagatcctgtacgacatggtagtggtccaatctgtggcattcgcagttagcatgctcggagtagtcgcaccaacttatgccataattacagtaatatagctaatcatcatccaata

SEQ ID NO: 30834 - DNA, 786 bp, Glycine max
  Clone ID: PAT_MRT3847_127849C.1
tatgtttctttcgattgtagtcactttggaataacccatgactcatcatcattcgaggcctagtgctaccttatcagtcgcttttacaattaaatgacccatttttcgaagtacatttgacagcattacaattgtttttatgttatactagctactcaaacaattaattaggtacgcacaaattatacacaggctaaagcattttctcaaacaaaaacaaactgcattaaaataaatcctataaaattttcctagatatatgaagaatttcattttctcagagccattttctcatcacctggcaggcaattctccccatggttgctagttccttcaagccaatcctccagcttagcttgtttactagctttgaagtcatcaaaattttctgatagtgacaataacttatccccaatatcacttggttcaggtcgagattcaccttcaacctggcttgataccggcttgtcagcttgtgaagatgcagtactatttgcagatgcatctggcaatgacatgctatggtacatcagttgcttctcggtgttggaatttaccgatcccatagaatcaagttgtggccacttgttgagacttttagttttagtcttctgtttagaaaagctaaaaacacttgaaaaatagttacccctcatttcacttattccctcctgggaataaactgcagggttagctctgtctgtctgaaaatatgatgttgactgatggataagccttcttccttttggatgcttggctgtcatgattaccagtgatttttttatg

SEQ ID NO: 30835 - DNA, 271 bp, Glycine max
  Clone ID: PAT_MRT3847_12784C.1
cccccataaaaaacttatactatttggaggctgctgtatcggcaactgcaagcattaaccttttaggcttacggggaattatccaaaaaaaaaaaagggaaaacctggggttgggcggggagggaagggtatttttttatattttgacccgggggacctttcattactttgaaaatcccctttccatgcatctcggccttgggaggcaaactgcaggttccacaaaacatcctttttagaggggctttctgggggctttttagccggggac

SEQ ID NO: 30836 - DNA, 248 bp, Glycine max
  Clone ID: PAT_MRT3847_127850C.1
cttgcatggcgctgttgtttactgttgtctgtggctatggaggtggtggaggaagcgacggttgtggtggggtagaacatggtggaggtggatatggagaaggagctggaggaggagaaggtgctggtgctggatatgttgctgtggggggtggacacggtggcggaggaggaagctgtggtggcggcggttgctggttggtgctgatggtggtggatccggaagatgtgctgttttaggtattttat

SEQ ID NO: 30837 - DNA, 353 bp, Glycine max
  Clone ID: PAT_MRT3847_127851C.1
accacgcgttcgcccacacgtccatccactcgtacggatacataactcgaccttccatgatgaacgggctaacatgggcaatgcaccggtgctgcccgagactaccaagaatttcaacacgctgctgtatacatggcttcaagattatgtccttgtcgggaagaacactggacatacaagccgtttcagatgcaagctgaaagcaggctggctaccacacatgggaaagatcaattctcaaggatccacaagatccttacactcgatatgcaagcgcatacaaaacatcagctagcgagtaactggtcaggcccggatacaacattgccgggatcattggagaccgatggagc

SEQ ID NO: 30838 - DNA, 403 bp, Glycine max
  unsure (1)..(403): unsure at all n locations
  Clone ID: PAT_MRT3847_127852C.1
tcctgaccgagtngtcgaatcggctcgagnnttntnttccnnanctcatggnaggntntntccntggncgtcttnnttntnggnnnatnggatncnggtggcaancnttntagnngangatgcncnattacnatgcancnatntttntcnntgcantcnatcatcttttcggctcggcacattggttcatcnnaccgnacnngacataccgtaggactatantcnggcaantctaganctcgctctttntaggctatctcgcgcacaaccntggaaanttcacactattttcggnccacgagatgtaaaccgctttntaccaaacnctaatcgnttttcngtccncnatggtcaaatccacggtantnttngctatgggaacttagcnaagcttannccctan

SEQ ID NO: 30839 - DNA, 312 bp, Glycine max
  Clone ID: PAT_MRT3847_127853C.1
tttcttcttttttaataataattttacaatttactttaataaacatgatactagtgtatgggtgaagaagaatcatgggcgggcaaaaatttattcacagtcgaacagcatacaaagatatttactttggggtgcaaacacccaaaaacactgctgcctcttggaaaatttccaaataaaaaatgaaccacagactacgaatttgcacacacacgctttgttaaaattataacaacaataattgtatttgccaactccggacactaaaacatattattcaccaatcaaactgaagatagggcaacttcactc

SEQ ID NO: 30840 - DNA, 428 bp, Glycine max
  Clone ID: PAT_MRT3847_127854C.1
gggagtttgattttgatctgttctggtctgaattgggtggtctcaacgagacgattattggttgcaggagaggcatcttgtgtggcgggtacctttttctttaattggtggttgtaaagagcgaggtgtggggtgtttctgtgacacgaaggatgacacttgtcatttgtcaatgtttgcctttaactaacggtgaatttcagtgtgatggccccctttaacactctttttcttcaagcctccattctgccaaagctgatgcttgaactgaactcgtttctaatttaccattcatattggacagacaaagctgattcacttaggagcctcgagagctatgtctacatcttctcgtgttcttcccactccattggaaaacaagtatatgaaacccccagattcttttcagctttcgccagtcagagatc

SEQ ID NO: 30841 - DNA, 150 bp, Glycine max
  Clone ID: PAT_MRT3847_127855C.1
tcttccacacatccgctcactcattcgacattttctcacactccaatagtcacctactcgtcctacttcaaactaactgaggcctttccatccccattatatctcataacattatccaactctgattacaacctccaccacacacacctt

SEQ ID NO: 30842 - DNA, 2096 bp, Glycine max
  Clone ID: PAT_MRT3847_127856C.1
ggttcccctcatttctttaattactacttccccgttcgagttcacccactcacccaaacacgccactttccagttatcatcatcatgctttcgttttccactctcagaagatcctcacccttcctcgcccgacgcttctcaacccaacggtcccagatccgccacgcgtcaacctcctcctcctcctcctcctcactccacaacaccgcgaacccggttcgaacctggttcggtcgaaacgcactctcgaccgtcctcgccggcgcgagcgtatcagggcttcttctctacggctactcttcttcgcacaattccgagttcgactcgtctctgctgaagagctcaatttcttctctcgttgaccggtcaacgccgatttccgaggaccaagaacggcgtcgttcgttcctttcgaaaatttcgctccctgaatgttccggtgccttgctatttggagattcgttcaagagaaaggttttcttcaactatgagaagcgcatacggttgcgaagccctccggaaaaggtttttgagtactttgcatctgatcgtagttcagaaggagaagttttgatgaaaccagcagacctaatgcgagcagtggttcctgttttccctccttctgaatcccaccttgttagagatggatacttggaaggtgaaaggaggccgggccatttatgctgcccttcttcagaattttttatgctttttgatgtaaacaatgatgggctgatatcttttaaagagtatatcttttttgtaacactactcagcatcccagaatcaagcttttcagtgacatttaaaatgtttgatgtcaacaataatggggagataaataaggaagaattcaagaaagtgatggcattgatgcgatctcgtcatcgacagggtgttcaccacagggatggactgcgaactggcctaaaggcgagtgattctgtggaagatggagggctggtggaatacttttttgataaagatggaaatggatgcctccaacatgataaatttgtaaattttttgagaggcttgcatgatgagattctgaggctggagtttgctcattatgactaccaatcttgccaaaccatatcagccaaggactttgcgctctccatggttgcttctgccgacatgagtcatctaggcaggttgcttgaaagggttgatggactgaatgatgatccacgccttaaggatgcacgaatcacatttgaggacttcaaaaactttgcagagctacggaaaaagttactgccattttcattggcccttttcagttttggagaagtaaatggcctgttgacaagagatgattttcagagagcagcatcacatgtatgtggcatatctctctcgaacattgtggttgaaattgttttccatttgtttgatgcaaatcgggatggaaacctaagttttgatgagtttgttagagtgctacacaagcgcgaaaaggatgttgcacagcccgtggagacaggaatacggggttggttgtcttgtggcgggaatcgtatgcataacccttcatcttcatggatgttttcctgatgcagaaaagttaatttcacaaacatttcaagaacagacataacaaaatggattggaacccttgatgggaagagaaaaacgaaagaaaaacaaaggaagagatgggtagtgatggttggtctgggactggagaagtttcccgtaaaatacatttgtgggtcaaacacaggtcttccttatatcacctccctttgcagtacccttaaagaaaagatgggcacataaataatctacttcgtaatagcttagaaatcaaacaagtatgtgtgtttgggaacccgtttgcatacttgcaatgcaaacggaaataccccctttcccatgcccaaaaatgagaagtaccaatcgccgacgtttgaggtttgccaactgcaaaccaaacacactcatatattgtaaagtcaatatgtacccctgaggtggtcacctgtttttccccctttgggcttttgattttgggttgaatggtgatacccaacacctggaactattttgccatgaatggtgatactatttatgaatgctttgcggttttt

SEQ ID NO: 30843 - DNA, 485 bp, Glycine max
  Clone ID: PAT_MRT3847_127857C.1
gttagctgtctatgatctagctatctctttatctctgtatctgctgaaaagttctgaagagtgatatattgactaatgtagctgctggccatgcatactgaagcgctgtaggaatcacaagttaaaaactaccagatgctggtgattagactctgcaatagatctggatactattattgcttacggggctgttgagataaatctgaactgtgacttacagcggttgttgactgtacacgaacgtgatctctggaacatgatgtgcctgtacaataaggccttttcagggctcacttccgacgctggtcaatacctcgatgaatctttgtcatcagatatggatgtgctctgattcatcagcgatgactgccaacattcgttgtaccaggcacatgccaagctcatgcattgactctacactgtcagactttaggcagatatatacttaggttgctctttattatgaccaacttgatttgacccta

SEQ ID NO: 30844 - DNA, 1040 bp, Glycine max
  Clone ID: PAT_MRT3847_127858C.1
ctaactaattaatattttactgtcttctatttttattttataacttttgccccttcaaaatatccaaattatatgcatatttttttctcgcttggccgaataatacgaactaatgcaaaacaacgtctaaacatggcgaatctttcactatttatccctctgcggcccccactttttcgggcggggggagcttgaaatctcaataacttctttgttctagtcttgtcttcatatggttgttgtgtcaccgaaaatggctaatgctacacctaatggttcggtgccacataaccatgtaggagcagtacttataacaattcccacaatcaaaattgatgggaagcaaaccctagccaccgaagatcacaccagcattgactatttacagagggcacagtggcttcgtgcagcgattttaggagccaatgatgggttggtttcggttgcatcgttgatgatgggtgtaggagctgttaaaagagatgcaaaagctatgctacttgctggttttgcagggttagttgctggggcttgtggcatggcaataggagagtttgttgctgtgtacactcagtatgaggtagaggtaggtcaaatgaagagagatatgaatatgagtgtgggaggggagagagacttggagatggagatggagagaagaacattgcctaatccattgcaagctactttggcatcagcactctgcttttctataggtgcattggtgcctctactttctgctgctttcattgaaaactacaggactaggattattgtggttgtggcaatgtcttgtttggctttggtggtgtttggatgggtgggcgctaagctgggaaaaactcccaagttaaaatcttgtgtaaggttccttcttggaggatgcatagccatgtccatcacttttggctcaactaaattacttggtgctagcgcattataataatgataagtaaggctgtgtatttattttacttatgagagtgattaattactactctagtgtcttttatgaataagattactttgtcaaaaaaaaa

SEQ ID NO: 30845 - DNA, 245 bp, Glycine max
  Clone ID: PAT_MRT3847_127859C.1
cccacgcgttcggaaaacggagacggcgtacaaagctccaacagctacatataccagtgctggcagaatctttgattctaagtcgactccgcaatacaccgattgtctcacacgtttagaagaatttaatcatgatcagaatgaatgtctacaacattctggtggttacaagatgtgcaagaaaatagagagggctgcactgttggaacgaaataaacaccgatccttattctagtgaaatctta

SEQ ID NO: 30846 - DNA, 384 bp, Glycine max
  Clone ID: PAT_MRT3847_12785C.1
tttttgttttgattatgatttgttatattttacagggtggtggtttatgttgtgggtttttttttacccccctaacactaaaaggggggattttaaatggcggaagaagttgacatactgaaattttaagaaaagattttgttttaaagaaactcaaaaaatccccgcaaaaaaaaaggggccacatttggggttttatcctttttggaccaaaggaaaaagcttggttacggggacatgtatgcttgctgaagacggtttgaaccggaataaaaaaaaaaaagggtaaaagaatgaggaccgctaatggaaccccatacccttttgagaatcccaagtatattagtttggggagacaattgggaactgtttggggtccacatg

SEQ ID NO: 30847 - DNA, 313 bp, Glycine max
  Clone ID: PAT_MRT3847_127860C.1
actctccatttttggaggcgaagccaccaccataccttgaaagaaaacgaaccgcaagaagcagacaaaaaaaaaacttggaactacagagaagcaaaaaccgggagcacaaaacaaactacaaaaacaacggcaacggcaactgcaaccaagaaaaaaacgaggttcccggcccaaaaacaaccaaaaaaaaaccccacttctaataaaaaaacgaaagcccacaaagtgaaagaaacaagaggagacccacgacaacacaccaatacaaaggccagaaaacatacaaggggaaggaccaccctcaggggaa

SEQ ID NO: 30848 - DNA, 330 bp, Glycine max
  Clone ID: PAT_MRT3847_127861C.1
cgtaagcttggaattcggctcgagctgttcttgccgcaggttttctaccatttcaccctaaccggggttcagatgggcatttatgtagatgaaaagacattgtttcaaaaaaaaggcgacggcaacatagaaggtcgtggtggcacctcgcactgtggatcatgatctcttttcggtcctaagtaccactatgactaggtcaaccatcacgcggtgctcgaaatgccctccatgaatcaggaaccttcttcttcctctatccaatttacagaccagaatcctaatattagaaaagtaaatacaagtgtgataggatgccttctgatgcta

SEQ ID NO: 30849 - DNA, 483 bp, Glycine max
  Clone ID: PAT_MRT3847_127862C.1
ttccaagaaggtttcccgtcatcactgtatgacgtcctccttctttgggggggggggggggggaaatgaaagagcaagagaggtaagccccataaaagaatgtttagccccacaatgaagttatgtgtttatcgtaattactagttcacgtgagaggtgcagccgtaaaaaagataaaataaatgtaatgggtttggcaagaagaattaggggatggtgtatcgcgagggacggggggttgtaaataagaattagggtatggtgtatcgcgaggggcggggggttgtaaataagaattagggtatggtggtacgcttcgagacggtgtaataccctgtgtagtataagagaagggtaaccgagatgtaagcagtgtaacgccgtaaattttgaacgtggtaaatgggaggggtggccgcatacggccagcggctttataagtgtaccctaggtagaagtaaccttactacttgtgagttgggg

SEQ ID NO: 30850 - DNA, 366 bp, Glycine max
  Clone ID: PAT_MRT3847_127863C.1
ctactcggccgcggccgcccttttttttttttttttgaatttaccatttggaactttaaaatggttctagggggatataatatacaaatacatgcaacgggattcctgcgagacagacacaaccaggaaacacagatattggaaaaaattggaaactaaaattaaactgcacaaaaacatgtccacacaatagccaaagaagatgcatcatgatctagcgccaaggcaaaaaccataaagccaacgtaacccaaagaccagagctaaatgccataccatgttgtacaaaccataaatgctacctgtactacttatacatactctcactatggggggcatgccagaactgttggtactctgacacaa

SEQ ID NO: 30851 - DNA, 495 bp, Glycine max
  unsure (1)..(495): unsure at all n locations
  Clone ID: PAT_MRT3847_127864C.1
gggggggggggggccngggacaacggaaaaacggggagggggagaccaaacaaacacacgaagnacaaanaaacacgggncncncnaancacaaaggagannaagnccatgggggggngccnncatgactgaattataccaaagtactacccttaagagagtcagaaaaagttttctttcatnaacccaacanagcaaancncccatcccacagnnccgcaccggaggacacgaacccgggggacngagacnccacgcngacaccnnggaagagnggaaccaaggaagcaagggnaaggaccacacnngnccccaagaaccacgggangccaccannnggaannngnncnaacacaccnngcccnnnggcnacnnccacggccanngcagccacaaacccaancanggccaaccnnccangganccncncaggngcnggcccacngaaggccaacacancagaaaacnaagggcncaccnnnggngaaggagcag

SEQ ID NO: 30852 - DNA, 1866 bp, Glycine max
  Clone ID: PAT_MRT3847_127865C.1
cccacgcgtccgggttggaaaaagcccacacatacccgctcattgccgaagatcattgttggcctcgcttctctctctctgcgatgcattcatttcttcgttcttctccaccatttaatacatattattatactacaaaaacataacctccagaacacatttatatattcccttgttgcatatatactttgttgttgttgttgttgttgttcttcttgtaaatggcgaatgcatctgggttcttcagcccttcggttccccacttcaaagtgagggttaagcctctcaccactgccattggattctccgccaaagtcgtttgcgttggaaacatcgaaggagctgaaaaacatgcttccaccgtttccccttcttcccaatctccaatacccaggcttgtcagcaaagggtgcaagttagttggatgtggctctgctgtgccagctcttcagatttctaatgacgatctttcgaaaatggttgatactaatgatgaatggatatctgttcgcaccgggattcgtagacggcgtgttctttcaggcaaagataacttgacaggtttagcagtagaggcagctaggaaagctcttgagatggcaaaggtagaccctgatgatcttgacctaatattgatgtgcacatctacgccagaggatctttttggtagtgctccacagattcaaaaacaacttggctgcaaagcaaatccattgtcttatgacattacagctgcatgtagtggatttgtgttgggtttaatatcagctgcttgtcacattaggggaggtggatttaataatgttctagttattggggcggatgctctctcacgatatgttgattggacagacagagggacctgtattctttttggggatgctgctggtgctgtactagtacaggcctgcaacagtgaagaagatggtttatttggttttgatttgcatagtgatggcagtggtcaaaggcacttgaatgcttccattaaagaaaatgagtcaaataatgcattggattcaaatggttctgtgtttggctttcctcccaagcagtcctcatattcatgcattcaaatgaacggcaaagaagtctttcgctttgctgtacgatgtgtaccacagtcaattgaatctgcccttgaaaaggctggtctccctgcatctagcattgattggctacttctccatcaggcaaaccagaggattattgacgcagttgccactcggttagaactcccctcagaacgtgtgatatcaaatttggctaattatggtaacacaagtgcagcttccattcccttggctttagatgaagcggttcgaagcggtaaggttaaggcaggccaaactattgcaacggctggcttcggtgctggtcttacttggggttcagcaattcttcgttggggctgaatgcttttctttcacggcagaattgcaaatagagaagaatcagttgcaagtgcagctgtccaaataccccacattcttacacaattgtagaaaatggggtttggggaatttgcaaaaggattgatatcattaacatccagcactccctaaacttgtccctttcttttgtcttaaatttattttgtcttcaatttacattttccttgggcttcctttctcaattaccaatttttctttttccgagtcatgtatttgtcattcagatttattttaaacgaggcttactatttatgtttgtcaatggtacttgtaattaaaaatgcagcatgccaagtgtttgcttgcttgtacttcaaaaaaacttgtcaacaccaagccaccccctttaatttagttatttgtttttggatctaaaaaattaaaatgggaagcaaaaaaaaaaaaaaaaaaa

SEQ ID NO: 30853 - DNA, 966 bp, Glycine max
  unsure (1)..(966): unsure at all n locations
  Clone ID: PAT_MRT3847_127866C.1
ccacgcgtccgagaaccttggattttccgtctaaaaagcgaaacaacattggagtttcctcaaatccaatccataatcgctcgctgccgaagatcattgttggctttgcttctctctctctgcgatgcattcatttctttgttcttctccaccatttaatacatatagttatactacaaaagcataacacatttatttatatatatataaatattcccttgttggtgttacatatacactttgttggtgttgttcttcttcttcttcaccttcttcttcttcctcttcttcttgtaaaatggcgaatgcatctgggttcttcaccccttcggttccccacttcaaagtgagggttaagcctctcaacactgccattggattctccgccaaagtggtttgctttggaaacatcgaaggagctgaaaaacatgcttccaccgtttccccttcttcccaatctccaatacccaggcttgtcagcaaagggtgcaagttagttggatgtggctctgctgtgccagctcttcagatttccaatgacgacctttcgaaaatggttgatactaatgatgaatggatatctgttcgcaccggaattcgtagacgacgagttctttcaggcaaagataacttgacaagtttagcagtagaggcagctaggaaagctcttgagatggcaaaggtagaccctgatgatcttgacctaatattgatgtgcacatctacgccagaggatctttttggtagtgctccacagattcaaaaacagcttggctgcaaaacaaatccattgtcttatgacattacagctgcatgtagtggatttgtgttgggtttaatatcagctgcttgccacattagggggaggtgggtttaataatgttctagntattggggcggatgctctttcacgatatgntgattggacagacagagggacctgtattctttttggggatgctgctg

SEQ ID NO: 30854 - DNA, 500 bp, Glycine max
  Clone ID: PAT_MRT3847_127867C.1
gaagatttctcattgaatattaattggtatagaagaatcataagattatgcgatgaaaatagccagacatttatcatgatgtatggtgttcaatccattgtagtttttacttttaaattaggaattgagaagacaattaagccataggtaagtctcaaacagtgagtgactgtgaaaactcccttttagtaaaaaagtgaaacagcaatggaatagtcaagtgaggttcaactagtagtattccttccttcatttgcttttcatctaacaatatttgacttcagtttcattgacgggaattggtgaaagaaaagtgaaaaacaattaattgttgaatcatgtgactcatattggtgatatggaatcatattttgtatggtatgatactatgattcaaagccatttgtgatttcttgtgatatgacgaataagttgctgcatcatattgaatcccattgaggattgtgtgattctaacagtaactgtgggaacctttgcat

SEQ ID NO: 30855 - DNA, 245 bp, Glycine max
  Clone ID: PAT_MRT3847_127868C.1
ccaatccgaggattctcaagagcaacaggaagtcaaagtatggagaggcactgtcgctgtacgatagcgacgaagacgatgaagaattggacgacgacgacaacgaggatgacgatgatgattggctttctgatgtgagctttgtgatttcactgtctgtggtcaaaagttgtctttaaattctaggatgaatatctaattcaattgataggtgaagatggttttttaattatgcatgtgaattg

SEQ ID NO: 30856 - DNA, 739 bp, Glycine max
  unsure (1)..(739): unsure at all n locations
  Clone ID: PAT_MRT3847_127869C.1
tcgagggtttattctgatgcacttgaaacactgtcacctacagagcctttgtctatgaactgtagtgtgagtgatgtgagtggcttagataatgtggttgcggatatgtgtggagcctcttctactgataaacaagctcatgatttcatgatgagcaggtttttaactgcagcaaaggctatgactatacagcctcctcaatatgcttcttctagaaagcaaactgttctgactgaacaacctagggaatttatcaaattggttcctgaacaaaagaagtcatttgttagtagacatatcactgacattgtaccatatactggtcaatgtcaagaagaggaagaagaagaggaggaaagtgacaatgaaactaatgattatgcaaataattcagctaaaggttgcggattatttccccgcttatgtgttagaaattcattgtgcttattaaatccagtgcctgggacgaaaatggggaatcagtttcccttgtattctgcctatgaggttggaaaacctgataaaagttctcatattcgctcgcatagaccagctccatctataaagaaggcttgngatgctattaataagagcaaatcaagctctagagctgcatcaccagacaagcaggatgtaagaaaaaaatggactagtgaatcaagcangtatacctactcangtgaattgaagagctaggtaggctctctccctttcgtcgttcaagagctgcttctgctgg

SEQ ID NO: 30857 - DNA, 1074 bp, Glycine max
  Clone ID: PAT_MRT3847_12786C.1
cggctgcgagaagacgacagaagaggattgttcaacacttaccttataacataattgggcaggcatcctccgcattgtgaagcaattagggtttcatcctccgcattgtgaagcaatcgagcgcaggcatcaattgggaaattagggtttcattttcttcttcttcgtttttcttattactcaagcaattcgttctctcgaacatggaaccggaagggcaaaagggtacggtgaacccgtcggcaatgttagcttctctgcttagtaggagagccaaacttcacgaagatcttcgcagcattgaaaagcaggtgtatgatatggagacaagttacttacaggatcctggacagtgtggtaatgtattaaaaggatttgaaggtttcctatcttcatcgaagaacactgcactcctgaagaggtctagaaagtttcaacctgaagataggctcttctcattatcttcagtgacctcgccagcggcagaagatcttgcagctggacgagatgatggtagaccagattatggtcctggtcgttcaaaaggtggaggaatttatgctaatggacagggtaaaccaaagaaaggtagaggtggggcaagagatgccaagagagcaagggcttcaagtgaacaagattttgattatgaagatgatcctgacctgaccttgtgattgaaaatgccgctccaaccttctgttgtattataaggcacggcacgggtgacctgttgtattattgcaaggcagtcaggagatacggtaaatgttactttgcggctcggcacgggtgttgtattaaacttgtttttaaggcacggcacgggtgttgtattaaacttgttttttctagcatgatttgatagtgtagtggcaatgctgtacagaacaagaaaataaattcaactaatttttgttcctatgcttatagattgatgtttccttctgtcttgagtttttggcgctctagtggctcagtagagcagcagtcatttgaacactgtagcattgctttttggtgttgcagctattgtagctgccatagtggtccctgcaataatatctatttgcc

SEQ ID NO: 30858 - DNA, 289 bp, Glycine max
  Clone ID: PAT_MRT3847_127870C.1
ggcgtttttttctttttcttttcatatctgtaaccttaagtagtttttatttttctagatacaaaagcaaagaagcaaagcatcttctcttctcgtacacatccacattgtcttgctttcccttgcaagtttcaaccttttccttgcttaagagtttagctctctccttttttccccctttataagtccattgatgcactattaaaactgtgggtgtatcttctttttgcataaaactcactttaagttttgtaatcgctactttatccaagcgattaatgtggtcaaa

SEQ ID NO: 30859 - DNA, 174 bp, Glycine max
  Clone ID: PAT_MRT3847_127871C.1
gacaaagacaaaggcggcagcgtttacaattacatgtgcaacacagagactgtcgaatggtggagagagcagagggttgcaactgcgtaagtgtaaccattatcctaattagctgaaaggtataggggggttatgaggttgttcaataatgacatagtgtgtgagagaatagaa

SEQ ID NO: 30860 - DNA, 578 bp, Glycine max
  Clone ID: PAT_MRT3847_127872C.1
aaattgtgagcacaccaaatcttgttcagtatagatactaacttatgtagtaggagtcttaaaatgtttcaaaacatatcttcttttttctgtagtatcttgacatagaaaattgcattaactattttaattgcatattttaattagattactgtgttttaggacatattcatgccatctttgtttattctttatctccagaaatctcagtctggctgtaattgcacctgcttgtttgctgtggcagaatgttttatataagagagggagacaatcataggattatgtaaagttctggaatggttaattgttgctttcttaccctcacagagtagagacttctgattcaacttgtaaaaacatggctctttttatgtgagaaaaggtaatagacaatttaaaatagaagtgccaaataaataatgattaggttatacatactccaaaatcttgaaattacctttctaaggccttttatgtaaaaattggctgaaatgttacaattgacatgatttttttcttattatagttggtttgatattcaagcacagttaaaattactatcttatacataaaaa

SEQ ID NO: 30861 - DNA, 239 bp, Glycine max
  Clone ID: PAT_MRT3847_127873C.1
agaggtatgagtttttgaaatggaattggatctagttccaacaaagatgcttgctctatttatggacagtgagccaccctactgttattttttttttttttaaggaaaatgtctggtgagcaccgattgacctatgatacatctaaggatatcgaagaaaaaaaagattctaaagaaatataactaatatcctttagaataatcaaaaagattattaaattcaaataaattttagatag

SEQ ID NO: 30862 - DNA, 863 bp, Glycine max
  Clone ID: PAT_MRT3847_127874C.1
gaccttcagcccagttactggttcaaatggttatgatccttggttacagaatgctttatttccacgattgtccggtggacttaaagctcaggagagtgctactcagaatgaaatgatacatgggagtcaaagtgcatctgctagcaatcatttgcttaagacttctccggctaacaattggtccaaaaatgaatggcctgtaaaaggtactgtggaaggcttagggaattcatctgttgccaggccccataatggcaatctacatccaacctcagatgtacagtcattttggtcatcatttgattagaaagaggatatgatagtaacagggtaacaacttgataaacaccattgttctcttgagacaaatagtctcatttggggaaatcgtttagaatactgaacccacccattgtatcttcctttcttcttcttttgtgaggaagattgatgtttacataacgccagcttcgataggaatacgcgttaatgcgtgcttctcttgaggcaggtaataagaggtgtcccccctttgaggtcaatttgtcctttggagaatgaaggttcacattcaccctgtgtcatgatcttcaaatatcttaatgaaaaataaaacttatactaacgtgatccgctgctaatgaaaaaatatagttgcgtttctgtttatctcattatttaagaatctagagcatcattctttgatcacgatatgcataaacttgggtgtgatctgacccaattttatcaaactccctagtagtggattcttttctcctcttttgctaattcctatgagttttagaatcctgtgttcgtcttcttaacaatgcgttaacgagtcaatgggaaaggagttttag

SEQ ID NO: 30863 - DNA, 484 bp, Glycine max
  Clone ID: PAT_MRT3847_127875C.1
ggctcgagttacaatgattatttcttttattctgcttgattttcattttaaatcaacctcttttaagtttataattgccatctctcaattgcaatctcaggcacactgatgcaaaatgactttctgatatttactgttatattaaagttagagccattctagtgcacaactttcttatgcattcttgaacagtatgttgaggcattagctgttaactaccaagggatatttgtgtcaggtagataacacaatgtcgctgaggcgtttcttaggctattctgatggtgaggtcatgaggtctgatgcaaaaccttgttccaggctaatgaggcacacagctgcaatctttagtgttggtggagcattaggattttgggtcctttgccgaatgcactatgggttgtgctacctttttccctcacttctttcttgttctatctgaactttgtgactgaattgctgacaacattgctttcctgtgcat

SEQ ID NO: 30864 - DNA, 498 bp, Glycine max
  Clone ID: PAT_MRT3847_127876C.1
acggctgcgagaagacgacagaagggacttaactgcttaagggttggagggataaggaggatgtaagctccaattactaacattttccaataaaaaaatccaagttaatttattggtcgttgaattattccaacagccaagatcatgtagcaaacgacagaactgctgcagagaatccaagctgagttttcgtgcttttagccatggaatagaatttgaaataggtgcacagtgacatatcaattagttagaacttagacgatcttttgaccacctacaacaacattgtgcagctatatagagtaggaagaatattcaaagtgggtcgtgtctgtgtcactgataaggaattactttgttattagaacagtcaacaagacgctgcaaattactgggtttctttatgcttttctttcatctggttgctaacttaaaatggattcccttccccaactttggagtaagaatatggaagaccaaagtacaaaacaaagacta

SEQ ID NO: 30865 - DNA, 205 bp, Glycine max
  Clone ID: PAT_MRT3847_127877C.1
aggcgtcagtagagcagagaaaggggaacaaatagaggtcgagacaaaagaatatctttcgctcgctgtttggaattgcctctttctttgagaaactcacaacatcatcgtttacctctctggtacaccaaaggctttaacacgtctaatatcggctgagctttatgtcaaatatgccaccatcattatcattacacgtgtaata

SEQ ID NO: 30866 - DNA, 557 bp, Glycine max
  Clone ID: PAT_MRT3847_127878C.1
ggggccctcctatatcctcagcaacacactcagaaaatgttgaacaaacagctagaatcttttgttccaaacaaaaacgtatgaattggtcggtttttctacggagtcgtcaccatgaatcatcttcagttaccaccaacaagctccacgcttgagtttcacgtttctccgaggttttattatcatccgtgtcgtgtctctgtctccgtctcttagtttcttcttcagatggcagaagttgaagacagagacaacaacactcgtcaccaccatcattacatttcttcaacaacaacaacacaatctccaatgaacaatttcccgcgagatctgttaagaaccttcatgggagtgaacaataataataataataataataatagtaataataataatcaccacaatttgcctatgccagtggtgaagttagaggaggagttagaactaagtctcgacctttcgatgaatggtcgatttggggatggaccccacggcgaagaagataaagagaacaacttcgataccggagtttgcaagcgaccaggagatgggatatg

SEQ ID NO: 30867 - DNA, 216 bp, Glycine max
  unsure (1)..(216): unsure at all n locations
  Clone ID: PAT_MRT3847_127879C.1
tgatgcaaacaagtaatagagtgtcacctttacattctgactggccaagggcaagggggcatcataaaaatataattgactagttcaaaactattgnctgaaaacatatttcatttattaaaacccgaaacgataaattccaaacaagtcacttgtttatgacaaacaaaacgaaagtgtgaacccacattgttccacccagaatttacttgatct

SEQ ID NO: 30868 - DNA, 349 bp, Glycine max
  Clone ID: PAT_MRT3847_12787C.1
cccgggtgggaccaaaactttttaaattcaccttttgaaacattttcccccaatttaaaccttttaacggtaacaacaaatttctttcaccattaaacttatttgggataaaacttaatttcctcacaccacaaataaaaaaaagccctcctcacgggaaatcctttcaaaccacccccccttattaaccccacccccctcttaaaattgtttaaaaaaactttatccctattgccccctgttgggaaacctttggagggaaaaaaccccccccctaaacatggttttaacagtattttttggctttcattttttaacaaaaaaacataacctttttggcgtttccctt

SEQ ID NO: 30869 - DNA, 2463 bp, Glycine max
  Clone ID: PAT_MRT3847_127880C.1
gtagtgaaaggcaccggattcccgggtcgacccacccgtccgcatcaacagccatgaaacatgaaatcaaccactcctttcactctgtaagcaactcctttacttctcttcctactcttctccctagtcgaaggacttcacaaccccaaatgtgacgcaacccatcaacaagaccatgatggctcaacccttcaagttttccatgtgttcagcccatgttccccatttaggccatcaaagccaatgtcatgggcagagagtgtcctaaagctgcaagccaaggaccaagccaggctgcagttccttgctagcttggtggctaggaggtcaattgtgcccattgcctcagggaggcaaattacacaaagcccaacttacattgtgagggccaaaattggtaccccacctcaaaccttgctcttggccatggacactagcaatgatgctgcctggatcccttgcactgcctgtgatggctgctcaacatccaccctttttgctcctgaaaagtccaccactttcaagaatgttagctgtggtgctcctcagtgcaaacaggtaccgaaccccacttgcggcgccagcgcgtgtgcattcaacttcacttatggcacttcctcagtagctgctaatctggtccaagacacagttactctagccactgaccctattcctgcctacacctttgggtgcattcaaaaggtcacagggagctcagtgccaccacaagggctattgggcctgggccgaggcccattatcactcttgtcccaaacctcaaaagctctaccaatctacattttccttattgcttgcccagcttcaaaacacttaacttcagtggatcactgaagacttgggcctgtggcccagcccataaggatcaagtttacccctcttctcaaaaatcctagaagatcatcactgtactatgtgaacttggtggctattagagttggccggagaattgtggatatcccaccggaggctctagcgttcaatgctaacaccggcgccggcaccgtttttgattcgggtacggtattcacccgactggttgaaccggcctacaacgccgtccgaaatgagttccggcgacgaattgccgttcacaagaaactcactgtgacaagcctaggagggtttgacacatgctacacagccccaatagttgcaccaacaataacattcatgttctccggcatgaatgtgacactcccaccggacaacatcctcatacacagcacggctggcagcgtcacgtgcttggccatggcaccggcgccagacaacgtgaactcggtgttgaacgtgatcgccaacatgcaacaacaaaaccaccgtgtgctcttcgacgtgcccaactcaaggcttggtgttgctcgtgagctttgcacttaatacataataataagtgattcttaggtcaagaattttcatgatttgtgggtacaataataatcgtgtcgaattggcattgcaagttactcctatttgggaattcgtatttgatctacatatcatatgggttggggttttggcattgctaagagtttatttgctgactatatagtagaagatagagctacatgtttaaggcattgcatgtaagtttccaagtttgaagttatatttgtagtagtatgaaaaagaagaagttatatttgtagctttgtaatggtatgtgtcacgggttcatatatcttagcaatcccttgtgtcgtttattgaagttgattgaattgataatgacttcacaccatggtacaagatcaaaaacaaaaaccagccccacgtgttcgacccctcaacgctttctcatcgctgatcaaacttcaaaccctagctaggatttcaaggtacacttaacgatggcttcaaaacgcattactaaggagttgaaggatctgcagcaggaccctcctgtttcctgcagtgctggccctgttggtgatgacatgtttcattggcaagctacaattatgggtccaactgacagtccttatgctggtggtgtattcctggtgaccattcacttcccaccagattatccatttaagccaccaaaggtttccttccgaaccaaggtatttcaccctaacataaacagcaatggaagtatctgtctggacattctgaaagagcagtggagtcctgcccttacagtttccaaggtgctactttcaatttgctccctgctgacagatcccaacccggatgatcctttggtgcctgatattgctcacatgtacaagactgacagagacaagtacgagagcactgcccgttcttggactcagaaatacgccatgagctagaagaaaatatctttattgttctggtgacagcttatgtgcgcaaaacaagttgtttggggatatgtcagtatataatatacatatacaagtagttctgctttgatactttataataattaaaaccctggattttttttttcgaaaa

SEQ ID NO: 30870 - DNA, 341 bp, Glycine max
  Clone ID: PAT_MRT3847_127881C.1
attatttgtcgcaccatgactaacacctcgtccctcacaatgcagctagcaatggcggacaacagtgcagtttcaccagcgccgctcctacctgagtcatttctacggacatacgtctccggcgtctgcaacaagctgactccccaatccattacgctttcacgccccaaggccctcagcgtcttcgccgacaccaagaatgcgcgtcgacgacctcaaggggacctgcgtcgacgaaagcgtatccacactcatacaagaagacgatggccctacgacagattatggtcggatctactgccttactccggggcttcatggttttcacctacacgtgtatc

SEQ ID NO: 30871 - DNA, 219 bp, Glycine max
  Clone ID: PAT_MRT3847_127882C.1
accattcaccaaactcactcatcaattgttatcactcttctcactaactattaagtgatcgtgctgatcacaactggccaagtcatcaaattccaacctgctgattcatcggaagcacctaagccactcgtgattgaagaaaccgatgctgctccaccacaagctgatgaaatgccctatactatcctttacaccttcatttgccacactgatgattac

SEQ ID NO: 30872 - DNA, 955 bp, Glycine max
  Clone ID: PAT_MRT3847_127883C.1
tttttgtttttttttttttaaaacataaattcaattatacattcagcattcacatattccaattttgaatattttattttcttgtacattttttttcctgcacaaacatgcagagtgtaatcagaggtagctagctagattcatctcatatagagcctatataaatgtgagaggaatctttttacctctacaacaaaatgaaaaaagaaaaaaaataataatcttcattatcttgagaggggacaaattgctttggccccactttcttaacatgttctgggttcattctcaatgggtctaattaaagtttccaacttcacgtaaatatcttgttcctcggggttatcttcactggtaacccatgtttgggcactggaaaaggaccatattgaattccatcttcatttcccacaacttgccacctgtaagaaagggtaagatgatgaaggaggacaagaagctcaagcttagccagctcactgcctggacaagagtggactccatttccaaaaggcatgtatgtgtttggtctcggtggcacctcgaatcttgaagggtcaaacttctctggctgagggaagaagtcagcagaatgatgaatgcttctgaagaggggaaggaccttccaaccttttggaatagtgtaaccttccaactcaacatctgttactgcttctctgaatgtgaatgacaaaatgcttgcacttctcagtgtttcttggatcacccggctagcgaacggcatctgcctggtatcatcccacgaaagtccacgattttccatagctagtttgttttttattccttcttgttctttcgtcacagcttccaatagattggcgttgtcgtgcaagtacttgaggacccatgttagagcacttgctgtggtgtcatgtgcagcaaagatgacaccaatgagattatcagcaacttgagaatctgtgagctgctgctc

SEQ ID NO: 30873 - DNA, 330 bp, Glycine max
  unsure (1)..(330): unsure at all n locations
  Clone ID: PAT_MRT3847_127884C.1
gcaaaacaatcagccaaataattgaacatgaaatcaatggtcgaacaagtttgaaccaaaattgttaaaatccttaatacaaattttttaataaaagtttttttaaattattgaaaaaaaaaaaaaaaaaaattataataaaaaaaaaaaaaaaaaaataaaaaaaaaaaattaaaaaaaattaaaaaaaaaaaataaaaaanggggccgccccccactattggactctttaaccccggaatttatttcggacccggtccttgaagctttacaatttttcttataaggaggcttatttaaactttggctaaataatggaaaaactttttt

SEQ ID NO: 30874 - DNA, 392 bp, Glycine max
  unsure (1)..(392): unsure at all n locations
  Clone ID: PAT_MRT3847_127885C.1
ggtaactctttcttttgagttaattttatcaaaatatacttaatttgctttcaatcaaaatcacccactccactcttagcttatcatcatttactgagattttaaacgatcgtctcttattatacattgaaaggtaaattattaaaaagtttaatgtaaatttaattagagacgatttttataacatataagaaagatgttacatgttttgatagatgattcgtgtaattaacattttgaaacatcatattattaatattttatacataaaaatttatgtatatataatttttgtatgattttttgtttacatagtcggcccccgacgaattgaatgttgggttagtccctgcaaataataatgattttctgnacattcaaacagtagctct

SEQ ID NO: 30875 - DNA, 479 bp, Glycine max
  Clone ID: PAT_MRT3847_127886C.1
atgcacgcacgcgtacgctcggaattcggctcgagtgagtcgctaacttttcattctccaattcaccactcgcttcatatgcatgcacagttgttaagacaaacttgacacaagcgcaccatataatcaacatcttgaagagcttgctgtgttgttccttttgcccccccttcaacgaaactgtactaattaaataagatttgtgattttttgttcaaattaaaatctccatggaaggtcgacagattctttccagattctgtccaaaatcatcttcagtgtcatctattccaattgtgaagcagcaatactctctaaagttccctcttttaccttcttcatcgtcgcatctttctagtcaatctcagaatctcgatgttcctagcagagctgtccatcctatcagcattgtgcacaaagaagtgtgttctagttcttggaggaggatatggtgtagtagtagtagtagtagtagtagt

SEQ ID NO: 30876 - DNA, 1395 bp, Glycine max
  Clone ID: PAT_MRT3847_127887C.1
cttgcatgcctgcagttggcatggcacctgatgcgcacttagcaatttacaaggtttgtgacctctttggttgttccgaaagtgcaatactagctggaatggacactgccattcaagatggtgtagatatactttctctctcacttggaggaccccctgctcctttctttgatgacccaattgcacttggtgcattcagtgcaattcaaaagggtatttttgttagttgttcagctgctaacgctggccctttttattcctctttgtctaatgaggctccgtggattctcactgttggtgccagcaccattgacagaagaatagtagcagcagcaaaacttggcaacggggaagcatttaacggggaatcggtgttccaacccaacaacttcacgtccacgttactaccacttgtctatgcaggtgcaaatggaaatgactcttctaccttttgtgccccgggatccttacagagcatggatgtgaagggaaaggtagtgttgtgtgagataggtggattcgttagaagagtagacaaaggacaagaagttaagagcgctggtggtgcagccatgatcctcatgaactcaccaattgaagacttcaatccctttgctgatgttcacgttcttcctgctacacacgtgagttacaaggctgggttagccatcaaaaattacataaactcaacatcaacgccaacagctacaattttgttccaaggaaccgttattggaaatccacatgcacccgcagttacttccttttcctcaagaggtccaagtttggaaagccccggaattctgaagccagacatcattggaccgggacagaacattctagctgcatggcctttgtcattggacaacaatcttcctccattcaacatcatttctggcacctcaatgtcttgtcctcatctcagtggcattgctgctttgctgaaaaactctcatccagattggtctccagctgcaataaaatcagcaatcatgacaagtgctaacactgtgaatcttggagggaagcctatattggaacaaaggcttctaccagctgatgtgtttgccactggtgctggacatgttaaccctttgaaggccaatgatccaggccttgtttatgatcttcaaccaactgattacattccttatttgtgtggtttgaactacacagacaaagaagttggattcatcttgaaccagaaagtgaagtgcttggaggtgaaaagcatagcggaagcacaactcaattatccctcgttttctattcggttggggtctagttcacagttctacaccagaacactcacaaatgtggacccgccaacataacctactatgtgaagttatgcgcctcggctgtagcatagcataaaccgcaggcatcaagaaa

SEQ ID NO: 30877 - DNA, 365 bp, Glycine max
  Clone ID: PAT_MRT3847_127888C.1
gactgaacaagtgatcaaagcatcagaagagaaagtagctctacaaggattgaaagtcacgcgcagcacctaaatgtaaaaaaagcaagaagagccagaacaagagtgtggtgaagcaggtgacaacagcagaaggtcttgatgatgcatgggcatggcgaaaatatggacagaaaccaataaagggttcaccctatcctcgaagctattatagatgcagcagttccaaagggtgtttggcgaggaaacaggttgaaaggagccacttagatcctgcggtttttctggtaacctacactgctgaacacagccatccccacccaactcgaagaaactctcttgctgggaccactaggaagaacaat

SEQ ID NO: 30878 - DNA, 363 bp, Glycine max
  Clone ID: PAT_MRT3847_127889C.1
acgaggtcgtatgtccaggtgagtttttttgtccaccttggtaaatggtaatgatgactatgctaatttctcctagggattgcatgtctagattttactagtattagcttttggagaaaatgtaatttttcttatagtttcatccataagattttggtaggaaattataagctaatatgcaagtaacaacattaggatagttggattttttgcagaatgccacaatgcaggagttgtgtttctttgtggccattaaaaaaaaaaaaaaaaaaaaaaaaaaaaaaaaaaaaaaaaaaaaaaaaaaaaaaaaaaaaaaaaaaaagaaaaaaaaaaaaaaaaaaaaaaaaaaaaaaaaaaaaaaaa

SEQ ID NO: 30879 - DNA, 302 bp, Glycine max
  Clone ID: PAT_MRT3847_12788C.1
tcaccaagcaggcctcctccggaagcccatggtacggcccagaccgcgtcaagtacttgggcccattctctggcgagcccccgtcctacctcactggcgagttcccaagtgactacggctagaacactgctgagctttcggccgacccagaaaccttcaccagaaaccataagctcaaaatgatccactcccaataaaccatgctcattaccttaatctacatcttccccaaactattatcccacaacaatatcaaatttagacaatctatataattcaaagccaaatcccatatcttcacc

SEQ ID NO: 30880 - DNA, 172 bp, Glycine max
  Clone ID: PAT_MRT3847_127890C.1
ggtgctatatattatatgaagttgcccaaagcctcagtcataagcacacaatcttcaccatgaataaaaatactccactctttcgaattgatccttgaaacgaggttcaattatccatagggtgaccttgggtatcctaaggtcgttttcaaaatcggggaggggggggtgg

SEQ ID NO: 30881 - DNA, 702 bp, Glycine max
  unsure (1)..(702): unsure at all n locations
  Clone ID: PAT_MRT3847_127891C.1
natttttgctacttgtgatggagttcttgaggacatgagtgatgtaaaggaattggttcctgagctattttacctaccctgaggtcccttcacaaatggaaaaattcatatttgaatttttgggcaaccaaccaacaatatngggcagcgataaggcttggatacctgtaaaagcctctcnctagctctgaggcttgaaaaaatcccaatttggatcttctatttccacaaagccacccgngaaagtgcctcttaaaatgagcgaagttatgttatcttgcttcattttgcattgaagtgggatttggacccttcataattttggggtattaagccaaccgaaggcaaagggatagccttggtttaccaagcaaaaataaatggtgtgttctttttaaaaccaaccctaattgaaggggaccaggtgggaatcctttgaataataattcttcttgaaccncaatgtacctaccaatgcgttggccattaacatagaatcaagatttggctttaatttttgngaccaaaacaacccattcccaaccttcttgaattgttccctcactttgaaaaaaaattgccatntatgcagatagttcttgcattttgcagaacaattatttccgtaaccccaaaagatagtcataaccattatgccttgttccatttccccagaaacgcttgcaattctttccttgcagc

SEQ ID NO: 30882 - DNA, 396 bp, Glycine max
  Clone ID: PAT_MRT3847_127892C.1
gcatgtgtacgatttgcagcgcactcatcgtatcagaggaatgggtgaaatggcggccacagatgggattcctgagaatacacgtatagcattggcctgtgctatgaatagttcttttaggaggcgcgccagctctgatatttacaccatctgctctcaagactgcgaattgtggaatcctgcttgcacaaaagcaatgactatgtcattgaatccaaacccgtgttctcatacatggagcttggaatttttgaagcgtaccacatctcattggaatatcattggtgtcagtgcgcggactgccaccctaatgcatgacgttcatgttacaattgattggtttattgcctctgaagaatgtgtacccaagacctattgtgttttaaatacacaaaa

SEQ ID NO: 30883 - DNA, 1147 bp, Glycine max
  unsure (1)..(1147): unsure at all n locations
  Clone ID: PAT_MRT3847_127893C.1
cgccagagaagccctggggattcgaggagtatcacgcgggagaggaagttggagatgggagtgaagaattcgtgtggtgcaatgacaacgagttaaactcaaaaatggagggaatttggccaattggatatccaaatttcagtgagaagatggaaaagctgaagtcacgcatagagatggtgggtaggaaaatgttgcctgtgatattggagaaggggagcatagaatttgtgggtgggcatcatgaggttgggacactttgctgcgtttacaagcatcgacgagatgatcatagcgttagcagctccctgaaatatgacgtgattagaatgctgattaggggaactgattactcacattcattgtgcttccatgtttgtaatggatcttcacactttcacctttactccaagaaaacttggctctctttctgccctcagccagctgcccttattgtcaccgctggagatcaaacccagacattcagtggtggagagtacaagcacgtgattggaaggccaatctttaaaggagagaaagaagagaccatttcaatggctttcctctattctactcaaaccaccaaggacaattttcaaaccagtaggggaagaactatttcacttggccagcaagccatcttggctttaattctgccccttgtgtaccatgtcatcaattttttctacaaaaaacttaattaaaacgtataatacacatccatagtatacctcgagttcacaaacactcttgtacacttgccactcttagggtctatagttacagcccttattacttgttcccaaacatgggacacttgtacacctttaccatgtttgtccctttccgagtgttaatacttnntttggctttaatttttcaaatcgaggttattgtaaccattttcacaaaactacagtggagggttttgggttatctggcatttcattttggtttgggcaaatttaattttgtgagttttatatataatgtttggatgcatcttctcaaagtaattagtttgctgaaattttcacatcaaaatagatatctctatggcttctgccgtaacgtggattaaatatttgtaaacatgcatgcatgtaactaaacgtgtatttagaaaagtcttggagttggttactgt

SEQ ID NO: 30884 - DNA, 184 bp, Glycine max
  unsure (1)..(184): unsure at all n locations
  Clone ID: PAT_MRT3847_127894C.1
gcccganccacccttaatcgtaacggccctataaccctcataaaaaaggtcgatgaatgctgggtaaaccattcttgataatggaccgttaaattatttgttaatttctcaaaaagtgcctgaccaaccccgggttattctaaaaagaaccttaatccttgggtttaaaaattacttggggctt

SEQ ID NO: 30885 - DNA, 394 bp, Glycine max
  Clone ID: PAT_MRT3847_127895C.1
ggaattcattaatttcggtgtagtccaggttcatttcactcactctggttttcaatagtccaaagttgtcgacaaacgtaacacactacacacgtacgaagagttacaagcagaggtgacagatggctcttagtgaaggtgacaagcatctaaaatgagctcaataacttcaacttatcggtttcaacactcactttcgtctctttcattcacggaggattaattacatcatcactgtccccaacacacgaaatctctcacactatggctcttagcatcaagaacagtgaaattgaatttgttgatcatgaaggtggagaatcattagcacatgcagatctagtttcaccatggacaccacaccaatgcaggaccgtgcagatcaaaagggtat

SEQ ID NO: 30886 - DNA, 772 bp, Glycine max
  unsure (1)..(772): unsure at all n locations
  Clone ID: PAT_MRT3847_127896C.1
agcgtccgccgccggagaaggcgtcggaatccgccggacatggaaatctccggcaccgttccgagctcggggtcctctctcactgctcagcagcgatgatggcgatcctctcttaggttctcgtatcagagctggaaaagacgatgctttaacagcggacacagatctagaggcttcctcctctggtcgaattgcttctagaaagcaaaaatattgggtgagcagcatcaaattgtttggggtagaattatcccctgataatgttgctgttgcgatggtttattttgttcaaggtgttttagggcttgcaagactggctgtgaacttttacttaaaagatgatttgcatttagaccctgctgaggcagctgtgatttctggtttttctgcattgccgtggcttgtcaaacctctttacgggtttattagtgattctgtccccctctttggttatcgaagaaggtcatacctagttttgtcagggctgcttggtgcactctcgtggagtttgatggctacttttgttgacaacaaatatagtgctggtttttgcatacttcttggatctctatctgttgccttctcagatgttgttgtagattcaatggttgtggagagggcacgtggtgagtcccanagcacctncggatctcttcagtctttatgttggggttctttcgcctttggtggaaatgtgagcntctacttcagtggatctttgctggatgcatatggagtaagggttgtttttggtggcacatcattgctttca

SEQ ID NO: 30887 - DNA, 377 bp, Glycine max
  Clone ID: PAT_MRT3847_127897C.1
tccattttcctcctaccccgggggaaagacagactctttagttaattttaacacacttgtctgttgtcctcgcagaccttgacctaatgaattccatttcttatagtagctctcgaacaaatcatcataaggcatggggatctctaaccaagacaattatggtaatattccataataaatacgaaatgaatgtccatcaaatgttcctagggcccaaaccattcaagggggaccaaaccccacaaaaacggggaactaacagagtcgggttccaacatggatgacatctatatttagtcgtcaaccccggagtcaatacccgttggtacttcgctggcgggatattgctatcaagaacccccaccatgtcatcttgc

SEQ ID NO: 30888 - DNA, 330 bp, Glycine max
  Clone ID: PAT_MRT3847_127898C.1
cacgcgtccgaaaaatcctcttttctttgttgttgtactaatagcatcatcattaggttaaaccaaaatgggagtcctttcccctcatagaatacaactatcattatttcccattgttgttgtgttgctttctctcacattgtcagcttcagctgcaaattcaggtcacaacacttttcttcattgccttgtgaaccattctgagccctttcaccccataactccagcaattttcacaccaaacaacacctcattctcttcagtcttggaagcctacatcagaaacctttgtttcaacacctccacaacccgaaagccattcctcataat

SEQ ID NO: 30889 - DNA, 399 bp, Glycine max
  Clone ID: PAT_MRT3847_127899C.1
cttcctttttccttttctttggggaaaaatgtacgagacaccttagtatattggtaaactagggaacattaccatccattccttagcagtttttcgcttgcgatcttccatctctatttattacacaccgggtagacaacacaccatttgtagcatctcctgtaccttattttcagattgtgagtaccacacagctctggccaaccaatattctcatgataaggtgctcttcattccgcacctgattaagaattatcgtacatactcaccgacgatctaaatatgattttttctatatatgaatgaaataacacacccgcatgcttcttttctgtagatgcctctcctatagcagttgacttactccgctatgctgggtattctttaacggccactttt

SEQ ID NO: 30890 - DNA, 175 bp, Glycine max
  Clone ID: PAT_MRT3847_12789C.1
cataacagctgaatgcatttcctaaccacccatatcctttgttcaagcgaacaccttatatatttccatgatactacaaccactcatattggcagtataacgagcgatcatacgtaaaaaagtttccgctttaactgctgactgctgcggcaaatgaaactaatacctatcgata

SEQ ID NO: 30891 - DNA, 136 bp, Glycine max
  unsure (1)..(136): unsure at all n locations
  Clone ID: PAT_MRT3847_1278C.1
atcganangtcatcgttggtnnntttctaaccaancacagacgctcanattnttttcttttgctntcgctgttcacngantccctcactttcttntatcncntcttatcctttgtcattntcagcaccactccatt

SEQ ID NO: 30892 - DNA, 430 bp, Glycine max
  Clone ID: PAT_MRT3847_127900C.1
gggaaaaaaaaaaagggggccttttttttccgttagcatcccccgttttaacccccctccacattgtttttaacccaaaaggggaaaaaccactttttttttttggaaatttgaaggggaaaaaaaaatttttttttttttaaaaaactccgttccccttttaaaaaggatttttaagggcccttttttttattactttgcccaaagagctcacaatgttgtctttccttgaaaacgaaaattttttgttgtttcaaaggttaccctcgaagaaaattttggggaaatttttttttttggaacttttttggccaaggggttgccccggggggacaacaaacccctttccgggtttaaagcccccattttttttttgggttggggggctccttttattatgctttgagtctacccttgaaaacatgggggg

SEQ ID NO: 30893 - DNA, 197 bp, Glycine max
  Clone ID: PAT_MRT3847_127901C.1
gacgctataaggagttgtatagtggcacgtaaatacaatggactgtgcgtggttttacagcgaaatgactgtcaaataccatggcgacacccaactaaatcgcgtatgcatcacatgcaaatttcgcagcggtagtgatatgagataaggtccattcagagcgtcgttctcaacagcggtctcctgaatggaaatgg

SEQ ID NO: 30894 - DNA, 384 bp, Glycine max
  Clone ID: PAT_MRT3847_127902C.1
gagcctgtcaggacattcaagtggaatagattctgtaagctttgattcctctgaagtgttggtagctgctggagctgcaagtggtactatcaaactttgggacttagaagaggcaaagattgttcgtactcttactggtcataggtccaattgtacatcagtggacttccatccttttggagagttctttgcatctggttctttagacactaatcttaagatatgggacatcagaaagaagggttgtatccatacttacaaaggccacactcgaggggtaaatgcaattaggtttaccccggatgggcgctggggttgttcatgtggagaggacaaatactgaaaagtatgggatctgactgcggggaaactcttgcatgattt

SEQ ID NO: 30895 - DNA, 1224 bp, Glycine max
  Clone ID: PAT_MRT3847_127903C.1
gcaccagggcacatcagccggaatgtctgtgacaaggggaatattttttctgttccttccaatcaatatgcagaatttactgagatcccggatcatttaggggccacccccgggttacaatccgaagttaacatcgacatcagtcaaccaagtgtccttgggacactatattccattaaacttaacgtaggtctgatacatcggaatgaactaatcgctcgaccagtgttttcggaaagtgtgctaccaagacaaacacgccctcaacaattccacacgagtcgtcagtggggggacacataagcagcaatgtcaatgacaaaggagatatcttttcagttccttcgaaccaatatgcagaattcaatatgttcctggatcctttagcagccaagatagtgtttgaatcagaagttaacatcacactcatcccactcaacacacagcgcagagtaagatcattttcaaccattataggcgagttgcgtagaacaccaagaacacccgaggctgtattttctgagcgtctgctgtcaaggctataccgtttaaagcaaacccataacagatatcagcatatggacacattcttgggggaaattctaggcgcagttgtcttggctgagagccattcaggtcttaatccaaaatttgaggcgaaggcagttaaagttttggctgatggcaatgaatcaagtgatggaaaaactgtggtagatgagaaaggtggaaaactaatgagaattttaagcagtgtggatgcaaaggcttatcatagtttgtatgcaaaaaagcttggcgatgagaaccaatcagctaagataggcagctttgaggaacagcggagaaaatggagtcatcctcacattataaattagagatcacttcacttagaatgtgattcatgaatcattactcaatttatgatccctttcatcatcccgacactttattagagcaaggttttcacgtattctggttgattctactttttacatcaatagccattatttatggttcccccgccctttttgttttgtttgtgttcatgcgctttattgtcttcgccgatggagtcgccgccggcgttggtgcattggtggtggatgcggaacatgggtcattggtgagaattttaagccatgtgaatgtcaaggcttatcatgaaaagtattcaaagaggctcggtgactggaaccaatctgctaaggtaggaagctttga

SEQ ID NO: 30896 - DNA, 618 bp, Glycine max
  Clone ID: PAT_MRT3847_127904C.1
ctcagattcaattgaaaaatctgatacaatagaaagtgaagggtttagcacaataactaccgaatttataaactctttatcaacctctaggcttccaaatcataagattaagcttaaggttgactcacgaataatgttgttaagaaacttagatcaaaatgaaggactatgtaacagtactagactaattatcacaatgtttgccgaccatataattgaagctaaaatcatgtcaggtaaaggccaaggcaacaccgtgtacattcctagattggcaacgtctccatcacaatcaccttggcctttcaaactcattagaaggaaattcccaataattgtctcttatgcaatgaccataaataaatcacaaggacaattattagcaagtgttggactatatctgcctacaccagtatttagtcatggccagttgtatgtagcactttttaggtgcaaaacaaaaatggactaaaagtaatgatatatgataaagataaaaagcccttgagtacaacaactaatgtagttttcaaggaggtgttccaaaacttataacaggtatttttttcttataatagttcacaaaaatcataatctatctacattgcacgttttctt

SEQ ID NO: 30897 - DNA, 440 bp, Glycine max
  Clone ID: PAT_MRT3847_127905C.1
ggaatcccaaatagaaagcttctttcaactttgccctgaccctccaaggggtttttttgaaacccaagccccaatattggacaactttggggggccgaaaataaacaaaattaacatggcggggaattaaaaaaagggttctgaaaaccctaaacaagcaaagctccaactgcccctacccccgcccggagtccaataataacccccatggggggcaagccccccccaatagcttttcccgggttaaccttataacgagcaaaccctttttttggggcttggctttggggacccccgtatgggcccggctgctcctcaaaagggttctggggggggtttttgtttcccccatcaaggcaaaggggaggagctcccgccttttgggtcccggcccgtttttttccaaatcggggaggagcagggccctttgggggcttttt

SEQ ID NO: 30898 - DNA, 110 bp, Glycine max
  Clone ID: PAT_MRT3847_127906C.1
gggccaagtctgaagacactcgcatcattagcagctgaagcataagctcaatcccttgcgtggatggttgattgtcagtactaattcgagtttggaagtcacttggcgat

SEQ ID NO: 30899 - DNA, 311 bp, Glycine max
  Clone ID: PAT_MRT3847_127907C.1
actaggaaccatgtgagagccccgtgggatgacatatcctcccgacccttgtggaacgaggtgctccatctgtacagatctccattctatctgctaaatgagtcaaatgcaaactgatcttaaagtatcatattgcaatatggtaatcaataatatatgtacgtggagcagaggccgattacaggaagaaacgtgggtattggtacacgtaatggaatgagttgaatttctgctatctttcattttcagatgtttgcttgtgtttaatttggatattccttgtggtcatgctcttaactttcccgttgtta

SEQ ID NO: 30900 - DNA, 246 bp, Glycine max
  Clone ID: PAT_MRT3847_127908C.1
tcgcccacgcgttcgcaaaaatggacaccaagccctccacacattcgctttctcgaaggctcaactgggcttggcccaaatgcattcttttctttaaaccacaacaacttctttaaccggctctttagctataggtccttcttcttcaaagattctgtactatatacctcaagggaagaagagaaaggcctaattaaacaactttcaatggggtaatcatattgcaagggttatggggcatttttc

SEQ ID NO: 30901 - DNA, 428 bp, Glycine max
  Clone ID: PAT_MRT3847_127909C.1
aattcggctcgagatccctagttcatggcaaccaaaccaaaaactctggagctcacggttttgtccgcggagggtctccacgtaaggggaaagcccacgcccaacatcaaagtgttcgcggtggttcgcgcggagtcaataacgagccacaccacggccatggtgacgacgacaacgaccaacgggagcgacaacggcttccagtacttgtggaacgacaagttctgggtggagcttgggcctcgcgcaaggtgcgtgacgattgaagtgaagtgcaggacggaaacgggagtggtgagagacgtcggcgtggcgagaattgcggtttcggattttcttggagggtcgtcggtgcctgatcattgcttgcagtctttgtgttacaggttgagggattgggatggcagagaaaacggagtcgtaatttc

SEQ ID NO: 30902 - DNA, 428 bp, Glycine max
  Clone ID: PAT_MRT3847_12790C.1
ggctcgaggtccagcatgcatcttgcttctgggattgtgaccctcggagacatggggtataagaaactgtccagatattgctatgatagcaactggttcattacaatctagtaaattctgtgtctaacggcattggatctattgatggccattcaactgacgcagatcacactggaatggttattgctaaagatctcgactcaacaaatgttactgtgctactctggacccactagagtcctatttcagcgttgtgcttctatcctagtggcaccattttaatgtcagcttccattcatggtcccaatcttaatgttttcaagataatgcctgcaagtgcgaagtggccagcatgtgttactggtacctactatgttcatttgacctggtggcaacgcggctctcagatgcagttatacaagatatca

SEQ ID NO: 30903 - DNA, 239 bp, Glycine max
  Clone ID: PAT_MRT3847_127910C.1
ccaaacaggacagaataaatgcaaggcaaaacatgcgttttttgataacctgacaaaggtaatctctacacggaccctaaaaacacccaacgagtcatataggggttcaaagaggtacacagaatgacatccagaaacctaaatatccgccgtgtaatatcacagggctcacaatatagactagaactgtcatacataaaatatctcaggcaataatctctggaaagggtatggaagat

SEQ ID NO: 30904 - DNA, 398 bp, Glycine max
  Clone ID: PAT_MRT3847_127911C.1
ggacactttaccgtgatatttccaagtacaatcaattagagactcaggaggcagctcaggaagagtcagggtggaaacttgtccatggagatgttttcaggcctccttcaaactcggatttactctgtgtatatgtggaactggtgttcagttttttgggatgattcttgtcaccatgatttttgctgcacttggattcctctccccctcaaatagaggggggttgatgactgccatgctcttgctctgggtccttatgggactgtatggtggctactcttcggcacgtctttataagatgttaaagggaacagaatggaaaagaattgctctcaagacagcctttatgtttcctgccactgcctttgcaattttctttgtgttaaatgcactaatct

SEQ ID NO: 30905 - DNA, 317 bp, Glycine max
  unsure (1)..(317): unsure at all n locations
  Clone ID: PAT_MRT3847_127912C.1
tcgataacggcgaaaagcgagccncncagcggggcggcactctgaacagncgaagacgccgccncagnccaacgagcaaacccacaaagcagaaacaaaagcccgaangcncgcncgcccaccccgagccagaccacanccgcagagagccagncggcggcagagcccagaagcggggaaanccgcgaccaaacggagggacaaacacacacccaggacacgcaacagccccaacancggagcgccgaacacccgaacccgacanngccacacccccnncaggagccgccaagacaaacaccaacgcacgcgccggg

SEQ ID NO: 30906 - DNA, 357 bp, Glycine max
  unsure (1)..(357): unsure at all n locations
  Clone ID: PAT_MRT3847_127913C.1
acaacacaggaacccaaccaccgggggngggagcaaaaatgaaaaaagaaaacccccccaacaacacgggaacaaacaaacacaaacacccgccgaaaaccaacggcaacaacccaacccgacaaaacaacaagagcacccgcgggaaacccagaaaacgaaagggccaacccaagacaaaaggccccagaacccgccaaaaaacccaacacccaaaccggggaggggaaaccccccacgggagcaacaccgaccccagacccggagcaaaaaacnacaacagccccacaaaaggcaaccacgggaacaacccgcccnnccacccgaaagccaagaacaccaacaanagcaaggacc

SEQ ID NO: 30907 - DNA, 488 bp, Glycine max
  Clone ID: PAT_MRT3847_127914C.1
gagagagagagcagaaataatattgattttttaattgaatggaagtaaacgttgtatcaagagggataattgtctaacctttgaagtagactcagccaaaggttcctcctcaagagggataattgtgcttcaaatccgttgtgcccctccatttgagttgattgatcagccattggattctcatcctcactcacttgctccatttcagctacatcaacagaatctccagtcttttcagatgcttcatgtgtgatttctggctcaaaggtagaaggatgatcaacttgtgttggaagggattctacttctattagagaacattctgaatctgaaatctggtagtaagtcttcacagatgtttcttctagttccaataaccttgcttgctgatcttaacctagcacgaatcccccaaattctagtggaatatggaatcaaacactttttgtttttggcagaaagattgccctcccaccaagaatctgact

SEQ ID NO: 30908 - DNA, 477 bp, Glycine max
  Clone ID: PAT_MRT3847_127915C.1
gtgggcgaaggagccgatgattgcttcactaattttttatggagacaacaggctctctgcgaaaacaattcttactcgcagagatacggacatcttgcgagcagattatacacatagcgagctagatgacacaatgtctaccgcgagacatgaggtaggcatcgagtatacactagtcagatctacatctgcccatcttccctcagtggtgaaataaaatataaacggaagtggagtaacatacatatatgcggctaattttacgacggcagatacaaattcgggacgaaacacgacaaaaatcgtgctgcgacagaagaggaaatgatggaagtgacttgaaatcgaggcattcctgctgatgtgcttgcaaagcgagctcatgaatccgaaaaacatgctgctcatgaaagcctcaaggatcaaattcctgctggtgacaagctgccttctactaaggttaatacagttgcaaaa

SEQ ID NO: 30909 - DNA, 707 bp, Glycine max
  Clone ID: PAT_MRT3847_127916C.1
tacggctgcgagaagacgacagaaggggtccccaaataaagatccaaacagaaacaggaactttcttcaccacaccaaagcaaaggagctctaaacaatttatgaacacctgttttcttccagggggcattaccccaaaatgtaaaccttcatgaaagtcacagaaaaaatgaatttacatatgcagtttaacaaatattatatgatgagattcgaaaccattatgacaatgagtaaactaaactccacttccagcaggtctgtatctctcattataaccacaaaagtcaaagtttgacaggcttgcaggcggctccatgtgatcaaatctgtccagttggaaatcgtcaaggaagttatcactgtaggaaaaaagacctaaaatttaccaagggccagaagatagtttgtagcaagagacataacaattaacaaagtagttggcccaccaaaagtttcatttggaacatgagacctaagatatattactactccctttacagaaaccatagttcaagatgcttcattggagtatccattggtattcataatgcccatacctgaactttaatttttcttgaatattcttgggaaaacaccctaagataatttttacaagatagaacttatgtctgctattcacatatccttattaacttcctttattaacaagttcaatttagggtagaaggcattgccattcttcc

SEQ ID NO: 30910 - DNA, 1947 bp, Glycine max
  Clone ID: PAT_MRT3847_127917C.1
cgataaactaacaacgtccctatttccggtttcaaattccctccggcgacacattcggattccaatatgaggacccgtttatcctcgactcgggtcatcttcgtggcctcgctctgtttcctcgcaagcttcgaattattgcaagccaaaaccatcgacccctacaaggttcttggggttgataaaaatgcaagtcagcgggaaattcagaaggcttttcacaagctatctcttcagtatcaccctgacaagaacaaagccaagggtgcacaagagaagttttctcagatcaataatgcatatgaacttttatccgatgaagagaagagaaagaattatgacttgtatggagatgagaaaggaaaccctggatttcaaagtggccatcctggaggtcaggatggatgtacttattttacagggggactccatttacaatgccatcttagatgctgcaaagcaaaaatctggcagggtatgggtggtcagggaggatctaagtcattctccttttcttttggcagctcgggcaattccaatccgtttggatttggcttggatgatctttttggcagttttttcggatagagaatttcattagctccgttctcagtggagatgtacccttcagagaagcaacacgggggaagcctgtactagagtattaggtcataaaagtgggttttgactgttatggctgcatgctcatgtacagagtcaagagatacatagaatcttttgtttttttttatactatcaagagtgcaaatgatctaattaagataacggcacataggatattattgatcaatgctaattcctcaaggttgttttatctagcttcattctgtaaggagcttggcatatatccacggagagctcctaggctttttgttttttcttataaggagaatgaaaaaggttctttggtggagtacagtggagacttggatgctaagaatttgaaggctttctgtcaagaacacttgccaaggttttcaaaacgaaccgacttgaatcatcttgatcaattcagcactactggaaagttgcctagggtgctgcttctttccaccaagaaggacactcctgtaatttggcgtgtccttagtggcttgtatcacaaacgcattactttcagtgatgcagagcttcatgatgttgctgatcctagagtgaaaacactagaagttgatgcacttccagctatagtaggttggctaccaaatggagaaaagcgtatcctgaaaactgggatatctgtgaaagatttaaaatctgcagttcttgatcttagtaacatacttgatagttttgaaaaagtaagtaaaaaggaatcatcaggtcaggccaagaaggcacaaactgactcagacgagggacgcataccattactttctaaatcaaactttgaggctctatgtggtgagaaaactccagtctgcataattggtgccttcagatcttctaaagctagagaaaagctagaatcaatcctctctttggtctctcaaaaatctttgtcaagacgaccaagtcagggatccagcagctctagggactccattttctatgttctcttagatgctgcgaagcaaaaatcatttctaaaggcatttgacaaaacagattataaatcatcaaataatttgttgattgcctacaaacctcggagagggaagtatagtgtatttatgggcgaaatgacaatagaggaggcagagaagttcattagctccgttctcagtggagatgtacccttcagagaaacaagtaggaagcctgtactagagtattagatcataaaattgggttttgcactgttttggatgcatgctcatgtacatagtcaaagagatcataaaattgggttttgcactgttttggatgcatgctcatgtacatagtcaaagagatatataaaatattttgttttgtatgccaaaa

SEQ ID NO: 30911 - DNA, 356 bp, Glycine max
  Clone ID: PAT_MRT3847_127918C.1
aaatgcatactctttattaatgtcgagatccaaactttaaagacggggatactgaactttattatccctggtcaccacaagaagctccttagatcacagcatatagctaatggactcaacaactaacaacactggtcaaaagtttacacttcatgttcccaccctacaaggtatttacccctgaccattaaaaaaccccattccgaaaacatcttcaaaaccacttctttcaaagtgccctcattatatccctatacaaggcttggaaacccctgaacattcgtctctcacacaattttctgatgtggtggaacaacgacctatctaaacgaggcatccatatgcctgtggaacct

SEQ ID NO: 30912 - DNA, 399 bp, Glycine max
  unsure (1)..(399): unsure at all n locations
  Clone ID: PAT_MRT3847_127919C.1
gaagcaaaccgntcgnaagnccacaggaggaaaggctnctaggaagcagctagcaaccaaggctgcacgnaagnctgcaccaactactggaggngngaagaagccccaccgnnatcgncctggnaccgnagctcttcgngaaattaggaaataccagaagagtaccgagcttttgatccggaagctncccttccagaggctgggtcggagaaaatgctcaagaacttcaagactgattctgcggtttccagagcccacgcccgngccttgccatttgcaagaaagcttgctgaggccatacccttggttgggcctcttttgagggacacctaaccctgttgtgcccatttcaacgccaagcggtggtaacccattattgccccaagggatatttcaagc

SEQ ID NO: 30913 - DNA, 508 bp, Glycine max
  Clone ID: PAT_MRT3847_12791C.1
gtgaaattatttggtgaattagctccttcaggaaatccagatttacagctttctgcagtacgagaactttcaattatgactgccatgagccatcctgcagcaatgcgattcattcctgatcacgatccaagagaatctatttcaaacaatttggttttgtcagattcattaacaagagagccagcaagatgtttgatattgagagcaaatggggagctttcacttcttgacttggatgatggacgggagagaaatctcactgattcagttgaactattttgggtcacctgtggtcagtctgaggataaaacaaatttgattgaggaagtttcatggttagattatggtcatcgaggcatgcaggtttggtatccatctccaggtgctaattcttttaagcaggaagatttcttacagttggatccggaactggagtttgatcgtgaagtataccctttgggacttcttccaaatgctggtgtggttgttggtgtttcccagagaatgg

SEQ ID NO: 30914 - DNA, 999 bp, Glycine max
  Clone ID: PAT_MRT3847_127920C.1
ccatcaatttgttatatattcttcattattttcattgtcatgagatacaactattcatattacaaagaaaaaggaaaaaaaaaatactatgacaaactatcctcacacttctgcaatgccataagaatggcaagatagtagtaatacatttcatatatatatatatatatatatatatatatatatatatatatatatatatatattcccttttattattgccacctcgtgtctattgaaaactgccacatatttgaatcatatatccagctccaaatctgtcaaggagctatctttactccgctttatggctaccgtggatgacaaaggacactataaagaaacatccgacaaatgtttcaatgtttctttagcgtaaccttaattggctcatgatccgagccaattaaatgaggaaaattcagcttagcttttgagccccgcatcttaaatgcagctcgatcataagctaaagctgcatcctcagcggtttcgtaggttccaagccacactctcacaccattcctcttagtgtccctaatctccgccgcatacttcccccacggcctcctccgcacgcctcggtagctcaaccccttctttggaggcgtgcgagtgccacgcgcggctgtagttttactattttgaccctcattttccattttcacagctacactaacattactcacctcatttccattggcggggaaccatccggtggcagcagcatcacgcaaagcaccgtagatgaccatgtcattggtgtcgttctccttcaacggcagctccgcccaattctctgtcaagaaaatgttccggaagctagaactccggcagaacgctgctatggacggcaccgatgcagaaacgtcctgaaacggcgtcgttacgggtatctcaaagtgatcaagagcattcacattggtgtttaaagcatgagagctcattgctccgtacaagtttgatgtttcgttgctttcgtaggttgtgtggttagcc

SEQ ID NO: 30915 - DNA, 841 bp, Glycine max
  Clone ID: PAT_MRT3847_127921C.1
gctgggccgtgctagaaggtttgattcaataaacaagttgctagagcatatggtcaaggatggatgccaacccaatgttgtaacatacaaccgccttattcattgctatggctgtgcaaactacctgaaagaagcactgaatgtgttcaatgaaatgcaggaggtgggatgtgagcctgatcgtgtcacatactgtacactcattgatatccatgctaaagctggatttattgatgttgccatgtctatgtataaaagaatgcaagaagctggtctttctcctgacacttttacttacagtgttataatcaattgtcttggaaaagctggcaatttagctgctgcccactggctcttttgtgagatggttgaacatggttgtgttcctaatctggtcacctacaatatcatgattgccttgcaagctaaagcaaggaattatgagatggcattgaaactatatcatgacatgcagaatgcgggatttcaacctgacaaagttacttacagcatagtaatggaggcacttggccattgtggttatctcgaggaagctgaatcagtttttgttgagatgcaacagaaaaactgggtgccagatgaacctgtttatggtcttttagtagacttgtggggaaaggctggtaacgttgagaaggcttcggaatggtatcaggctatgctgaatgcaggtttacttccaaatgtacctacttgcaattcccttctcagtgcattcctcaggttgcatcgattgccagatgcttataatcttgtccaaagcatggtggctcttggccttagaccttctttgcaaacttatactttgctccttagttgc

SEQ ID NO: 30916 - DNA, 709 bp, Glycine max
  Clone ID: PAT_MRT3847_127922C.1
actctctcttccttccttctccataactcacaccatttctgcatacatacacccaccattaccaattccttccataaaagcttccaaaaaaataaatgggtcactcatcacgttttctcgtgctgcttcttcttacctccctcctctttctctcttttgattatggtatttatggtttctctaactaactctctactggtgttgccacatgcatgaacttaccatcttttaagtttttcttttttcgtttggttttgtcttttgtttgattcctccttgttgtgatgttctgttcttaccttttgtcaattttaaggattcggtagggtggcactgatagagactcagcaggattttcccattctcacggttgtaaagtatgacatggccgattattctgatccacagccaaataccaatcccaagaatgggtatgttttgagccctccttcgtctccaactccaactcatcctccaagtccttaaatggaagctcacgattagactttcaccacttgtttgtgtctttctgaacggttttgtaactggagtgtgtgatcgcttttagtttgacacgggattcatagaaataggattatggtaactgtgttgctgttaatttgtatccttctatagtttttcatgtgttttcagaatgcaaattgtgaattgtgctaataaataaagtgtttggttactttgcacaaaa

SEQ ID NO: 30917 - DNA, 442 bp, Glycine max
  Clone ID: PAT_MRT3847_127923C.1
gcttttgtaatcgtcaccaatcgtgaaatgaaaatctgctctataacttacacggggtgtgtttgttgccccaactgtactgcttcctacctgaaagttaataccaagtacttaaaagggatgaggatgttaatttgtattggggctagcgcttcataattgacactgaaatgtctacgcactggtggcctcacacatgcaaatggtgaaggaggaagcttgggccactctaactctgctctaaacaaataattacgttccgggtatttgagcacgactagatggagcgcttcatcttcccattattgttaagaacagcactgttaacacaaaaatgctagttgagctaatcgaagggctcttaaagatcagattcaattctcttcacaagtacactgcctgcttgcgttttactggcaatgttgaagtcctcacggttgct

SEQ ID NO: 30918 - DNA, 357 bp, Glycine max
  Clone ID: PAT_MRT3847_127924C.1
ccacacccgtccgccaacgcttccgcccacccttcctaaattccggccagataaagggtttccgcctttggcttttctttttgtggaaggcggaccccaaatttttccttaacgaaccttaattaatttttccaattcgaaatttggatcaccttttggattaaacctttttttcctggttaattttttggttcgcctggaccataaaggggggggatggaaatggaatcctaaagatgccagttccagcaggaggggttcgcatgcctgcgaccaatagggttaacagaagggcagggcttaaaacccatggtttatggcaaagggccatcggttttgaccctaatgcccccaata

SEQ ID NO: 30919 - DNA, 183 bp, Glycine max
  Clone ID: PAT_MRT3847_127925C.1
gcgtacgtacgcttcgagcacggttagagggtattcatatctatgtagtcggacatgagttcctggtggactccggattgtattgctctttggtcctatctggtttatcacacatgatatagtagcatttgcttgcctctggtgatttattccttgacagtttctcacttctgatctggtggt

SEQ ID NO: 30920 - DNA, 392 bp, Glycine max
  Clone ID: PAT_MRT3847_127926C.1
ataaaaaacaaatgaatttaataaatgaatttaccttaccaaacatgaatttaatcaatggcagggggcgtatggttattataaaatgccccaccatccctttattagtgaaaaattgaatgggcgagtttggaacccaaaggggcggacatttgaatgggccacaaaaacaacacaaaacagaaggtgggaatagccgccattttgggaacaaacactgggtgaagcggcggaaatcttggaggaattgggtatatacgggtttgaccaaaaaggtaacccgctctgaacttcaactaaccactccattgtaaaaaccccaatgttagatattttcctagtttcacgaagcaacccacaaattaccctcgatgttgacggaaaaatcaata

SEQ ID NO: 30921 - DNA, 180 bp, Glycine max
  unsure (1)..(180): unsure at all n locations
  Clone ID: PAT_MRT3847_127927C.1
acncctggaanangtcgcangcacgcgtacgtanagctcgggaatntcggcttcgagtagttctagatcggcgagcncgccgccgaactagtngaggctcgtcgacccggngaatttnattnccgggacccggtaacctggcaggncgtaaccagctttcccctatagtgagttcgtatt

SEQ ID NO: 30922 - DNA, 281 bp, Glycine max
  Clone ID: PAT_MRT3847_127928C.1
gttattgaatattcagctcgagagctccactacgaatggtgatattgtttaaggaaaagaactcgtaatggttaaagataatgatacatgagctgctattggcttaacttcaagattcattccacctccaaagacggtatctggcttgcttaaagacagagggacaaacgaagaatcatttggacggatgccactactttgatcataacgttaatctctcctccatgaaagacatgccgtatgggaatcctacctttgaaaataaacctcccgtcatattg

SEQ ID NO: 30923 - DNA, 428 bp, Glycine max
  Clone ID: PAT_MRT3847_127929C.1
ggtaagctttttttaccaaacatttatgtgtaaatatatacacaaggcaaccatgaccttaacacacccatgacaaggacagaacacttgaactcgctcaagggcaagaaaagaccactgaattctaaaggtgcccgtttaaacagggtggtccagaggggggcataccacatactacatattttcgaaaaaaaaaaaccacataggggagagaggagggggtacaaaggccatctctgcttgaagccaaagctctccaacaccacacttgaaagagcaggggttgcaagtgcagcgagctgcacatgagacgccatggacctcagcggaaacacccatagcaaaagtatacaattgagccttaactgatgccactcccatgaccaagagttcaggaaggggttgactccctgcaactcaagcctggg

SEQ ID NO: 30924 - DNA, 263 bp, Glycine max
  Clone ID: PAT_MRT3847_12792C.1
ttttgtttttgttttttactgagaaaggaagggccaagggatgaggtgggaaccgggccctgggggcgccacagactaaggcagagactcccctacctggcgcccagccccaaccagctggccgctcctgcccatgctttttttttttttttttttaaatttttaaaattggagcccctggtgaggttacgcgtgccatgagaacccattttaaaccacgacgctggtccctcagtgttggccaaactctggagtcactgact

SEQ ID NO: 30925 - DNA, 648 bp, Glycine max
  Clone ID: PAT_MRT3847_127930C.1
ggccaattcaacattagtatttggtaaaacagaaaggcttcatgccttcatcacaaattagtcactactcatgtttcacttgagactggactagtttatttagatgaaacatcgttaaaaaaataataaatatacatggttcctgatttgaatggtatattataccttgtatgaacataaaacagtgataaagaattcagccacccaatctgaaaactgtacaattgagcagtaccacaccgcttgcatagatgcaaacctttatctattttagtgtggtcaaacctctgcacgtatccaaagaaatgaaagccagttatgtccagacgcaaacaatcccattcttatcagctgaagctaggggttttgcaattccgctccacctacaacacagaacagaggaagtgtgttccttcagagtactgactatatcacctttagatattgaccaaatatagacagatccatcagcagacccagcagcaacatgattgtcatctgggctgatacaggagcgactccaattagaagccactctgtttcccatggcttttaatgtgccacaaacttccagagatcgacacattaaaccaaattgtgtaaattggccccttcactagtcagtacaacatttccatttcgagaaag

SEQ ID NO: 30926 - DNA, 485 bp, Glycine max
  Clone ID: PAT_MRT3847_127931C.1
atggagccagccagccagctttgatagaattggtatgacagacaagtaaccaaaatggagaatccgcggctcgcttagctgcattgcattaggcattagcacggataaagcaagtaccttgccttgctgtgtggcatacatttcaagagttaagtgatacacggcatcaaagtggatggaactgtaactgcatattcatgtatctttttgcataacaaaattactgcaatctcagccgaatccccttttgtgtcagacaaagctcagtcatcagtaagtgaagaattaaattaaaattattgtaattcaaaaaaaggatcaccccctctttaatgtcgaagatcttcctataatgctattccccccttaaaaagtttcacttttaatggttattcccttgtaattattgtcctacagattgattgccttgcttctgtattactttttccacctttttcaagtttcagttctttctctccttttcc

SEQ ID NO: 30927 - DNA, 1037 bp, Glycine max
  Clone ID: PAT_MRT3847_127932C.1
gaacaaatctttcctctgctttctttttcttgtgtctccctacacagttggaagtagaaggcagtgatctgacatggatgcggagaatggcgaagagagaaaacatcatgaggcaagcacgtcagagaatagtgcagaaacaagcacgaatggggagaagagagaaaagggcaaacaaaaggaaaagccagagacagttccatttcacaagctgttcgcttttgcagactccactgacattcttttgatggctgttgggaccattggtgccattggaaatggtttgggtttgcctctcatgactttgctgttcggtcaaatgattgatagcttcggtagtaaccagcaaaacactaacgttgtcgaagaagtatccaaggtttctcttaaatttgtgtacttggcagtaggatctgggttggcagcgtttctccaggtgactagttggatggtcaccggggagagacaagctgcacggataaggggattgtatttgaaaacaattctgagacaagatgttgctttctttgataaggaaacgaacacgggagaggtgatagggaggatgtctggtgatacggttctcatacaagatgccatgggtgagaaggttggcaaatttctgcagctaatagcaacattcattgggggatttgtgatagcatttatcaaagggtggcttcttactgttgtcatgttgtccactcttccactccttgctttgtcaggtgctactatggccgtcatcataggcaggatggcttctcgaggtcaaacggcttatgcaaaagctgcacatgtagttgaacagaccattggatcaataagaaccgttgcatccttcactggggaaaagcaagcagtatctagttatagcaaatacaatactgtttcagtcagatgagtatactgtacacatgttctatatttcctcttcatttttcttttgccttttctatagtgccgaaggtttactatatgaaattttgaatgaatgtgtaggaaatgagtaaatattaagttgtaatttcacgggg

SEQ ID NO: 30928 - DNA, 1323 bp, Glycine max
  Clone ID: PAT_MRT3847_127933C.1
ccacgcgtccggaaaaaagaaagaaagatggaagacgcaagtgaggtttattaggggaagcgtggctagcagagactagagagatagaattagaattaaaaagcgtgaaggacagtgataggtttggtttggaaggaagaagaaaatgaaggccatagtgataacgaggccaggaggtcccgaagtgctccaacttgaggaagtggaagatcccctagtcggagacgacgagcttctcatcggagtccacgccacttcccttaacagagccgatacctttcagaggaaaggctcctaccctccccctaagggcgccagcccttacctcggtctcgaatgttccggaactgtcctttccctgggtaaaaacgtttccagctggaaaatcggtgatcaggtgtgtgctcttctcgccggaggcggatatgccgagaaagttgcagttccggtaggacaagttcttccggttccagccggtgtttctctcacggatgcagctagttttcctgaggttgcttgcactgtctggtcaactgttttcatgatgagtcgcttatctcaaggggaaaccttgttggttcatggaggttccagtgggattggtacatttgcaattcagatagccaagtatcgagggtcacgagtgtttgttactgcaggaagtgaggagaagctagctttttgcaagagtatcggagctgatgtgggcatcaattataaaacagaagactttgttgcgcgggtaaaggaagaaactggtggccaaggtgttgatgttattcttgattgtatgggagcatcctactatcaaagaaatcttgatagcttgaattttgatggaaggctttttattattggctttcaaggtggggttagtacacaagcagatctacgccctttacttgctaagcgtctcacagtacaaggagctggcttacgcaatagaagtctggaaaataaagctgtgattgttagtgaagtggagaagaatgtttggcctgcaattgccgaaggaaaggttaagcctgtggtctacaaatctttcccgctttctgaggcagcggaggctcaccagcttatggaaagcagccagcatattgggaagatattgcttttgccatgaaaattgtcgtaaatactgaagttcgtgacatacttctggatcctttgtgtttggacttgtttctttgttaagatctcaggattctaatatggttgcggattaaaataacagctaaaggaattgatatggcaagttcatttaaacaatcacaccgtatttatcaattgatatgattgttgaaacaaacactttttcgcgtc

SEQ ID NO: 30929 - DNA, 265 bp, Glycine max
  Clone ID: PAT_MRT3847_127934C.1
acatgtcgataaaataacccaatctatgaacctaactagtgttgatactagacctaaaaggatgaagcctgatgatgatgaccctgttatgttatcctctaacaataggacaggtgaggacttctgcgatcgcatccacaaggacgtgctaaaacatactaagtctgctatgttctgtggttcaagtgccactcacaagcctcatagagatggcaaggagcatgaacttgaagatgaagacatagttcatattatcaaaacagta

SEQ ID NO: 30930 - DNA, 263 bp, Glycine max
  Clone ID: PAT_MRT3847_127935C.1
gttcccattagtattcttgatgttattctgttttttttttttgtttttgtctgctttcaatgataaagtgattctatagcagtgttcatgttcactctgccacttccaaattccaatattaaactatggccggccacaacatatgcatggttgctacgtttctccatcctttggtctaaaactatcatagccattctccaatggccataaacttaaactagttctactccatttacagaccaccttgcttctagttctagaaa

SEQ ID NO: 30931 - DNA, 360 bp, Glycine max
  unsure (1)..(360): unsure at all n locations
  Clone ID: PAT_MRT3847_127936C.1
gggggtaacacaacgggaattgggggggggttttttggccccaattttaaaaaataccaccaaggtgggaaaccttggtgggantttttttanncttttaaataatggccgccaaaagcaacccccggcttgaaattttttccccaaaagaaaaacctggggagggtaaaatgcttcgcggttttaaataacctcatgaaaaaaaaccaaacccccttgattaacttttttaacccttttttccttttacaattatctcctgggaccaaatggggtaactttcaattcccgggaacctccaaaacaaaaatcttttgcaaaaaaaaacccaaaaaccctttgttttttgggggaaccccc

SEQ ID NO: 30932 - DNA, 472 bp, Glycine max
  Clone ID: PAT_MRT3847_127937C.1
aaatcagtcacgttaatctaatgtaatatacatttctatgcatatatatagctgatgtagcttatgtaaactctatgatggccaacatacgaacacgatggatcatacacatcagatttacttgttttaaccgaaagtgactaatattactttcactcacggtccattatccaaacctacacacatggccaacatcactgcttggacaactacagggtcaatatcccttgatccaccaacgatagtagaagagctgagtctttctgagagacaaatgatataacatatcgaaacacttagtaatatctgtttttatctcattattactgttaattgcacttgttttaggtgtgtctctctcagttctttttactgttagtatatctgaagttagaacgtgttgattctacaatatcctactcatttaaataaaaatggttgggaagaaaaaaaaaaaaaaaccgggatccac

SEQ ID NO: 30933 - DNA, 819 bp, Glycine max
  Clone ID: PAT_MRT3847_127938C.1
ctcgagccgaatcggctcgacttcaactcttaactcatcagtttcaagtcgcagaaatgaacggtggcgcctttgattttatcgaagaaaacggaaacgggagcgactcggactcgaattctgatgacgcgccggagtactaccagccgatctccgccgtggaagacagtgggagttcggacgacgagcacgacggtgaattcggacacctcccgaacggttttgccgcgcacggcgtggtggagaacgggatctcgtctctggatctgaacgacattacagagaagagcagcagcgacgaggaggaagaagaggaggaggagaggatcagagagttgttcgagagatcgtcgagagaagacgagaaccggcggaatgcaccactgacggcggagaacgcgacgagagttatggaggcgatgcgcggagtgtccttcgccggagtggttcccgattgggctggtcgagatgctgatgatcgatggattgatcagcttcgcagattgagacaatcgtcgaacacttgacggaaaattagatactcaattaggtgcgatgtttttttccctccagtttttaacttgttatttggatgaagatttagttagaattttgtgctcgaaatgtgttgaaattcaatgcggctttggataccaagcataatcaattttaggttgctttggcaatgtaaaaaaaataagctaggtgcaatactttgaaaattctttctactaaagtcatgtttgcctgtttgggtgtattctcatttttcacattagaagtatttcaaacctcgttaaaacaacgtttggttaacgt

SEQ ID NO: 30934 - DNA, 241 bp, Glycine max
  Clone ID: PAT_MRT3847_127939C.1
gagcctagctgctggctctaatatttctcttatcgcataccagattagaggattcaggcctgaaggaggcagacttaaaaatgactctttaacagacgaactcagataggctttgggtgaggtggatcacaaaccctaaatcatacctggagcgcttggattcattgctgccgctcgacaccctgaggccaccactgtagttacacgcatagtcggttgtgcaggattaaagtccacagtt

SEQ ID NO: 30935 - DNA, 428 bp, Glycine max
  Clone ID: PAT_MRT3847_12793C.1
gagaacccttttcagttaatgtcgcacgtgagaaccctggccttttcagttctttgaaaaccctcttcgcacgtcgccgctctaaactctggcccaaagctcgtcgcaacggtgtttgcgttttccaccgtcgtcaacagcggagttccctccttcaaagcccgtcgcacgccgcagctctgaactccgcctcgaagcccgccgtgatggcgtctgcgtcttcgttgtcatcaaaagcggagttccctcctttaaaaccctttgctctctactgtctgcattcacgtttctgttctgtattctactggaacacctgaggtggcttttgttgcaacatcgaacagctctaggatcaatgtatttagatggtcaattggggaaaacaattgctcgcctacaatgtcttctcgaggagttagacagctctc

SEQ ID NO: 30936 - DNA, 308 bp, Glycine max
  Clone ID: PAT_MRT3847_127940C.1
tcgcttggatatgctgcattgataccatatgttgagccagtctgtgcaagctcaaagtgctgaagttgactgtaactggttcgctgaaggggatgatggtcaagagggagtcgctcatatggatgaattgcaatgtgcagaatatgaatcactgcctacagaaactaatttggtgggaacttccaaggaatgacaactggatctactctgtgacgaaaaagctagtgtctagactacacatgatgagagagtgaaaacctcaaaacatgaggtaaatgatgcttgtctagatggaacagaagaatatg

SEQ ID NO: 30937 - DNA, 329 bp, Glycine max
  Clone ID: PAT_MRT3847_127941C.1
ctttctcgtgggcggacgcgttcgtggacacgtgggcggacacgtggtgaaaactttgcaaaaaaaaaaatggcctactacaaagggcgttgaactgataaccgataagtggcttacacaatggcttttgtctgaagtataacattctagggggtgagcttgacactgacaatgcttaagagttacgtgtgcatcttgagcatgacaatggactctgagatcatgttatgccatcactatgccaaagacatttgagacgaagtcagtcagatgaagggaatgtctctgatggctgccggaaaaccgactgtgcgtagcgcatacggtag

SEQ ID NO: 30938 - DNA, 404 bp, Glycine max
  Clone ID: PAT_MRT3847_127942C.1
tgagcatcgtctagctatctcgatcgaactgtccaaggtcctgtcaccgggagggcataaagccggtctggtccggttcctggttatgtaattaaattccggtgatcgttatgttgtgattgtttatctcttagcactaatcgttctaaccattgtagttatccaggtttgtacaaaattagtggtcatgtctgtaatcacaataattgtgttggtccgagtgatgattacaatagttttgttatatgtggtggtaacacttgctgtaaaggaaagaatcttgcaacggttagcatgatgttggcaacggtaccaaatatgttcacaaacccaagtcattcaaggatcccgccgccactacaccgatggtcagcgtcaccgggggttcatcaatcagcagtagt

SEQ ID NO: 30939 - DNA, 116 bp, Glycine max
  Clone ID: PAT_MRT3847_127943C.1
accgcgccaggactatgatagatcatgttattgctcaacagcattcacattctgattgttgcagcgatcaaatcatcaaaggacttgccctggtatatgtacttgcaggaacagat

SEQ ID NO: 30940 - DNA, 414 bp, Glycine max
  Clone ID: PAT_MRT3847_127944C.1
ggctcgagctcgagccgcttctgccgcggctgcggcggcaggacggccgatatccatcgtttggtccatgctcctcgtggctaagaaaaaccagctgttcttttttgtacttcttgttgctccaacaatgacctcttgcgttgccggctgctggatgcatccgattcttctttcataagaattggatgactgtattgctgccctccctgcgacgcttttataggacgatgaatctgctgctcataacagcgcatgattgttggcaacaatgatctttctccaatgacgtcctcagctggaccctacaaggagctccacaaagaagcaacactatttgcatgcacatgcttgtgaggaagagccatggtggctcaccgctgcggctgatagaagctcccgacccgccaatacaac

SEQ ID NO: 30941 - DNA, 745 bp, Glycine max
  unsure (1)..(745): unsure at all n locations
  Clone ID: PAT_MRT3847_127945C.1
atttttgttgttggtaataataataatattggatgctgttgttgttgtgaaggggtttattctgtgagagtagatgcanatgaagggaaagtggtagtggcaggagatgtggatccagcgaaactggtaaaaaagctaaagaggggagggaagcatgctgagatatgccagaaccagaaaggaggaatgatgtgtaatcagattcagaactatcctatcaatccccaattccagaacatgcaacttggtattgggggaaaggacaacaataataatcacaagggtcagaaagagaaaggtactgctgcggctgctggtcaactagcacacttccctattcttaaaggggttcaggatctcaaggtacctgccaaggaacaaaagtctgtcaagttcaacttgccagaggaggatgaatttgatgccagtgatgatggttatgatgaggatggattaggccatggacatccaatgcagaacaagatcatgcccatgatgattaatcacaaccataaagacaattctggtgggagtaggaatattaatggaagtgttaagaaagctgacgtcattgatcaggcaatgctgttcaagggcaaaggtggaaatttcgatgaggcagaagctgacaatgatggaggaaagaaaggtagtagtagccaaaaagatgaaatcaagaagggggatttggataagcctaaggcagtcagtgaggtagattctcataagaaaaagaatgggaaaa

SEQ ID NO: 30942 - DNA, 408 bp, Glycine max
  Clone ID: PAT_MRT3847_127946C.1
gttattcaccaaaccataatggatctaattggtgtgttataataaataagatcggtacgaacctacatctgtaaatagcaattcacagaccttaaaggtagtgagtgttgcccttcttacttaatgtattgtgtgatcaaagccgcaactatataaggatctaattgataaccatgtcgatgaacttgagattagctaccctatccatttctcagtggctttccatggcaacatgatgcctttggcaatccaacagccgctacgtatgtgacacacatggctacccttttgaaactgacgattaatactacatcaggccgggcctaacagacaacggatggcgtggcacattgatcaacagaaacagggcgagccctttggacgtgacactcgaaaacaccgacacac

SEQ ID NO: 30943 - DNA, 276 bp, Glycine max
  unsure (1)..(276): unsure at all n locations
  Clone ID: PAT_MRT3847_127947C.1
tttttnataattttccttggggccagaaaaacagaataggggagcattgaaaaggattaccccacaactacctgcaagaaaaaaaatgaagggagggacattggggaaagaagtacgacccttgagcactacgggcagtagcatgtgagcaagagacggggggcctgccttacggcccccagcccggcggacaatgaactgcctggggggtagtcggggacattggatcatgataaagggcatagcagtgaccagaaaacaggaatcggtacttca

SEQ ID NO: 30944 - DNA, 159 bp, Glycine max
  Clone ID: PAT_MRT3847_127948C.1
tttttttttttttttttcgtttggttgaccagagggtatggggaattttccttgaaagccattgtgaaccttttacgcggaagcattatttggatctccttctacctatgtggcgaaaagaacaaacttaatttttgaaactgtttttaggggaaggag

SEQ ID NO: 30945 - DNA, 269 bp, Glycine max
  unsure (1)..(269): unsure at all n locations
  Clone ID: PAT_MRT3847_127949C.1
agaccaaggacaccgggagaagacggaacaagcaaaccagaacagcaccaccgggcaatanaagnccaccggactaaggagcgggggacgggaacaagctttttttttgaactncaggagtatcaaaagatatatggggaaaaggagggattaggacagctcacattggggcatanccagaggaaggcaaatccggatcgtagcctggcgagagccagaaggggagagcttgagtttaccggacaccaattgctttaatgccaaggctc

SEQ ID NO: 30946 - DNA, 233 bp, Glycine max
  Clone ID: PAT_MRT3847_12794C.1
attggtatattctattgttgtatattttgagagaaaagggtgaaacgaaagaagagaacatagagcatatgtaaacacaaaaacgagaacggaagagaagcatgaacagaagtaagcagagagcaaagcacgaaaacagaatgaaaacaacagcatgaagagagagattgaaaacagggcaaacgcaaaggcgacacggagagagacaaaatgagtaaaacgcgggggaaaac

SEQ ID NO: 30947 - DNA, 333 bp, Glycine max
  Clone ID: PAT_MRT3847_127950C.1
acgaagatactccagacctgcatgaggaactctatacacacagacaagggggagctatgggatcaaaagaggaagaagacagagaataatccataagcaatcacatctatatgtagagcacatcatacaggagggctatcaaactcgcagatctaatataatcaggctctcgaggatactgcatacatttcatgcatatggcagcaacggctaggtatcatgctacaaaacgattacactgattgctactgtacatgttccatcaacagggatggcatcacaggataaactagtgactaaaccaagttcatcagacgatcttttgaccactat

SEQ ID NO: 30948 - DNA, 155 bp, Glycine max
  unsure (1)..(155): unsure at all n locations
  Clone ID: PAT_MRT3847_127951C.1
ccacaaaaaaanaaatttcaacttttaaactctcacttcaatatctcttgctcgctattttaaaccgttttctcaacaatctcgttccaataaaacttnaaaaccccttatcaatacttttatatttttcaaacttctcataacaaaacaacttc

SEQ ID NO: 30949 - DNA, 401 bp, Glycine max
  Clone ID: PAT_MRT3847_127952C.1
cctcgtgcctggaggggaaccgcgagagggtggtggcgggtgcgtcgactgtggaacacgcgctgaggggcgcgttcgagtgggggaaggggtgtgacgcgagggcggcggcgtgcgtcggggaggtgttggcgatgcggctgaagacggaggcgccggagctcggagtgggaggtggaggtggggtccactttgacgcggagagggagatcgagaagaagagtgtcgacaacggagatgcggtctgggccgtggttcgcgctttgaggaacagaggcgtcaaggtgttcgtcgccggtgatcgcaattcaggttcgccttgaccccaaaaataaaataaactagtaaacttctcttgcatttttctgtattatgatattttctattgcatttatgatatc

SEQ ID NO: 30950 - DNA, 977 bp, Glycine max
  Clone ID: PAT_MRT3847_127953C.1
tacggctgcgagaagacgacagagagggggagctgggtttgttttcggcctttgatcttcgattctctctctttttctctcgcgaaaaccgtatcagcaatgtctggagaatcagccagcgctattcacaagggtcaagtcgatctcttagacttcattgactggtctggggttgaatgcctcaatcaaagctccacccactctctccccaatgctatcaaacagggttatagagaagacgatggtttgcatctggagagtgatgcagacgagcagcttttgctctatattcctttcactcaagtcgttaaactttattcctttgttatcaaaggtcctgaagaagaaggccccaagacagtgaagctcttttctaacaaggagcacatgggatttagtaatgtcaatgattttcccccaagtgatgtggcaaatttgtctgaagaaaaccttaaggggaaaccggtacttttgaagtatgtcaaattccaaaatgttcgtagcttgacaatttttattgaggacaatcagtcaggttcagagatcacaaaagttcagaagatcgtgctgcatggtacaacagttgaaacaacagacatgaagggtctgaagaagattgaggatcattaacccctggaaagaggagattcaactttgctcctaatccctccttagaaattttgattggaattgtaatgttaacttggtgaatgatggtttatgacttctaatgtctatctgatttcaaataaaacagatgcacaatatatctacatggttgtgacaatttgtgattggaggtaacattcaagctgtatggttatctattgtgtctttttacatgttttgaaacatgtaatcttcattgaggaattatacctcgaatgactgaatctggaacgagctagattgcattgaaggtgtcatcctaatcagtaaaaccactaggatttgggaatatcacccctacctgcagc

SEQ ID NO: 30951 - DNA, 243 bp, Glycine max
  Clone ID: PAT_MRT3847_127954C.1
tgctactgctggtcagccgacacaccacggttggtgggcagaacctgatgctaccctgccgtaacggtgccgtcctcagaggaaccattagccggaacctttgatggtgcgagcagatagacccgaatccaacgctccataatcctgaactgcatgaactggttcagacacaccgtgaaggccccacttgcctccggagcatcgtggaggaagaccatagacagaggcatgggagggatccac

SEQ ID NO: 30952 - DNA, 116 bp, Glycine max
  unsure (1)..(116): unsure at all n locations
  Clone ID: PAT_MRT3847_127955C.1
cttctncgntaaccttctcctntggaantggaggaccatcntngtcaccatcatcagtatggcatcnctgatcngangcaactcgttnacgggcctcggccgactcatnnccacag

SEQ ID NO: 30953 - DNA, 279 bp, Glycine max
  unsure (1)..(279): unsure at all n locations
  Clone ID: PAT_MRT3847_127956C.1
actgtaaagaaaatatttattgttgataagaacgtaaaacaaagggcattaatggggcaggggggtggacggatcatatgcgggggggaccataccatattagtgctttgaatgttgtggacctgaagaagttgctagtgactgtgttcggagataatctcatagttttgtatgaaaccgttatctaggatccaaataatctagccgactcggatcaggacgtgactaattatgctcancatattatagacagtttgtctgtaccacaggaatgggttt

SEQ ID NO: 30954 - DNA, 391 bp, Glycine max
  unsure (1)..(391): unsure at all n locations
  Clone ID: PAT_MRT3847_127957C.1
ataccctccaactccgttgcgggtatcaggatcgcaaacagacagagggccaattgaggagtattttggaaggatgtcttacgttgtttctaacgttaatcagcccctagagacatatttgttggagggaaattatccctttgatatcaaatcacgctctacatgggaaaatgntcctctacaaagctcacttagtagtggaaaaaccttcataatatgatatatttggcgctgaatcacattcttcagaagattttcctgaggacgaagatcatgaaaaacccaaattgattgatgcctgatcgagacagagaatatatcctcaatacactgaggttcatgctcacagggaaacaaatttgggtacattggatcttgatgacgttgaaac

SEQ ID NO: 30955 - DNA, 440 bp, Glycine max
  Clone ID: PAT_MRT3847_127958C.1
gcgcgttgttttttttttttttttttttttttttggggggaaaaagtgtgtgtgatattttaaccggggatcaacttgagctcgaaaatacatgtgtgaaacgccttacaatgagtgagtcgaacaaccaaaaaataaacaaatatggggctgtgaaacagaataaagaattacgtgaaggggcctcgccgccacagcctctttaactagggcgctgcttgtgttgggaccaccatgggaggggggggcgtgggtttcggagagggatggaggggtggagtacttacggcctgtgtggggggaattagagtgaaaccttgcggcaatcctgaccccttgggcaaaaatctcaaccaggttccccatgcgggtattctatcaaaactcaaaaaaccactcaccctcttttctattctattctctcagaatttcttgggggg

SEQ ID NO: 30956 - DNA, 304 bp, Glycine max
  Clone ID: PAT_MRT3847_127959C.1
gcatcaaaataaaatttattcaagggtgggcttgataaacaatactgccccaatcaaataactctaacccaagtcaagaagtgatcctttaggtggcatcccgatatcactgcgcactagtaaggctagtcttacacactataagcatctcactgctcaacaccatatttacattatcacacccactcttatgtggccaacccctgactacctggtgcaactattaacaactaaaggactcgtgacctctgggatgacatgattccaacacacagaaaactcatgcatagccatttccgggaac

SEQ ID NO: 30957 - DNA, 389 bp, Glycine max
  Clone ID: PAT_MRT3847_12795C.1
ggacaacaaaaatagtcttaaataaaaaacaagcaggtatatagcaaaggcaaatctacagggaaaatctttgaaaaacaaacaaccataacatagggggggggggcaaatctttgattcatattttaggagcccaacaaaatcattcaaaggcccattgattttcccgacaaacttcctttttttcctcaggggggaagccattcttaagggtaaagggcttggaaatttccccgggagtcttccccttgaacatggcggctacagtttggcatgaaaggcccaccaggcttttgaggttcaaggagttccccccccggaaaaaatcaaaaagcggggccgggcccaccttgacaaaaacggggccccaggctttaaaaacgcccccg

SEQ ID NO: 30958 - DNA, 387 bp, Glycine max
  Clone ID: PAT_MRT3847_127960C.1
ggctcgagctttattcagggttgacttcgaaagcgattctgcgggaagaataggatgaggccgggttttgctgggaactcggagtatgaactcgtcaatcagagctcgaacgcttgtttgtatagtatggtaagtatcgaccgtgtgtgcattgaatcatggaacttctactaatggaaaatatgctgagctactgtcttggcttgccaacctatgtgcatgtaatgtaatgaaacgatcacttgctgcctggtgtttctctcccactgactgatcagcatattaacatctgatcattcgtgactcaccataccatcttctaacatagacattatcattagaatgttgttagtgagatcatcagtcagattattaagccatgcccta

SEQ ID NO: 30959 - DNA, 1116 bp, Glycine max
  Clone ID: PAT_MRT3847_127961C.1
ccacgcgtccgcggtggcgtgggttcctctcgcccctcacgcgccgcttcaacgtctacgtcccggacctcctcttcttcggagactcccacacgacccgccccgaccgctctgaagccttccaggcccagtgcgtcgcggccctcctccaggcccacggactccagagaaccagcgttgtgggtataagctacggcggcttcgtggcgtacagtctcgcggcgcagttcccggagcgcgtggagaaggtggtgctatgctgcgccggggtgtgcttggaagataaagacttggacgaagggatgttccaggtgaagactgtggatgaggctgcggatattttgctgccgcagacgccggaaaagttgaggcagctcgtgcagctcgcgtttgccaagcctgtcaaaaccatgcccacttgctttctcaatgattacattaacgtgatgtgtactgataaccgccaagagaggaaagaactaatcgaaacattacataaggatagaaaattatctaatcttcctaagataacccagcctacgttaataatctggggagaaaaggacctggtcttccctatggaattagctcataggctacaaagacatttgggagagaacgctcaactagtggtcattaagaatgcagggcatgctctcaatgtagagaagcccaaggagatgtacaagaatttaaaatccttcctcattgatcccgctactccaactccaactgcgcaaaaaaaccacagtaacggtagctaagtggattagcagagaaatggaagagatttatttttcggcattgtttgtgaatatgcttgtgtatctatttgtttatacgctgttatcagccacgcggtagttttcggcacggataggacgagaagggatagtcgtgaaactggttctttatagagtaaaagaagagcgtatctgctgccaatttaaagtatgcggatgagcatctgaaaataaattttacagatcatccactgtaaactcatatatcaggaaacttggctacggatagaatctgattcagaggaatttgttgctaaggatacaggaattgcatatgaaatatcatgagctggtgtgggtatttcccccttct

SEQ ID NO: 30960 - DNA, 1047 bp, Glycine max
  Clone ID: PAT_MRT3847_127962C.1
atggcggcgtgcatcagcttcaccgccacgcgcgaccgctgcttccgcttcaccttctccaacgcaggcctcaaatccgccaccacggacctcggcgacggcaccatcatgcactggtgggcccccaaggcccccaaggactccaagcccaacctcctcctcctccacggcttcggggccaacgcaatgtggcagtggaacgacgtcctctcgcccctcacgcgccgcttcaacgtctacgtccccgacctcgtcttcttcggggactcccacacgacccgccccgaacgctccgaggccttccaggcccagtgcgtcgcggccctcctcctggcccacgggctccatacaaccagcgttgtcgggataagttacggcggcttcgtggcgtacagcctggcggcgcagtttccggagcttgtggagaaggtggtgctatgctgcgccggggtgtgcttggaagataaggacttggatgaagggatgttccaggtgaaaactgttgatgaggctgtggatattttgctgccgcagacgccggaaaagttgaggcagctcgtgcaaatcgcgtttgccatgcctgtcaaagccattcccacttgcttcctcaatgattacattaacgtcaattttaccgccatggtgctgactagggtaaaactattgttaacgaataaccagaaaaatgttaaaagaacaataataggaattggactattgggaactggtagggtgatgtgtactgaaaaccgccaagagaggaaagaattaatcgaaacattacataaggatagaaaactatctaatcttcctaagataacccagcctacgttaataatctggggagaaaaggacctggtattcccaatggaactagcttatagactacaaaggcatttgggagagaacgcgcgactagtggttattaagaatgcagggcatgctctcaatgtacagaagcccaaggagatgtacaagaatttaaaatccttcctcattgatctcactactccaactgtgccaaaaaaccaaagtaatggtacctaa

SEQ ID NO: 30961 - DNA, 792 bp, Glycine max
  Clone ID: PAT_MRT3847_127963C.1
gataaactaagggatgagctttcctgtgctatttgtttggagatatgctttgagccaagtaccactccttgtggtcacagcttctgtagaaaatgtctaagatctgctgcagacaagtgtggcaaaaagtgcccaaaatgcaggcagctaataagcaatggccgaccatgcactgtgaacacagttctctaacacaatccagcttctgtttccacaagaagttgaagcaagaaaagaagccagtgccttgaatagtctccaacaagctcaaaatctgattctggactcagattttgagctaatctaaggaatgacagacgacagccttttaggggggcatcaacaacaacatcatcaacacagcaggatgaggatgctgcattggctagaatgttgcagagacaaattgatgaacaaagaagcccgggaacaactcgaactcggtttgcaagattgagggcaagaagaggaggggtttctactagccaacatgaggatgcagctttggctctaaggatgaggagagaagagttcatgcaaacttatagagggagcagccagtctagcaggctaccctcatcattattagctagagaaaaattgagggctatggtatctagagccatgaacagaagagaagatcttagacaagggtgaatgttgttaacaactaaactttttttttctgaatgtcattttatggttatattcgtgtctcataatttgtgaggtgtgcattgttttgattttcaaggtacaaattgaattattcaaaactgaactggcattctg

SEQ ID NO: 30962 - DNA, 215 bp, Glycine max
  Clone ID: PAT_MRT3847_127964C.1
ggcattcggctcgaggcgttgacggtatgctgctcatcgtggatgcggcgaaaatttcgataagcctgtcacaaatctcgagccgttacgccatgtgtaggtcatatacgtatgaggtgatcgagatcggtcagttcctatagaatcagcgaggctgatggtctcaatcgatggcaaaggttggcgtgcccgatgcgcatcagcgtattcttccg

SEQ ID NO: 30963 - DNA, 308 bp, Glycine max
  Clone ID: PAT_MRT3847_127965C.1
tatacacggaggcacccaggagaggctataaggaatggcggaactgcatctagggacttaagggcagctctcacccaatgcgtacaacaagtgcgaagatatgaatatcatcactatcttagccttctcgagctgccaccgaatatgcggaaggctgaacatgcactccgcgccatgaatgtagaaacagcgagggctaaggaagtagcctcagatccaaggaacggcctaatgcgccaagattggtggcaggaagccatagacaaaatgcacgccaaaaaactgattgaacaacccaacagcacagg

SEQ ID NO: 30964 - DNA, 370 bp, Glycine max
  Clone ID: PAT_MRT3847_127966C.1
tgggaagtaattttaaataggacgtcaagtaataatgtgcccattccgacatatggcctataccgttgactgcaatgttacatctggctctatatatgatgcaaaatagcatactggtctatgtctgaaatgatagctggagcgtttatgccctccgctaaacattgatgacaccttgctcgctacggacccgggacaccacttcatattcatttttggcatctgatgcggactcaagaaaactacattgaaactcagccctatgcttgtaattaaaacccccttgaaaacctaacccactggttgatgttatgaaggcattgggactgctagctggcgacttattattgcatgagcaagcattttatgg

SEQ ID NO: 30965 - DNA, 369 bp, Glycine max
  Clone ID: PAT_MRT3847_127967C.1
gccactcgtgctgccaaacattctaacttttcattcagggacagttaactggacaattgggtaaaaataaaaaatagatgctacacatgttctgtacactccgaagcataccatacgattaggaaattttaaatatgacgggaaacttgatagtgaccacatatcttaatacctaccacataaaatgctatcttgtcttctactgttactgtatcttaacctaaatattgctttacatgtactaccatggacataccggacgctgctcgaacgtcaccaatacgtgctgctgtggtcaaagtgaacaagcatgtattctacagaattttaaggtagaggatttatgtgcgggtagagcattgttatgcc

SEQ ID NO: 30966 - DNA, 438 bp, Glycine max
  unsure (1)..(438): unsure at all n locations
  Clone ID: PAT_MRT3847_127968C.1
cccacgcgtccggtccagtggctctatgtgtactctctccggtgttattataaggtccggattaaaagtgtggcttggtccttattataaggtccggtctaaaattttccctgcattaactattttttcacaaaagtgcccttaattaaagttagttctaaaatgaagtgataataagagaaacataactcgttaatgtttgttagttttgttcacaggtaattttggaaaaaatactaatttaggacaaatttaatgctatcaatcaaattaaccaattttctaatagcacaccatcatttatctcatattacataaatgaatagtcattgtcctcaattccttagttggtttatgcatatattnctttggattttgaacaatatatgtgaaatgtgtgtagtgggaaaaggcttgtcgttgttgaatttgggaatg

SEQ ID NO: 30967 - DNA, 273 bp, Glycine max
  Clone ID: PAT_MRT3847_127969C.1
gtcttgttcaacaccaaacatatctgtcgctctctgctctgcttatggatccaagttgcaacccaccacttatcgttctcatgcatcaagggaaaacgaggcctattttctgtggaaatattgaatatgaagcccgccagtcagagctggagcggctttttagccgatatatgaaggtcgataggatggatatgaagtctgagtgcgcttttatatatatggcagactagagaaatgcttacgctgctatatgcgctactgatccatagaatt

SEQ ID NO: 30968 - DNA, 291 bp, Glycine max
  Clone ID: PAT_MRT3847_12796C.1
cccacgcgtccggtactgtgttcgtactgcttatagtttggtgaggcttctgtgtgctacggcattcccttccttcactcttcatgcactattttcattttgctaagggatcgatcataacgcggaagaattacaaggtcttgggacctgttctgttggcttataaagagtccacaacaggagccttcttggtgtttcagaaagtaggaggctaggatgaaaaggagtggagatacaagtggtcaaagggacagcgacttattggatactgaatgataacaagtctatggc

SEQ ID NO: 30969 - DNA, 240 bp, Glycine max
  Clone ID: PAT_MRT3847_127970C.1
gtttgaatcgctacctctccacacagctaatgcatgtccttataaaatggcggccgcagtgaaacacttccgtctgtttcttcaccagtggtctcactgtagctctcgtcaccgcatcatgtgaagtccgaatgagatgctacggatgctggcagtgattttcatcgacctcaaccaggggtacccagggaaccattgatcacgacacagaaatcgcagagtgtcaatgaagcacaggtt

SEQ ID NO: 30970 - DNA, 296 bp, Glycine max
  Clone ID: PAT_MRT3847_127971C.1
aaaatctccttatttaatttttgtgttctaaatatatctcacgattagtcaaagggtagtgggtaagaaatcccccagctgcggtttgaaaatttttttttttccaaaaaaactccggaggagaaaacaaagagtattctttagaaaaaaacgcaataagaaatgataccaacggtttttttacaaaactggcagagataaagatagatcaaaacagcagaaacgtaaatccctaaatatgtaaaactccgagaaaactgtgaggatccagctactccaaaggaatatgtattatg

SEQ ID NO: 30971 - DNA, 424 bp, Glycine max
  unsure (1)..(424): unsure at all n locations
  Clone ID: PAT_MRT3847_127972C.1
tacaccagcaattaatatataaaacattaaatgcatttttacaaaagtattaacagaaaaaccactatttccttataaaagtatcttacatcaattagatttaattactaatcttcttaaaacaccaccacctaaaactattacagaagttctaaataacaatacaagaaagtacttaataaaaatacaaaagaaatctcctataccatttaaacagaaatttccgaatacaaatccattaacacttcgcctattacaaagacttttagcatttaatccaagaaatcgaccaactactcaagaaacactanctaatcccttctttagaaatttaaccaaagttaagagagaaccttcttagcagccaatttcaagattagaatttgagtttgagaaaacacgactgacaaaagatgatattaga

SEQ ID NO: 30972 - DNA, 378 bp, Glycine max
  Clone ID: PAT_MRT3847_127973C.1
ctcacgcgtacgtataggacaggcccaacacctgtctaaagccgcgtctgtcgcgtcctgacggtccaagacaagcccctatacccaacctaagagcaatgagtgtaaaacatgagtacgtggcacgcaacacgggctgaactaggtcttctcgcattatattcgggcaaggctgcttcatggtacataatacgcagggcattacagtatgggtccaaatatacgagtatcatgaaaacctgtactgctcataatgccgagctaacaaccagcttggcacgaagagtcttccggctttctaagtcactcaatgacctacatgctttgatcagtccaacgcctcagggcactaacttaccgctatctctgttggtaaag

SEQ ID NO: 30973 - DNA, 685 bp, Glycine max
  unsure (1)..(685): unsure at all n locations
  Clone ID: PAT_MRT3847_127974C.1
attgcaatgtagaaatcgctgcacaggtttcacgcctgtcatcatcaaaacatggtacttgagttctctcagcttagaagggttaatggagagtccatctgtggataacgatggggactgcttctcgcctttacagttaaatgcaacatctattaacattgaagtctactataataaagcagtgaactataccttgatggttacttttatctcatttttgcaagttcttctattaattcggcaaatggagcatagcaacacccaatctggggctgctaaggtttcaatattaatgattggtcagcaagctatagtggatgcttatctttgccttatacatttgactgcaggaatactagttgaatccttgttcaatgcttttgcaactgctgcatttttcaagtttgtggttttctcaatatttgagatgagatatctccttgccatctggaaggcgagtaggcctttgagcagtggtgaaggttgggagacaatgagacgtgaattgtcggttttatacagtcgtttctgtaagtgctcatttatttaaagtttctttggcaatctgatcttgttatctcatcactgtggatatgccctgnagtcattggttccatangatccatgatcatgttatgtcttcaagttttgaactgtaatagtcacattacatcttaggagcctg

SEQ ID NO: 30974 - DNA, 288 bp, Glycine max
  Clone ID: PAT_MRT3847_127975C.1
accacggaggacattgaaacccatatgggtcctgggcctcaggtctggagtaccaccaccaatggcgatgtcgcccaaggcaaatatgtcgcaatggctaaagaaaactgttgaggtaatgctgggagggtgacaccaggcttcactccagctacattgctggaatgttagatgcaaaccgacatctgtttgattggagcttactgcaagaaagatgtttctcatggatcttcccatagatgatccctaagagagagatttgttggagggaaatttttcctttgatat

SEQ ID NO: 30975 - DNA, 427 bp, Glycine max
  unsure (1)..(427): unsure at all n locations
  Clone ID: PAT_MRT3847_127976C.1
aannnaatnnntntnnnaacccttggggggatttttgaaaagggggacggaatttttgacccgtacattcttgccttaaacctttacgaaaaccaactttcctaataataggggtaataaagcttttcctaaactattttctaaaatttcttctttaaaattttaccgctaacataacccaaaacataaaatccaaaacttgaattctaaaaaaattgtttccaaaaataaactaacccacttaattgcggaaactaaattgaaatcttttgtgtgaaaaaataaatgcaacctcaaataaattatgcgcgccccccccccgattaggcactttgaaaatttttccccccccaatttttattttaacaacaaaacgggcaaaaaatattttttcttatacacctccacctttttttttttttttaaa

SEQ ID NO: 30976 - DNA, 306 bp, Glycine max
  Clone ID: PAT_MRT3847_127977C.1
acaagaacccatcccctccccagccgctcccaaaatctcactctgcttactcttcttgctccaagagaagcaaacatccctgactttcaccacatcagcacacactgacaaagacaaccttgtgcgactccaatctaaacctatcaagcctgcgttcgaaaacctagagatccctgggcgagtaatcaagcccaagagtaggtgtatcatggacgctggtggccctggtgttgtagtctacaactggtggacaccgtggctgtagcctttgctaaaataaagcgagaatgttctatgcacgcttca

SEQ ID NO: 30977 - DNA, 208 bp, Glycine max
  Clone ID: PAT_MRT3847_127978C.1
aattcggctcgaggtgaaaatcagggttacagaccagtgtaatgcttatccatcagtccacaataagagctgggcatggataggaacagtatttttgtcgtgatgataaaaaaatttggagggaatcttactttgttctccttgatgagtaattacattacattgtcatcctttctaattttaaaatgtttttcttgtgagacataaa

SEQ ID NO: 30978 - DNA, 557 bp, Glycine max
  Clone ID: PAT_MRT3847_127979C.1
ggttgagttaggttcaaacccacattctaagttggtattagagcctatcctagatccatttaaaggaccactaaccttgttatccatgcaccaagcctaaaagtattgggcataaagggttgtattggaaaaaatccaaatcccacattggctagagatatgaccaagatagtatatttcagtgaggggcaattaggcctaaacccacattctaagatagtgaaagtttatccatgtattcttgtgaaataagttgcatcatggggcaaacacaagactaaattatgcatgataattatatgtctattttatcatgaacaaaatgtattgatgttttcaatttttactgtgtggtccttttgatcatttgtcttctacgagtaaaactttctgcaatgctgtttctgattcttttttcatatatattcatatttgtacagatatcagtgaaagaagataagcacaaagaggaagtaatgctattttcaggaaacccgaaacatgctgattattcattccttaagcctgaaaaaaggcgaatgggaaaaagtgagcca

SEQ ID NO: 30979 - DNA, 349 bp, Glycine max
  Clone ID: PAT_MRT3847_12797C.1
aaaataacacacacttcacgtttcatttcgactatcaaaagaggtgtggaaattttcaaataggcagagcctactcaacaagagggtcatgcctaatttcctttattgtgtgaaacacacgaactagcgaaagaaaacacagattccagatcatgcaaaggattccgcattttcataagatctggcagtagcctgtggaacacaaaaagctggcataaaagtattaccagcattttcaaaaccttgagagattcccacgagaatatcataaactgtagattgcttgggattgtcaatccggaaacctataagccatgaagtttgatttgcccactcagaactccacatt

SEQ ID NO: 30980 - DNA, 747 bp, Glycine max
  Clone ID: PAT_MRT3847_127980C.1
cggcaatataaaggataaaaaatgatgtaatccgactgtccaaagtcatcatcttctgttccccttcccgttactactagtcactttccaactttgttccactgaaaaacacacttacaaatatagtgctaactttctctctctcactcactcaccttgctgctgtgatttggatcttgaaggtttgagagggtactgccatccaattaatgggttctaaaactaatgcatcgggctatagagcacgaaggccactgtcaatatttgctgtgcttggtctgtgctgtttcttttatcttttgggagcatggcaaagaagtggatctgggaaggcagataaacttgcattgaaagttaataacctgatgacaggctgcactgttttacccaatttgagttttgaatcccatcacagtgatgtagaaattgtcagacctgatgtgctaaaagctaaagcattcaagccgtgtgacatgaaatatactgattatacaccttgccaagagcaagaccaagcaatgaaattcccaagagagaacatgatctatagggaaagacattgtcccgctgaaaaggaaaaaatgcactgcctcattccagcccctgaagggtacacgactccttttccatggcctaaaagccgtgattatgcctactatgctaatgttccttacaagaacttgacagtgggggagactgtggaaaaaccaactgcattcccgggaaaagggttcaaatttccagggg

SEQ ID NO: 30981 - DNA, 759 bp, Glycine max
  Clone ID: PAT_MRT3847_127981C.1
ataccatggacttcaaatgagggaatgtatctaatggaagttgaccgagtcttaaggcctggtggatactggagtttgtctgggcccccccgtaattggaaaacatactaccaaacatggaagcgatccaaggaagatctgaaggcagaacaaacaaaacttgaggagttagctgaaagtctttgttgggaaaagaagtatgaaaagggtgatattgctatttggagaaagaaaataaatgctaaatcctgcaaaagaaagtctcccaatgtttgtggtttagataatgctgatgatgtgtggtaccaaaaaatggaggtctgtaaaacccctttacctgaggtaaccagcaaaaatgaagttgccggaggagagttacagaagtttcctgctagactttttgcagtccctcctcgaatagcccagggagctattccaggggttacagctgaatcttatcaagaggacaacaaattatggaaaaagcatgttaacgcttacaaaagaatgaataaattgattggcactactagatatcggaatgtgatggacatgaatgcaggccttggaggatttgcagctgcacttgaatcacaaaagtcttgggtgatgaatgttgtgccgtcaattgctgagaacactttgggtgttgtctatgagagaggtctgatcggcatttatcatgactggtgtgaaggcttttccacatacccaaggacatatgatcttattcatgctaatgttttattcagcatatac

SEQ ID NO: 30982 - DNA, 596 bp, Glycine max
  Clone ID: PAT_MRT3847_127982C.1
tcgaacgcgcgctcgtacgcgtgggcggacgcgtgggtgggaatgaatttcagcaactgcatgctttccttcaccagtcacctactaaccgtcctagaacgattggagtttccattccaatgaaggctaccttctttatgacatacataatggttgatggatgggctggaattgttggtgagattctgagattaaagctattggttatataccatctcaaaaacatgttcttagttataaccgaaagagatagaggaaaggcgatggactctgggagtgtggactttccagagactattccaagtctatatctataccaccttcttggaattgtgtatgctgtggtgacatcaatcctttttcccttctttctagtcttctttgccattgcatatttggtttaccgtcatcagaagttcaatgtctacaacccacagtatgaaagtgctgcttgccgcatcccaccaagccacataataattatcgctcgcttgctaatatcccagcttcttctgttgggtcttcttagcaccaaaaaggcagctaaatccacacctttactcgtcatattaccaatattgacatttgcattccac

SEQ ID NO: 30983 - DNA, 2568 bp, Glycine max
  Clone ID: PAT_MRT3847_127983C.1
cggcaatataaaggataaaaaatgatgtaatccgactgtccaaagtcatcatcttctgttgcccttcccgttactactagtcactttccaactttgttccactgaaaaacacacttacaaatatagtgctaactttctctctctcactcactcaccttgctgctgtgatttggatcttgaaaacacgctgagagcatttcaattaggtcaatcaactttcaaatacattaatcgcaaaaacacacacacactctccccgaggtttgagagggtactggcatccaaaaaatgggttctaaaactaatgcttcgggccatagagcacgaaggccgctgtcaatatttgctgtgcttggtctttgctgtttcttttatcttttgggagcatggcaaagaagtggatctgggaagggagataaccttgcattgaaagttaataacctgatgactgactgcactgttttacccaatttgagttttgaatctcatcacaatgatgtagaaattgtcgaacctgctgagccaaaagctaaagagttcaagccgtgtgatgtgaaatatactgattatacaccttgccaagagcaagaccgagcaatgacatttcccagagagaatatgatctatagagaaaggcattgtcccgctgaaaaggagaaattgcgctgcctcattccagcccccgaagggtacacaactccttttccgtggcctaaaagccgtgattatgcctactatgctaatgttccttacaagagcctgacagtggagaaggctgttcaaaactgggtgcaattccagggaaatgtgtttaaatttccaggtggagggaccatgttccctcacggagcagatgcatatattgatgaacttgcgtcagttattccaattgctgatggttctgtcagaacagcactggacactggttgtggggttgcaagctggggagcctacttgctaaagagaaatgtgctggctatgtccttcgctccaaaggacaaccatgaagcacaagttcagtttgctctagaacgaggggtgcctgctgttattggtgtccttggcaccatccaccttccatacccatcaagagccttcgatatggcccagtgttctcgatgtctaataccatggacctcaaatgagggcatgtatctaatggaagttgaccgagtcttaaggcctggtggatactgaattttcttctggtcccccaattatttgaaaaacatactaccaaacatggaagcgatccaaggaaggatctgaaggcagaacaaacaaaacttgaggtgttagctgaaagtctttgttgggaaatcaagtatgaaaagaggtgagtttaattatttcaaagaggaaaacataagatgctcaattcctagaagaaatattgtctgcccaatgtttagggatttcacattaatgccgatgattttctgggtgacaaaaaaatgagaggtctagtaaaacccctttacctgaggttaaccagcaaaaatgaagtttagagatacagagtccttagaatcggagcggtacattcttttgcagtccctcctctctgaatacctgcccaggattccaggggttacattcgcagaatcttatcaagagaacaaattatggaaaaagcatgttaacgcttacaaaagaatgaataaattgattggcactactagatatcggaatgtgatggacatgaataggccttggtcaggacgattttgcagctgcacttgaatcacaaaagtcttgggtgatgaatgttgtgccgtcaattgctgagaacactttgggtgttgtctatgagagaggtctgatcggcatttatcatgactggtgtgaaggcttttccacatacccagagaacaatctttgggtattcatgctaatggtttattcagcatataccaggacaagtgcaacctagaagacatccttctagagatggatcgcatcctaaggcctgaaggagcaatcatcatccgggatgaagttgatgttcttaaccaggttaagaaaattgttgggggcatgagatgggatgccaaactggtggatcatgaggatggccctcttgtgcctgagaagatattggttgctctcaaagtgtattgggttggcaccagcaaaaacaaaacatccaatgaggaataaaaccactattgttcgggtgtgaatcttgtacttcagcctgcagtaacatccaaggtttctaaatccaacccaaagaaggaatggggaaaaatatgaataatgagaagagaaaaaagattgtagagcaaagcaaaagcaaagattggtatggttattcgagtttattctacgtctgccttacaccaagtgtagaactgtagataaaataggttctaagtagtcttaaattaattttggaggatatggaccagcaagtttagctgtctgaataatttaagcccaagttgttgtgttgatgcccagatatgaatatttgatgttagaatattgaaatattgcaattttatttattctcatcattattcagtatatatttatcatatttgaaaaataggtcatttttaatgt

SEQ ID NO: 30984 - DNA, 433 bp, Glycine max
  Clone ID: PAT_MRT3847_127984C.1
ggcaatcaaggaaaattttattgacatctccaagttcactacagactcaacctgtttttatcaacaagaaaaggatcttctatttaccttaacatttggggaccccattctttgcaaggatttttcaccccactgcagttcgggccagattcccatttacgattaaatggttttaaaaaatttccgggaaaagaaagaatgaaaaataccattcattaaaatgagcaagaccctcaagtttaatttccggggggcctaaataacatgtagcaacagcagctcaaaggcttaagccagaacccaagtggtatgaaattctaagcaaaggggcttaattggacaaaccttgggcggcaggcacccccctgttctggagccctgtgcctttccagaaagatcccacagtgaactgggtagccccacccctggtaat

SEQ ID NO: 30985 - DNA, 336 bp, Glycine max
  Clone ID: PAT_MRT3847_127985C.1
agttgcattggcgggtttggcaggtggcgtgacgtcgtgtaccggaatctgcttgctcattattgcgtcccacggctgggggaaatgcctcggtcagtacgtgccgaccgcgatcggaaagagtagtgcaatggcgcaatgatacgcccgtccctgcgctccaagggtgcgacctttggtcgcgttgggtctgcgctcagtatggtgtagcggatgtaacaaagcatgatccaagtcaattgactatagatgattgatcgtgagtgggggcggattggcgccggctatggcgatctctgatccgccgacccgtggggtgtttcctgcgtgtggaaa

SEQ ID NO: 30986 - DNA, 425 bp, Glycine max
  Clone ID: PAT_MRT3847_127986C.1
ggcgaggcgagaagacgacagaaggggattgtcctatatatgatcattcttctcatctattagatgccatactggagtagctggaggagaagtgtccaaaggcagaactggtatggtctggccctcatgtatctctaagataggaatggaagagtctactacatgctgaggtgaagatggatccactcttggaaatggtgcaacagctgatgttggcactagtccatgatgagtagcctcattggatctcgtctctaatcttctttttttacaatcaacagctccagagatggtggcttcagatgagtgatcgttttctggttctggctcatgctgttgaagtgcctggccaccttctcaacgaatgctctacactcataattggtctctgttgaactaattcctgcaagctttggataatgaga

SEQ ID NO: 30987 - DNA, 349 bp, Glycine max
  Clone ID: PAT_MRT3847_127987C.1
ggggcaaaagatttaaatattaaaaccaaagattcatactcaaaataacccggagtttatccagaggcgaccatttcccaacctttaaaaaaaaaaaaaaggaaccagccttgggcttaacacacccataacaggcccaaaacactggaactggctgaaaggaaaaactggaccacttttttttaaggatgttggtttaacaaaaaacaccaaagggcccaaaacccttcacagacctattccataggtttttagctacacattaagagggaataataatgcctaataaagggctatctcggctggaagcttggtctcccaacacctcacttaaaagggcaggggttgc

SEQ ID NO: 30988 - DNA, 1890 bp, Glycine max
  unsure (1)..(1890): unsure at all n locations
  Clone ID: PAT_MRT3847_127988C.1
cccaaacccaatcctcttcctcttccctcaaatcataacacattttctctctttcccttctctgttccgttccttctcgcgcgatttgcatattccgaaattgagaaccccacccgcgcgaaaattgaaggcagagaagggcaaaagatttgatctttcaaacgaggagtttctggggtgtcccaggatgaggctaaacggtgaaatctcaagcggagaagaagaagaagaggagaaacaaacgggaacgacgacgttttcgtcgcagaaagtggtcgttggctacgctttaacgtccaagaaaaaaaagagctttctgcagccaagtttcaccggtctcgcacggaacagggggataaactttgttgctattgatctaaacaagccactaccagaacaaggtccttttgatattatcttgcataagttgtccggggaggtttggcgtgagattattgaggattatagggaaaaacatccagaggtaactgtccttgatcctccggatgcaatccaacatttacacaatcgccaatccatgctgcaagatgtgttggatctgaacttatctgattgtcatggcaaggtttggtgttccacgtcagctagttatcacaggagagaaagacccctctagtatcccttatgaagtcactaaggctgggatgaaattgccattagttgcaaaaccgctagttgttgatggcactgcaaagtcacatgaactatttcttgcttatgatgaattctctctttcagcggttgaacctccactggttctacaggagtttgtcaatcatggtggtcttctctttaagatttacattgttggggaaaccataaaggttgtgaggcgtttctctcttcctaacatcagtaagcgtgaactatcaaaagttgctggtgtattccgttttccaagagtttcatgtgcagccgcttctgcagatgatgctgatctagatcctaatatcgctgaacatccaccaagacctttattggagaggcttgcaagggagctccgtcatagattgggactccacttgttcaacatagatatgattcgagaatatggaaccaaggatgtgttttacgtcatcgacatcaactactttcctggatatggaaaaatgccaggctatgagcacgtatttacagattttctacttagcctagtggagagtaaatgtagtaataagaaacttgctgcctaaactagagcaggttagtagatgcattgaacagggctgttcttgctggtggctttcttaaaaatttatgcaaattagtatggaatttcaatgaagccaccaaaatgttgaaaaaggtcgaaatagggtctgtctaatttctccctctcaataatgagcgaaaatgcctttattgtaagttataatatatgcttatatccaaatcaatgaaagttttggtggtgctctaagcctagtgcagagcaattgtaagaagaaacttgctacctaaactagagcaagttttagtagatcagatccattgagcagggctgttcttgctggtggctttcttaataatttatgcaaactactctggaatttcaatgaagccaccaaaatgttgaaaaaaaaggttgaaataggggctgtctgtctaatttccccctctctcaataatgagcgaaaaatgcctttattgtaagctatatatgcttatatccaaatccacgcaaattttggtggtgctaaataactgctaagatttaaatttcattcgtaaaagttccgaatggttgatttatgaccttttcagaattgtttatttttattccaccgggtaaaaagatataaatgttcctaaatttggacgagataatcctccgccnnngcaagatcatgcaagcatgnnnnnnnnnaa

SEQ ID NO: 30989 - DNA, 651 bp, Glycine max
  Clone ID: PAT_MRT3847_127989C.1
ctctctccctctctctattttttatttttttttacgtttcctcttcaaatttatcactggcctcttttccatttcacctttacactctctccttggctcgagtttttctttcactatccctttcgaactctctccgattagggcacacgcgatgcctctcttcctctccgacgaggagttcgcgtggtgctccggtgacggctctgccgtggccgcgaaggccgacgccttcatccgcggcctcttcaacgagctcgacaccgtccgctccaaggcccacgccgccgacatcaacgccgagcagaactgccttctcatcgagcagaagtatctctccctcaccgccgagttctccaaactcgagtcgaacatcgccgaacttcaatcctctctcgatcagcgcctccgcgaaatcgacgaggtgcaatcgcagaaccaccgaatcaaattggaagcggttgagaaagatagggagatagagcggttgaggacggaggtggcggagttgcacaagtcgaagaggcagttgcttgagttgaacgagcagaaggatttggagctaagtgagaagaatgcaaccatgaagagttatcttgataagatggttcgtttaagtgaaaatgctgctcatacagaggcacggctgagtga

SEQ ID NO: 30990 - DNA, 246 bp, Glycine max
  Clone ID: PAT_MRT3847_12798C.1
acgacagtgattgagcttattactctaattcgactgtactaagatggcatctctggtgcgtctttctactctcatggaaacgggtcactcttccttcgtgatccacaaactggagtctcctctacagccctagtcatgctatactgacgttacacattcatgcgcatgcgtcttggaccatacgacgagactaacctccaactattacagatattctcactgcctccgtagctgcctttgcatatg

SEQ ID NO: 30991 - DNA, 993 bp, Glycine max
  Clone ID: PAT_MRT3847_127990C.1
acttggaaagagcagggtaggaagatttatcacacccttaggcccaaccccatagggcaaatgtttatttatttatttataaagttttaaacttttgacttacacagagcaggccaaccaattaaataataaagggtaaaagtgacaaatggataagagcagagagaggagaaaagtttcaccaaaccttggcttaacaccatcacaccaccactattgtattattatatattcttctcattccattcacttcttctttcacaattacacccaaacccaatcctcttcctcttcccacaaatcgtgacacatttctctctttcccttctctattccgcgcgattcgcaaactcccagattgagacccgcccgcgcgcaaattgaagaagagaaggccaaaagatttgatctttcaatcgaggggtttctggggtgtccgaggatgaggctcaacggtgaaatctcaagtggagaagaagaggagaaacaaacgggaacgacgacgttttcgtcgcagaaagtggtcgttggctacgctttaacgtccaagaagaaaaagagctttctgcagccaagtttcactggcctcgcacggaacagggggataaactttgttgctattgatctaaacaagccactgctagaacaaggtccttttgatattatcttgcataagttgtcaggggaggagtggtgtgagattattgaggattataggcaaaaacatccagaggtaactgtccttgatcctccggatgcaatccaacatttacacaatcgccaatccatgctgcaagatgtggtggatctgaacttatctgattgtcatggcaaggttggtgttccacgtcagctagttatcccaaaagagaaagacccctctagtatcccttacgaaatcactaaggctgggatgaagttgccattagttgcaaaaccactagttgtggatggcactgcaaagccacatgaactatttcttgcttatgatga

SEQ ID NO: 30992 - DNA, 233 bp, Glycine max
  Clone ID: PAT_MRT3847_127991C.1
gccctcactcttccaaaccttctcttccctcttttctttctttcatccccaaatcaaaacctaacattcccaccttcaactttctcccccaaatcgaccacccccaccactgccaagtcccattatcttctatatctattcgtatatatacatacacagagagcggggagaatggattcggatcacggaaagcttttcatcggtgggatctcatgggatacgacggacgacaa

SEQ ID NO: 30993 - DNA, 1917 bp, Glycine max
  unsure (1)..(1917): unsure at all n locations
  Clone ID: PAT_MRT3847_127992C.1
cacgcgtccgggcctgagtatagggttattggtgagctcatgaatcggcttaaggtcgcgacagagctgaaggacaagtttgttttgcagaacaagcttaatagggcgttgaggttggtgcggtggaaggaggcttatgatcctgataaccctgccaattatggcgtgattcagcgcgagcagccaaccgcagacgcgaaggaagaggctgagttcgagaaggagaagcagaagcagattgaggagggagataatgctgatgatgaggaggagcaggagtttgatgacatgaaggagaaggataatgtactgatggccaaacttgaggctatcgataggaagctcgaggagaagttggcggagctcgagttacatttgnggaggaaggggaaggcgctcgaggaagagatcaaggatctcgctgaggagagaaatgaattgactgaccagaggagaaagccactttaacggaagggttctgatacaagattgatagacatgaaccgaacttgtaaagtcacaaagggaggacaagttgtgaagtatactgccatggtagcttgtggcaactataatggcgtcattggttttgcaaaagccaaaggccctgcagtcccagttgcccttcaaaaggcgtatgagaaatgcttccagaatttgcattatgtagagcgacatgaggagcatacaattgcacatgcagtacaaacgtcttataaaaagaccaaggttttatctctggcccgctcctactacaactggcatgaaagccggcagatcagtcgaagccatactgcatttagctggtttgaagaatgtcaaatcaaaggtcattggttccagaaatcctcataatacagttaaagctgtcttcaaagcactgaatgcaattgaaacgccaagggatgtccaagagaagtttggcaggactgtggttgagaagtatctcttgtgatagacatggcaatgtggtgagttcagtggcctttggcggttgtcttccattgaatctcttaatttttactttttattcatgtgaatttaccaagaattggaagagagtttccaaaatgctttacttgtgaacattagctatggaattttggctgtaactttttgttcttaaaagcataaggaacaatagtttaggaaggttccttttggttaatgagtttgattttcctcacaaaaggcgtatgagaaatgcttccagaatttgcattatgtagagcgacatgaggagcatacaattgcacatgcagtacaaacgtcatataaaaagaccaaggtttatctctggcctgctcctactacaactggcatgaaagccggcagatcagttgaagccatacttcatttagctggtttaaagaatgtcaagtcaaaggtcattggttccagaaatcctcataatacagttaaggctgtcttcaaagcactaaatgcgattgaaacgccaagggatgtccaagagaagtttggcaggactgtggttgagaagtatctgttgtgatggacatggcaatgtggtcagttcagttgcctttggtggttgtcttccattggatctcttaatttgtactttttattcacgtgcatttaccaagaattggaagagattttcccgaatgcattacaggtgaacattagctatggaattttggctgtaactttttgttcgtaaacacaaaaggaacaatagtttaggttaatgtttgtttttcctcacttttaatgaggcattctacccataccccttttagccggatacaatttacatttacaatctctcaaactcaagccttgaaaaggatagtcaaaagtttgagcacacaactcaatgaatgatgtttagcaaaataagtgttcctttgtctacagagatatatagattggaaacttggttgagtagaaaaa

SEQ ID NO: 30994 - DNA, 228 bp, Glycine max
  Clone ID: PAT_MRT3847_127993C.1
gcacaagtgagtttgttgattgaaaatactagaaacaattttaagaaaatgaaaggtcctgttttcctcggttccaaaattttgggtgcatggcaaatccaatgcgtaacatatgttccctccccgaaataacactggctatggtgcccgttctccggacgttaaattcccaagttggacgcatgctgtggaagcacacaacatctttggcttttaaaccattcctga

SEQ ID NO: 30995 - DNA, 655 bp, Glycine max
  Clone ID: PAT_MRT3847_127994C.1
acgagaccatgaccagagtgacagaatgaatggagataggcctgataattccccatcccatgaagccatgatgggaaaccgtgatgaaacaatgtatgattcatatgcagggccaggtgtaccgccatttgcctctgatatacctcctccaccagtgttgatgcctgtccctggtgctgggcctttgggaccctttgttcctgctcccccagaagttgcaatgcagatgttaagagatcaaggaggatcatcatacgatgcctctggaagaaagatgcactctggccctcctatgggtggaggatcatcaataattgctgttcctccaacttttagaccagatccacggcgaatgcgaagctatcaagatctggatgccccagaggatgaggtcactgtgatagactatcggagtttgtaggttcatctttggtggccgaatctgccatggatactttgctgggggattttattctgagtcatgggtggatagactttaaattgtactacaatttagatttgatttgtatatttgttgaactaaatttcctttccattatatttttgggtggacaatttcctgatttaataaaaaatgtaaaagtgtcaaatataatttcttatttcatatattataaattccagttttttattt

SEQ ID NO: 30996 - DNA, 257 bp, Glycine max
  Clone ID: PAT_MRT3847_127995C.1
cacaccctcgagtttatcacgatcacgatcaaagacagaaccaaaaaggggggcgtaaattgcaatggctatacttgaagaatgcgaatgaaacttgggataaaaggagtagagcatgaacttgtacgcgagagagatggatggtaaacaacttgcgcattaggatctgatcaggggtgggggctgttactgcatagcaacaatggtctaagcttacatttcaattttcatagtggttggatacacgatcctcatat

SEQ ID NO: 30997 - DNA, 388 bp, Glycine max
  Clone ID: PAT_MRT3847_127996C.1
aggccggaacatgagaggccaaattcattacgcaacctccttagatttaaggtagaggactacaaaagcctgaaagaaaaaacctcttccggaaaaaaataaaccactatttacatcaaatggggttactgtataagaatgggggcgcatggagagaaacctatggtccaagccttactccttttgtacgatggtttttaccctcagaaatgtggagcacggcgaaaaatggattgtgtccaatacagcttttgcagaaaaggcctttggaaagaaacaagctcttaaaaaggagaaccatgttttcaacccctctgaagatatcacatctgcgtggaggaggcaagatcggcattctgaaaattacaatgctgcggacaccaagggc

SEQ ID NO: 30998 - DNA, 529 bp, Glycine max
  Clone ID: PAT_MRT3847_127997C.1
gctttgacttgatcaaattgtagataagatgggcggaggaggcggagcggcgacagcgcaagcagaggcgcagtactcgacggcgaagacgtcggtgtggtgggacatagagaactgtcacgtgccgaaaggatgcgatccccacgccatcgcgcagaacataagctccgccctcgttcgcacgaactactgcagccccgtttccatctccgcctacagcgacaccactcgcatcactgccgtcgtccagcatgccctctccagcaccggcatctgcctcaaccatgttcccgccggcgttaaagatgcaagtgacaagaagattctggttgacatgctgttctgggcagaggacaatcctgcacctgctaattacttattaatttctggtgatcgagatatttccaatgcccttcatcagttgcggctcaggaagtataatatccttcttgcacaacctcaagaagcttctgtaccattagtggcagatgctaagagtgtgtggctttggactagtctcttggctgga

SEQ ID NO: 30999 - DNA, 297 bp, Glycine max
  unsure (1)..(297): unsure at all n locations
  Clone ID: PAT_MRT3847_127998C.1
atcatgggtttatttctttgccttgattggggggggtttttttttcggggatgaaaaattttgctacctaaacatgtgtttatttttgggagnnnnctttggtatatacatgcatatccaagggatcttggtacctaaacatacatatatatgttttgggagggatttttgctatatacatgcatatccaagggttcttggtacctaaacatgcatatatatgtgttgggagggatttttggtttatacttgcatatccaagggatctttgttacctaaacatacaatatttatttt

SEQ ID NO: 31000 - DNA, 564 bp, Glycine max
  Clone ID: PAT_MRT3847_127999C.1
cttcaattctcactcttaataagaggaccttatttcttatttgtgagtaatatgttgacaccgtcaagtattctttaagttttgaggattaccctaattctaatgtgtcttaaagatctaatttatttaaacttttagtcgtaaaaaatatattttattagtttatgttataaaaaaagaactgttactcactagacaatagtagtggagaaccatttaaaaagaatatgctttcatatcatgtcatgatactagtcacgcactaaaatcaattcttaataaatctttagtgcaactcgatacctaattaccacaaaagaacataagaaactaagaaaatagttattagtctatctcaaatatcaaactgtgaaacccttataatgtttataatttagctttaccacattcgaaaatattaataaatatttatatttaattttcaaatcatttataacaaaacaatataaatataaaaggatggctaataaagttttgtagcactattggatgataaacaaatactattgaaaagaaaaataaatcatattcaaatattttatc

SEQ ID NO: 31001 - DNA, 289 bp, Glycine max
  Clone ID: PAT_MRT3847_12799C.1
gggaaaaagggccggtttaaatttttttcccccaaaaaagggggtccccccaaccattggggcctgccccaaatgttttcatagggggtaccccttctttttgtattttcccccccctttgttaaaagaccgggcccccctttcgggggtgcataacaatcccccaactcggggcatgcatttgggggggcaaaagttaaacccaaaaacattttaaaattttctcccaaggagcttttgttcccaacaaaaaaaaattttgggggaggccttttttgggccccccccc

SEQ ID NO: 31002 - DNA, 146 bp, Glycine max
  Clone ID: PAT_MRT3847_1279C.1
acgtgtacgttcggtccgaattcggatcgagcagacataatagagtgctacggtgcccctcatggcacagagatagcagcagcagagcatgcagctgagggagcattattgtacctagaagtatacaagatgtatgatggaaaacc

SEQ ID NO: 31003 - DNA, 334 bp, Glycine max
  Clone ID: PAT_MRT3847_127C.1
tggaattcggctcgaggatagagacgagcggtgaatcctatcctccaagactatactacatcttaaccggagcatgcaccttgcatacacttgcctcaccatgctggaaccagtccatgatcgttcacaggaatcaaatcaggtctctcaagtttataacctctacagaataacaataaacatggacatgaaaagagtccttacctgcaataactttttaatgtcaaaatgctgaatatattgtctcatcatgccactactgtgaatcactatatgttaatcgtactgactatcatgttgtcgataatatttgaagactgatttgtgatgtctt

SEQ ID NO: 31004 - DNA, 324 bp, Glycine max
  Clone ID: PAT_MRT3847_128000C.1
gttactagggtttgattgatgggtgacgcagggggttcttacaggaccaatgggagcgccctcctctagaggtaactacccatgaccacccaaagcctaataccattccccaactctctttattttctgaaaggctgacgacctgatcttattacttgccttgcctccttccatgccaaacttataatcccataacgagaagtggactttgaatgcccagatgattttttcattgttaacaaggctaaagaataaggcattgaactttcctactcgtgcaaggatggttctttcgattcatgtgctgggaaaatttataaacgt

SEQ ID NO: 31005 - DNA, 489 bp, Glycine max
  Clone ID: PAT_MRT3847_128001C.1
ggggatatgttcaactttgttcatatacagctgaatcttagcttgacatggtaattgttgtgatgataataaatttgttggtctttaatcccttccagaagttagtgtagaagcctaattttagtgaaatttaaattaaaatggttgattgaagtcatcaacttcattccttttgtgcaattacgctccccaatctgctatattactccaaatccaaaagaatggcacaatattgcaaagaaaggtatgcccttacctaaaaaaatcaaaaaagaccccaccagcatttgtttcaaatgtcaacaaaactaactccaaatttagtagtacaacttaggtcactttcggggcatcttaattctcagccattgcgatcatattcttaaaaagaaatcaataagtcacccctaaatcatagatggacaggactagggaatggcaaatatattgctcattcatcagctagtgatttgtttctagccaacttgc

SEQ ID NO: 31006 - DNA, 706 bp, Glycine max
  Clone ID: PAT_MRT3847_128002C.1
ccacgcgtccgatttggaactgacagacactatcactgcacagcatcgtcaccttagaatctgttgtctgatgcaatctcaggtgcccgcgtttcacaaactaacttccattagctctgtcactttcgagtttccgcaatgaaattccttaaaatcttcaattccaaacccttcaaactccgaactttcaattccctctcccattcccaaacacctcccttctccattcccaccacactcaccgaatccacactcctccattccatcgaatcttctcagtggcatttcatcgaacaggttgccccacacctcactccctcccttctctcttccactctaaccacccttcgccacaacccccaacttgtccttcacctcctctcccatcttcaaaaccaccctcactccctcgacctcgccacctcttccctcgccatctgcgtcctctatcgcctcccttctcccaaaccctccatcaacctcatacaacgtctcattctctctcccacttgcaccaacagaaccattttcgatgagttggcccttgcccgcgaccgcgtcgatgccaagactactctcatctttgaccttctggtcagggcctactgtgaactcaagaagcccatgaggccttggagtgtttctacttgattaaggaaaagggttttgtgccctacattgagacttgcaatcagatgttgagtct

SEQ ID NO: 31007 - DNA, 2746 bp, Glycine max
  Clone ID: PAT_MRT3847_128003C.1
ccacgcgtccgctctcaacctcttcatctcccacgcttcactttctccctccccctccctctccctctccctctccccaccccgagacctcaccctcccctccttctccctttcgccaccacaacgcccaacgtccacataaggaacaaccagctatcattttacattgaactagaaattcatttagaagatcaaagacaaaattttccgattaaaacgtacttaaattgaagaggggttgttggcattgtgcaccaaaaaggaaaaaaaatgtggaggttaaagatagcagatggagggaatgatccctatatatttagcacaaataattttgtggggaggcaaacatgggagtttgattctgaggcaggtaccgctgaggaacgagctcaaattgaagcagctcgtcaaaacttttatgaaaatcgcttcatggtcaaggcttgtggtgatcgactttggcggtttcagattttgagggaaaataatttcaaacaaacaataagtggcgtaaagatagaagatgatgagaaaattacatgcgagaaaattaggagcaccatgaagagggccactcattacctatcgtcactacagactagtgatggtcattggcctgctcatcttggaggttccctcttttttactccaccgttggtcatttgtttatatattacaggacatattgattctatattttcagaagagtatcgtaaagagattcttcgttacatatattaccaccagaacaaagatggaggttggggactacacatagaaggtcacagtatcatgttttgcactacactcaattatatatgcatgcgaattcttggagaaggacctaatggaggtcataacaatgcttgtgctaaagcaagaaagtggattcatgatcatggtggtgcaacacatataccttcatgggggaaattttggctttcggtacttggtatagttgattggtgtggaagcaacccaatgccgcctgaattttggatccttccttcttttctccctatgcatccgggtaaaatgtggtgttattgtcggttggtatacatgcccatgtcttatttgtatgggaagaaatttacgggtccaatcacaccgttagttgtaaatttgagagaagaactttttattcaaccttatgatgaaaatagttggaagaaagcacgtcataaatgtgcaaatgaagatctttactatccccatcattggatacaagatctattatgggatagtttgtatgtattcaccgagcctcttctaaattgttggcctttcaacaagttggttagagaaaaggcacttcaagtaacaatgaaacatattcattatgaagacgaaaatagtcggtatattgccatcgggtgtgtggaaaaggttctatgtatgcttgcttgttgggttgaagatccaaatggagatgctttcaagaagcatcttgcaaggatcccagattatttatgggtttctgaagatggaatgaccatgcagggtattggtactcaatcatgggatgttggtttcattgttcaagctttacttgctactaaccttatagatgattttggacctacaattgcaaaagctcacgatttcatcaagaaatctcaggtaagagaaaatccttcgggagattttaagagtatgtatcgtcacatttgtaaaggctcatggacccttgccgatagagatcatgcatggcaagtttctgataccactgcagaatgtttgaagtgttgtctacttttatcagtgctgccacaagatattgtgggagaaaaaatggaacttgaaaagttacatgattcaatcaatttgatactgtcacttcagagtaaaaatggaggtatgactgcgtgggagcccgcaggagcttataaatggttggaactactcaatcctacggaattttttgctgacatagtagttgagcacgaatatcttgaatgcactgcatcagcaattcaggttttagtgttgttcaaaaagctttaccctgagcatagaaaggaagagatagagaacttcattgctaaagcagtaacattcattgaagatacacaattagagaatggttcttggtatgggaattgggcagtttgtttcacttacagctcttggtttgcacttggaggtctagttgctgctggcaagacttacacaaattgtgttactattcgtaaagctgtgaaatttctactcaaaatacaaaataaggacggtgggtggggagagagttatctttcttgcccaaggaagatgtacgtacctcttgaaggaagtcgatcaaatgttgtacaaacatcatgggctctaatggctctaattcatgctgagcaggctgagagagatccaactccccttcatcatgcagcaaagttactcattaattctcagttagaagatggcgattggccccaacaagaaactcttggagtatacttgagaaattgcttggttcattactcattctatagaaatatttttccaatgtgggctttggctgaataccgcacaaatgttttattgccttcctttactatttaagttgaaaaattgtgagctcaaaaagataatgtcataccaataaaagtctagaaaaagaaaagttggtaatgaagtttaataggcttattcatattcccatacttttgtaattttgaaacaaatatttcgtatacattgtcagggactccaaaatttatcatacataacgaggggctctttttgcacc

SEQ ID NO: 31008 - DNA, 774 bp, Glycine max
  Clone ID: PAT_MRT3847_128004C.1
ctctcaacctcttcatctcccacgcttcactttctccctccccctccctctccctctccctctccccaccccgagacctcaccctcccctccttctccctttcgccaccacaacgcccaacgtccacataaggacaaagcgtttgctttagctagatgagatcaatctgaagcaaatggttataatttcaaaattttaagagtggaggacctgtgttgtgcacgttagagtgaatcgttcaagattaatccttaacaacctgaccaccaggaacaaccagctatcattttacattgaactagaaattcatttagaagatcaaagacaaaattttccgattaaaacgtacttaaattgaagaggggttgttggcattgtgcaccaaaaaggaaaaaaaatgtggaggttaaagatagcagatggagggaatgatccctatatatttagcacaaataattttgtggggaggcaaacatgggagtttgattctgaggcaggtaccgctgaggaacgagctcaaattgaagcagctcgtcaaaacttttatgaaaatcgcttcatggtcaaggcttgtggtgatcgactttggcggtttcagattttgagggaaaataatttcaaacaaacaataagtggcgtaaagatagaagatgatgagaaaattacatgcgagaaaattaggagcaccatgaagagggccactcattacctatcgtcactacagactagtgatggtcattggcctgctcatctttggagttccctcttttttac

SEQ ID NO: 31009 - DNA, 239 bp, Glycine max
  Clone ID: PAT_MRT3847_128005C.1
tttgtctctcaaacatttactatatgaaaacaaccttcagaagtttgaatttcatccaatacatttttaatctttgcttctgtgtttctttactgcaacaaattcatgggttctgctactgaaatcatgtcactcccgtctcatgtggccccagttacaattggtgttgcttctcctcttgattctggtcttgcccgtcttcttgaacttggtcacaaacaagaactctagcgctttct

SEQ ID NO: 31010 - DNA, 687 bp, Glycine max
  Clone ID: PAT_MRT3847_128006C.1
gtcttaaatctcatccaatagttaaaactataaacagcatccatgctccctatttcaaagggagcatgttagaaagcatttacattcacttgcaagtgtactacaaacatagcagccaatacattcgaagtactaaaggtaggatatgattaatgacacttagaatcttccgtctagtaagtaggccgagtttatcatcatcataactactattatttcaaatggagaatcatcaaaatcatggatgatcttgcatgaaaatggaccttccattacaagtccgactatataacccttggctttctactttacaattttcccatatgcccattatattgagtaaatgaaattggtccttccaacaaaattgaattttaagtccttcaaacaaataagagtttctagacctgacagctttaatggtaggctaagggggctgcatcataacagtattgaaagcattcaaggatctttgctttgctaagaagtgtccgtccagaaaatttttccgaacattaacggtccacacacaggccacacacaccatggtacacattattcaaacatggttttcctgtacatgccttttgctgtccctctcagtatggcctagccgactgaccttgtttcgatccttcacgtaatcaaaacgattattgtgggtttggtccaaggccataattatga

SEQ ID NO: 31011 - DNA, 467 bp, Glycine max
  Clone ID: PAT_MRT3847_128007C.1
ttttttttttttttttttttttttttttttttttttttttttttgtttttttttcaggggaaaaaattggaccttctccgggttgacaagggcaaaaaaaatggccaatctggtgggggaaaattttccaaccccccttttgtgggtggaaaaaaaaaaaaaccttcaacttttccgggttaaggccaaaaagccccttttttggcccaccaaattcctccacacgctattttatttaaaaccggcaattgcccgtaaggaaaaaaatctttaaaggaggggtgcaagtccacctttgtccgtccccccagagaaaccaacccccctttttttgtacccttgggcaaaaccccaaatccaggggtcagaagtaaactaattttgcgaacgggggccttgcctgaagaaaaaaaggttctcgggccctcccctttgataaaaaaaaaaaactccttgctccccccccc

SEQ ID NO: 31012 - DNA, 257 bp, Glycine max
  Clone ID: PAT_MRT3847_128008C.1
aaaaaaccaaaccttttttttttttccggcctttttggttggaaggcgggttgggaaaaaagagaggggggttacccttttctggctggggccttcccaccaaaacctgccaaagggggagggtttcctttttggcaacccttttaggtccctaaccctaattccccccggggttttacccaattctggaaataattccggcccggaaaaccttattttaagcccccaaccctaattccccaagaggttcccttggg

SEQ ID NO: 31013 - DNA, 583 bp, Glycine max
  Clone ID: PAT_MRT3847_128009C.1
tacaattagtagattcttgttaaacccaggtagagagcattggaatgttgtgagatggattttgaggtatcttcatggtactgttgatatgaggttttgttttggtggtgataaacctactttggttggatactctgactcagatatgacgagagacattgattctagaaaatccacttcgggctatttgattaaatttgcagggggagctgtgacttggtagtccaagctacaaaagtgtgtaactttgtctactataaaggcataattcattgtcattatcgaagcatgcaaggagttcctatgggtgaagaaatttttgtaggagcttggttttgttcaggataaatatctactgtttgtcgatagtcaaagtgctattcattttggtaagaactcaacctttcattcaaggtctaagcatattgatctgaggtatcattggatacgagatgcttttgatgctaagctgttggagttgaccaaaattcatactgatgataatggtgctgatatgataactaaggcattaataagagggaagtttgaagtttcttgtgagatctgccggtttggcagtcac

SEQ ID NO: 31014 - DNA, 405 bp, Glycine max
  Clone ID: PAT_MRT3847_12800C.1
cgtctctagtgcatgtgctgctacctgccagccttggaggaatatgtgcgacggacatcgctaatagcccgcaggcttgaggcgcactgacatgttgctgtgtccttgaggcgactctgagccacgggatggaatcattcgatgtgtgatcagctagagatagatgctgtctaccataccacctattcctttgtctcatccctgctttgctaagtgcacatggtaaattactcctttctgctgggaggacacggagaactactcacacagaccacgttattgccatggatgctgacaacatctctagatccagctactcttacagctgtagagctgagatcaaattgtcttgctacaacattcattatatgctatacacacactccatactgttgtaggcatata

SEQ ID NO: 31015 - DNA, 2761 bp, Glycine max
  Clone ID: PAT_MRT3847_128010C.1
ccagttttctggttctgttccctctagggtttggtctttgagtgctctcaggtctctggatttgtctgataacttgttggagggagagattcctaaggggattgaggcgatgaagaatttaaggagtgttagcgtggcgaggaaccggttgactgggaatgttccttatgggtttggaagttgtttgcttttgaggtccattgatttaggggacaattctttttctgggagtattcctggtgattttaaggaacttacattgtgtggttacattagcttgcgcgggaatgctttctcgggaggggttcctcagtggattggggagatgagagggcttgagacgttggacctttcaaacaatgggtttaccggtcaggtgccaagctctattggaaatcttcagtcgctgaagatgttaaatttttctggaaatggtctcactggtagtctgccggagtctatggcgaattgtacaaaacttttggtgttggatgtcagccggaattcaatgtccgggtggcttccgttgtgggttttcaagtcagatttggacaagggtttgatgtcagaaaatgtacagagtgggagcaagaaaagccctttgtttgccttggctgaactcgcgtttcaaagtcttcaagttttggatttgtctcacaatgcattttctggtgaaatcacgtctgctgttggagggttaagcagcttgcaggttttgaatttggcaaacaactctctgggaggtcctataccacctgccattggtgagttgaaaacatgttcaagtcttgatttgagctataataagctgaatggaagcataccctgggaaataggaggagctgtgtccttgaaagaacttgtactggaaaagaacttcctaaatgggaaaattccaacgtcaattgagaactgctctttgctaacaactttgattctgtcacagaacaagctgagtggtccaatacctgcagcagttgcaaaacttaccaacctacaaactgtggatgtatcgtttaacagtcttactggagcccttcctaagcaattggccaaccttgccaatcttcttaccttcaatttatctcataacaaccttcagggtgaactgccggctggtggttttttcaacaccattacgccttcctctgtttctggcaatccatctctttgtggcgctgcagtaaacaaatcatgccctgctgtcctcccaaagcctattgttctaaatcccaacacctctactgacactggtccgggttcattgcctccaaatttgggtcacaaaagaatcattctcagcatttctgcactcattgccattggtgcagcagctgtcattgtaattggtgttattagcatcactgttctcaatctccgtgttcgctcctctacatctcgtgatgcagctgccctcacattttctgcaggggacgaattcagccgttccccgactacagatgctaactctggcaagcttgtcatgttttcgggtgagcctgatttcagttctggtgcgcatgctttgcttaataaggattgtgagcttggacgtggaggatttggagcagtgtaccaaacagttcttagagatggacattcagttgctataaagaagctcacagtgtcaagccttgtcaagtctcaagaagattttgaaagagaagtgaagaaattaggaaaaatcagacaccaaaacctcgtggaactcgagggttattattggactacatcgctgcagctgctcatatacgagtatctctctggtggtagtctctataagcatctccatgaaggatctggtgggaacttcctctcatggaatgagaggtttaatgtgattctcggaacagcaaaggccttggcacacttgcaccattccaacattattcactataacattaagtcaaccaatgtccttcttgatagttacggtgaaccaaaagtaggggactttggcctagcaagactgttgccaatgcttgatcgatacgttttgagcagcaaaattcagagcgcactcggctacatggcgccagagtttgcctgcaagacggtgaaaatcaccgagaaatgcgatgtatatgggtttggtgtcttggtcttggagatcgtcacagggaagaggccagtcgaatacatggaggatgatgtggtggtactatgcgacatggtgagaggggctttggaagaaggcagggtggaggagtgcattgatgagaggctccaagggaagttcccagcagaagaagctattcctgtgatgaagcgacatggtgagaggggctttggaagagggcagggtgagaatgcatgatgagaggctcaagggaagttcccagcagaagaagctattcctgtgatgaagttaggcttaatatgtacttctcaggtgccatctaacaggcctgacatgggagaggtagttaacatattggagctgataagatgtccctctgaaggacaagaagaattggcatgaattaacttgcgattttctttattaggaggatagacaatgggttgtccggggaagaagaatccggttttatttattataagagagagaggaattattttgttgcaaaatgtttactttttcattgtattttttcccttgttaattagtctctagttgtttgttttaagatttctcgtgttatgctactacacctaggatgccggattccttttcaccgggttccgttttggaccccccccccccttgaaaattgttgctgaattactgatctttcataaa

SEQ ID NO: 31016 - DNA, 289 bp, Glycine max
  unsure (1)..(289): unsure at all n locations
  Clone ID: PAT_MRT3847_128011C.1
gtctgaaaaccgaaaatgaagttttagtactctgtttagagcagtattacacaatcttgcgttgcgttctctatttacaaacgcaattgccaggaaacaatctcaatctcaatatgttttcccaccacaaaatatgaacctaaactcataccagagggaccagttgtgttccctaccactctttcgttctgatcaagcattgccgataacctctttaccttctctacctttgaagcattctcgaccatgtcttcttnccagttaccttcctcaagtcctgattttgaga

SEQ ID NO: 31017 - DNA, 408 bp, Glycine max
  Clone ID: PAT_MRT3847_128012C.1
ttttttttttttttttttgtatacaaagatcaaaggtgttgtatatacacaaatatacatgaatctaccacaactctctataatctgaagtctgtcaattaaatatcacataacaattcttgtatatgatcattaataaaaatctaccactaacgtacctacgtacattgatgttttggccgcctctatctattttctttcacttttcttcaccttaaccaaatgggttcctcgttgatggtttccaatgcaggcttccttgacctacaataactaaacctattccgaaaccctgactcaacctctaccccttccaagctcaaccttgggacatcatcatttgttccaacaccttcagctaaatgatcacatgacattaaatctttgtcgttagttatccgtttcgcg

SEQ ID NO: 31018 - DNA, 732 bp, Glycine max
  Clone ID: PAT_MRT3847_128013C.1
ccggaattcccccgtcgacccacgcgtccgcacttttgtaattgttgttgttcctcgtacggggttggttttgttacgcgcgatgatgacgtggatctgcttgtttcgttgcaggggagattgaggaagaaaatttcaatttttttcctcttttatttggtgtttcttttttgttgtttcaagaaaactttgattttgaggaattaagggttgggatttatgtccttcaatcaatcaaagtccgataagagcgacgctgtgtaccgaaaatccgggcgacccggcagcttcaatcagcagcgcggtccctccggcggtgcgtacggcaagggcggcggtggcggcgccgggccttctccgtcgctctcctctaaccggagttttaacaagaagtctaataataatgcacaaggtgggcaatctagggtaaaccctactccggtgaattcgactgagtctaatagtacttatgcagcccggactgtaccaaacggttcccatgtacagccacatattcatggaggatctgatgcaccgattacaaatgcaactgccaagccatctgaatcgttggctgcacagaggagcaccagaactgttccaaaagctcctacttctcaacctcccgccatgagttcttatccagcagctcctacaaccccagctaaggatgcatctaaggcattccctttccattttggatctattagtcctggctttatgaatgggatg

SEQ ID NO: 31019 - DNA, 749 bp, Glycine max
  Clone ID: PAT_MRT3847_128014C.1
cttttattttgatccccgttaagctctgttccaagcttacagacacttcatttttaatcatcctgactttgcaaaaccctcgggaaagagccagtttcacttgggaggccgcaagcaccgaacgtaaaaacgaagctctggtcactcacgaagcgtgattagcatactcaatggccgattctggcttcactagtaacaggagggatcccattaagtcctcagttgggaatgccgcggctagtaggagacgacagcatgcagtcacagtggggaaagaaaggagggaatcgctgatgcgcgcgaaaagattctgtagggtgggcattgatggcggcgatggcggtgatggcgaagtttccgttgacagtgacatgttaattgaagaagagcaatccattttggagtctcagacttcagcggcagtggaaaatttgaaatctgccattgcttttcaagggaagggtgcagtgaagaaaagagtgggggctcttcaagagttaaggcgtttgctgtcaagatctgaatttcctcctgttgagtctgctattaatgctggagctgtacccttgcttgtgcagtgtctttcatttggttctccagatgaacagttgcttgaggcagcttggtgtctcacaaatattgctgcagggaatccagaagaaacaaaagctctgttgcctgcattgcccttgcttattgctcatcttggggaaaagagctacccacctgttgctgaacagtgtgcttgg

SEQ ID NO: 31020 - DNA, 572 bp, Glycine max
  Clone ID: PAT_MRT3847_128015C.1
ttcggctcgagagcagaaccatctctatgttcaagagttttgcagccccatgacaaatttcttatatttgcatctgatggactttgggaatacatgacaaatcagcaagcagccgagattgttcagaagaacccacgaaatggggttgcaagaaaacttgttaaggctgctctaaaggaggcagctaataaaaggaaaatgaaatataaagagcttcagaagattgagaaaggaaacagaaggatttttcatgatgatatcactgtgattgttgtcttcatagaccatgagttgctcgggaagaaaattactgtgccagagttgtccatcagagggttcattgactcggctggaccgtcaaattttaaaagtgtccaggagtttatgtgatacaaggaattattttttctagaactatagcaaataaagttggttggctctgcctaattttggttaaaaaggaaaacaagaatctataacatttcacttgcacacagctttgcagcatactgttattgtctctattttgagcatttcttggcatctatcaaagttctcctatttttagctaa

SEQ ID NO: 31021 - DNA, 353 bp, Glycine max
  Clone ID: PAT_MRT3847_128016C.1
cccattgttgcgaacccccacgcgagcgggaagaaagggaggccgtttaaacagcgctgccgcaacttttcaccggaaagaagggctgaacgggcgggggggcaagaacaaaagcaagcgctggctacgtctaggcggacgactgcgaaagggaaagaaaaagacactgtgggcaggccacagactgcgggaagcactatgtcttccactctcagaaaatgtgcagaacactctcctatatgatataggactgcgggtcagatcaaaactaattgtggggctatctcagttctgtgcttaataccaagaacaagctggcgaaattatggattagtgctcccactctacgatct

SEQ ID NO: 31022 - DNA, 1049 bp, Glycine max
  unsure (1)..(1049): unsure at all n locations
  Clone ID: PAT_MRT3847_128017C.1
tcgaattggggataatcaattctctgggaagatacctaattttattcaaagcttgacaagtctccaaaaactagtgattcaagggagtggattaagcgggccaattccgtctggaatttcatttctagaaaacttaacggacttgagaattagtgatctgaatggatctgaacattctcttttcccacaacttaatcagatgaagaacttgaaatatctgattctaaggaattgcaacatcaatggaacactacctccatatcttgggaatatgacaactttaaaaaacttagaccttagctttaacaaattgactggaccaattccaagtacctatgatgccctaagaaaagtggattacatatatttaactgggaatcttctcaatggacaagtacctgcatggacagagaaaagtgacaatgtggatatttcatttaacaacttcagcgtcacaagccaagggagtacatgtcaaattggaaataggaacttgtttgctagctctatgacgcacaatgactcaggaacagttgcatgcttaggaagcagtgtctgtcaagaaacgttatattctcttcatataaattgtggtggaaagatagtaacagacaatggaagcacatatgatgatgattcagatactggaggtccagcaagatttcaccgaagtggaacaaaaaattgggcatatatcaatactggtaactttatggataatgacgctggcgcctattatatcgtgcaaaataaaactttgctttctatggacaatgttgacctatacatggatgctcgagtttctcccatttctcttacttactatggattttgcctgggaaatggaaactacacggttaatctacattttgcggaaatcatgttcattgatgatcaaacatttaacagcttaggaagacgagtatttgacatctatattcaggtatatatatactcaacatttttttacccttgtcatggcgttttttcatatataaaatgaaggtggtagcttgatttattanngaaacttttgaatatttcatact

SEQ ID NO: 31023 - DNA, 295 bp, Glycine max
  Clone ID: PAT_MRT3847_128018C.1
atgtgactatgggtctattttatgtttaaattaaaaacccataccggtttaggaacatacttcacacataatatcaaaatgactttgacaacttaaggggatatactacagggaaccctcaaaccagtcacacctggctctgagaaaggtatcaaaagctcgaacgcgacaatgccagcaccaaaactgttgtgcaacttagcgttaacatacctctcatcaatcaggggccctagtttcttcagacactctctaaatctcccaaaggaagcctttatgacaggagccccacccc

SEQ ID NO: 31024 - DNA, 2629 bp, Glycine max
  unsure (1)..(2629): unsure at all n locations
  Clone ID: PAT_MRT3847_128019C.1
tcgaattggggataatcaattctctgggaagatacctaattttattcaaagcttgacaagtctccaaaaactagtgattcaagggagtggattaagcgggccaattccgtctggaatttcatttctagaaaacttaacggacttgagaattagtgatctgaatggatctgaacattctcttttcccacaacttaatcagatgaagaaactngaatatctgattctacggaattccatcatcgacctggaatccggccttcttagcttgggaatatgacgcaaattcaaaaaatggtactttcctttaacaacttgattggagaattacctttaaccttagtaaagccgactacgttgcaggatattcgaattggggataatcaatgttctgtgaatctatgacgttttatgacaagcgaacagttgcatgcttaggaagcaatgcatgtcaagaaacgttatattctcttcatataaattgtggtggaaagatagtaacagacaatggaagcacatatgatgatgattcagatactggaggtccagcaagatttcaccgaagtggaacaaaaaattgggcatatatcaatactggtaactttatggataatgacgctggcgcctattatatcgtgcaaaataaaactttgctttctatggacaatgttgacctatacatggatgctcgagtttctcccatttctcttacttactatggattttgcctgggaaatggaaactacacggttaatctacattttgcggaaatcatgttcattgatgatcaaacatttaacagcttaggaagacgagtatttgacatctatattcagggagcgctagtgaagaaggactttgatattgtagaagaagcaggaggaattggtaaggcagtcatcacatcattcactgctgttgtgactagtaataccttggagatccgcttgtattgggttggaaaaggaacaaccagtcttccatttagatcagtatatggtcctcttatatcagctatatctgtggaacctgattttacacctccttcgaaaaacaaaagtagcatatctgtaggagttgtggttggagttgtggcagcaggagcagttgttatcatccttgtacttggtatactttggtggaaaggctgcttcggaaagaaaagttctttagagagagagctacaaggtttagacctgcgaacgggtttgtttactttaagacaaatcaaagcagcgacaaacaactttgatgttgccaataagattggagaaggaggttttggtcctgtgtacaagggatgtttctcagatggaacactaatagctgtcaaacaactttcttctaaatcaaggcaagggaatcgtgagtttttaaatgagataggcatgatttctgctctgcagcatcctcatcttgttaaactctatggatgttgtgtggagggagatcaactattgttggtatatgaatatatggaaaacaatagtcttgctcgcgctctatttggcgccgaagaacaccaaataaaattggactggacaacaagatacaagatttgtgttggtattgctagaggtttggcatacctccatgaagaatcaagattgaagattgttcatagggacattaaggcaactaatgtgttgcttgatcaagatctcaatccaaaaatatcagactttggtttggccaagcttgatgaagaggacaacactcatattagcacccgaatagctgggacatttggatatatggctccagaatatgccatgcatggttacttgactgataaagcagacgtctatagctttggaattgttgctttggaaatcataaacggaaggagcaatactattcaccgacaaaaagaagaatcattctctgttcttgaatgggcacatctgttgagagagaaaggagatataatggatctagttgatagaagattaggtttagagttcaacaaagaggaggcgctagtgatgatcaaggtagctctcttatgcactaatgtgactgcagcacttaggccaaccatgtcatcggtggtcagcatgctagaaggaaaaattgttgttgatgaagagttttctggagagacaactgaggtattggatgagaagaaaatggagaaaatgagattgtattaccaagagctgagtaactcaaaggaagaaccatggacagcttcatctacttctgtagcagatctttatcctgtgggcctagattcttcttacttggagaagagagattaaagactttggagaaaagttgctttaattttgtattaattattttgttgtgagtttatgtgcaaaattcatttctttcttgtaaatctatttgtgattgtttgaacgtgtgcaaatgtatgcatcagtagctttggttttttattttttatttttatgtttaattatttaccaagttttaaggagtttgttgttaggttgtctgattgttatgtgtgagtaacttagcagcttaagcttagttgctgaagtttagctagttagttgttattttcagtttttcagttttttaacttaatctatttaagcaatatctgatgcaatcaataaaagtgtgcatttttgttatttccaataatctctaaaaaaaaaaa

SEQ ID NO: 31025 - DNA, 333 bp, Glycine max
  Clone ID: PAT_MRT3847_12801C.1
aacgcaaaaactctaatgcttggccttttctccttcccactctcttattcactctccttggaacctctcacgccggtggcatagccagctactggggccaaaaccggaacgagggcaccctttcagaagcatgtgcaacacgcaaattcccacacatgaaccataagcctactcaacaaattcttccatggcaaaaccccataaatgacccttgatggccactgcaaccccaaacccaattcctgcacaaagtccaattctgaaatctcggactgccaaagtaaaggtctcaaggtgctgcttccaattcgcggtgggattgaaagcttacac

SEQ ID NO: 31026 - DNA, 361 bp, Glycine max
  Clone ID: PAT_MRT3847_128020C.1
ctcgtattgtacaagtacatatcccgaatctagaaaatactcacagccgggaacaaggtaaaacaacagcgccaccagaaaaaaacctttacaatacgcaagactcaaataggaaacaacaatactttcaatcaattgttttgcctgcatatgacattcaattgctacttagatctggatacttaaaccacgagcaacacaaattatcaactataatatccaacaagatatatcacatgcttactggcatcgatgcattgatattgcaaccatacatcactgcagctaatgaaattgctaaccggtctgaggataagccctaaaatgctgagtcatggcgcgagggactaaaaagagaaaa

SEQ ID NO: 31027 - DNA, 572 bp, Glycine max
  Clone ID: PAT_MRT3847_128021C.1
gttcaacttcaaagtagctagctagctcccatgatggatcaagaggtagaaacgcttgaagcgaagctgcaacgtgtgaaggaggataatcgtacccttagagagatgctggaaactctgagcagcaaatgcgagaagcttcagtctcatcttcaagagatcaataatgaagaacaagaagtgagcacaaaatcagaccaaagtggatcagtattattagctagagccgagtttcccatagcacaaaagccatcacaaatctttgttaaaacccaccccaaggacaatagtttggtatgccgtatgcctattaattaattacttgtgattaatgctcaaatactgtcaggaacttcatacatttcacacaaattttaattccattgggaatatatatagatggtaaaagatggttatcagtgcaagaagtatggacagaagaaggttaccaaagacaatccctcgcctagagcttattacaagtgctacctggctcctagctgccccgtcaagaaaagggtgcaaagaagcttacaggataagtctttccttgttgcaacttatgaaggaaa

SEQ ID NO: 31028 - DNA, 278 bp, Glycine max
  Clone ID: PAT_MRT3847_128022C.1
ctcgagacgcggtcaactgaaacacttggatagtaattcaccttgtgccatcgcccatgagcagtccattctacacccacttcatcgaataattctagaaaccttgtttccttacttgctcagtcatttcttattgaaattgaaagaattctattatccatattctcttcttctagtgggtgagtcaggcgcgctctagcatgcatactcagacatattcgagtactttcaatgtgtgtctatcatatcatagatttgggacaaactcgcagtcatct

SEQ ID NO: 31029 - DNA, 572 bp, Glycine max
  Clone ID: PAT_MRT3847_128023C.1
ggctcgtggcctcctcagacccgtctggacagatggggagggtcataaatgttgatgtgttggtggacttggaaaatgttcaaggaaagaaattaaaaaatgtgaactccaagaaacttatgaagattcgctccatttcagaaggtaattgtgtaattaagggaccatggattggcctggttcagagggtagtagacagagtgactatattgtttgatgatggaactaaatgtgaggtcattaccttggaaaaagataagctgttaccactgactcataattttcttgaagatttgcagtgtccatactatcctgggcagagagtaaaggttaatacctccacagcttccaaaccagctagatggctgtgtggcacttggaaagacaatcatgatgaaggaactgtttgtgctgtggaagcaggtttggtttatgttaattggcttgcctctgttcttttgggctccaattctaatgtgagtgttcctccatgctggcaagattccaaaaacttgaccttgttgtgctgtttttcacatacaaactggcaacttggtgactggtgcatgctc

SEQ ID NO: 31030 - DNA, 213 bp, Glycine max
  Clone ID: PAT_MRT3847_128024C.1
cccacgcatccgttctattagagaaaacatttccttcttcctggattccagacttactaggcacctcctttggagcctccttttgaactacatttccccctcgtttttttacaacctaatggccaataaaaccccgtgaacccacaaaatagctttttcccaaaattttttgccttcaacctctgcaacccctaagacgaaaatttaaacctt

SEQ ID NO: 31031 - DNA, 370 bp, Glycine max
  Clone ID: PAT_MRT3847_128025C.1
gtaagtttgtgctgcgagagagaggggttccgttctgggatatggtgtagactaaaattctgaatgtgtagacttgtaaggtgtgccagcttgcagaacttggcatctgcctttttgagtgtacctagtcgcatcttcacctgatctgctcttagcaccttgtgttatcgtctcctcgtatctaggcttaggcctaggcatgcaccccagcctcagtcaccatcctgacacttaccaatagtcagcatggagtcgtcaaagatctacgcttacctcttcctctgcaagatcattctctcttccgccactcgcatccacggttgtggctgctgtggcaaaacccccttaaagcagaagcctggtaaaacac

SEQ ID NO: 31032 - DNA, 174 bp, Glycine max
  Clone ID: PAT_MRT3847_128026C.1
gagatggcggcgtatgtattgtcttgaggctgtaagtcaactatgttcagaagctgtgcgttagtaagtgttacatgtggtagtggacgtggtggtttactcaccactgcttggatgagttctgcagttgatgatcgctcctcagatatcaactctgagattcgcacaccactt

SEQ ID NO: 31033 - DNA, 809 bp, Glycine max
  unsure (1)..(809): unsure at all n locations
  Clone ID: PAT_MRT3847_128027C.1
ctccttgcttactactgtaggcacggacaatgcgctctgatcctagttgtccaagtagtgagacgtgtaaatgagtctggtgcctttctttctttgagcattagatgccaggctcagtgcatattgccgacgattctgatcacggacatggttcagatgacaacatacatggcccgactctgcatataccggatacaggttgagagtgaaagtgctgctgttgtacttgctctagagttcctggccagaagactacatggctgtgtacctgactgctctgcagctgctaacagatgatgcatgatgatcgtgcactaaatactgaggctgctgacacactgtgctacgggaactattcatcctatgatgccctctgaagctctatgttgcgcgttctggatggacattgcgttgcggtcatgggatcccttccggaagaggcataactgttgcgtgatacgagacatattgttgatgcgtctgcaacacaactggacattttgctgtgttctgagatagctgtatctgtctattctttggcgtttgcgagttcctgcggttaaaactgcgttcttcccgaagaagctttggttgtctaaggcttgcgtggggacgccccttctcgccgcccttctgaggtggcccttatacccctttcccccaacgcaaaacccacaatacccccccttccccccggccacccctcctccccccccccccgccctncccgcctcaacactccctccctccccccccccccccccctccccaccccccaaacccccgctccccccccccccctccccccc

SEQ ID NO: 31034 - DNA, 778 bp, Glycine max
  Clone ID: PAT_MRT3847_128028C.1
ggtcacgggcaaccaacagacacgcataatctagggtttgttcgttggttcgcaacaatggcgatgaggagattgtagagcaaagtaatcgcaaaatctagggtttgttcgttcgctcgttcgcaacaatggcgctgaggagattctacaacgagatcaaggggaagagggtgagcgaggtccctgagcacgtgaagccgatgctgtccctgagctacatcaagaaagcgattcagagaggcttcgacaattaccatgccaagtacattgaaaccagttcccctgatcccatcttccatgtctgctacggcggcatgatcttctcctacctcgtcgctctcccccacgagcgccgccacctcctccacgcccaggagcacgctcagcagcatcactgattccatccaccttcaggatcctggttgaattggaggtggttggcttgcttgatctttgttttaaaatctgaaaaatcaaggcagaaagatactgtcagcttctgtgtatttcatcatttggatgataaaataagttctatttgatacaattctcaattttcttgcagttaaatgtttaattgaatgtgtgaaaaatgagcatacttttttatttggttctgtcttttaggtcctcttgatgtggtgatgtaattttgcaactgttcaaattatgggataggtttcatatctcaaacaaatcatagacagtgcgcctaagttaaatttttttaaggcaaatctgaataatggatttaatctcttggaaaaatttaacaaaa

SEQ ID NO: 31035 - DNA, 282 bp, Glycine max
  unsure (1)..(282): unsure at all n locations
  Clone ID: PAT_MRT3847_128029C.1
gacatcccgcaggagcagcctaaatattttttttcaggcttgtgttttttttctctggaggggaaacacaaaatttaggcttgtgttttttttggacgttgcagttgtgttcccctccatggacgttgcagcattcacaagtggatgttccccttcctctgcaagcgtagccgctgtgatcttctactaaagatagatctgctttaattcttatcatttttggtattctaaaattttgatgtagatctngtcaccattggacaatgtaaggaattatgatgc

SEQ ID NO: 31036 - DNA, 256 bp, Glycine max
  Clone ID: PAT_MRT3847_12802C.1
gtttggtcaggtgatgaggatccgacccgtttccgcatcttcatagcgcattttcgagaaagtgggggagaacataaagaacgctctagaagcgtgcgccggcgacccgaccatcggcaagtgcattggcgcgttggacgaagtggaggagctgaccgctggggcgagccactccaaatacaaacataaggggaaggacttctactcgctttaaacctactgcaaggacaattctgagaccattgattgcaaaact

SEQ ID NO: 31037 - DNA, 445 bp, Glycine max
  Clone ID: PAT_MRT3847_128030C.1
cgcagagaaaatgtcgaccgacctgcaattgaagtcgagttgtagcggatgcggatcaacgacggatctctacggaagcaattgcaagcacatgactctgtgcttgggctgcggcaaaaccatggcggccaaacgcgccaaatgcgttgattgtggcgccaccctcactcgtttgattcgagaatataatgttcgtgcaagttcccccaatgataagaattacttcattggaaggttcataaacggtttgcctgatttttcgaagaagaaaagtgctgagaacaagtggtctctgcagaaggatggactacacggacgccaaattactgatactttgcgggagaagtacaagaacaagccttggctcttggaggatgaaacaggtcagtcccagttccagggtcatctagaaggttcacaatcggctacatattacctgctaatg

SEQ ID NO: 31038 - DNA, 332 bp, Glycine max
  Clone ID: PAT_MRT3847_128031C.1
tgtatttaatcatgcctttttgggatcaacagcttgaacgtcaggccacccattcaatttaagggaaactttgccatggaacatgccgaaggggtatcgggacacaacaaaataagcacggaaagtacgaatttgttcctttggcatacaagcaatttctggacacatgaactcgttggcgaacaaaattaagaaaaaggccaatgatgtcaacaaacaattattttgggttcgttaagacaccaacaagggcatttgtgcacaacctgcacgcttgaattgtgtctgacaagttaaagcagctctggcagcatctattacgtaactccaca

SEQ ID NO: 31039 - DNA, 1651 bp, Glycine max
  unsure (1)..(1651): unsure at all n locations
  Clone ID: PAT_MRT3847_128032C.1
ctcatgctctcgaaattcgctttgccctccctctctctccctcggctccagcccaaaccctctctctccctctctcccagaaaccaaaaacctaacaagacaaaaaaaaaacaaacaaaccctaacccctctctcatggcttcctcactcttccaaccttctccgtcttccgccatgactctctcttcttcttctacttcctcttcctcttctctcttcaccggcactctccgaaccttaggtttcgttgatcattcccgcgcgagaatctccgcgcctaacaccaaatgtgacatgtcggaatcgtcgatattcgtcaacgggaaaccgatcattccggttcttaacgaacggactctgccgaagttcatggaatccgcgagggaggcgaagaccgtcagcagaaacagtaaccggttgaaattgttctctggcagggccaatcccactctctctcaggaaattgctcggtacatgggcctggaacttggaaagatttccatcaagcgatttgctgatggtgaaatatatgtccagttacaagagagtgttagaggttgcaatgtttaccttatacagcctacctgccctcccgcaaatgagaatctcatggagcttaaaataatgattgatgcttgtcggagagcatccgccaagaatatcactgctgtgattccatactttggatatgccagagctgatagaaagactcaaggacgtgaatcaattgctgctaaacttgttgcgaaccttattacaaaagctggggcagaccgtgttctcgcttgtgaccttcattcagggcagtccatgggttactttgatattcctgttgatcatgtacactgtcagcccgtgatccttgattatcttgccagcaagacaataagttcgagtgacttggtggttgtttcccctgatgttggtggtgtcgcaagagctcgtgcttttgcaaagaaattatctgatgcacccttagctattgtagacaaaaggcgccatggacacaatgttgctgaggtgatgaacctgattggtgatgtaaaaggaaaagttgctgtaatggtggatgatatgattgacactgctgggaccattgctaagggtgcagcactattacatgaggagggagctagggaagtgtatgcatgctgcactcatgccgttttcagtcctcccgcaattgagaggttgtccggtggcttgtttcatgaggtgattatcacaaacaccattccagttgcggagaagaactattttccccagttaactattcttactgtagcaaaccttttgggtgaaacgatttggcgtgttcatgatgacagttctgttagtagtatttttcagtgaacaatcagttacttttggagttaatttaatgaataaatgcttttttttttatatgataaaaaaaatttatttataaaaaaaaaaaaaataaaaaaaaaaaaaaaaaaaaaaaaaaaaaaaacaaaaaaaaaaaaaaaaaaaaaacattttttnnaaggaanaaaaaaattttaaaaaaaaaaaaaaaaatctgggggggggccccggcccccatttccccttttagggggtttttttccccccccctccgggcccgttttttaaaacgggggggggggaaaaccccgggggtccccca

SEQ ID NO: 31040 - DNA, 572 bp, Glycine max
  Clone ID: PAT_MRT3847_128033C.1
agagctcagtttccaggtgataaacctgcccaaatggaagaactagagctgcaacatatggatcaaaatgaatcgagaagggatgaaagtcagtcactcaagctaaaaccaagagatagtcagcagaatcacagtgtctcaccttttccaaggcaagaaaataatattgatggtcatggaaaaatggataaaaagttaattgatcttaataccaggccactgcggttaaatggatcagcaccaaacaaccaggaacaatgcatggatattttaagaggcaataatcatgaatctgccagtgtgccaccagtagaatccttcaaacaagagtctgagaagtaacaaagacctaattaatgacggaaaatagttgctttcatatggatgagctgcataaacaaggttactactgcataaattcgagggtataacataaattgttgtccaggatataccacgttccttaaagcagcttatgtccaatgcatccttaatattttggttttcctagtctgacagcagaggaactgttggttttaatacaaactttatgatattttattacatgtcta

SEQ ID NO: 31041 - DNA, 1485 bp, Glycine max
  Clone ID: PAT_MRT3847_128034C.1
tttttaatatcaaattttaaaaaaacatattagtaaaattaaacaatattctatctgatttttataagaaacgaatatcaaatacattatttaatcaggaagatattagttgagttggatagtaaaaaataaaataaaattatagatttaattttcttattaataaattaacatttatttataaactaaaaataaaaattatgagctttgactaagagctaatagtagattaattgtataataaatttattgacagataacaatctaaatcaataaattttaattttaaaaattatttctctcctttactatcaagtatttttcaactttgcattcgtctggttgtggaatccttcttaatagtactgttttagaattgctaagatgaagtcaagttttgaggaattgaagaagaagaagaagaagaagggagaaggagagcattggaagacatagagataaagaattgaagataatgcgaaccctttgcgacgtatgcgagagcgccgctgccattgtcttctgcgccgctgatgaggctgctctctgctccgcttgtgaccacaagatccatatgtgtaacaaacttgctagtagacacgttcgggttggccttgctgaccccactgatgttccacgctgtgacatatgtgaaaacgcacctggtactgaatgctttcttttactgtgagatagatggtagttcgctgtgtctgcaatgtgatatgattgtgcatgttggtggtaaaagaactcatggaagatatcttctattgaggcaaagagctcagtttccatgtgataaacctgcccaaatggaagaactagggctgcaacctatggatcaaaatgaatcaaggagggatgaaagtcagtcactcaagctaaaaataagagatagtcagcagaatcacagtgtctcacctgttccaagacaagaaaataatattgatggtcatggaaaaatggataaaaagttaattgatcttaatacgaggccactgcggttaaatggagcagcaccaaacaaccaggaacgaggtatggatattttaagaggcaataatcataaatctgcgagtgtgccaccagtagaatccttcaaacaagagtctgagaagtaataaagctacaacatatagggtgtggtcagaggctacagaaatattatgtttacgcaaatttctcttacactgctgaccttgtttatgtgaatcttgttttttgtctgcttaaaagtttagttgtttggctgcagaccaaattaatgagggaaaatagttgctttcatatggatgagctgcataaacaaggttactacagcttaaactcgagggtataacatgattgttgccagtatacaccacgttccttaaagcagcttatgtccgatgcatccttaatattttggttttcctagtctgacagcagaggacctcttggttcttatacaaactttatgatattttattacatgtctaaaaa

SEQ ID NO: 31042 - DNA, 560 bp, Glycine max
  Clone ID: PAT_MRT3847_128035C.1
atactagtgcttgatgaagcaactgcatcaattgataatgcaacagatttgattctacagaaaacaattaggggctcgagtgcagattgtactgtaatcacggttgcccacagaataccaactgtgatggattgcactaaggttcttgccattcgtgaaggagaattggtggagtatgatgagccaatgaacttgatgaagagagaaggatcactgtttggacaacttgtcaaggaatattggtctcatttgcagtctgctgaatcacattaaagctagaaatgtttcatttttattgatgtcaatctagtccaaccctgcccatagactaaacggattggaaaagtagactcactttttcaccaattgatttttcaaaatttcttgatatttttattttcttattctttgagtttgttgttatgaattaatatgttgctggatttgtcgtatttatatattttttcttttttaaattagataaataaactcaatcttgtaacggtcgttttaattccctattaattgttattgttgatgacttacaatggcttttgaac

SEQ ID NO: 31043 - DNA, 272 bp, Glycine max
  Clone ID: PAT_MRT3847_128036C.1
cacgaggtgctcttcgcttctctctctatagagcgtgcgtgttatcctgcgagagcgacagagctcgctttcgctattgtgacatctatagcgcatgcgtaacttcagcaatcactgaactcgtcctagatctctctcgcactcctctagcaaatggtgtcccatattctatcgagtccgcactcagctcgatattcgtcattctcgatctcatcgatagggcagatgtctctgatctatgcagtgcggtcgctgctggcagtgagtctcgc

SEQ ID NO: 31044 - DNA, 389 bp, Glycine max
  Clone ID: PAT_MRT3847_128037C.1
gtgtctgcgagaaagactctcagaagagaacatcatcacatttccatggctgattttgactcaacttatagtcctccttctcctctctgcgctcctcttttctttaacccttctcctattgggttctgtcgaccaccagcacaacatccttgtaactgacgacacgcatcatcctatgacaacctctttcagggtgtccttggtcgagaattttcacatgcagactactgactacacgttcactaatcacgattcatcgcctactcatgcaccatcgactcttgcagggtgggcagaacctattattaagaggcaaaattgcaaccggtccaggttcgagcttgagacgggaagatgagatcatggaggaggacgaggacgaggctgta

SEQ ID NO: 31045 - DNA, 463 bp, Glycine max
  Clone ID: PAT_MRT3847_128038C.1
gaatggagtctgaattattggatgatattctacgaacaatgcagaaatcagaggatacaagcatatatgataaagttttaaatgctatctttgacgaagagatgttaagcacaaaacacattcgccagaacagttcatccattcagtacactgacttcgaaactgaggtgcgagattatgttgtagatgcgaacagggaaattttccgacagcattgtgcaaagcacctagaaatacctacaatgcgattattggatgattgtccacagtttaatagaaatgcagttaaacttctgacccatggaggagacatgcttgaactttgccacgagttgcgtttgccttttgtgaactggattatttctaaccagaaatcttcattcaaacgatatgagatatcatgtgtcttcagaagagcaattggacattcatcaccaaaccactaccttcagggagattttga

SEQ ID NO: 31046 - DNA, 273 bp, Glycine max
  Clone ID: PAT_MRT3847_128039C.1
tttttttgatgttttaaacagcacctccccaaatcatgtattcaagcgccaacttccatggaaactgcaacagtctgattaccaccgcgagcataacggataatttatacattcgatcaagaacaacactgggacttatgatgctactatttgatacacgatccttgtgactgccccatatagcgataactgttataagctcttacacgggtgctgttttacaggtgcgttcttgcgtgtctgtggattccgcaccgtatgtaccgccggatg

SEQ ID NO: 31047 - DNA, 403 bp, Glycine max
  Clone ID: PAT_MRT3847_12803C.1
gggaaaatttgggaaattcccccctttccccgggaattaaaaatttttttttttaatttaaattcccggatttttaaaagttacgcaaaattttggtttgaaatactttttcccaaattggaaaaggggaaagggttggttttttttttcccaaaaaaggggggggggaaaaactttttttttttttttttttttacaaggtttttatttccgggatttttttttaaatgaagggcccacttttcccgccctttataaaaaaaaggatttttttgttttcttttacccccctttttaaacccttgggaggttttttaaatgcctttttggggcgcctaaattggggggaaatagggttttccagagccttttttttttttacgtccccattaaatttttaaaa

SEQ ID NO: 31048 - DNA, 684 bp, Glycine max
  Clone ID: PAT_MRT3847_128040C.1
ggtttcagtgaacatgttcgtcaatcagccctgaagattgttgaagttgtgctgcgccaaggtcttgttcatccaatcacctgtgttccataccttatagcccttgaaacggatcctttggagtcaaattcaaagttggctcatcatcttctgatgaatatgcttttcaggtaccctgcattttttgaaagccgcttgggtgatggacttcaaatgtcatttatgtttatgcaatctatttgtggaagttctgaaaatgttgatcataagattcaatctaagatccctacttctggaaaagggaagcctgaggctgggtcacttgctcaagctaaacttggggtttctcgaatttacaagctcatccgagggaatcgggtatcaaggaacaaatttttgtcctcaatcgtgcggaaatttgataatccaagatggaataaattagtaatagctttcttaatatactgcacagaagtcctagcattgctgccattcatttcacctgatgagcccctttatttaatctatgctatcaatcgagtagttcaagtaagggccggaccactagaagcaaactttaaagcctggagttcaagcatttcacgtcataactcaccttatgggaatggaatgtatcaacaggggccagatgagcctactgttacaagccaagtaatgtcattg

SEQ ID NO: 31049 - DNA, 361 bp, Glycine max
  Clone ID: PAT_MRT3847_128041C.1
caaacctccagcttcttcagatggggatgaggactcctgttcctctcagtaccaaatgatcaaaagagggaagtttttaccctatcaagcgggagacacacactcctttttaaatgattacataccctacacttaccaccctctatgccttaattcttcttacacctgagaaacacagattcaagctaattctcgagatttgtatgaccttagtccacaacaaatcctatcatcttaacatactgttaaactttcttaaggctacaacttcatacaaacaacaatcttttacatgcatcaaaaagcaagctcggagttcaccttagaaagatcaaattctcacaacaatgaacatgcctaa

SEQ ID NO: 31050 - DNA, 293 bp, Glycine max
  Clone ID: PAT_MRT3847_128042C.1
gggacaagtgagtttgttgatccagataactagaaacactgtgaggaaaaagaaagtccttggtttcctcggtgccagaattttggtagcaaggcaatgccatgcatacgacatgttcccactcggaatgaacactggcgatggtgcccgtacgccggaggtgaaatgcgcaagtttgaggcttgctgtggaatcacataacatcattggccatgagacccttcctgaagagtccgtttaagcaccttaggaaaacatccgaggcgaataatagcgatcagactccataacag

SEQ ID NO: 31051 - DNA, 1308 bp, Glycine max
  Clone ID: PAT_MRT3847_128043C.1
aaaaaacaaaaccatttgatccaacgtcagacacactccctctctctcttgatcattctctctcagtgctctcgatctccactgcaacttccttgtctgacagatcccgtgttccggagaaaggaaaaggaaagaaagatgtcggggcaaacgcagcgtctgaacgtggtccccaccgtgacgatgctgggagtggtcaaggcccgactagtcggcgccacgcgcggtcacgcgctcctgaagaagaagagcgacgcgctcacggtgcagttccgccagatcctgaagaagatcgtgtccacgaaagaatctatgggcgacatcatgaaaacgtcgtcgttcgcgctcaccgaggcaaaatacgtcgccggcgacaacatcaagcacgtcgtcctcgaaaacgtgaaagaagcctccctccgcgtccggtcgcgccaggagaacgtcgccggcgtgaagctcccgaagttcgactacaccgccgacgccgacgccacgaaaaacgaccttaccggactcgcacgcggtgggcagcaggtgcagcagtgccgcgccgcgtacataaaggcaatcgaggtgctcgtcgaacttgcgtcccttcaaacatcgtttctgactctggatgaggccatcaagaccacgaatcgtagggttaacgctctggaaaacgtggtgaagccgcgactcgagaacacgattagttacatcaagggagagctggacgagctggagagggaggatttcttcaggctaaagaagattcaggggtataagaagagggagattgagaggcagatgctgcagcagaacaactccaagcttgagactaatctccctttgcgcaaagggctttcgtacaattctgctcacaatttgttgtctgtgggtgacaaagatgaggatatcattttctgaatgtgctgctgctgctgctgctgatgggtgagactgagactactctgctattgtttaggtctcagttgagtgtatcatgaataaaggatgatactggttagtatatgtttatttatttctttgttcatttaattcagacattcatcgtttttaagtatgtgatcttatggaagatttttgaagtttttgtgattagctgtattttcgtttcgaaatatattacatctcaaaagagttatgagacttgtggaaagaaaggcatattttttgaagttaccttttgagaatagttattactttagcttatcatcacttatatctgtatatcaatgacggcagatgttttaaattttggttcggtatgaagaatgggtttatagatatgctctttag

SEQ ID NO: 31052 - DNA, 200 bp, Glycine max
  Clone ID: PAT_MRT3847_128044C.1
tccactcgtccgaaatatgccataattcaatgactggttcgagttcaacattggcgcatgtagacatggggattatggaaaatttatgaggcgttattcgtggagtatgatgtgcctattaatgtaattggagacacatgaataaataacttgtgcttctatgtaaggtgtttcctattgtcagctgaatcaataacttg

SEQ ID NO: 31053 - DNA, 1147 bp, Glycine max
  unsure (1)..(1147): unsure at all n locations
  Clone ID: PAT_MRT3847_128045C.1
ttttctccgattacgaacgcgaattcgcattggtgtttgatcgatcagatcccgtgttccggagaaaggaaaaggcaagaaagatgtcggggcaaacgcagcgtctgaacgtggtccccaccgtgacgatgctgggagtggtcaaggcgcgtctagtcggcgccacgcgcggtcacgcgctcctgaagaagaagagcgacgcgctcacggtgcagttccgccagatcctgaagaagatcgtgtccacgaaagaatctatgggcgacatcatgaaaacgtcgtcgttcgcgctcaccgaggcaaaatacgtcgccggcgacaacatcaagcacgtcgtcctcgaaaacgtgaaagaagcctccctccgcgtccggtcgcgccaggagaacgtcgnccggagtgaaactcccgaaattcgactacaccgccgacgccgacgccacgaaaaacgaccttacgggactcgcacgtggtgggcagcaggtgcagcagtgccgcgccgcctacatcaaggcaatcgaggtgctcgtggagctcgcgtcccttcagacgtcgtttctgaccctcgatgaggccatcaagaccacgaatcgtagggttaacgctctggagaacgtggtgaagccgcgactcgagaacacgattagttacatcaagggggagctggacgagctcgagagggaggatttcttcaggctaaagaagattcaggggtataagaagagggagattgagaggcagatgctgctgcagaacaactccaatgtcgagactaatctccctttgcgcaaaggggtttcgtacaattctgctcacaatttgttgtctgtgggtgacaaagatgaggatattattttctgaatgtggttcaatgttgtgatgctgctgctgggtgagactgagacttctctgctattgtttaggtcacagtggagtgtatcatgaataaatgttgttactggttagtatatgtttatttatttctttcttcattaaattgggacaaacaaagtttttaaagtatgcttcttatctgagcctatgaatttttttttatgttgctgtgattagttgtatttttgattcgatatatattacatctcaaaatagttatgcgacttgtggaaaaacaggcgtattttaagtt

SEQ ID NO: 31054 - DNA, 468 bp, Glycine max
  Clone ID: PAT_MRT3847_128046C.1
ggggaaggttaacccaaacaagagtcagtattttaaaaaatttttttggcgggaacttattccagcccttccaaccgtgtgccagagggacaaaggttatagcctgggagttggccaaaaatacacccaagtttgtgtaaaatggtttgcaacaaaaagcccaaagagaacagggcttttagcttgcccaacagggtttcttactttttgaacaaaaaggggggactttttgaaattttccctaaaaaattggagggacaacttttgttcagggacaaaaaagttttttttagtccccgtgtagccaattgttactggtactgcctttaacaaaaaacactccacaatgtaaaacctgcggtggcccacaaaaaattaatccccctccattgggacatttggaagggaaaaactatttttttcaataggcttggttatcacatatactgggctggaaattgacataaa

SEQ ID NO: 31055 - DNA, 258 bp, Glycine max
  Clone ID: PAT_MRT3847_128047C.1
aattgttgttcatcctttcttcctcacttctgggtcctatcttaaaaccctgcataacttgagcatttcttaacttttttctccattcctttatgtatggaaattagcctcccaaaacctaccctttggaccattttgtcttgtgtcagattatttatcatgaagctcatattgatcaaacattccgctatggattccatttacattctgtcatttcattctactactgaccatagtgtgcactgttgttgttgcaac

SEQ ID NO: 31056 - DNA, 269 bp, Glycine max
  Clone ID: PAT_MRT3847_128048C.1
gtaatctcgctagagcgctcgctctctcactctgcctctctactcattttcgcttatcctccaaaactccacacgattacacaaactttgggggagagcgactcattttttttgggagcacagatacaaattcaccgcgtctcttcatcattaaaaactactctcacatgactttgcatttccatacaacacaatattgtttttcaccacgtgggcataatttcttcaaagaggctctccactataattgtgccattctacacccacct

SEQ ID NO: 31057 - DNA, 364 bp, Glycine max
  Clone ID: PAT_MRT3847_128049C.1
tttttaacaccaaaaataaatgaataaataaatatgattaagggatatgcattcaaagacaaaaaaccttaataaacaccacacctgcgggtgggggtggtaagagacttaacgctcttattttgcagacttaaaaaatcttcttgcatttaacaaaatcgatcttacacttctttgaattaattttatgtggaactctcaaatctcattctctacacctgatggcataaaacaaccaactgaatgctgaacttgtcctattctaccaagatccggctagcactcacctcaaactaatggacattgatccattcacaaaatctgacttttaaccaaacgcattcttccttgcattatataccct

SEQ ID NO: 31058 - DNA, 390 bp, Glycine max
  Clone ID: PAT_MRT3847_12804C.1
cccacgcgtccggttggatgttcttatattgctggttattgctggggctgaagtgccagagttactcacatatatgcatccttgcgtggaagactggcagtggtgatagatgacattgatagcttaatgctgtgttatgatgtatgtctctttgctcttaattgacatctcgcaatgcgacctgcaaagttagagagtaccagacgcagctatgactagatcttggctattgcatgctcataggcaaatgacatcatgtatgctaactgcatccaatggctcgattatgacatgatagtctgtgcactacacgttgttatcactgaagagagaccggcgttagcgtcgctatctctaaggatctatgcagaacgcgtgctgtaagatgaa

SEQ ID NO: 31059 - DNA, 164 bp, Glycine max
  Clone ID: PAT_MRT3847_128050C.1
ggacaattggtttgacatagaattataaacctctgcgagatgggaatcgcgcaccacaacacagggctcctgattggggggcggtaagtaccatacagtgtgggtgcccggcaaactatgaaaagaatccctcccctcaggagccctcacagatttttcaaacc

SEQ ID NO: 31060 - DNA, 412 bp, Glycine max
  Clone ID: PAT_MRT3847_128051C.1
acagagacgaattcatcgtttgctacggcagcgcctggtccgtcggcatgtcatcggaaccagttgatggcctagtctccggagtttcagatagaccaactgtggacaccattcctcataactcccacaacctattgttgtagcttcaaccctataatctcgtctgcaaagatcttccacatctaaatttcgcattttacgtgttggacgctaaacactagtgaatccagcacagctgatttttaaaataaataacttgcataccccatcgtcgagaggctctttgctatgcgcaggtattatggatgagtattgtacgcaaccttacccttacatatgcactgaggacgattgcggattcaaacacatgaccaacatgtcacctaagcacatcttcaccgatgcaccacgc

SEQ ID NO: 31061 - DNA, 935 bp, Glycine max
  unsure (1)..(935): unsure at all n locations
  Clone ID: PAT_MRT3847_128052C.1
aaaaataaaagtaactttttactgtcaaaagcttctactcaataagaataattaccttttgaaacattgaattttagaattttataatcaatttatcactctaaatgtcacatttattaatcgaatttaaaaattctgctgtattaaacaatttaatcaaattttaaattttaccgctgctgcagtaccttcaacgaatacatagtagacttaccgctgcagtgccttcaacgaatatcgagttgattgcatgtactaaatcacaacccctggtgatatatatacaaacaatatagccgctcaaacagaggtggagcataactgtgagcactatttgcaattcaccaaatgaacatgagtgcaattcagatacaaaaaaatttcttccaattatccattcaagctcatatagatcgctgagtaaataacactattcacgtatactagttaatttgaatctagctcaggatcgtgtagataaagcaacaattcgcctctaccaccagccactcccaaggcacctctcgaatcatcggtagcaacacatgtaacattgccatcttggaaatgatgcagagtatcaagcttggatcctttagacaactcccacatatacaccactccatcacttgtactgatgattccataaccacaagaaacaccattaccagaagtccttagatccaagggacttccaaaaattatgctatttttcatcaaaagagcaagcctccaacttctagctgtatgtatatcatnactacttgaagttgaaacatgattatggcaagaatcaaggtcagaggtagtcgagacaaaaagccacatagcnnnatcttcctctattggtgnnnnccaacagatatctctctgctctgagtaccacnnnntnnntgcttctaaaagtnnatcagcctgctcctctatattcacat

SEQ ID NO: 31062 - DNA, 270 bp, Glycine max
  Clone ID: PAT_MRT3847_128053C.1
tttttgtttaatgctctgtttataattggattgggggggtaaacttccccaaggcgaagctcttccaatcaatatccaaatcatgcttcttccaataaaaaagcaacttttttttccctttttttttctccgggggggggggccgacccccccacccgaaatatgttctttttttatcgggcggaaaagcaacaaactccaattggggaacacccctcctgttgcggcacctatttatacaaacattttgggggggggggcccccccccc

SEQ ID NO: 31063 - DNA, 603 bp, Glycine max
  Clone ID: PAT_MRT3847_128054C.1
ctcgagccgattgtcttattgttacatagtcacagaaaaatggcaaatagaattcccctagttgtgtcatacaaaaatttggtcaaacacctccactcaactagtgcgaaaaatgcaaatgctcgtgtgcatactcaaggtggtgattcaattgtaggagcatcagcacaaggggcagtgaaggcaacagaggtgttggagaatgtgggagaaagggctaaggagacagtggacacagctttggatgcagcaaagaagactacagagggtgtgacagagacaacaaccatggttgaggcagataacaatgttgtggacacagttgagtacagatgtactgaagatttgcggggccagcttggagatggccatgatagttataattgaatgagagagtttattatgggaattgattagggttgatcctatggtttttcctgttgtgacttcaataatattatgactaataaaatattgaagaaaaggaatactgaagttaatgttctgctcattttgttgtgtataatctatgaacataggaatccctatattgtataatgacatctaaatcatgttgcgatatttaaagcaaactcgccacta

SEQ ID NO: 31064 - DNA, 167 bp, Glycine max
  Clone ID: PAT_MRT3847_128055C.1
cgttctcgttttaagtatacaagatgggcgtctcataaatgagtttgatttgtatctttgtaggatgtttgcattgccttcatgattttcaatgaataaagtggacatggaatgccttctaggaaaaggatgctccgtgattaatattgacctgtctttatacaggt

SEQ ID NO: 31065 - DNA, 389 bp, Glycine max
  unsure (1)..(389): unsure at all n locations
  Clone ID: PAT_MRT3847_128056C.1
accaagaccgcagaaggctagaaaagataggtaacttgtctactctccaagccagaacttcacaaggaggaaaagcttgttgacctgatcctcttagaccctgtcttcctaatggagctagctccgagaaaacccaacacctccccccgcaacaacgatcctttttncagcgggggtctccttntcctccccnctaccctccaaaaccccccctcccccccgcccccaccccccggcctccccccccctccctccctccccccctcccccccccctcccgccgcctccctcccccttttttcccgcccgcccccccttttttctctccccctcctccctcccgtccccccccctctttctcccctcatctccccccccccaccccctcc

SEQ ID NO: 31066 - DNA, 368 bp, Glycine max
  Clone ID: PAT_MRT3847_128057C.1
gttgaaaaaaattctgcacgaaaagctcatgaatatttcacgacttcataatgtatcaaatccgaacagctttcctaaatacacgtgaaatccttaaaatcgaaatggaaaagtttatactctaacatgactgttgccaagaattatgccatccgaagggaaatcacactgtttacgatctgcttctgtaccaaagtacaggctttacaagtatgctaacccccctacaagatcaaagtcacgctgctaaacccgcccacatctttggtttcttaactgatgcaaagacatgctggtcacagaatggaaattgtttctggttgccataatgaaaatgctgaggggtgaaacaaatgacctcttgcttt

SEQ ID NO: 31067 - DNA, 636 bp, Glycine max
  Clone ID: PAT_MRT3847_128058C.1
aatccttgtttctgtttctgtataaataaataacaaaacagacgagtgagtgaatagtgtgattaagcttttgaggttgttgcgagaaatgagaatgaagaagctgattttaatactcatagcagcatttaccttcgtttctgtggctagatctgcggctgatcatttcttcgaaaacgatggcgtttcactggcagttgcagcaacgcccggacctccacctctcatggtccccctcactcttattcagggagctgcttccaaaggagccgtctgtttggatggaacattgcctggttaccactttcatcctggatttggatctggggcaaatagttggctcattcaattggagggaggaggatggtgtaataccatcagaagttgtgtctttagaaaaactactcgtcgtggttcctcaaaatacatggaaaaacaactagcattcacagggatattgagcaataaagctgaagaaaaccctgatttctttaactggaacagagttatagtacgttactgtgatggggcatctttcagtggagatagtcaaaatgaggctgcacagcttcaatttcgagggacaaaaatatggcaagctgcaatgcaagaattattgttcaaggggaatgcaaa

SEQ ID NO: 31068 - DNA, 428 bp, Glycine max
  Clone ID: PAT_MRT3847_128059C.1
atgggaaaagaaaatacagcctttccttgttccattttatttcttcaaatataaaatatgaatcgaggaaacatggcatccaatcctttgacatgagcagaagaattccaacaaaacaattcaagcaatttatcgccacagcattaattttatctctcaataagaacattcactatggcttgcttaatcaatgcttcaagaatggtatctctggaccaccccgtccaaagataggcatcaaagttcatacccacaaggtttttggcttaaaggctacagcttctgcaactattagcttacgagggatggttcttaacatattgctttttacacttcaatcaaacatcagataacaaaggaatgctaaaacaggaaagcccctaagactaagtgtgtgtttggaactcaattgggttcaattgaacacc

SEQ ID NO: 31069 - DNA, 217 bp, Glycine max
  Clone ID: PAT_MRT3847_12805C.1
aattaacctcatgacaccataagccggtacattaaaattggaattagcacaatttgccgcattagaagccctctccctattcgcttctgatctcgctaaagctactcataatcaattaacacgaggtcaacgattgcacgagttgcttatactatcgcaatcaactcctcttaccgtggaagaacagttaataactatttctactggaacgaatggt

SEQ ID NO: 31070 - DNA, 504 bp, Glycine max
  Clone ID: PAT_MRT3847_128060C.1
aatatcaaaaatttttcatattttctaattttattttctttcattttaattttacccccaaacacaaacacaaaaaaaaaaggaacataaaatatcttttttttttttctacaaaaaaaaaactaaaaaaggggacaccgaaaaccagggggataaaagccccccacccagccccagggggtagggactttgatttttgccccaccccattggtggggaaaaaaatcagggggcccccgagataaaacactttaaaaacccggggccccccaaggagaagtaaaagacccagcaagatattccccccccaaaatctccggtgggggtcttggggacactgaacccccaaatacccaacaccaaacccatcttgccccattatccctaggagacccccaaaatccccaaacccaagattgtggtgagatccccaagccgaattcccaaccccaaaatccacatgtagacccccagcccccccctccatagaggcgcccccccccc

SEQ ID NO: 31071 - DNA, 960 bp, Glycine max
  Clone ID: PAT_MRT3847_128061C.1
acgcgtccgcacaaaccaggatttatctggtagctggagaagcatatggtagaggaagtatgaaatatggtgaggatgctttccccaacattttctctcattcctctctgtggcctgaagaagagttgaatcctttcaagaatcaccagaacatgttagctggcatagactatattgttgcacttcagagtgatgtatttctctatacttatgatggaaatatggcaaaggcagtacaaggccataggcacttcgaaaacttcaagaagactatcaatccagacaaggtaaattttgttaaactcgttgataagttggatgaaggaaaaatttcttggaagaagttcagctccaaggtaaaaaggctgcatgaagatcgaatcggtgctccgtatcccagggagcggggagaatttcctaagctagaggaaagtttttatgcaaatcctctgccaggatgtatatgtgaaagaaaattagatacttcacagtaggttgtctgtcatatggttgatgccatgatgagggttgcatgtattggccattgtggctatgctgtctcagtacttctgtcttgagaaggtggaaatttgattgtacaaaagcttggttatttgataagttctatgtattggcctggatgatggacatgtttacatggggccaagaaaaagggttaagaactgagccactcagctgcattccaaattaaaggatcaagcacaggcaggtccagtatacagtataccattcccaacacatgataatcattaaaccccataccttgaggggcaaacctcatccttaatcacactactaatgaagagtttttttttctttttcatttatagattttaaattatttaatatcttttcatgccaagaaaagatggtgagaccgaataaggggtattgttatagttcattattcaataatacaaaatattatggcaaaaagcc

SEQ ID NO: 31072 - DNA, 466 bp, Glycine max
  Clone ID: PAT_MRT3847_128062C.1
tcggcgcgagcaacggcggtggaaatggaaatgggtcgggtcaaggcccatctgtagccccgtatcccagaagttcattcagcaaccttccgggttctcgaccagacaagaagcatgagttgatcaagagaatccttaatatttcatccccctccaaatgatatcacttatctctttttataatttatgcctttttccactcctcatgtaaaatatattcccttcgtctatgtattataaaataaacgctctcttatcacttgtgtttctatttgtctacttcttcttttttctctgttatataccattgaaattggcgctgttttcttctccttcattttccattatttggggctgtagtaattgagtagatcagtatcctttatagttcattgatctattctatccctaaaccaatttacactacactgcggcttgtggtgagagaagaggctacagagcttag

SEQ ID NO: 31073 - DNA, 218 bp, Glycine max
  Clone ID: PAT_MRT3847_128063C.1
tcgtttacgcgcgggctgtgccatacatgaacacacagtttaatcccttgtttacctctaccaagggtaggcttgctagggggtatttatctttacccggttaaagacaatgcaccccgccttgttgatggcttggctttatgttacgccccaaccccaatgttggaatcttgtttgtaaaaagacacaccgctccttgctgtttatgaacaccggat

SEQ ID NO: 31074 - DNA, 1214 bp, Glycine max
  Clone ID: PAT_MRT3847_128064C.1
cacgcgtccgccaccaattaccgaagcgaatatacgctctcatcattcgccattcgctgtccgctaatttccctttttcctgccttgtcgttttgatccctcccccaaactaaacgacccctctcctcttccggaaccttcgccaccattctccgcccaattttcccgcgctttctcgaacctccgacgccactccggccaccgcagagtgaacaaggtcgtggaagatgagcaacgtgttcgagggttacgaacgccaatactgcgagctctcggcgaatctagcgaaaaagtgcactgccgctggtgctcttaatggagagcaaaagaaacagaaagtttctgaagtaaaggctggaattgatgaagcagaagctttgattagaaaaatggaccttgaggcaagaagtttacagccaaacatcaagggtgtgcttcttgctaagttgcgagagtataaatcggatctcaacaatcttaaaagtgaagttaagaaaattgtatctggtaacttaaacccttctgcacgggatgaattgttggaatcaggcatggcagatgctatgacggcatctgcagatcagagaacaagattaatggtgtcaactgagaggttgaataagaccagtgatagagttaaggatagtaggagaacaatgttggaaacggaagagcttggtgtctcaattcttcaagatttgcattcacaacgacaatctctattgcatgcacataacacgctccatggagtggatgataacataggcaagagcaagaaaattttgaccaacatgtcaagaaggatgaacaagaacaaatgggttattggtggcattgttttggtcctggttatagctatcatcgtgatcctgtacttcaagttttctaaatagcctatgactgtcatttccttgtaatggccataaaggtcgctaagatacgaggatttactattgtttcccattgttccccccttctcttctgattatgatttgtgagtgttcggacaaagatggtgctgtgcagtgctgccagatgatttcatactgttgttggcttctttcaatgtatgtatctgatgatgggtttggcatgtatggaatattggttttgatttctttatggccagttatcgcatgaatgttaatcatgaaaccagaattctttgtggttatgctgttcaaaatataaacgagatttggttctaatccccc

SEQ ID NO: 31075 - DNA, 352 bp, Glycine max
  Clone ID: PAT_MRT3847_128065C.1
tcgggaatgacccatctctcgccccattttggtaaaatattcttctctttctctccttctggtgagcacacatgatttttgccaacaaagattgagccaattgataagaaacgaactcatatcccttaaggatgtggatttgattctcgttgtcgatatgaagaccttgttggtaggtaatctatacgtaccttataagcgttctttgagtcttgagccctgtcttgacctcggtgaatccaggatccagctcacctaaattttccacaaataaaaaaaaaagtaatattgcgttcgctaaggtagtgtaacatctatccgtcattacagttttcacatactatgttatccc

SEQ ID NO: 31076 - DNA, 783 bp, Glycine max
  Clone ID: PAT_MRT3847_128066C.1
cccggggatcctctagagtcgacctgcagaagaggttacaatttaataatagaaatagaaattttataggaacgtgaaaaatctaccagccagatgaaatatcaaattaagcaactttgaggaatattcactgtttcacccatatgtatattagacacactgagcttaagttgcacctaaactaacacagacatattacaaaatgagaatgaacaagaataagcttcatatgaaaaattgtataaaaaactcattcctgagtattcttttggcccctatttttagggacattatacttgatttggtttgagaaagaaaatggaaaggaatagtgataaaaaaaattgaataaaattttaggatgtttgatataaaagaaatgtgatgtattgttgtaaagacaattgcatcccttaccttactaaaaagtgctttaataggaaaaataagaggtacaaaacaaggacaagaatagtgatgggaactgataaccactatcatgaacagtcaagtatcattagatatgtgtgcaatgtcaaacttgagagctcacataaactcgtgggagctctgcaaactcgactataaactcgtaaaatttatttcatatgaaaatattaataaaatacccaaaaaaaaatctatttaatttattatattacagattatgttttatttagtttttatcacggttattatttaaattaatatcatattatgttctatcttagtttatcattattatttagtttattttataatatattatgcctttaaataaat

SEQ ID NO: 31077 - DNA, 776 bp, Glycine max
  Clone ID: PAT_MRT3847_128067C.1
ggctcgaggaggatgcatacaagtcaccattgagtgtcatcattcttgatgacattgagagattattggagtatgtgcccattggtcctcgattttcaaacttgatttctcagacactgctggttctgctcaaacggcttcctccaaaggggaaaaaactcatggttattggcacagcaagtgaactagatttcttggaatcaattggattttgtgataccttctctgttacttaccatattcctaccttgaacacaacggatgcaaagaaggtcctagaacagttgaatgtgtttactgatgaagatattgattctgctgcagaggcgttgaatgatatgcctatcaggaaactatacatgttgatcgagatggcagcgcaaggggagcatggtggatctgcagaagccatcttttctggcaaagagaagattagtatcgctcacttctatgattgcctccaggatgttgttaggttataagttgttgtattaagcgctttctaagttagagtgcatataatccttattgagttgaaatctttttttaacagttcattacattgcttgttacggttcagttacagagatttttttgaatcagtgtttgtttggttgtgctgatagtaattttgagaggaggcaggggtttcgtagtctcatgttttatctttagggctacgacttagttggaaattggaattgtgacctttattcgggattcatcatttatccaaacgtacgtctcatattgaggtatctcgtactcctttcttt

SEQ ID NO: 31078 - DNA, 1679 bp, Glycine max
  unsure (1)..(1679): unsure at all n locations
  Clone ID: PAT_MRT3847_128068C.1
ccacgcgtccgctcactcttccgcgccattgctattgtggtgtgatctgcaacaagcaagatctgcgagaaaaacaacaaacaaaacaatggcgagtcggttcgggttatcgtcttcgtcttcctctgcgtccagcatgagagttaccaacacgcccgcgagcgacctcgccctcaccaacctcgccttctgttccccctccgatctccgcaatttcgccgtccctggccacaataacctctacctcgccgccgtcgccgattccttcgtcttatctctctctgctcatgacaccataggcagcggtcagattgcgttgaatgccgttcaacgccggtgtgccaaagtttcttccggtgattccgtacaagtgagccgatttgtgccgcctgaagatttcaacctcgcactgctaactcttgaattggaatttgttaaaaaggggagtaagagtgagcagattgatgctgttctactggctaagcaacttcgtaagagatttatgaaccaggttatgactctcgagaaataattatagctttactgtcagtaatgctgctgttgagggccaagaaaagtctaattctcttgaaagagggatgattttcgatgatgacacatacattgtttttgaaacatcacgtgatagtggaattaagattgtctatcaacgagagggtgccactagcaacattttcaagcagaaagaatttaaccttcagtcactgggtattggtggcctgagtgcacaatttgcagatatattatgaagagcttttgtctctcgtgttttcccaccccatgtgacatctaagaatcaagcatgtgaagggcatgcttctttatgggcctcctggaactggaaagacacttatggcacgccaaattggaaaaattttgaatgggaaggaacccaagattgtaaatggccctgaagtcttgagcaaatttgttggtgaaactgaaaagaatgtgagagacctttttgctgatgctgaacaggatcagaggacccgaggggatgaaagtgatttgcatgttataatctttgatgaaattgatgctatttgcaagtcaagaggttcaactcgagatggtactggagttcatgatagtattgtaaatcagcttcttactaagatagatggtgtggagtcactaaataatgttttacttattggaatgactaacagaaaggacatgcttgatgaagctctcttaagaccagggaggttggaagtccaggttgagataagccttcctgatgaaaatggtcgattgcaaattcttcaaattcatactaacaaaatgaaagagaattcttttctagctgctgatgtgaaccttcaagagcttgctgctcgaacgaaaaactacagtggtgcagaacttgaaggtgttgtgaaaagtgctgtctcatatgctttaaatagacaattgagtctagaggatctcactaagccagtggaggaagagaacattaaggttacaatggatgactttttgaatgcactccacgaagttacttccgcatttggagcttcaactgatgatcttgaaagatgcagactccatggcatggttgagntgtggtgatcgacataagcacatttatcaaagagcaatgctacttgtggagcaagttaaagtgagtaaaggaagcccacttgtcacttgtc

SEQ ID NO: 31079 - DNA, 303 bp, Glycine max
  Clone ID: PAT_MRT3847_128069C.1
gaggaacataaatctaactgcagtaacaaatctactgagattaaaagattccctcctgcttctgagaactgcgatgaggcttacaaaagaaaaacacctgagaatacatggaagcctccacggtctgagattgttctcaatcaagaggatcatcttcatgacccttggagggtgttggttacttgtatgcttctcaatcggactgctggtggccagacaaaaaatgttgtgtcaaacttcttcaagttatgtccatatgcataatcctgtacacaagttacaagataggaaatacagaagaca

SEQ ID NO: 31080 - DNA, 877 bp, Glycine max
  unsure (1)..(877): unsure at all n locations
  Clone ID: PAT_MRT3847_12806C.1
tgatgttggaagtcagcctaaggatgtaacccttgcactcaataaccctgaatttgctatcgttgcaattgaatccggagttgtcttgctaaacggttctaaaattgtttccactataaacctgtgcttcattgtgaccgcggctgctatgtcacctgatggtagtgaagcaattgtgggagggcaagacgagaagttgcacatgtattcagtctcaggagatacagttactgagcaggctgtccttgagaagcaccgaggtgccatcactgtaatcagatactctccagacttttccatgtttgcatcagctgatttgaatcgtgaagctgttgtatgggaccgtgcttccaaagaggtgaagcttaataacatgttgtttaacaccgcacgtattaactgcctagcttggtcacctgatagcacactcgtagccactggttcccttgatacatgtgtcattatatatgaagttggaaagccagcatcaagccgcagaaccataaagggtgctcatataggtggagtatacgggttggtttttattgatcaggaaagagtggtcagttcaggagaggatggttgtgttcgtgtttggaatttgatttctgaataaacttagcatcagaaccttccaagatgtgatgcagttttgtgccaagaaattgatagttgtcatgtattatatgatatgatgatcatcaattttctgcagtggttatatagtgggaaggaaagttaagattgcaatagtgttttggtgtgtactcttgatagatttctcgtaggactaacattcggatattttatccaagctgaattttgatctgcatagatgggaaactccgtaagttatttccaaagagannngcaataa

SEQ ID NO: 31081 - DNA, 2668 bp, Glycine max
  Clone ID: PAT_MRT3847_128070C.1
gaaaattcattgcttaagtcttgagttattgctttattggtgcgatctgcaacaagcaaaattagagacaagaatcatttcagtctccggcgccattgctattgtggaaaaacaagaacaaaaatgttcggcttatcgtcttcgtcttcctctgcgtccaacatgagagtgaccaacacgcctgccagcgacctcgccctcaccaacctcgccttctgttccccctccgatctccgcaatttcgccgtccccggtcacaacaacctctacctcgccgccgtcgccgattccttcgtcttatctctctctgctcatgacaacataggcagcggccagattgcgttgaatgtcgttcaacgccggtgtgtcaaagtttcttccggcgattccgtgcaagtgagccgatttgtgccccctgaagacttcaacctcgcactgctaactcttgatttggaatttgttaaaaaggggagtaagagtgaacagattgatgctgttctactggctaagcaacttcggaagagatttatgaaccaggttatgactgtggggcagaaagtattatttgagtatcatggaaatacttcactttcagctactaatggtatcgctagcgacttcccataagtcaagatgatttcagatgaatcaatgattgaactacatgagagcaccaaatgtgcacagattattaggcttgtggaggatgcatacaagtcaccattgagtgtcatcattcttgatgacattgagagattattggagtatgtgcccattggtcctcgattttcaaacttgatttctcagacactgctggttctgctcaaacggcttcctccaaaggggaaaaaactcatggttattggcacaacaagtgaactagatttcttggaatcaattggattttgtgataccttctctgttacttaccatattcctaccttgaacacaacggatgcaaagaaggtcctagaacagttgaatgtgtttactgatgaagatattgattctgctgcagaggcgttgaatgatatgcctatcaggaaactatacatgttgatcgagaggcagcgcatgggggcatggtggatctgcagaagccagctcaaccgagatggtactggagttcatgatagtattgtaaatcagcttcttactaagatagatggtgtggagtcactaaataatgttttacttattggaatgactaacagaaaggacatgcttgatgaagctctcttaagaccagggaggttggaagtccaggttgagataagccttcctgatgaaaatggtcgattgcaaattcttcaaattcatactaacaaaatgaaagagaattcttttctagctgctgatgtgaaccttcaagagcttgctgctcgaacgaaaaactacagtggtgcagaacttgaaggtgttgtgaaaagtgctgtctcatatgctttaaatagacaattgagtctagaggatctcactaagccagtggaggaagagaacattaaggttacaatggatgactttttgaatgcactccacgaagttacttccgcatttggagcttcaactgatgatcttgaaagatgcagactccatggcattgtggagtgtggtgatcgacataagcacatttatcaaagaacaatgctacttgtggagcaagttaaagtgagtaaaggaagcccacttgtcacttgtctccttgaaggttcccgtggaagtggtaaaactgcactttcagctactgttggtgttgacagtgacttcccatatgtcaagatagtttcagctgaatcaatgattggtctacatgagagcaccaaatgtgcacagattattaaggtttttgaggatgcatacaaatcaccattgagtgtcatcattcttgatgacattgagagattattggagtatgtgcccattggttctcgattttcaaactttatttctcagacactactggtgctgcttaaacggcttcctccaaaggggaaaaaactcatggttattggcacaacaagtgaactagatttcttggaatcaattggattttgtgataccttctctgttacttaccatattcctacattgaacacaaaggatgcaaagaaggtcctagaacaattgaacgtgttttctgatgaagatattgattctgctgcagaggcattgaatgatatgcctatcagaaagctatacatgttgattgagatggcagcgcaaggggagcaaggtggatctgcagaagccatcttttctggcaaagagaagattaatatcgctcatttctatgattgcctccaggatgttgttagataataagttgtcgtgttaagcgctttctcagttagagtgcatataatccttattgagttgaaatctcattttttttttacaacaattcattcctacattgcttgttactgttcagttgcagagtttgtgtgttgcttggttgtgctgatagtaatttttagaggagacgggtttcatagtttcttgtttttatctttagggttattacttagttggaattgtgctgctctcaaactgtaatgacctttattggggattcatcattatccaaacgtcttatattgaggtatctggtacccctttcttttaaaaaaaaaaaaaaaaaaaaaaaaaaaaaaaaaaaaaaaaaaaa

SEQ ID NO: 31082 - DNA, 560 bp, Glycine max
  unsure (1)..(560): unsure at all n locations
  Clone ID: PAT_MRT3847_128071C.1
gaattcggcaccagcgataatacagcgacactccgagactcccagccaaaatgaagttcctcaagactggccgtgtggccattatctcccgtggacgttacgccggcaagaaggtcgtcctcctcatgcccgtcgacaacggctccaagggccaccccttcccccacgccattgtcgccggcatcgagcgttacccttccaccgtcaccaagcgcatgtccaaggcccgccaggccaagcgcagcaaggtcaagcctttcatcaaggtcgtcaactacaaccaccttatgcccacccgttacaccctcgagcttgagggcctcaagaacaccgtcacctccgacactttcaaggaggtcagccagagggaggaggccaagaagaccgtcaagaagaccttcgacgagagataccagagcggcaagaacaggtggttcttcacccctctccgtttctagtggttgcgcgcaaagctatggatggaatgcaacaacagctgggatgcgattcggagttcatgtgtgctagcggaagtctagcnnnnnnncnaannnnnnnng

SEQ ID NO: 31083 - DNA, 488 bp, Glycine max
  Clone ID: PAT_MRT3847_128072C.1
attcccttttttttttttttttttttttttttttttttttttttttttttttttttttttttttttgtttttttgtgaagaaactcaaaaggaagtataataagatccctagaaaccaccaaaacaaaagggaaaaaaaagggaaaggcaaacaaaaaggggggaaaaaaaatgggctgggtttaaaagagaaaagaaaccaaaaaaaaaaaaaggggagggggtgaagaggccccccccggatcttccgggggggggaaggggaaataacaacaaaacatatcaagagaaaaaaaggagggagaacccgccacaacacggaagggaaatgccagggaaaaaactgcaaagatacttggtagaaaaatcaagggaaaagcaccgggggagaaagcaacggtctcaaacatggggggaaccaaaaaaagaacaaaaaagtggccaaggagaaacacccaaggaaaagcccacaggggaggaaggggccg

SEQ ID NO: 31084 - DNA, 249 bp, Glycine max
  Clone ID: PAT_MRT3847_128073C.1
cgctttcaatacatagatttagcattcattcatcaccaacatctttcttctatacttaaaaaacaatgcggccttgaccctcttgttgcggggaacaactgtacctcttcaatcacacccttctacccttttcaatcttaacaaaaacatcaaccctttattgtattcatatcaacctcttcttcatacaacatgctacaccttcaataacacgacattcaacttatatattacattcttacctcaaat

SEQ ID NO: 31085 - DNA, 292 bp, Glycine max
  Clone ID: PAT_MRT3847_128074C.1
atatactatcacgtgtgatcttgataagtgtggtgctgcaaacaaggttcacttcatttccgattataagaacacaatcagtggcgagcatgctgaacatcatctcatgtgtgccacttttagaccgtaagacaaactaactcatgtgttcactgtaattcttgatcctgaaaaggatatgtacatttatgatggagggggaggagaacaaaaaggcaaatttcttgtattctgatcgactttgagtcttctattgtatcctttactaacattccctgaacctgacgataaa

SEQ ID NO: 31086 - DNA, 890 bp, Glycine max
  unsure (1)..(890): unsure at all n locations
  Clone ID: PAT_MRT3847_128075C.1
cacatcacagctattccactaaatcactattcaccatctcttcttttctttcccggctctcccaacaaaacaaatcaatggaccccacaccctccttccaccgccgatcctcctcctcctcctccgaccgcctcctcggcccctaccccttctccccctccccctcctccgccgcctcctcctccgccgaagaactcaacgaagccgaacttttttgggccaccgattcctctgaatcggaaccccaacgcccaacgcccccaccaaaatctcgcctccgcaacttcgatcgccccgtggattccggaatactcgtcgtgctgagggaaaccgaatcccgcggcggcctgttccgcggcaagtcccccgttccgacctcttcgcggatgacgattccgtcgcttccgaggccgccggcggcgtcgccgtccgccgattacctcgcgcagtccgcgccttccagaaagttccagcaatcggcgcccgtcaaggtcccgattctcctctctgccagcgcctccaggcggaaaaacgccgacgacttcgcgcgcgtagtcgacgacgacgacgatgacgaggagatgcttccgccgcacgaaatcgttgcgagaggctccggcgtttcacccaaaaccactttctcggtgttggaaggtgtcgggagaacgctcaaagggagggatctccgtcaggttaaaaacgccgttttgcgccaaaccggttttatcgattgatttaatataatttaatttatatacctttttttttctctttatattttaaggtgggaaagttgannnnnatngnnnnnnngcgtnntgtgacagattccgtatatgtgactcagcataaggatgatctctttgtgctcttccgtttgcggagtctgt

SEQ ID NO: 31087 - DNA, 918 bp, Glycine max
  Clone ID: PAT_MRT3847_128076C.1
cgcgttcgttctgttctgttcggtagagagagagagagagaggaaagggaaagtgaaacgacatgatggggggacgattgacggcgagaagggggagccggagcgatgaggttttggatgctgaggagcaactgagaatcgctaatgagatcagagcccaattcgatgccttggaacccaagcgacccatcaagcccaacagaagcgaacccgacgccgttttgcaataccccgtcgcagccgcttctgtgaacaatatacctgagcttcacaagtttcaatcccttcaatctccctctcatgctataatttcatcggcggggtttgtggatgcacaggatgagtttgtggagacgcagtactataaagaattggcatccattgacaaacagcatcacacgacagggagtgggttcataaaggcggcgagagaaggaggggaaggtgaatatgagattcagttgcccaataatcatgttaatgctgctgaaacccaacccaggtcctataaaagcaaccctgccactatacgattgggttcctaactctgaatgttaatgctgctgaaacccaacccaggtcctataaaagcaaccctgccactaacgattgggttcctaactctgatgaacatcagcttgtacaggcttttgtctcctccaagccaaataggagcgagagtacttgaagatatgctaggtgaaaaattggaaatgggttatcttgtaccagctttttcttattactgtttatgtctatttggtgtttacaaattacgggaggtggggtggggtggtacaactgttgttgtataatactatagtctagaagagaaagtagtttcagaatgctacaatttcccgtgatatgatttccttctcaacacctaacctaattcccctttcttctaaaaaaaaa

SEQ ID NO: 31088 - DNA, 349 bp, Glycine max
  unsure (1)..(349): unsure at all n locations
  Clone ID: PAT_MRT3847_128077C.1
acggntgcaagaagacgacagaagggggttattctacaattgaaccttttccgttctgggtcaaaccttgccgtcgcattgggaataaacaacaaatcatatttgatgaaataggaaaaatggcattgagtttatctaaacaccaacaagcccctttttttctacgttaatctggccaagagatatatgcaacagcatgatgaggtcgagctctcatctttaggaatggctattgccacagtattaactgttgctgaaattttgaaaaacaacagactttctgttgaaaagagaatcaggacattaactgttgacataaaggatgactctagaggtcgactacttttaa

SEQ ID NO: 31089 - DNA, 364 bp, Glycine max
  unsure (1)..(364): unsure at all n locations
  Clone ID: PAT_MRT3847_128078C.1
tttaaggtttagccttctgagccagatcgagtgaagtatcatatgcattagatcaaatggctttgctggtcgattaattgtaaaatgcctttgaactctcaagacattcatttgcagtttcaaatactttttcggtgaaacactttgtaatattgtattttatagtaaaaaccaaatgttaattataaactagtttatatttttaaaaaaaaaaaaaannnnnanaannnataataaaataaaaaaaaaattanataataaataaaaataaaaaaaataataaataataaaaaaaaaaaaaaaaaaaaaaaatggggcggcccccctttagggagctcttcaccccggaaattattttcggacc

SEQ ID NO: 31090 - DNA, 277 bp, Glycine max
  Clone ID: PAT_MRT3847_128079C.1
ggggggcatttaccaagcctcccccctcttatggggtaacgttttgcctaacttgaacctacttaagttaaaattagggggcgattacttatttaaaaacaaacagtggtaaaagaaactgcgaacgcaaaggagtactgggctgccctgcggggacgttctctggttgtttagcaccgggaaggggcaacgatcgggcgggcgtgaccctaaccccactcgcatccgggcctatggacctggaaggaggaaacaaaaatacgcgggcaatcgggac

SEQ ID NO: 31091 - DNA, 807 bp, Glycine max
  Clone ID: PAT_MRT3847_12807C.1
agaagtataattataattataactattgccgaatcttctgataaaaaattacaacttcaaatccaacaatgcttaaaaaaggtcatcagattcctacaaggtgcatcgactattatcgtcagtggatgcctcaaacatcaggatcctatcaaagcatctcacatgtaagaagccaataaagaaagaatttatcatcacaaagcggagtcccaacttgaaggagttagggtgctttaactgcatatatatatatatatatattttctcatgattccattattgttgcccaatctcagagtcagtcaaagtctcacagaggatgttcaattgcatcgaaggactttcagctagtgtttgtgtaattaataatctttttcacaaccactgtccttgccatccttatctgccgactacattcatcagcttgcttactcaacgcctcaatggtctctgcaaaaatgtctatattcttcttaatctcatctatggcaaactttacagcatcctcatttctaagagcaaaatcagaactctgcaacatggactctatctttatttccaattggtcgatgcgcaaacgaatgtttttcaagtccaccaatgtaatgtaactaccaacttgcatagaactgattagttctctttggccctttaaagctgtctcatatcgcttaaacagagagttacaccatttccccactgagcctattggaacagccaatgcaccagccaaagcagttacaacagggcggtgcagcaatggcagctgcgaccactgagaatatcaaaacagacacgaaagcagcc

SEQ ID NO: 31092 - DNA, 441 bp, Glycine max
  Clone ID: PAT_MRT3847_128080C.1
tatttctttttttttttttttttttttttttttttttttttttttttttttttttttttttttttttttttttaaaaaggaaaaaaaattttttttttaccccctaaaagttccccttgtaaaaagagaaccccccttatggggggggggtggggggggtaaaaaaaaaacttgttaacaaaggaaaatgtttttcctttttcctccggggataaaacaaaaccctcctttttgtttttgcggggggggaagttcccccctggggggggggggctcaacttttttgtttgggcaaatctttagcagaaaccgtttttggttttgcccgtaagtattgggaaccaattgtttgaattacatgtccaatcttttgtttaaaccttggtcactgactgacaccaaagatggtttcctaaggaaagtaacttggcccagggcctt

SEQ ID NO: 31093 - DNA, 167 bp, Glycine max
  Clone ID: PAT_MRT3847_128081C.1
gtactggtgaacgacagcaacatttcaaaaaagaaccagggtacgccgaaaccatcaaaagcgacgaaaaacaactgggaaaggaccacaagccgtggcaacccccccccaacatgataggatctcaagaacgaagcgctcacagttttagcaatgccagccgggac

SEQ ID NO: 31094 - DNA, 407 bp, Glycine max
  Clone ID: PAT_MRT3847_128082C.1
gccacgcgtcgccacgctccggaccattcagaagaaagaattgatggacatggaacctatgctatcctacaccagcatgaaaagattgagtctatatgattgccagagggagtggatattcgggaagatatgatcatagttgcataaattctcacaaaagagctttaaattctttgctgactttaatttgattctatatctaatctagtttcattagatgctttttatttcttttatttttatctttatgttttttttaatatttgattttttttttatgttctttattatatattttattttttttttattttatttttatatctatttttttttatatttttttatagtttttttattttatttcttttgttttttttttttattttttttatttattttttttt

SEQ ID NO: 31095 - DNA, 461 bp, Glycine max
  Clone ID: PAT_MRT3847_128083C.1
cccagctacaatgactttcactcgcttcaattcggttggccgcgtggtgctcatcaactacggcccggacgccggcaagatcgccacgatcatcgacgtggtggacgagaacaaggccctcgtggacggccccttcagcgtcacgggcgtgaaccgccacgtgatcaacttcaagcgcctctcgctcacggatctgtttgtggacatccccctccaggcccgcgagaagacgctcaagaaggccctggccaaggccgacacgctcgccaagtgggagtcgtccacctgggccaagaagctgcagaacaagaagacgcgcgccgagctcaacgacttcgaccgcttcaaggccatgatcgcccgcaagcagaagagcgcccttgtcaagaaggccgtagccgccgcccgcaagaactaagcgggtcgcttgatacgtcgcacagtctgaggagaaccgggag

SEQ ID NO: 31096 - DNA, 538 bp, Glycine max
  Clone ID: PAT_MRT3847_128084C.1
gggataaatgatttctgggggggactgtaaacagtttcacttttatatgatataggaaccttttgcaccaaaaaaaaaaccggagggccttatgagaaaaaaaaaaagaacaactgctttttttttattgggcacttgggggctccaaagagggacttccagcaatattaatccataggccaaagcgcaaccagaggcccttttttgagggggcgaaaaggcgggggttaattatagcaaaaagacggcccggaggaaaaagaaattcaccggccaacacccacaaaaaaaaaacccgcgggccaaaaagggaaaccccggggggcgcaaagagggggggcccccccctaaagggggggggccacacgcgccggctctcgggagggaaaaacctcctcccccccgataaaaaaaaacgcccaaacccccccggggggggaggtttctcatttttgccccccccggggtggtaattttttttttccccagggatgagcgggggggaaaacaggtttttgtgctttttaaacccaccttt

SEQ ID NO: 31097 - DNA, 654 bp, Glycine max
  Clone ID: PAT_MRT3847_128085C.1
ctaaaatgaattttttttataaaaacaaaaatatataggaatattatgccgcaggcattatatttacaagctaggtaatagtaatttcatcagtagagtttgtacataactctttggaagatgcttttctgagtaaaatttctctttccacatagaatgctggttttcgaggcaagggaactactacactttcatttgttaacattgaaattatttgagacattgtgggtcgatcatttgcatatttttctacgcatatgagaccaatgtgaatgcatcttgtcacttcattgagatcaaacaaatcattaagcgatggatccattaattgtagaggcacaccttgattccataactcccatgcatgtcctatcaaattcatcgggcggtcgtcattgaagctagtatttcttctcccactaataatttcaaggaccaacactccaaagctataaacatcagactttacagaaacaattccttccatagcatactcaggagacatataacccctaatagatagaaatccaagcttttgtttggcatatactcataaattagaatcctctctttttcatgaatgcagcatccaagtagttgtacaagattcatgtgttgaagttcacatatgagcattagctcatttttgaattc

SEQ ID NO: 31098 - DNA, 629 bp, Glycine max
  Clone ID: PAT_MRT3847_128086C.1
tcgaccacgcgtccgctctttttttgtttaaaacacagaatggcgcgtcccggtccctgttcgttacaccctgcgctgcttttgggctcaccgtcttttcccaacgccattgcttggtctgacgacaacctcattgccgttgcttccggtcacctcgttaccattctgagaccggacttgcctattggtgcgccgcgaggcgtgattaaagtctccccgagtgagcctcttcccatagggtttgtagaaagaaaagatttactctctggatgcctcctgccgatggctttgtatcgggatgataagcctgttgtccgatcaatatcatggtctccgcttggcatggctgcaaattcagggtgcttgatagctgtttgcaactctgaaggacatgtgaagatttatcgtccacctttttgtgattactgtgctgaatggattgaggtggtggacataactaaaagtttgtatgactattttcaatgtactgagtttcgaggtacaaggtttgcttcattggatgtatctgataaaaattcatcagatcaaacagattctatgtatgaagaaaatgggaaattgttaagtgctgatcaatatgcttcgcgtagtgcaatgctatgttcact

SEQ ID NO: 31099 - DNA, 216 bp, Glycine max
  Clone ID: PAT_MRT3847_128087C.1
ccatgattgacacctggtgaaggaccttcttttttccatgactccgacggagaagattgggcaagtgacccaaattgagcgcactgtagtcaccttttctgtcatttgagatctctccattgggagcctactcagtaatggtggcagtgccccatttgaaaatgcactggcgtttgtttgggctgatatgggggatggctttcaaaaataaattct

SEQ ID NO: 31100 - DNA, 241 bp, Glycine max
  Clone ID: PAT_MRT3847_128088C.1
aaactcaccaccacggagacgatcactcacagatcgaactccaaagatagatggaaaggagtatataagtgaggccaggagtgggctttcatatgagcaggtcagtgcatgtctcgccaacataaaggaatcaaatgctcacaagcacacacaggaggaaactcgaagaaaagcagatgagatatcagggtcagaaaacaaagatctatacatatatattcaaggatagctaaaccgaaat

SEQ ID NO: 31101 - DNA, 281 bp, Glycine max
  Clone ID: PAT_MRT3847_128089C.1
gacacgtgagtcagcagatcgaaagtactatgatgcactgtgatgaccatcacggtacttgatctcttcacgtcccaacgttgggtaccggggacgatccatacgtccaaatgtattccgcgttgtaatgaaaactcctaattgctgatgtactctcgacgttaaatcctcaagttgcacgcatggtgcggcagcgtattctatctttcgaagagagagaagctgagacgagtacgtaggcgcaacccgtgactgcagctaacgcgtactcgatgcgatca

SEQ ID NO: 31102 - DNA, 245 bp, Glycine max
  Clone ID: PAT_MRT3847_12808C.1
tcctcccctaaaaagttgggaaataaagcatatatgtcaaatactgggaagaaaggtaggttgcaaacagtatcgtcatctacttctgtaaatgacaacagagttaacaaaccgccatgccatgcccctcgcactgttacatcggtcatcacgaaccagaatctgactaagatggtacaaccggaggattcaggatctgcattgcatggacctacactccatgcagtcaataccccagatcctcg

SEQ ID NO: 31103 - DNA, 570 bp, Glycine max
  Clone ID: PAT_MRT3847_128090C.1
gagaatccgatgtaaataaatttgcatctgagaataggctacatggggcacaaaagtgcattttgcatggcttctgctcgggcttatggagttcattaatgtctcagcattaaactttctgacaatttgttcatatcaagcaatcaactaacaaatgctcacttgttcgaaaagaggaacttgttgtatgtaacatatttaaagcatcaacgcatgaggggtttctctcctgcacttaagatactagaaatgacagttcgtgcaatggcaaatgcatcttctggaatcagaacaccatatagatgccagagaaagggctaaattgatacaaaacttaacttgcatatttttcttttttgggaggttagacattgctgtacagtagatgggaaactgttttgtgattctgcatttacgaatggggaagtcaaggttttgtagagagtccatgcatggtttttgggctctgatgtattgttgtcagtgtatactctactactgggtctgttctgtacattattattcaacagtaaaatggaagaaatctgatcttatgatcctcattagatt

SEQ ID NO: 31104 - DNA, 353 bp, Glycine max
  Clone ID: PAT_MRT3847_128091C.1
gaaacaggggaattttcaattaacaagtagatttgggggggaacaaattttaattcatcacttactatttaaaaaaacttgcaaacaatgaatgccctaaaccccctcaaatccctacagggtatttttgcattgatgcggcaccttttccttttttgtttttgacaataccctgcctgttcaaaaataaaaaagtttttttccaattaacccacctccaaaaacctcttgttccttgtaacaagggcttttttgctccttgccccctggggctttgaaaaaacaaaaataatggccccttaattttttgctaacaaaaaccttcttccctgaatttggggatttaaaatttt

SEQ ID NO: 31105 - DNA, 417 bp, Glycine max
  Clone ID: PAT_MRT3847_128092C.1
ggctcgaggttctatatcgcgagcggccgcccttctttttgtatttttgttgttttttacctttgtcacatgtttggctttgccatttgattgaaactccctgattacagtgccccttagtcatgttcttgcaaccatgctcggagactcccccaccgagagaaaagaaaaatggtacctgtgctaggctgaggccaaaccgcaagacacaagtcaccgctgagtactacaatgacaatggtgccatggtccaggtcgagtcctcactgttctaaattccacccggcgtgatcatactgtgagcaaagaccaaatgctggtgaccttaaagagcatgttattaagcctggcattcctgagaagcacatggatgagatgaccatcttccaccttaatagggggggccgttttgtgggt

SEQ ID NO: 31106 - DNA, 229 bp, Glycine max
  Clone ID: PAT_MRT3847_128093C.1
gttgccctcttggagattttgctaccctcaaatatggtagcagtagcagcccaaggagagcaaaaacaggcgaccccaagcataaccaaacacgggatgaaaaaccgccacaaaaaatgggaaaaaacgggccgggccacaaaaagaggaaaccccaccaagcccgaaccctcccccagggggggcccccccggggcgggcacccccagtaacaaacccccctggcccc

SEQ ID NO: 31107 - DNA, 357 bp, Glycine max
  unsure (1)..(357): unsure at all n locations
  Clone ID: PAT_MRT3847_128094C.1
cctgcaaggntgnggaagtttngacttccgaaactggaaagcacggtcacgctaagtgtcactttgttggaattgatatttttatttcaagtaacttgaggatattgtgcccttttgggggagctgcgatgttcctcatgtgaatcgtactgattaccagcgcattgatattgctgaggatggatttttgagtctgcttactgaaaatggtaacactaaggatgacctgaagcttnccactgatgagagtgtgntcactaagataaaggatggatttggtgagggcaaggatcttgttgtgtgtgagatgtctgntatgggtgaggaacagatttgggccctgaaggatattgaggc

SEQ ID NO: 31108 - DNA, 740 bp, Glycine max
  unsure (1)..(740): unsure at all n locations
  Clone ID: PAT_MRT3847_128095C.1
atttgatgctgcaagaggtgatcnnnnnnnatgttgtgatattactcnnnnnnnntatgcacatatgacaaatatgttgaatgcnnttnnnggcnnnaaattgcttgttattcttgaggggggctataatcttcgttctatatcgtcttctgcaactgcagtaatcaaggtattactgggtgagagtcctggatgtgaactggaaaatagcttcccttccaaagctggcctgcaaactgttctggaagtcctcaaaattcagatgaacttttggcctgccctgggtcccatttttgtgactttggagtcacaatggagggtgtactgttttggaagaaaaaggaaacagattaagaaacgacgccgagttctggttccaatgtggaggtggggacgaaaaagtttgttattccattttctgaacggccaccttaatgtaaaatcaaagttatgttgagctgatgaattttgtaagcacgggaaatacgtagtagttatcagcatgctgtacattccatcgtcaggacaatatgatttttgtgggatcgtgcaaatgatagatttgtgcggaagggtgagacaactcggggaaagaaggggagggtggcaagtgtaaaggataaaaatgatttcccagttccttgtttgaacatcgaattttgatagttaccaaatgggaaatatgagaaattaaagcactttctgctccaacgaatctttaataaacaacataaattttt

SEQ ID NO: 31109 - DNA, 271 bp, Glycine max
  Clone ID: PAT_MRT3847_128096C.1
agccttgggctgcctatttccggatttgctgacccgcaacggggtgaagttcggataatccgagtggattaaagccgggtcccatatcttcttcgaaggtgggctccactacttgggcaacccaagcctgatccacgcgcagagcatactcaccatctaggccacacaaattatcctagtgggtgccgttaaaggttaccgatttgctggtagccacctcggtgaggtcactggaccaatctacccatgttgcagcttctgaccaattggc

SEQ ID NO: 31110 - DNA, 644 bp, Glycine max
  Clone ID: PAT_MRT3847_128097C.1
acttaattaacagaaagcagtagtagcttaatattattgttctatttcatattgaacaagaagcaagaagagaaaaaagtgaaacacaagaacttcatacaagttaaaaattaaaataaatgcagctgcagtgctgcatatacataatagaaagagaaaacaacataacacatctatctatctatgtccaaggagaggggaggggttggtcgaattgaaagacattgtaataaaacagaaaatcatataatcctcctccttgttttacaacatagatcgatcgatgaaattaaagccaagcatcagacttgcctagagtgcacatttcttcaggtttctttcttgctacctcttttcttgtggtattatatttggccatggctccaataaccgcagcgacatccccacaaacaaatacttgatcttgcaccaaactgatgttgttttcaaccttgagagtctcatcacgtttttcttcaaaaacactttgaagacgaagaagaaagttaggaaagaggggattagatttgttgagaatccggagattacaagttgtatttataaagagacatagatttcgaagtgagatataacattttttaaaattattttgcattttattagaataaactaataattaatat

SEQ ID NO: 31111 - DNA, 811 bp, Glycine max
  Clone ID: PAT_MRT3847_128098C.1
gcttgttgttcctgcaattttttttttttaaaaaaacacacgaagtgttaagttggggctttgctttttgtgtgaaggagagaaaatttgagcactgagttgatgagaagagagaaactataatgtgtggcgagagacaacgagtttctgcttgtgctgcctgcaccaacaactgtctactgttccacaaaacaaaacaaacctcacctacctctttcttcaagctcatcactaaacgagaacatttaacaactttgtatatccctcctgcttttagtagtactgtgtcagacttggttaataagaaaattgctctcaatgattcaagtgagcggcaatggaatgtaaaagtatcagggtttaatggttcttttgctttcatggaaggatggagtactttttcattgaatcatggggttaaagttggatatcttctggtattcaattacgttaaggatttgcactttgatgtcaagatctatgatccatctgcttgtgaaaagcttaattttcctaaaacaagaaatcagaagaaaagaagtagggggaagaagtggctctccagttagagattgtatgttggttggtcaagaatccaatgccttagttgtcacccaacattatgtgccgaaaatgaaaagccagcgcagtgaggttgacttagtagtacgaaaaaatggtgaagagagtggccaacttatgtgcatatcagaactccatgaagacccatgttattcgacaagcctagaatttgaccagagccatgggtgttaatgggaccatgaaaattgtgaatggagatttaaaagtt

SEQ ID NO: 31112 - DNA, 696 bp, Glycine max
  Clone ID: PAT_MRT3847_128099C.1
cttgaataacagttcatcatccaacttggacttttcactgcccttccaatgattgtagagaattcccttgagcatgggttccttcaagctatctgggatttcttgaccaggcagctccagctttcatcagttttttacacattctcaatgggaactcgaagtcatttctttggacggactgttctgcatggtggggcaaaatatcgagctactggtcgtggttttgttgtagagcacaagagatttgctgaaatctatagactctttgcccgtagccattttgtgaaagcaattgaattggggctgatacttgtaatttatgcatcacatagtcctgtagctactgacacatttgtttatatagccttgaccatcactagttggttcttagttgcatcatggattatggcaccatttgtgttcaatccttctggctttgattggttaaaaactgtttacgattttgatgactttatgaactggatttggtacagtggaagtgtatttgctaaagctgaacagagctgggaaaggtggtggtatgaagagcaggatcatctaaaggtaactggcctttggggaaagcttttggagataatcttagaccttcgattcttctttttccagtagggaattgcctatcaggtaggcatttctgatcataatacccagatttgcgggtaccttggtatacct

SEQ ID NO: 31113 - DNA, 271 bp, Glycine max
  Clone ID: PAT_MRT3847_12809C.1
agctacccttattgctcccaacaaccactctccccaataagaatctgaagctctcagaaaggcttttgaaagatagggaactgatgaaaacactgtcatagtaaatttggggcatacaactgtatatcggaggcaggagatcaaaaaagtttatgaggaagtttaccaggaggatcttgtgaaacgcctagagtctgagatcaaaggagactttgagagagccgtgtaccgatggatactggaacctgcagatcgaaatgctggtttggct

SEQ ID NO: 31114 - DNA, 300 bp, Glycine max
  unsure (1)..(300): unsure at all n locations
  Clone ID: PAT_MRT3847_1280C.1
tngnncatgcacgcgtagtaagctcggaattcggctcgagngaagcannagtnannnngggatagtgngtcttagngggntagntcagtaagngtggngnagatggngnaaccnatcgaattcganntcgacntaaagcctttctnnnaganntactcagngcncaggacncctatnngngctngatcagcttgannttaaaaaaggnctgtnaacgcggananttnnngnggttaannatcntcnctcggagttngatnttgggancntagngtnnattctganganncgtnttcnagt

SEQ ID NO: 31115 - DNA, 130 bp, Glycine max
  Clone ID: PAT_MRT3847_128100C.1
ggcactcttccgctcacgcttccgcataacctcactcatcctctactttcgtcttgttccatttcaagatcgccggacaaatcttgcggtagaacacatattccatgcaccgctcttctgcgccaacaat

SEQ ID NO: 31116 - DNA, 584 bp, Glycine max
  unsure (1)..(584): unsure at all n locations
  Clone ID: PAT_MRT3847_128101C.1
tcgcangcacgcgtacgtaagctcggaattcggctcgagtattaaggttttttctagattctgtacaacttttatataacaagttctattttgtgtgcacatctcccctgtatgtatttatagcaacccaagcctctcaaattccaggtccctcttgtgccaccttttccccttagccttgactgtcactctcttctgctcaccgaggtagcctcgggggctacttctagccaccatgacagccagacagcaggaactggtgtttgtcagctgtggtctgttgatacaggaagtactctgggcagtaacccagtagctatgttactgcacaagcccttctcgcttagtgcagtgatgtcctggtgcagccacctgtgggcgggtggctggacccatcacgaaagtccttgaagacagaggctagatgaaagcccagtgtctgaggtccttctgtgggcaactggaggacttgagggcacactgccaagtgactgtccttttatatcctagcagcttctgtgctcacccttgagttaaatgttagacttttaaaggaagaaataaactaatttgtattacaaaaa

SEQ ID NO: 31117 - DNA, 147 bp, Glycine max
  Clone ID: PAT_MRT3847_128102C.1
agaggggccagcccacacagcccagaacacaacaccgcacagaccacgcaagagccagaagacacacaggcagagcagcaaagggaccacaagccaacaggcagagcagcccgcagggcccacccaccagggaaaacccaaggaacc

SEQ ID NO: 31118 - DNA, 942 bp, Glycine max
  Clone ID: PAT_MRT3847_128103C.1
gaaaaaaacaggatttaaagaccatgactattaagcaactcatgggctccttacaagcatacgaagaaaaacaaaagagaaaaattaaacaaaaggaggctacggagcaactactacaactcaacgtaaaggaagcaaactatgcaaattacaagagccaaagaggacgaggtcgtgaccaagatcgtggacgtggacgaggacatggaggagaaggtagaggtggttatcaaaaaccactccaacaaattcaacaatggagaaagaagttggaatccacaagtaacaagaggtcgtggaagaggaaattcatggtcgaggtatgacaaatcacaaatcaagtgcttcaattgcaacaagattggtcactatgcatccgagtgtagattctcgaagaaggttgaagagaaagctaacttcgtagaagaaaaaggcggagaagaagaaacttcgctattcgcgtgccaaaacaaatttgaagagaaaagaaacaagtggtacctcgacaccggcgcaagcaaccacatgtgcggcgataaaagcatgttcgtggagatcaatgaagcggcaactggcgatgtctcatttggagatgactcaaagataccagtcaaaggcaaaggtaaaattctcatacgtttgaagaatgggagtcatcaattcatatccaatgtctactatgtgcctaacatgaagaataatattttgagcttgggacaattattagagaaaggctatgacatccatttgaaagaacacagtcttttcttaagagattgtagacataacttgattgctaaggtgcctatgtcaaagaatagaatgttcctcttgaacatttaaaatgatgtgacaaagtgtctcaaggcttgctataccgactcttcgtggctatggcatctatggttcgggcacctcaacgaagacggtctagagtcgacc

SEQ ID NO: 31119 - DNA, 184 bp, Glycine max
  Clone ID: PAT_MRT3847_128104C.1
gataggtgtctcgattttcttccatactgaaattaaggatgacattgctctaaatggttctttttggacacttttggcctcggagttgccagtcagttatgtcatccactgtgaaaaggcacattatgaccgaatcatcctgaatagttttcatgcatttaaatttatgaaggtaattggccaa

SEQ ID NO: 31120 - DNA, 271 bp, Glycine max
  Clone ID: PAT_MRT3847_128105C.1
tttttaattaaacctcgctccggagggatccaggagctttgattggaaaacctcttacaatcttttgttggtttattgcatccaccatatctccaacaaacggtccaacccagaaaaattattggtccgcccatgctttatctgattttaaaatcacaacttgatcgaaacttcttgcatgggtaatgcctgctccagtgacagggattggatccaacttaaccatgaatacggcgaacccaatgggaaaggtggctaacacatgaacatg

SEQ ID NO: 31121 - DNA, 539 bp, Glycine max
  Clone ID: PAT_MRT3847_128106C.1
gggcccaaaacaagggatgggatatgggggggggctttggcccaaacaaaaaaacaaaggggtccccgttggaaaatggggggggggagaacccaacaggcaaaattttttcatccccccccacaaagttttcagcaggggggggggggaaagcaaaaccccccccccaaaaattcaaaatccttaaatttaaaaaaaaggggaacaagggcggaactttaaaaaaattttttccaaccaaggtggggttccaccaaagcaactttattaagaaggcctttttttatttaggggccctattaacggggttttaaaggttcgaacaaaattgggggtgggaaaaatgggaaattttatgcctttggtagctaaaaaccaggagctggggcaactggaggagcaggacccccagggggggggaaccccacaaaaactttgaaggcataaaaaattccccatggggccccagaaagaggtccaaaaaaaaaaattgggggggggggaccccccgtaaaaagaccccacaaaccaagtttttt

SEQ ID NO: 31122 - DNA, 489 bp, Glycine max
  Clone ID: PAT_MRT3847_128107C.1
ggctcgaggcatcaaattacaagtatttcctccttttcttggtatggacaccttagctcaaaaagttcttatttcaactgattagtgatcactcatgtgacttgaatggttttcataacatcttccatgttccaatttgcttaccataccttagcatgtgtgtaaatggtttgttctttgttcatatcttcattggatccataatattgaatggggttatctgctcttctgcaatcttaatttagtttttccttttaactacttaaataacaaaatgttaacatcctttactgctggctctctttgttgtgaccaaagaaccttttatcggtaataacttgaccacttgatctttacagtctacacttcacatctaaggcctggtttgaggccattatttatcccctgcagattccttatgagttgcaagactatgtgtttcatttcatcaccatcatcacctttttaacttgaaaattttcaacatca

SEQ ID NO: 31123 - DNA, 392 bp, Glycine max
  unsure (1)..(392): unsure at all n locations
  Clone ID: PAT_MRT3847_128108C.1
gttattatctaagccacgcgtccgacaaaactaactgaaaccaaaaccttgagaaaactgagcatggcggagagtggcggaggaaatcgccggagagaaccgcttctggtgtcgccggaggaagaggctgcaaaagcatcgtggaggcttaacgtcaaagagtttcgtttgccaagccaaacgaatgatcatcaaaatcaacgatccttcactttccatggccttcttcgtaaacccaggaagcaacgcaaagtggcagaatattacaagaatcaggagagactccttgaaggatttaatgagatggagactatgactgaagagggtggtttcccaggatctctaactgaggatgaaatgaagcagctagccaagagtgagaggatnggctg

SEQ ID NO: 31124 - DNA, 406 bp, Glycine max
  Clone ID: PAT_MRT3847_128109C.1
gtttaaggtcgttcaaagcatctaggactacgtggttgtataggccctttcaaaaggccaacaaaagccaacaccatgagttggcaagcgtggcccgaacccatcagccgagctgaaaacttagctgaaagcccactaagatgaagcccttcacgcaacattaggactcacttccaaagacacctgcaatgaccacattcttattgcaacgtcctaaaccatgtgtagacatgaccatgaccatgttaacattcccgtcattgacctgaaacatgcttgctgggaggatccgatcctcccagaacaagcgataggccaggcggaccaggcatgtccgagagggggatctttcaggtggcgaaccaagcacgcaggcaggatttgctgaagagctctagaaactggg

SEQ ID NO: 31125 - DNA, 182 bp, Glycine max
  Clone ID: PAT_MRT3847_12810C.1
atagaaattgcacataaacattcaaaaccattttgacaactacacttcaaacaaaaggtagtcagaaccttgcttatacatgattcatacactactacaaacttcttgaaaatattcttaaaaggattaatagagattatgctacgggatccattaatcgaaatgaccttctctgacgatta

SEQ ID NO: 31126 - DNA, 482 bp, Glycine max
  unsure (1)..(482): unsure at all n locations
  Clone ID: PAT_MRT3847_128110C.1
cgtgcctacacctgttaggccgcttgttgacgcacgacattgctccttttttcttccgctgtgctcgttgttcagtgcctttagtctctttttgctacaacgtcatggataagtcagtacccaacccccctgctgcaacgcccattgctaagaagccggtctccctcacaaatcttgtgctgggagcggccattcaaacctttgaggtgtctacgctgggccaaccttttgaagtcataaaaacgcacatggccggtgggttgatgcgataaaccaaaagtgcaatgacatatcatcatgttcaaaaaaacggaaaaaacgcatgattggaccatacttcgcgtaacctagtantggcgtcgcgtagttgtcagaaattttctctcgtcttgaaaacttatacntccagcattcattcggtacgctctattncaatgaacgaaattccatagctcaccgcaggatggcttgataatggccat

SEQ ID NO: 31127 - DNA, 422 bp, Glycine max
  unsure (1)..(422): unsure at all n locations
  Clone ID: PAT_MRT3847_128111C.1
acgaggtggatgaggagaacaaaagattagcgaagcgatgcaagggaaggtaccacagcagttctggtgggaaacttaccggaagtgcatctgcgaagtcaaacaagagaaagtctagtcccaagacatgtagcccaacagcgaggaagattgattttgaagatgtagattcagcaagaacacccttgtcacctttgggaaataaactctcctggttgccgcatgtataagaaataaaagggactaatgtttcattaacagggctgatcatttcttttaatacaaagttatgatagggtttccgattagtattctgtattcgctagtaagaattgcatgctatggggatcacattcttacttgggaatggaggcagtatttttctgttgaactcataacatgtaattntctcaactcaactc

SEQ ID NO: 31128 - DNA, 494 bp, Glycine max
  Clone ID: PAT_MRT3847_128112C.1
cttaacgcgctttttttttttttttttgaaaactcagggaaaatgatttctttgcctaaccagggaagcccatactgcttgcatgttatcgacttaatatgacgtttttttttaaagggacctttatccttaagaccccaaagaaagatattgacaatttgcctataggccttatatttctttggggttacgggggtacctaatggaattgataaactttataaaatgcttctgggtaacttaaaaaaatttctggaacaccattcatctttaactctcaaagcaacccacattgacatggatgacgggtattgatacatcctccaaaatattatccacataatctcttcactgtattgttgtgaagagatatgcagaagaggttggtttgattttttatactgacatctttatttgttacaggacattgcattattgcccaaaattctttgcttatatagatcttcagaacaccaatatgatgttgggcaatt

SEQ ID NO: 31129 - DNA, 401 bp, Glycine max
  Clone ID: PAT_MRT3847_128113C.1
ttaattttttttggggtggttctaattaactaacgtctcttcatcgggtgtgttcctttcttcatttgatacccggttatagtatttctccccatcctctttactccgctttagattcataaatgtttatccagcaatacagtaacgaagatgtcgaaccaaactctgtattgtgtctgccaatagataggtcaaaccatcttgagaggatgtatctgcagtttctgcaatcctagttagatcccttagtattgggctccccattccaccaccgaacattgcaacctcgatgcttgatcacagtaactgaatttccagtgctgcctttatagaatgcaaccaaaaacatacccgatgcaaaaatcagaaaaagcccgaagtcccctgtgactttccttttc

SEQ ID NO: 31130 - DNA, 714 bp, Glycine max
  Clone ID: PAT_MRT3847_128114C.1
gccttatttagtttctaaaactctaaatgtgcatgctctgtgtgagttagcaaaaaggagaatccctctcctctcgatctagcttgttgaggaagcacatggctggtagtagttcaaagccagtgatatgtccgcgaagccagggacaaacttggctttcccatggccccacttccaattaccactccttcaatcatcttgtttcaagaggaggaattggaaggctcagtcgttgttgttgtactttcaatttcaggttaagaaagagcaaaacggctgcgttttcggtcatgagaaactttggcgtgacgacggaggaagaccatgagttcgtgaaggctctcagggaatcccaaccttacgtttcggtccacaggggcagactattcgttctgctcatatccgctgaactctagtccttacttcaatcccattctcatatagctttccttaatcaccttatccgctttcccggggacacatgtgcagatagacgcttcgggtatgttggtagatataggataactgatgatgaatctctggaagctggatctggaggcatgatgatagaagaatgcgtagatatctgctcatatgcgctgaacttgttgctagtccttacttcaatcgcattctcaaggatatagcatgtccttaatcacctaggtatccgctttgttcttgttgccgagacacatgtgcagatagacaagc

SEQ ID NO: 31131 - DNA, 1760 bp, Glycine max
  Clone ID: PAT_MRT3847_128115C.1
acggctgcgagaagacgacagaagggaatggtcctgaatacagtttaagaggctattgttggatgcgttcacatgtcccgaaatgaatggattgacaaaaatagtgaaagccactgcactatgccatggtaaaaataataatcaggtcagcttgaggtggctcgttggctgaagtcccacatggactaaagcaagagatgaaactgacagacgctattataaaaggagttatcagacacagtggcaaagcatctttgcgcttggggcaatgacgcagctagtgaggttctaaccgaggcgcgtctattgctggttgaaaactatttccaaaccccctcttgggcctgagtttagccctggccttcgagaatttctgtagaagggctccgggccggctgagaaaccagctcgatcaggtcgggccggtaaattaagtaagaaaatggaggagaaaatattaatgagagtgatagtaattaccgtattcctatttataggtgcagcaactgcagaagatgcagcagctgaggcgtatgagtctcctaaattaaaaaagttgataacagattgcactgggcatgttggtgaaacatgcagtactactactagtagtagtggaagtgaagcattaatgcagaagcaggatgggttggctctttgccttttggattctatggagagatgcttgctagaccatcaaacaaatgttggaactcttggagacctaattacacttccaccctttccaccaagacctccagtagatcctaacataattccatttccaagacctccaaacatagttccatttataaaacgtcgtcgctccaaattagataaccatcaaacagatgctggaactcttggaaaagtaattccacttccaccgattcgaccaggaccgccattaaaaataattccatttccaggaactaacatagttccatttccaagacctccaaacatagttccatttccaagacgtcgtcgctccaaattagataaccatcaaacagatgctggaactcttggagacctaattatacttccaccctttccaccaagacctccagtagatcctaacataattccatttccaagacctccaaacatagttccattttcacctcgtggtcgtcgctccaaattagataaccatcaaacagatgctggaactcttggaagagtaattccacttccaccgattcgaccaggaccgccattaaaaataattccatttccaggaactaacatagttccatttccaaaaccttacattcctcattcatacaatacaattacgaaccttcttggcgcacgacgtgatcaagttcaagatttgccactcctcattcagactacacaattacgaaccgtctttgggagtctgtagtcatgtcactgcacgaacttgtctcactgctccaaatgttgctacatcagatttagaggcttgtctcactccttccatgaatcaatgcgtctatcctcctggagctgaatctggtagcccgccaatataattagggcatacaggaaaatatgttggaagaataaatggacatgtcaactagatttaagcaagctagcttgttttatgatgaaggattttgtatcccttcaaaattccaatagctgcatcactggcatgcataaataaatagctgaatgttacgaacgatatggtgttcctactaaataaatagtcataaaaaaggcttatttctatttttaaaaaaaaaaaaaaggccgcccgttta

SEQ ID NO: 31132 - DNA, 193 bp, Glycine max
  Clone ID: PAT_MRT3847_128116C.1
gaccaggcacaccctggttatattatgactaaatgaatttacaacacaatccctatgcaacttagaggcaccatgccactcgcaacttacaatgaatactatcactggcgaacaagaattacatagctatgatacaatccatggaaggtcaaaaattgagaactacaattgcctaacttggctatacacggac

SEQ ID NO: 31133 - DNA, 366 bp, Glycine max
  unsure (1)..(366): unsure at all n locations
  Clone ID: PAT_MRT3847_128117C.1
cgatacgagtggactagatataagtgggatggtcgagcatactcacaaggccgcatccagctttagagccatgcctctgtcactgccttttcaaaacggacatcggcaggctgctagtcttactcagagagacatgaatctaganaggcgccctgcaaagttgactaagccgacaggcaaggatcccccagaaaacaagaacaagtcgggcctaaaggatctcccagaagacaagagcaaatcatgggatgcggatgcatncttctcgntggtncaattnaacttgncaatagnttnnnctgtnacaccatcatnaaaagattaaatcggaaagcctgtnccaaggccccccctcccttaagttca

SEQ ID NO: 31134 - DNA, 704 bp, Glycine max
  unsure (1)..(704): unsure at all n locations
  Clone ID: PAT_MRT3847_128118C.1
gaatgnggctcgagccacctcattcatactcttagcttatgctaaatacttgaccaaagcccatgtggttgtgaactgtggtggaaccatagtaactccaaagagactccgagctatagcccaaaaacaggtggattacttgctgggagacaaccccttgaagatgtcttatatggtggggtatggtccacggtacccgcaaaggatacaccacaggggctcatcgctgccgtccgttgctgttcaccctggcaagatccaatgctcagcaggattcagtgtgatgaactcgcaatcacccaacccaaacattctaatgggtgcagttgttggagggccggatctgcacgatgggttcccagatgaacggtcagattatgagcaatcagaaccagctacttatattaacgcaccacttgtaggagcacttgcttatctcgcacactcctttgggcaactctagggtgctgtgtctctcctccaacttgtgtgcttctctttttttaattattaaatagtagttcaagtggattggctagttttaattcctttggattgcacaaggtaagcgaaggggggtaaaaactctcaagagcgcagggcgcgagccccaaccttgaagcacattgttcaaggcaaaataaatggcatgcatgccttatgtttttactttactcctaagtggatttttctactttggtcat

SEQ ID NO: 31135 - DNA, 225 bp, Glycine max
  Clone ID: PAT_MRT3847_128119C.1
cggctcgagctcgaccgaattcggctcgagggatgccaaagcaactttgctggagatgaggacacgattgacttagtagatctttattggcattctagatgagaacatagcaatgcacaaagggcaccaggttcgtaattagcatgcgtttccttatggagtggaactgagactgtgagtggattgccaatattgaggctagataatgctagtatcactcagttg

SEQ ID NO: 31136 - DNA, 442 bp, Glycine max
  Clone ID: PAT_MRT3847_12811C.1
ctttaattcaagtgattccatgagatgtagcttactgtcaattgttgctctatgttcaataagtacttgtgctttcatttgtgttttgttagatgcttgtttggtctttcaacttggtgggccagtttgttaagttctttgattccgtgggctttaccattttgcctttgcatcatttgctggagggttccccatcttttgagatttgtgcttcaacccagaaaatagatataaatatgataagagtaatcattttcgattcttcttatggaaatttctgcaatattttttctatgaacaatttttacttctttcttaggacattttatggtggtagggcctaggttatgttgcatatggataccagacacttattgattatggtaagatatctagtgtgggattgcttaggttcaaataagcttgaagttgtatcatttca

SEQ ID NO: 31137 - DNA, 324 bp, Glycine max
  Clone ID: PAT_MRT3847_128120C.1
agcctttcttgctgctaggctgcaaatgcgttagatatatcctataggtcaagttgatacatagcttgagtggagatataaggttggtctaagggagataggtggggggagtcccaggtttgaatcccttcgctaacaaaaactaacaacgaacatttgtcaataaaaaaaggtgatagcctaagtttcaagtttcaaggttgttgagattatgaggaaaggataatgagaagagatactttgtataatattctgctatgtaatcaaatctagtagactgtattttatatttgtattcatgtgtatataaaaacctatttatac

SEQ ID NO: 31138 - DNA, 564 bp, Glycine max
  Clone ID: PAT_MRT3847_128121C.1
gggctaataggttaagtcggcaacacatctttggcaggcacctacataccatatgtatccaacgaatcttaacaccattatggatcttggattgacaagaactatatcaaccaatgcaagggtgtttggccattatttcattaccggacctattttgagtctaacacttatatatacactacctgttaattgggaatgtatgtatatatatatatatgtgcgagtgccaaatagaattgatatgatatatagtaagtatctgcaatgcgaacaacgagtagtatatcttttataatgttggactggatggatgatggtaagtaccgtgctccttgttcttatgttgctgaggacagaataaacactgcttgtataataaatgagggaagtggtactttgcaagactactttaaggggacatgcgctcgctaatataataattcctcccggcaaatagttccagactcgtgcccaggcagcacaccaaattgccctatagcaacttcgagtagagcgtgacggactcctgggcatagctgtctcttcggaccaaaagatatgcgc

SEQ ID NO: 31139 - DNA, 171 bp, Glycine max
  Clone ID: PAT_MRT3847_128122C.1
tgtctccataaatgaaatgagtgagggagagaacagaaaattacaaggaaatgactcagtgcagtgactctgaaaacaatcatcataacatcatagtggagggacgaaagatagcttaatcagaacttgtcctactcgtggtcaccatatcaaatgccaagacagggtggt

SEQ ID NO: 31140 - DNA, 434 bp, Glycine max
  unsure (1)..(434): unsure at all n locations
  Clone ID: PAT_MRT3847_128123C.1
gcacgaggtttccattttttcaccgcgtcaacaactgacccattttctccattaccgttacattgcctcagccgcgatcgacctcgctttcagcgctgcgaacatcttcgacgtcgcgacaaactgttgggtcttctacgccttccccgaactcgcaagaatttcgaggacgaggatttccccagcaaaagatgtggtcgttctgcataggcatggtgtttcctttttccacttttgatcacaagttagctaagggtaagggttgtccctcatggatgtgctacttggattttttccaacaaaataagtagagggttaacggtcaccgttaatgaaagagcatgcagagggataaatcgaatttgtcaagcctctattcgtttaaatacataaatgattatttatccnnnnnnnnaaaannnnncnnanaaaaa

SEQ ID NO: 31141 - DNA, 474 bp, Glycine max
  unsure (1)..(474): unsure at all n locations
  Clone ID: PAT_MRT3847_128124C.1
gggaaaggctttttttctttttttttttttttttttttttttgtcttaaaaaaaataaaaacagttaggcgcaaagaccttcggaagaaaaacaacaatgaggtgggaaacacatccataggaaaaaaacaagagggattaaggaacccctccaaccggggggggggnncccgaagacgggtgaaaacaaaaagatggcccggaaggcggggggggggggaaaaaacctgcggggcaacaagggaaactgccgggtgatcaggcctcaccaaaagagggggaaccccaacgaggctggcagctaaaacaggagagggggctcaaaaacgagcagagggtttagacggatggaggaccctacttccctaaagggacgcgttgcaaaaggtaaacctttttttcaaaaaagggcaagttaggaaagctaagagtgtataaaaacacaagcatggcgcctcagggttcgcagggata

SEQ ID NO: 31142 - DNA, 696 bp, Glycine max
  Clone ID: PAT_MRT3847_128125C.1
cactaaacacaaccacgattgatattttgacattgacagtagatcacaaagcatcaacaaaaatgaacgcaaggcatgctcgacatgttagcagaagattcagagaagttggtaaaacttaaaaatccgtaggtcacacaaccactaatcctgtaactcaccaaatatgtcatagttcctaatgtctccctccaaagtaaataacattttgaattatatactcaaaacctactctactaagaagaacgctgtaatccagttcttccatacttttaaaagagctccattaattgctgcgagacatcttgaagtatggatggtgttgtctggaactcttgccagatgttctgataagctgcgagatccatgttcagaaacttggcagcaagatatgcagctccagcagcaatatgatggggtttaaattgaagccacagagaactccgaagccatccgaggcaccaacttagcatatgttcccaccatgacagatcatgtcatcaactagaaaagcagcaactcaggaagaatacaattccaagaatctgtgcaggattgctgataagagtaccaaactatagcaatattttatactcatctagagaatttatcagacttccagacccaactgtgctgtgggggctctaaactccagaaatttatgcaactaaaaagagaaagcatcggacgcgtggg

SEQ ID NO: 31143 - DNA, 243 bp, Glycine max
  Clone ID: PAT_MRT3847_128126C.1
gctccaaggggtctttttcacagatgggcccagccaccctcgacccacaagaacctctgccacacaaaccacctgagcactcccagaccataaaccgcacactactcccagcaatgaacccccaagtctccaccggagcattccgacaacccgtcaagacagcggctctcagctccccggcccccagaaacggtaccagcaccaaatcagggaaacacccaagatcaagcaaccaaagccaac

SEQ ID NO: 31144 - DNA, 2746 bp, Glycine max
  Clone ID: PAT_MRT3847_128127C.1
gacactgacaggggagcacagggcatcaacaaaaatgaacgcaaagcatgctcgacattttagcagagaattcagagaagttggtaaaacataaaaatccgtaggtcacacccactaaaatcctatgtcgtagttcctaatctctccctccaaagtatgtgacattttgaattatatatactcaaaatctactccactaagaaggatgctgtaatccagttcttccatacttttaaaagagctccattaattgctgcgagacagcttgaagtatggatggtgttgtctggaactcttgccagatgttctgataagctgcgagatccatgttcagaaacttggcagcaagatatgcagctccagcagcaatatgatggggtttaaattgaagccacagagaactccgaagcctgcaaaacaattttctgcatcagtagaccatacaagacagacaccactacaaccagcattgctcaatactaatagaagattcataaatagtcaaactaaccatccgaggcatctacttaacatatgttcccactattagtgatcatgtcatctattaaattgagcagtaatataaaagacaataaactaacatcaagagatatgcattccagaagtagtaaacaaagataacaaattttatgtccaatctataaaagcagtaacttaccaagaatggagttaaaacaatctgagcaggattcaagatacgagtcacaaacaaaagttatattttattatgatttaggcaagtttttagaattctttacataagcttgctctggtgtttattgacaatatgaatttatggaggtaccaggcgaaagcatgcattgagtgttttccaacatatagctaacaatttaatctctcacagataatgccaaagcaacatcagatcaatattttgacctgtagagccttgctaacatggatataggaatgttgactatgaatgcaacttattcaacacactatagaataaatccaatgaatgttcatgttgcaagtgtaaattagaagttcaaaactcactagacaataacatcaaaaaaagaaagcaaaaagaaaagaagagaaattatcgattacccttgcccaaatataacaatttgaagcagaaagctagttgatgagtttagtacaaactttggcatacgtggaaggcacaaggacaaatttataaagattgattagtattgacaaatatgtctcactgttcaagcacatctctaactgtttcaacaattgggagatccttattgtgaccttagggtgtaacgataaacggcttcggggcaacccccttcccaaaaaagaaaaagaaacttctacaagcaaaccctaaccagtctagcactatttttcaaaagcccaaatttgcacatgattaccctttaaatggaatattttcgacttatgacaaggtatgtaggctgcatagaaccactacatcacagccacctgaaatacccactgaccctttttaagaggaacagggataaaaacagaacaggaaaaagaaaagttccacttttttaatcctccttgtctttcgaggttgagcacaggaaatccagtacattataactttcaaactagttgtgcagaactttcagaagcaatgaaggtattaactgtaaatcatattggagaagaaggataaaaagaaaggctgctaggaccaacaccatacaatagtacaaaatttccttaagaattaaaagcataaagacagagccactgtccacaacaacccatccaacaaagaaggttttggagtcatcaaaacatttgagcaatttaactaaagacagaagcaaaatctcttctatgcataatccattgaaatttagcaggccagccataccaacaaataacactggtaccattagtattgatatttcatgaagatgctgaggcacttaaatcataataaagatcaaccaataacattttcaaagaattaaggctgacatctaaagaaaagaccactagatgtcaaatcacatgaagaatgaaagtaaagtgtgagccaacttcagcatcatgtttttggggccaggagtacataagcataatatataattggcaaaattgcatttttggtccctctagttgtctccaattttgattttagtccaaccttaagtttatcacgaatttaggtcttcaattatgtgccatcccgttaaagttattcccaaactccggttttgaaggtttctgttacgaaggaaaatttaccacccccatgaacaatgcctaatgttaaaacaaatcaaatcaacactacaaggaagtaattctcacaattttcagttaacaaacaaacaacaacaaagcctttgtttgtgccatggttgtcacgtcaaactcttttttagatgcatcaattaattattggataaagtgaaagcatcttatagattgaaaagggaacaaaattaaattcaaatttaaaaaacctggggggaaaaacaaatatgatttaactaatccatttgagttagcaaaatattcattcaggttggaaatgagggggaaattaagaaaagaaatgtttcacaaagccaaaagttggcaattaaactgaccacaacggaaacacttcaaaagagaattttatcagcagatttgtcctagaaacagttttctcccaaatccattgttaaatgtcggagccatggcagaattggcagggcggattttttgccataggcaatttgtaaaggga

SEQ ID NO: 31145 - DNA, 891 bp, Glycine max
  Clone ID: PAT_MRT3847_128128C.1
acccgttcgtttataaggaacttgcgttgcgtgtggtttgtggcggcttgtttcagttggtagcgaaaggagagaacgtgtgtgcctcgccgtgtaagagtttatgggtgctgcgaaaggagagaacgtgtgtgcctcgccgtcgccggaaatctcgaaggaagtggaccccagccatgcctccgagaccttgcgcatcgttaacgttatgggggctgccacccccattcccgctaactgcaacgcgcgtggcttctacgacgctttcctccgaagcttcatcaaggtcgatcacatccaacgtggaagaatttcatgcactgttgttgccaaaccacccatctgtaatcgctatggaactctgcatggaggttctgttgggtccttggttgagattttatcgaatgcttgtgctagaactgtagttgccaaggacaaggaactttttcttggggaaatcagcatttcttacctctctgccactccagcaaatgaagaagtgctagctaatgcctctgtggtgaagactgggagaaatttgactgttgttgcagttgaatttaaactgaagaaagctgggaatttgctctatattactcattctaccttctataacatgccagttgccagtttatgaatatttagctgtctggtggacgttgttctgcagttcggttttaatgttttccatgacaaaattcttcaaaataggccgattcatatcaacaatagatttatagtttgcaataatcatatatttattggaaaataaacaggaatgtaatgttattttttttctttttcttttttcccgtgggttttgagcttgaattgcaggagatagaactactttcacttgttgcaaagcgaatgaccaacaaatgcaaaaaa

SEQ ID NO: 31146 - DNA, 165 bp, Glycine max
  unsure (1)..(165): unsure at all n locations
  Clone ID: PAT_MRT3847_128129C.1
ggtccggnaattcccggnngtcgacccacgcgtccggtttctactttggaaagaacaaaaagttcagtggccctaattcccgcagatgtggtaacgggcagcgtcaagcctaacaaggaaggaggcatgacgtgactactagacttccgtttaaatggatcatgc

SEQ ID NO: 31147 - DNA, 353 bp, Glycine max
  Clone ID: PAT_MRT3847_12812C.1
ccatctcactagtcatcggcctgcccttggtatatatttataacttctgcttcttagtaatcttgctataacttttatatttgtttggtgatcggacgggatagtaaaggatatgccaccctaggattgaattcctaaaaaggatagtggaggtgacgaggttattatacttggcggctctacttggaaggattagttatcatggaatgctcgcatcaagtgttggatggcttacatggataaaaccattgggactatcccttttggcgccccatgtttagattggtgattgctatgtataatatccctcctagataacgactcccaaaattatattcctggtgcctcgaatt

SEQ ID NO: 31148 - DNA, 561 bp, Glycine max
  Clone ID: PAT_MRT3847_128130C.1
tcgaatttgtatgacacttctacaggtaaccttaataaatagtcggttttcaagaaaaattgtcatatcaaatacctagtcttgctcatactgaactcaggaacggaaaattacaaaaatttcatttcttataaaattacgataatggttgattctaggatccttatgccattttgaacttatctaacatgaataaagataatttagtgtaaggatcttggaaacaaccactatggtaatttgattagaaatgaaatttctgcaattttcaattattgaattcattatgaaaaagaacatgtctcagttatagaatttttttttttgaaaaatcaactattcatttttgctaccgagcacatgtaccgtacactttcattagaccaagcatgtaataacccagaagaagacaccattttagatgtgcaagaaatagagttatgtacttgttgactactttctatcacatgcaatctattatattgtctttttcaattgttgcatcaatttttcctagttcatgtacttcatttgttagcagcattaataaatagtcgattt

SEQ ID NO: 31149 - DNA, 129 bp, Glycine max
  Clone ID: PAT_MRT3847_128131C.1
ggtgatgataaaaacgcaaaaactttgcagttcattgaagatatgacacgaaacactgatagtgtccaagagagggtccttgctgagattctgagccaaaacgcccaaaccgaatacctgaaacggttt

SEQ ID NO: 31150 - DNA, 430 bp, Glycine max
  Clone ID: PAT_MRT3847_128132C.1
aaaaaaaactaaactctgggatgggtttatttcattggatccaaaagttttttcccactatccttttaacgataggctgaaactaatttgatttctttcttaaagttattgggttgaattttatctcaacaaaatattttttttatacccatgactagaactcgaatttctaaaccattttttaaaaaaaaaaaaaaactaacattctacaccctgggctggggtaggatgcaaaagccttgaagcccccattattgtactcagggtagcccccatgtctaattattacactttgggacaaaacaaaactgaaatagcccaacctcacctccaaatttagggataggcctttttggaagtcagggaccctctgcaaagaggaacacgggattttctaaaaccaacccttttattcaaaaaacctttgggg

SEQ ID NO: 31151 - DNA, 101 bp, Glycine max
  Clone ID: PAT_MRT3847_128133C.1
catgattcatctacgaagggacgcacagtaatgatggttacgtctcacctcacgagacccttgtcttgaaggaaactctactccaccaaaagcttgccttt

SEQ ID NO: 31152 - DNA, 547 bp, Glycine max
  Clone ID: PAT_MRT3847_128134C.1
gggaagcaaatgattcaaatttgatattcagtaacatgatttgaaatcttgacataatcagcaccagaacaaggggaaaaaaaatagcatttgagctttgaacctccttatctggttttcttctccagcaataataggatcatacttaccatttttcactcctcctaagttaaagatgaaaggtagaagatacatcaacaagcttcctaacaataacttgtttaaaaaagtgacaccaacatgtaacatattaatacaaacaaagatcaaatcatcaaatgacagaaggttgtcttaatcacaactcaagattaccctccaagtgttattctgagattgatttcaagctcttcttgttgctcaaagttcaggtccccatcaccgcacaattgcggataaagtgattaagctgaatgctgccacatccaatttgcctccacctcaatttctcatcatcaggatcagggcagcaagtgtacatagacaaggcatgcactatgtgtggcatagaaggtgcaccaataacaagcaactcatcaccaagaga

SEQ ID NO: 31153 - DNA, 132 bp, Glycine max
  Clone ID: PAT_MRT3847_128135C.1
gaaactagaaggtgtgttagctttcctgcattggtcttatagccagttaacacaagctgagcctcgcagaccaggatcataccgggtgctctttatagaaacctgcagggcaagtctacattccggagattc

SEQ ID NO: 31154 - DNA, 389 bp, Glycine max
  Clone ID: PAT_MRT3847_128136C.1
cgttgtcaacccgtagtgggggtgttggtatcaatctagttggagctgacacagttattttttatgatagtgactggaatcctgctatggatcaacaggctcaagatcggtgccacagaattggtcagacacgtgaagttcatatctatagattgattagtgaaagcaccattgaggagaatattttgaagaaagcaaatcagaagcgtgcacttgataatctagttatacaaagtgggggttataataccgagttctcaagaagctcgatcctatggaactattttcaggtcatagaacactttcaataaaaaatattgtgaaggaaaaagaccagaacaatggggaaggttctgtaactaatgatgatggtgaggctgcattaaaat

SEQ ID NO: 31155 - DNA, 357 bp, Glycine max
  Clone ID: PAT_MRT3847_128137C.1
tgtccttccaggttgttgtggggcaataataaaaccttcttttttttcttagttggccattggtgaggagggaagacgcctctgaacagtaaaggatatttatttgtgtttcacgcacacatccaatttttccccaaaaaaataaaaaaagatctcttaaaaattgttcgggggggggcccataaagaccccgccaacttttttttataagtttgccccaagaaatgggctgggggggacaatccgggcaaggaaaccccccctcttcccccggataatttgggttgcgggttataatgccctccacttatctcaaccttttttcggaaaaagattttttgaggagaccttaaatgg

SEQ ID NO: 31156 - DNA, 310 bp, Glycine max
  Clone ID: PAT_MRT3847_128138C.1
atatgtcctaaactttctgcagcatcgttctccatttttggctttacagaatgactgtgtctgattaagggttctttagtatttccaatatttcttgtagtgaataagttgttagctaaatcaagatcaagtttttggtgttgtagaaggaagagaagaattaacatgagtattcactgtgaagtgtgtgagacagctccaggagcagtgatttgttgcgcggatgaagctgctttgtgtgccaagtgtgacgttgaagttcatggctcaaacaagcttgatcgcaagcatgaaacacctcttcttcaat

SEQ ID NO: 31157 - DNA, 823 bp, Glycine max
  Clone ID: PAT_MRT3847_128139C.1
tggttgcatagcctgcagttctaacaggtctgttaactgttcatctataatcccagcgtagtccagcacatcaagggtaatctgatgaaccctgccgccgggaacaatggctttctccttaacaccgtaagtaagacttaacaattccccgaacttacgtccatgtattgtttcgggcaatccaggataactgtccaacttcttccgaaacccgaacatatgtattccgggtaatgcagggtatttatcctcatggggaatggacccttcaaagacgcattcacatagtcttctttcattgggtaataatatcctatcagctacgcacaaagcttttatataaaaccgggcaattttgagctttatcaaccatgatagcatctcacccagaaactccctccgccaagtaatgtacacgtcaatgcattcctcctttaaccctgctgtcaccatcagccttacacattcacgaaggtcattgataataactgatggcagagaatccaccaccaagttgtcatcgcaatgcaattgcagcactggagtctggacaagactagctttgaggtattcctcagcatgcttgaaaattgtgaaaataactttctctttctccttcttaagcgcctctatgcaacccatgaactgtgtcacaatactattgttatcactatcattatttctttgttgtgattcagtgacttggaatcctagatcctcaatttctggagaggaaatagcttcctgtgccatgataacaatagcttgggacgtatctacttgagtagtgctagaactggttctggttccctgtgattctgaa

SEQ ID NO: 31158 - DNA, 200 bp, Glycine max
  Clone ID: PAT_MRT3847_12813C.1
gaacctacgttgccctcagatccaaccaaatccatcgtcaccaagaagaccccttttgcctaatcagctttaccgcactcttcaacagtgtcgccgataaggttcagcccatcctttgctccctatgccatttccccaaggatggcaagtgcaacggttgtgggaagttacgaagaataacgcaagtcatatgagcgcgt

SEQ ID NO: 31159 - DNA, 1005 bp, Glycine max
  Clone ID: PAT_MRT3847_128140C.1
cggaaatgaaaataaaggtggtgatgtgatacttgatgtagagagaggagcatttgaatccacaacatctcatacagcagataatattccagctgaagatgctattataacagaactacaaactcaagtacaaaatggtgaacaaccaagagatgaagttggtgaaccccaaggatgggaaatacttaaaagcattgtctatggtggtttaattgagtcaattactagcctaggaattgtgtcatctgcagttagttcgggtgctaccccattgaatattatagcattgggatttgcaaatatcatcggtggacttttcatccttggtgataatcttattgacttgaaaaaagataactctggagaggatcaaacacaaacgaatgtgcaagatcggtgcaccagatcactagggcgcagagagaacttcttgcttcatgttgttgtagctgttttatcattcctgatatttggtgctttccctcttgttatctatggcctcttgatcaataagaattactacaccgaagttaagctcgccacagtagcagctacatctattgtatgcatcattctacttgctattgggaaagtttacaccagcaaagcacccaaatcctatattaaaactgtgttatactatgttacattggcaatttcggcctcgggagtctcatacatagcaggcaacctaatcaaggacttcctagagaaacttaaccagccagaatcaggttttgctattaccatgcccatatcagacacaagtgtggggtcagcatggatgtcttactgaagcagtagggagtaggaattttggaaggagtttgagcttcttcttatgctgagcttcaaagttagtacctagaggaacttggttagaataaatatatttgtagcaagacatgaaggttcaagcaacctttttattttatgttttgtgactcaatggaaattaggaaaagaaaattcaataaaatctttgtattcaaaaaaaaaaaaaaa

SEQ ID NO: 31160 - DNA, 353 bp, Glycine max
  Clone ID: PAT_MRT3847_128141C.1
aaaaaaggcaaccctttgcgccaagtttttggattgttcaatgttcaatctaatccttcacaaattatgtttccaacaccaaaatacattttaaatttttttttttatatttactaaaaattattttcatccttttgggcagacattttgaaaaacaaaattaaaatttaaaattgaaaattaaatgaaaaacggttttttttaatcaaccatgtccattttttttctattttccatcatttacttttactatttttttctcccgggtttttttaatggaattaaagatacttgtttttatacgtaacagggaatactaggatctatgatgatttttaatcaacaaatttaaa

SEQ ID NO: 31161 - DNA, 767 bp, Glycine max
  Clone ID: PAT_MRT3847_128142C.1
gtcttcgccttctccggctcgactttctacgtctgattccaaaacaacccttcttttgctcttccacgtcttcaccttttcgatctcttctgcaccccaattccacgccccttctttcccccctccatttttgatccattgtttctcacacgggcactaccttgggttctgtgcctgattctacttccacgtgctgggggaagtgcaaaattttgttctttagctccaactagaagtgggttttcgctgtggcttctacaatctcaacatcaaagctaccataataggttttgttcctcaaaactctttttatttatttattttctttctctttgttatcaatttttgacttttagttcatgccttggtaacaatttgcttctgtagtttgtgtttgatgtaatttgtgaatgaatttttagaatctctttgatgctttgtgtgttatatcagtatggctagttccactattatggctgtttccaagaaaccccggcttaggcttagagatgtggctctgtgccgtctgttatctgtggtgtttgttactttatgtggggttttgcttctgatatttctccttgcatcaaattcaacaccaattgggactcatgatatgatagacaatgctgatgcataccatcatgacatgaagtttgaaaagttgcatgatctcccacagcagaatgacttatcacttagattggaaaggctaaatgggttgccacctaggaacttggatttgtatccaactctcgcgaaggatc

SEQ ID NO: 31162 - DNA, 437 bp, Glycine max
  Clone ID: PAT_MRT3847_128143C.1
gaactctacaaatagaaggttgacatttaatgtatagagcactatagcgcttcaaaggcaagaatatcgctgcgcttatcaaaaggggaatcaggggttcctagaaacgcaacagattagagatagagaaataaaagcaattttggcaccggcgatcaagaacccagagctgggaataacagatgcgagatgatggaggagatttcaatctttgtccgattaacaggctacctagaaaaggatactctaggagctccccagagaaaccaacattgattgtgaccaacataccctgatgaatcagccgggacgattgactgattcttctgggcaggcttgggaacctaggatgcattaggagccttcttatgcaaggagctgagatgactccacagaaacagttagacgcatgtccctagcaggaaacctaccaagtg

SEQ ID NO: 31163 - DNA, 325 bp, Glycine max
  Clone ID: PAT_MRT3847_128144C.1
ggttaaagcctgatcacatgttttgagttttaccgaggcgatgactttcatataggggtcgctgttgtgcgtcgcataattgggcccattctggatccgattgcaaagagatcggaattcctcggcgatattcaggtccacatcttcgtgtcatcgcgaggactatgtgctcagtactgggaagctattacgagggatcttatgatgcctattcagaagactactgaagtgagatcgcgagttcttggggaacagcaactgcacattgtcatgatgtctggcggcatgcatgttgacgacagagtggaagttattgggtggctta

SEQ ID NO: 31164 - DNA, 542 bp, Glycine max
  Clone ID: PAT_MRT3847_128145C.1
ggcaaaggtcttacaacaataaagccttcatttctaccattgatcaaaaaagccatattagttttgaagtttaagtttggaactattgattaaagttttaaagcttcattttttttttgacacccttaaagtcaaaataaattttaaaattgggattttttaaaaagacaaaaacccagggatgatgttgcctaattatttattggtgggtttaataaaatatttgggtccgattaaaaataaggggtggacatattaacttttaaaatgttgatttgtttaaccaaattattgtggatttttttttgaagaattttggttattaaaggtttaaatatactttgtctaataaaaataaatattcttagacagtggaacaaaaattttattattttattgcaacttgattttggataaatttctcgaaagaaataaaggtttttcttttaacaaaatatacattcatttgactattatttaatggttttggatttttaaaatcatatttttaaaaggaaaaaaacaaacattttcaattttta

SEQ ID NO: 31165 - DNA, 435 bp, Glycine max
  unsure (1)..(435): unsure at all n locations
  Clone ID: PAT_MRT3847_128146C.1
acgaggtctagaccaatgtccatgctatacataattcagttttgttttatttactctctatcttgcgaattcagaaatctcagttgtatcgcacggaaattggttggaaccataatgtgctgatcatggatgatgtacctctttctacttaaaaagtgacttgaaagaaggggaggagagagatagaacatgggaggagagagagggtggggaacaaggaaacagaaaaaagctaggttttatttagggatgattaatgttcacccatttttgggtgggttggagtggaaagagaagatacataggaagggaaagtgagtatacatttctctgttttctttctaaaataatttcactgaacattcctatgagtgctattttttccctttatttttataaacaataagctgcataatggtttaataatnnttcaga

SEQ ID NO: 31166 - DNA, 570 bp, Glycine max
  unsure (1)..(570): unsure at all n locations
  Clone ID: PAT_MRT3847_128147C.1
gtacgcctgcaggttacccggnntccggaannttcccgggtcgacaaggcttctcgtcagtgtcgatggcgatctggtcagcctgacgcccaacggcgtaacgctggtcgaagccgtcatcaacacccagttcgtgacgccgcaagcctgagggaggtatccgatggaacagcaaaaaagctcgtccgtgccggtcttcagcttctactacattgctatcgacactgaagccggcgtgacgccagaacagtttgagcactttgttcgccacaagggcgtacatattcccagctatccgggctggagctggaccttgttacgcgggttgcggggcgaacgggcagggcaatacctgatgctgtttgagatcgacagcgccgcgcagcgcgattgttatatggccgcggatggtaataaaacagaactggcccaccagttctggcgtgaacatcccgaagcgctggatattctcggggagtggaagcgttacgctaccttcagcgagctacccaccctntacaccgattatcggctgctggcggaaaacagcaaaagcaccgtgccccatgg

SEQ ID NO: 31167 - DNA, 1687 bp, Glycine max
  Clone ID: PAT_MRT3847_128148C.1
gcgaatcttaacctctctctctctctctctttctctatggcatctgcgacgcgtctggtgcactgcgagctgcgctcggcgaggcccgcggttcggccgagggaaccggccggtccggttcaggttacgatccccaaacccaaacccaaagcggcggaggcggaaggcgcgaacatcgttttgcagccgcggttgtgcactctcagatcctacggttcggatcgagccggggtgcttatcaagactcgcaaggagggtgaccatgatgacgtgtcacccttcttcgccgcgctttccgactatattgagagctctaagaaaagtcaagattttgagatcatctctggtcgtctagctatgatggtgtttgcagcgacggtgacaatggaagtggtgacagggaactctgtgttcagaaagatggatattgaaggaatcacagaggctggtggggtgtgtttgggtgcagtaacttgcgcagcactctttgcatggttctgcagtgcccgaaacagagttggtagaatcttcaccgtaagctgcaacgcattcattgactctgtaattgaccaaatcatcgatggtttgttctatgaaggcgaccctactgattggcctgatgaaccgtgatcattaagtatatataattcttaccatctttgcagatttaatgtgtctaaaaatcatagacacagttagaagatgcaatactaataatatttataaatatataggcagaggaagaatagcaaaattgatgccatcccgatgcagaagaaaaaatagtaacaaaaataaatgatgaagcatcatagatgttgaacctaaatggatactgtaaacgattgttttcactttcttaagaagcactcttagatgatgaaatatgttttatttacatgggtttattaaaccttttcaaataactattcaaactttttcaggtcttgtacttcatacaaaatatctaaatactaaagatttccatctgcattttatggatatttgtttgcactcccttaacgccatattcctcctcggtgatgcatcattgaattgcatgagatttccagtgtttcgatttgcatattttattttgtggacagctatatttgtgattttttcagtggatcattcatgctttgttttttttcagtggatcattcatgcttgtgtttcattatggtggccttatcctttccttgacttgtcatccccatacgcccccttatggtactttggtgtgggtgtaatgcacattccatgctatggcttctttgctttgataatgaagctgaagcacttgtggttgtcaaaattgtttcctggctcttgtcagtttgtacggtgataatacattgaagattagtcatcggagtaaggctaccttcatcgtggctaaagcagattttaaattttaagatcaaatttgtaaccccacccctcccctccccccaaagtgtttagaggactatcatttttgtgcggaggtaattgtggggatgtgtattagtatttgctacttaagatggaattgataaaagttctctggtctaaccatgtatatgatatcttccataatatccccatacattgattaattcatcctatgtagaatcaaatatatgtttcaaaatgtattattttattttccccacttagtaaggatattaatatcattctgcgc

SEQ ID NO: 31168 - DNA, 593 bp, Glycine max
  Clone ID: PAT_MRT3847_128149C.1
cccacgcgtcctcccacacgtcagctcaaataccaattagcctaaaaacactcacaacccaacccaagttttttcagtttttctcttcccaaagagttttgttttgtctattgttctcatgggtgggtttgaacagcagatgaaggatagagccaaggagctcaaggtcttgctcaagaaaggggtgaagattgtgggagattcatgcaagaaggggtggaacaaagtcaaacacatcaaacgctagctgattagtgatttgtaatcatttgttgcatggcttattatcccaaagtctcttgattggttttgttttttggtattgttatttgtactttcataggtttggtttgcatgtaaaatgtagtccttctatttttttgtccctctctccccttttttggggttgtttttgtctcttcctagggaagtaattttggtgtgtccgagtttgtttgttttgttaaatctaaaattttgttttattattctctctgttcttcctctggattggtatgtaaaattgctagtgaggacccaagttccagatcttgtttcttttgattcgaaaaaaaaaaaaaaaaaggccccta

SEQ ID NO: 31169 - DNA, 2334 bp, Glycine max
  unsure (1)..(2334): unsure at all n locations
  Clone ID: PAT_MRT3847_12814C.1
gtcgacccacgcgttcgcacggctgcgagacctctgaagggggagcctaaggtgtatgaaataagacgacaatattttgttccgatgggaccggacaagggacgatgaaatcagtgtagtggaagaagttgtgtttttgttgggacaattggtggctctcaaattgtgaaccggacatatacccaccctgcttcctacgccacatcgatctcacgttctctctctttcttttttcttgttgaaactgtgagtctatgttatttgtggcggagcacgccctccaagcataaaatttgcaggattagatctgatgtccaagaaattcacactagatgaacattctgcattactgagataggtgtcgctaaaattgaggaattccttggactagtgcttaatccagggagaatagcgtttcaccacttgataaccgtatatatgcctctcttgcctctcactccccatagattaatacgagttcacactgtcaatctatttaatgtaacggtgagtctaagttacttgtggcggagcatgaacccctcaacttagacccagaagtctcagtcatggttttcggaagccagtgatgggtctgggaagaagataagaaaaccttacaccattaccaaatcaagggagagttgggctgaggaagactctccaactatttgacagggactggaagaaaattgaagattttgtaggttcaaaaacagttattcagattcgaagtcatgcccagaaatacttcttgaaagttcaaaagagcgggactgtggcacatgtgcctcctccccgtcctaagcgcaaagcttctcatccttacccgcaaaaggcatcaaaaaatgttttggtgccaatgccagcttccatgggttatgtttcttccacaagtacccttgcacctgggtatgtcacatgctgatattggatcaaaggggataacacgaattgaccacagcagtcttagtggtgttgggaactctactagaaatctgcctgctactgagatgccaaaacaagggaaacaggctcaggttattcatggtttgccagattttgctgatgtttacagcttcattggaagtgtttttgatccagacacagaaggccatgtccagaagctgaaggaaatggatcctataaattttgaaactgttttgttgttaatgaaaaacctcactgtcaatttgtctagtcctgactttgagcccgttagggaggtcatgtcatcatacgatgtccatacaaaaacagtaggagttaccgcaggaattgacgtcaagaagcagacaaatgatctatcatgtcaaacagcttgacaaccattaattgaacttattatcaaatttggatggaagaccgaggttttgcccaaccagcagcattagcaatgcattcacattaactcgttgtgaaacttgaaaatgcaaccaaaccatcagcctatgtaaccacaaccaggagagtttgttttaatggaagtgctagcaaagccaaaaatatattcatcgggtaattctaaggtgcacaaggttttgtagtattgcagtgattctagtacttatttatggaatgtggttttcaagtagacacatgggtctaactgtaagataagtttgatggctcaggtgtattaattggagaggtggggggctagtcatagtagcttatatcaatgtggcctaactttcaatgtaaatcataaagagcatcataacaggaagtggtcccaatttctaattctaaccactagcaatttgttgatatgttaggtagggcaaatttggagtgaagactgaggtttttctcggccagcagtagggcatgggaatatcttgcacccactgtaaagcctgtaaatgtaaccgtagtcctttgtaaccacagccaaaatagtttatgttagaaagctgaagagcccaatgtatttttcagctgattcttattacaattgttgtattgcagtgattttgttgccttctagtagagacataggtttgtaagatatttttaatgatacaaatgtatcatcacaaaattagaaaaaggggagggagtaactattgtctagtgactaatatcgacgtggcctttcgttttcaccaaaaaaagaaacgtggccttttgttgccgaatttgtgtgtgtaaagtcacactttgacatactacatttttttgtgcttcagccttgtgagtcctggtttgccagttgaatggctttcttcgttagatttgtaagatattttcaatgtaaagtgtcccaatgtctaaataatatttattttctaaataacatccaaaaaaaaaannnaaactccccccgctctc

SEQ ID NO: 31170 - DNA, 816 bp, Glycine max
  Clone ID: PAT_MRT3847_128150C.1
tatggcatctgcaacacgtttagtgcactgcgagctgcggtcggcgaggcccgcggttcgggcgagggaaccggccggtccggttcaggttacgatcccgaaacccaaagcggcggaggcggaaggcgcgaacatcgttttgcagccgcggttgtgcactctgagatcctacggttcggatcgagcgggggttctgatcaaggcccgcaaggagggtgacgatgatgacgtgtcccccttcttcgccgctctttccgactatattgagagctctaagaaaagtcatgattttgagatcatctctggtcgtctagctatgatggtgtttgcagcgacggtgacaatggaaatggtgacaggaaactctatgttcagaaagatggacattgaaggaatcacagaggctggtggggtgtgtttgggtgcagtaacttgtgcagcactctttgcatggttctccagtgctcgaaacagagttggtcgaatcttcaccgtcagctgcaacgcattcatcgattccgtaattgaccaaatcgtagatggtttgttctatgaaggcgacgaccctactgattggcccgatgaaccgtgatcaaatataccattcttaccattttacacactttgcagatttaatgtgtctaaaaaccatagacacagttagactaagatgtaatattaaataatatttagaaatatataagcagaggaagaatactaaaagtgatgtcatcccgatgcagaagaaaaaatagtaaaataaataaatgatgcgcaccatagatttgttgaacctaaatggattatgtaaagtgt

SEQ ID NO: 31171 - DNA, 2954 bp, Glycine max
  Clone ID: PAT_MRT3847_128151C.1
gcgcccacgcgtccgtacggctgcgagaagacgacagaaggggggttaaacaaggaggtaccaaatattgttagtgaatttgttgggggcaccagtttagaaattcaggagaggtacaaaactatcaaggaaaagaacattggaaggttggaccagccttctcaaaactcaggagaatatgaatctactattggcatatgtgtagagaaaacgctgagtgctgcattagattcttttgataatcttttttgtcgccgttgcctgatttttgactgtcgtctgcatggctgttctcaacctttaatatatcatagtgaaaagcagacagtttggtctgatcctgaaggagacaggaaaccttgcagtgatcagtgttaccttcagttaaaggtagtaaaaaatgtgacagaagattcaacttctgggtctgatcagaataagagaactacaattacagaagaggcagatgtgatattggctccctccattatagaggaacctagtaatcagagtatagtaccttttccaacagaagttgattgtcttggatctcttaatttaaatgttcctatctcaggcacgagggaaaaatggaaagtcccaaatcagtcagacacagcactccgtgactcatcactccctcctgatgattctcagcattcttataaaaagctgaagacaatatctgatgatgtagttactgcaaatagtgattctagcaagaacataaattttggtgcatgtgatgaaagtatacatacaattactagtggacttttggacaaatctgttaaagataattcaaataaattaatagattcttctagcacttgctgtagtgatgagcaggacaaaagtattggggatggaccaaaagatcctacaaataagacagaatttaagaagttgtccaattcaatggaagggaaagttgatgggatgctaaggggtttcagattggaaacctctggaaaaagaattatacttaaggggagtagaaatgtttggcagaaacagttgcctcatagcaaggaacttactttctggcctgaagacttgtatggaaatatctagttacatgcattctggaggagtgtcaatgccccatggatctacggttgctcctagttcaatcatggaagaaaagggaaaatttgatgcagagtgcacagaccaggagatgccatctaggtcacggttgctgaggaaaaggggtaaaacaaggaagtttaaatattcttggaaatctgctggccacccatcaatatggaaaagaattgctgatgggaaaaaccaatcttgcaagcagtatacaccatgtggatgtcagtcaatgtgtggaaaggaatgtacttgtattaatggtggaacttgctgtgagaaatattgcggttgttcaaaaagctgcaaaaatcggcttagaggatgccattgtgccaagagtcagtgtagaagtcgacaatgcccatgttttgctgcaggacgggaatgtgatccagatgtctgtcggaattgctgggttagttgtggggatggttcgttaggggagccacctcggcgtggagaagggcaatgtggaaatatgaggcttctattgagacaacaacaaaggattctcttggcaaagtctgatgttgcaggatggggagccttcttgaagaacccggttaacaaaaatgattacttaggagagtacacaggagaactgatctcccaccgagaagccgataagcgtgggaaaatatacgatcgcgccaactcatcttttctttttgacttgaatgatcagtacgttcttgatgcttatcgcaaaggagacaagttgaaatttgcaaaccactcatcaaaccccaattgctatgcaaaggtgatgctggttgctggagatcaccgagtaggcatatttgccaaggaacacatcgatgctagtgaggagctcttctatgattatcgttatggtcccgatcaagcaccaccatgggcacgtaaacctgagggttctaagagagacgaatcaacagctcctcaaggcagggctaagaaacaccagtctcattgatgagcctgggccaaagtctagcgcatacaaatttttggcttctacattatatatcctatgcataaacaaatttgtgatatcccatgggatagattcaagatcaacggtcacaaaaggagataattagtggtttgctgatgctaatgtgcctttaaataggcaagagaagcaggcatgaagcaaattaatgttagcggcaacaagctagtagaaacaaacctagcagttcgtttcggatgctaggcgtgacatttcggcgaacttgttctgttcaaacttggttttgctcttcattatgtgattgtgagacatccaagttattattaaatggcttggtattcaatttggtttcttagtttaatttaaatacttaattaagttccttggtttttgaatatgcaattaggttattttgttttctaattttatccaattagatcattttcgtcaaaaaaaaaaaaaaaaaaacaaaaatgagaattacaagcctttctgtttccatcttctttatcctacattcttgtgtcttgaccatctttttgttattttctttttggaggtgaggggaggattggtaaagctaaaataaagttttccatatgtaatataccagatggctccaactgttttgataagttgtgattttgtattataccaataggttatgaccaatttttttaaaaaaaaattatataaccagcatcattatattctgaagaattggtatttctatagtctagttgggcatcaaacttaaaaaatattatctttgattgtaggaatttttctagcttttttttttggcttcctaataaataggatgtttctaggttgaacatgtaaagagaaagattaagttacttgtgcgttgataaatgttattttcttctttctt

SEQ ID NO: 31172 - DNA, 241 bp, Glycine max
  Clone ID: PAT_MRT3847_128152C.1
cttaatgtacaatacatatcactgagatattaagtaagattcgtgacaaacatgatgatgaatgatttatttatttttatctctcttagcagatccagattttatagttagctagttgttgccaaattgttcactgatatgtttttctaggttctcaacaggaccttctccagttacataagcttggaagtagaaaccaagcatggcaaacatagcaagtcttccatttttggatctgctg

SEQ ID NO: 31173 - DNA, 424 bp, Glycine max
  Clone ID: PAT_MRT3847_128153C.1
cggctcgagggaaaatttgatgcagagtgcacagtgagaattacaagctcttctgtttccatcttctttatcctacattcttgtgtcttgaccatctttttgttattttctttttggaggtgaggggaggattggtaaagctaaaataaagttttccatatgtaatataccagttggagccatctggtatattacatatggctccaactgttttgataagttgtgattttgtattataccaataggttatgaccaattttttttaaaaaaaaattatataaccagcatcattatattctgaagaattggtatttctatagtctagttgggcatcaaacttaaaaaatattatctttgattgtaggaatttttctagctttttttttggcttcctaataaataggatgtttctaggttgaacatg

SEQ ID NO: 31174 - DNA, 384 bp, Glycine max
  Clone ID: PAT_MRT3847_128154C.1
tttttgttccacgcctccaaagtccttggggcggggctatttacattgcactttaacttaaacacactttatgtcatatgccacctgggatatttgctaaaccataacatgcatttgcccgattcccatggcgcgctgtaatatccgccactaaaacaatatggaacgataactatctgccaccatcaaacagcacgttacctaactcaggccttgcttgcaggaaaatttgcaacctaccaaggctccattggcggtactcactgaaatgcttgtacacctttgaaaccacccaacgactacatcttgttaacactctgccaatgtagatggagcttaactaaccccgggaattgaatgccgttggctccagttttcgcaaaa

SEQ ID NO: 31175 - DNA, 427 bp, Glycine max
  unsure (1)..(427): unsure at all n locations
  Clone ID: PAT_MRT3847_128155C.1
ttttccattcanttggnattatacatacataacataacatgccaataagtcctaatttgtttatttaacatgccaataagagcttcatatgccttttcatcatacaataaccaaaggctaagtttagttctgtgttcttttttcacttaggacaccgatgcagaggaggagctcaaagaggctttcaaggtttttgacaaagatcaaaatggctacatatcagctagtgaggtatacattttatttttcttttcggtggctttagttttctttctttgatgtcaacgtcatttctaatattcattaacatacaaaaaaattgataaagtcagggtttctgctaacgtgaacaatgcaggtagggccaacaggccagtatatgttgcaaattagtttacagctatattttctttttctttgaagtgtc

SEQ ID NO: 31176 - DNA, 528 bp, Glycine max
  unsure (1)..(528): unsure at all n locations
  Clone ID: PAT_MRT3847_128156C.1
gcaccaggatgcattgtcgaatgattcaaatagctccactaattactctagcaaatattcacctgactacacggataatattgataatcaaagtggaatagacagaagatctgaagatgatgttgccagacacacagcaataacaccaatcttaaaaaagaatataacaaagttttacgagcctcttgttgacaataataccgtatataattatgaggatgatcctgttgaatacaaaaaagctagaaagcgtattcaaaacagggaaagtgcttctagagtcagaagtaaaaagaggaactatgttggagatctcgaagttgaaatgaatatgattaagaaagaaaatgctgatcttaaagtgaagaatgcagctttaaaagctgaaaataacttgttgaaacaacaaacttgcttcttagaaaaaatgattatgaagaccggcccacaatctataacaaatacaccagctaataatgtggaacaaaactntcaagagtgcctattacctcttgttaacaaagctga

SEQ ID NO: 31177 - DNA, 1134 bp, Glycine max
  unsure (1)..(1134): unsure at all n locations
  Clone ID: PAT_MRT3847_128157C.1
ngaattcaaaaaaagagggaaaaaaaaaaaaaaaattaaaaaaaaaaaaaaaaaaaaaaaaaaaaaaccaaaaaaaaaaattaaaaaaaatctcgagcgggccggcccggctcgaggccgggcaaggaccggaaccgatccaataaagttctcaaaagtgcaaactagtttatcactaagagaaccaattaatggagaaaatgagagtggtactaattactctattgttgtttataggtgcagcagttgcagaaaaagctggtaatggcaaagctgccaataatcctgcagaagatgctagtgatggcgaagccattaatcttgtagaagaagctggtggtattggtgatgccattactcctgcagaaggcaaagccactaatcttcaagcgtatgagtcagctagattcaaaaagtttgtgacacattgcagctcacatgttgctcaaacatgcagtggaaatgatccattgcatcatcaggaaggtggccatggaataaacgttccacttgggttgtcattttgcctttttgattctatggagaaatgcttgggagaccatgaagccaaacttatagatcccaacccaggtcccatgtcggctattcctaattcaatccaatctcagcaactcctcattgagactgtaaaattcagaactgtcttgaaaacctgtactcgtgttagtgcacaattttgtttaactgctcctaacgttgatacatcggttttaccggcatgtctcgggccatctctcaatcaatgtgtttatcctgcagctgatgcatttacacctggcccgccgctcgaactcccacctattattatttataattagatctcggaagtactgcaaacagaagaataattgggtttgctcgatcagcctatctaataatcctttggcctagtgaagggactaaagtctttatctctcttgaaacgttccagtgatatgtcaattatacatgattgccttgcaattaaccttgtattatgatgaaggatctgttataccttcattattccaatttgctacatctggtctgtataagaaatcactcatgtcatgaatcatgatcgataattacattcctactaaatagtaattactaaaacatgttttacatcta

SEQ ID NO: 31178 - DNA, 349 bp, Glycine max
  Clone ID: PAT_MRT3847_128158C.1
ggagggtataaggggaacattactgaaggacggaaaggaggaagaagggaggaatagatacttggaattcatagagagaaagatggagagaaaagaggaaaaagaaagagatgagaggaggttggatatgctctgcgtgcctctcgcgcttttgtcctttgcggctttttctacactctttctcttctgaatcaatatacactatcacttcaaattcaataaacacaacacggaaaaattgtacaaaattaatttaacaaactaagtgtcagtcgatgctgcaatgtcgcatactagtttatttatttaaaacagtaatgaatagtgaatgggttcttctaccagctgc

SEQ ID NO: 31179 - DNA, 301 bp, Glycine max
  unsure (1)..(301): unsure at all n locations
  Clone ID: PAT_MRT3847_128159C.1
catgggtgggtcagtacagaatctaaatttagtagcaagcgactctcctggcgttgggacagcctattatatgtgctcacaaaatggtgcgggaccaaacagagatgaactagattgagagtttttggggaacaaaacaagaaagccttatttgattcatacaaacgtatacaanaatgagactggcgggcgtgaaatgaagcacatgctttggtttgaccccacacacgactaccacacccatctcattctctggaacaaccaccaaatagagttttttgtggatagattcactgtcagg

SEQ ID NO: 31180 - DNA, 256 bp, Glycine max
  Clone ID: PAT_MRT3847_12815C.1
gttcgtcgttgtcaacggtatgaaggtggaatgtttatgaaataatcaaaattgacagtttcaaattcaaatctctatttcttcaaatcctccaagtatgcgacactcatctgaattttgattacgccgagaagatcgggtagaaaaaagggcaagatccaacttctccaacaacactttcttccgaaaacaaaatgactggggctgaaggcccaagctacacagtagatgatgctcttgtggctttgggttttgg

SEQ ID NO: 31181 - DNA, 242 bp, Glycine max
  Clone ID: PAT_MRT3847_128160C.1
gacaaggagaagggtagactccttttgaatgccatagtatgccatcgagcgtgcatctataagctgctgcctagcatacaacaaccttagctggtctgaagtaatgcatatctaagtgaatactatgccaataaatactattaccacggaggcctaaagcatagacacaattgataatgctacggcacatatacaggacacggaaggaatccctccagaccaacagaggtatatctttgctg

SEQ ID NO: 31182 - DNA, 300 bp, Glycine max
  Clone ID: PAT_MRT3847_128161C.1
ggactacaggtaattcgttacagggccacaccaagggacacaatgttcatcagaaagacaaaagtaccccggtttgggggtttttaaccttccccaatatgaaaaataacatacaatacatacagtggaacgcgcgactggtcaacatggtgatgtgcacacaaaaaaccaattgatctacgaagggttggcttggaccaaaacctgtgacaagagcttgtacaaagtaacccaagatggccaacataggcaaccttacattcttaacttccttgagctgaaaatgcttcaaggcctttc

SEQ ID NO: 31183 - DNA, 661 bp, Glycine max
  Clone ID: PAT_MRT3847_128162C.1
gcaagaaataaatgcatattttaattcaccagctcatcttgaaacttctacaaaattgatttgtttcctctcgataagatcctactccttcctaggcgtatgcaacatatacagtccacctacaagttacaaccaatcaatcagtaaatgaatttttgtttttgtctgtgcaattttcccctaactgtggattgggtgttaccggagctgaattcaagatgaccactcctgacatttaggcacccaaacccttcatcggtgaaacatgtgccaagaaaacctctttagggtaattcaagaggtcctttcctacataataagactaactctagctgcaaaactggtgggttaggtctaaatcttccatgtactctctaaactcccccaatcaatccacactagtaaatgcgatcactatgacctcaaaagaaaccaaatagctggaatctctacgagtccccagcactttgaagcctgacttgttcatgagctttcaccacctctgaagtgaaactctccaatgtcttaaaaataggaattaaaccagcttggaaactattattagctgcatcacgaacaagtttaatggcttctttatgcctgaccctctcttcctgcaatttcttcttcatagaatctaaatccacttttagatcatcta

SEQ ID NO: 31184 - DNA, 472 bp, Glycine max
  Clone ID: PAT_MRT3847_128163C.1
ttcttttttttccatacaaggggcataaactggcaaaaaacgaaaccaattgcccccttaacaaaactttaacgaattgtttatcctccacgcttacaaggtgtcaaacttaacacaatgacatccgggtccttcttttttgaagcctttttattaaatccaaaccacaaagatttgttactaggtttaaggaaccaacacccaaaaaagttgttgccaaccctgacccgagcaaaaaactaacaggccccaaaaacaaaagccacacaagggggattgttttgcgacaaacaaagttgcaacagcctatttatgactactaaagacctgggaggtgtaacctccaaaacttcctccacattaaaatcccctgacttcttattaactttagggggaaaaaaaaaatcacctccgtttcccatagcacacggataaaacagcagcaggtgcaacaacagcccttgtagaacct

SEQ ID NO: 31185 - DNA, 220 bp, Glycine max
  Clone ID: PAT_MRT3847_128164C.1
agttattactagttgaagatctaaagaggaaacatttgcccgtgcttgcatgacctatacgattgatgctatgaggggctattagaaagcattgcaggcacgaaccattcataaacttgggcaaaactttgaccgtgcctttggaacacagttcacagatgactatgggttaagggaatatgcttggccgacatcatgggcaattagtacacgttttggt

SEQ ID NO: 31186 - DNA, 441 bp, Glycine max
  Clone ID: PAT_MRT3847_128165C.1
ggctcgaggacctttgaggcaataaaaagccttgtgtcatgcatacgttccataactggccaacagattcaggaagatatcattctgaaaaggttataaaaactggataggaaatttcaaaaaggccttcacttcttggctgagatgcagcatacaatagattgagatatggctgatacaagccccattcattcaatacatgttaagaaaactgcaaccgaataccttattaagcaagagcaatgtgcgaaagcatattatttggatgctgctcagaatagtagggccatgaccgtagatcacctacaaaagacacatcctgatctgttacagtcactgagggcgccgtcaaatgctagaactaaggctattgaggctataaataccacatgaaaagccgcatagtagagtgcttgacattgcatcacagctgtttttata

SEQ ID NO: 31187 - DNA, 585 bp, Glycine max
  unsure (1)..(585): unsure at all n locations
  Clone ID: PAT_MRT3847_128166C.1
aactgttcacaggcacgagaaaaaagaaagagcgagtgaagaagaaaaacatgaacgaagatggcgtaacctctgcgaatcccaatccctctcttcccaaaccaccctcttctcctccaactcctgcggccagctctgcgggggcgtcgtcgccggcgtttccggcgaacaccggaaacggggatgctcgccggcggcgcgacatattgagcgctgattcgcacgcggttctcggtccgttgctgcgaggggcttcggttccgtcctgccggccctgggaacgcggcgatttgctccgccggctttcaacgttcaagctcgccggaaaattgcacaaggttgctgggtccttggcctgtgcgaagagaggttgggtgaatgtgggtgttgctaagattgagtgtgagatatgtgctgctcagttagattttactctgccttcagctccctcttttgaagctgatgcctccggtgaagaattttctgaacagcttgatagaggacacaaagccacctgtccttggaaaggcaatagctgtnccggaaagcttggtgccagttcccttctactttaaccttcaggtt

SEQ ID NO: 31188 - DNA, 180 bp, Glycine max
  Clone ID: PAT_MRT3847_128167C.1
tagttatggggcgggacttatgtggctcttaatgagaactatatctgcacaaaattatgtatatatgaaatgtgatggtatgtggactataaaaagatatgggtgagaaccacagaccttcgaaacttcgggataatatattgccactgacagtcttgttgatttgtgatagcgcaatat

SEQ ID NO: 31189 - DNA, 497 bp, Glycine max
  Clone ID: PAT_MRT3847_128168C.1
ttgtctcattaaatcacatcttatttctagtatactgtatacattacatgtcaaataaacaccaatacaacgtaaatagtgctaataaataaccccactttctgctttcagtgtaggcaaaactgccaaaacaccatattatcggacagcataccttagtttatagctagtcatattcgtagcatattgggcaaaataccataggtatatagcttagttcctaagctaaagggaatgaatgaagaaacatcaagatattctcggaaaatatagagatattgcttgataggtgcctgttcagtggaaaattttcctcactatcattgaaaaatcgtgcagccgcgaaaatgttcctacagtttcattgaaaatgtactttgcatcctccgtaaaatcacaggaagtaagacaactgctgctgcttccttgaaccaccttctccgtacaaatcgttccactgtttcatctcactcattccagccccttcagctgcaaag

SEQ ID NO: 31190 - DNA, 248 bp, Glycine max
  Clone ID: PAT_MRT3847_128169C.1
cccacacgtccgataaatgaaagaattaatgattgcctttgctaagcattctccgatgtccttaaccatggagagtattacattcacagctcttatgtgatgtggaataagaaaacctaggacgcgagtagagatacatgctagacgttagcatagcacacacaactgcgagtgaaaatactcctcatcagtatatgctccacacacatgtttttcacaagatgtatgaaacataccaatatctctta

SEQ ID NO: 31191 - DNA, 543 bp, Glycine max
  Clone ID: PAT_MRT3847_12816C.1
attttgtccggatgggaccgaacaagggacgatgaaatcagtgtggtggaaagaagttgtgtttgtgtttgtgggtggtgttgggacaattgataggggtggctctcaaattgtgaaccgcacatatacccaccctgcttcccacgccacatcgttctccctctccctccctctctctctctctctctctctctctctctctctaagctctttcttgttgaaactgtgagtctatgttatttgtggcggagcatgaactccaccaccaacacttcgaattctcagtcaatggctgcagcagcaccgagtgatggttctgggaagaaggtaagaaagccttacaccataaccaagtccagagagagttggactgaggaagaacatgataagtttctcgaagctctccaactatttgacagggactggaagaaaattgaagattttgtaggttcaaaaacagttattcagattcgaagccatgcccagaaatacttcttgaaagttcaaaagaatgggactgtggcacatgtgcctcctccccgt

SEQ ID NO: 31192 - DNA, 525 bp, Glycine max
  Clone ID: PAT_MRT3847_128171C.1
tttacgcttccgcaaaaagtattcagttcagttgatattttagaaagtttgatgttccattttctagaggcaatattgaatcaaaaaacttgattaatgctgtgaaaaatagatggccaaattatctggtcttttatggagtcataatgtctaatagagtcttcaaatgtcttcctgttctgggatttctctgtttggttaaaaaatatgaattgtatacctgccactcaattatttctttatgcagccgatagtaagtatccaaaactgtgtattcgtatgacttatgagatgatatttatattttggtattacattctgtttttcacttggttcttatagtaatattttctccaatgtagattgtgaattcttgccactgctctattttttttttcctgtttgagatgaaaatcttatagaagaaatggagaagaactggttgaagtttgctccttaatattacatatcccatttgtgtatttggcccttttgtctttgaaaataaaagaacagccttttgtt

SEQ ID NO: 31193 - DNA, 1650 bp, Glycine max
  Clone ID: PAT_MRT3847_128172C.1
acgacccacgcgtccgcttggatttgtgaaaggtgttgttgactccgatgacttgccgctcaacatctctcgtgagatgctgcaacaaaacaagatcctgaaggtgatcaggaagattacaacaagttctccgcaatttcattgaacatctcaatgcaattgcggagaacaaggaagattacaacaagttctatgatgctttttcgatgaatttgaagttgggtatccacgaggatagtcagaacaggtccaagttggctgatttgctcagataccactcgacaaagagcggagatgaaatgacaagcttgaaggactacgttacacggatgaaggagggtcagaaggacatttactacatcacaggagagagcaagaaggcagtggagaactctcccttcttggagagactcaagaagaaggcgctatgaagttcttttcatggtggatgcaattgatgagtatgctgttggacaactcaaggagtacgatggcaagaaattggtttcagctacaaaggaagggttgaagctagatgatgagactggaggaagagaaaaagaagaaagaggagaagaagaagtcatttgatgaactctgcaaggtcatcaaggacattctgggagacaaagtggagaaggatatgttgtctctgacagaattgttgattccccttgctgtttggtgactggtgaatatggatggagtgcaaacatggagaggatcatgaaggcacaggctctgagagacagcagcatgagtggctacatgtctagcaagaagacgatggagatcaaccctgacaatggtatcatggaggagttgaggaagagggctgaagctgataagaatgacaagtctgttaaggaccttgtgttgcttctctttgagactgcccttttgacttcaggtttcagccttgatgatcccaacacatttgcttcgaggatacacaggatgttgaagctgggacttagcatcgatgaggatgacaatggcggagatgatgttgatatgcccccgttggaagaggacggtgctgaggagagcaagatggaggaagtggactaaatgccaaaggtgttgtgttaatgaattgtggatcgtacgatttagtctgttaaatggtacaggatgcataagtctttatcttccttgttttgttttttgaaatatattgggttttctttttaacttttgtgatgtgaaaatgtgtctgtgtattgcatctacctattttgtcagtgatcgttatgaatatacatcattgagatggaggaagtggactaaatgccaaaggtctcgtgttaaatgaattgtggttcgtgtctgttaaatggtggtggatgcagaagtcttttagttttatctttctttttgttttgtttttttgagatatatagggtttttactttttaagtttttgtgatgtgaaaaaaatgtgtctgtcagtctgtgtgttgcatctacctacttttgtcagtaattgttctggatataacatcttttgtcagtaattgttctggatataacatcaatgaaggagaacaagtattacttcctctgactttgcctcttataccttccttctaatgtaccattgaaaatatggttcaaatacattatggttcacctaaaaaaaaaaaaagg

SEQ ID NO: 31194 - DNA, 422 bp, Glycine max
  Clone ID: PAT_MRT3847_128173C.1
taccatttttctttttttttttttttttttcttaattatttatccaattctcaattattgcaggggggaaatgaaaagttaagttcttgacttttctactccccttctaatgcggaatcttcaaaaatggtttaattaaattaattaaatcaaagagtttcccgaaatttataagagatttatttgcctatgtatcattcccttcgatcctttatgcccaaacgactcctttatggttctttcaggatgttcttaagcctatatgcgatgtatttacttctgtaaccaccatatctttccttttttgaacattattgcctgttcttcctaaaaaatttgcttttttaaaccctcaagaaaaattttttttttttttcacgaggcacccacagttttacacttatttctctatttccatattt

SEQ ID NO: 31195 - DNA, 338 bp, Glycine max
  Clone ID: PAT_MRT3847_128174C.1
aaatccacaaacatgaaccctgtttgtatcaaaaggaaatagaaaatacttgcgtttaacagctcatttgatactcgaagcagcgaagctcaacctaaatcccaaaagccgtcctcattacgaatgagtgaacgagattccgctaatttttgaaacgcctttcttcttcacagcggatgttaagttgaagctcgcacactttgttaggcttccatagagcaaagagccctatcccaatcttgaagtcgccaaatcgaactgccatagattatcctccaggtgttatcctccaatcactctcgaaggccctaggattctcaccctccttcacaaaccca

SEQ ID NO: 31196 - DNA, 1036 bp, Glycine max
  Clone ID: PAT_MRT3847_128175C.1
ccgggaaaaagaaacagaaacgatggcaaagaaaactggttcttcttttcgcgttgcgttttcttggtgtctctgtcgattcttcttctgaattttaatacttaggaagtttagttttctctcttggcttctccggttggagtttccggcgaccttgtcggagattttgttgtttatttttcacaccacttgtgaaacttctcaagaaaaagaaaaaggatgtttcttgttgattggttctatggaattttggcgacccttggcctgtggcaaaaggaggcgaagattttgttcctagggttagataattctgggaagaccactttgcttcacatgctcaaagacgagagacttgttcagcatcaacctactcaatatcccacttcggaggagttgagtattgggaagataaagtttaaggctttcgacttgggtggtcaccagattgctcgtagggtctggaaggactattacgctcaggtggatgctgtagtgtacctggttgatgcatttgacaaggaaaggttttcagaatcaaagaaggagttggatgctcttctctctgacgagtcactagcaaatgtgcctttcctcatcttgggaaacaagattgatataccttatgctgcttcagaggatgaactacgttatcatatgggcctcactaacttcaccacaggcaaaggcaaggttaatttggttgactccaatgttcgtcctttggaggttttcatgtgcagtattgtccgcaagatggggtatggtgaaggctttcagtggctctctcagtacattaaatagagaacaagtgtttgctctttattatcctcatgctaatgtagtctccacattagcgtatctctgctcatgtaaattggatatactttaatggtggttttactttttctttgttatgaatgagacatactagtttctatattttttggtgtcagttgccagcttgtgttgcagttctatatatattggttattaaaattgcatagttaataaatggtggcttgaatgttactatgtt

SEQ ID NO: 31197 - DNA, 1327 bp, Glycine max
  Clone ID: PAT_MRT3847_128176C.1
acccacgcgtccgggctgcgagaagacgacagaaggggacagcatatagtcacataggctattaagggtgagatatatagaaaaacaaaggagaaaagatagaaatggagaagtttccagttgttgacatggggaaccttaataatgaagagagatcagcaaccatggagataatcaaagatgcctgtgagaactggggtttctttgagttggtgaaccatgggatatccatagagttgatggacaccgtggagaggatgacaaaagagcactacaaaaagtgtatggagcaaaggttcaaagaaatggtagcaagcaaaggtttggagtctgctcaatctgaaatcaatgatttggattgggaaagcactttctttttgcgccaccttcctgcctctaacatctcagagatccctgatcttgatgaagattacaggaaggtaatgaaggattttgctgtggaactggagaaactggcggagctagttcttgagttgctgtgtgagaatcttgggctagagaaagggtatctgaagaaggtgttctatggatcaaagggaccaaattttggaacaaaagtgagcaactaccctccatgtccgaagccagagctgataaaggggctgagagcccacacagatgctggtggcatcattctactcttccaagatcacaaggtcagtggattgcagctcctcaaggatgcccactggattgatgtccccccaatgcgccactccattgtcatcaaccttggagatcaacttgaggtcatcaccaatggcaaatacaagagtgtgatgcaccgtgtaattactcaaacggatggtaatagaatgtccatagcctcgttttacaatccaggcaatgatgcattgatcgctccagcaccggccttggtgaaggaagatgagactagccaagtttatcctaagtttgtttttgatgattacatgaagctctatgctggccttaaattccaggacaaagagccaagatttgaagctatgaaggccacggagtcatccaacattaatttagggcccatagcaacggtctaagcctcagattgaagcattatattaattataatataatatatgtttactaagattactgctatctttatttgctatggatgctccgttatgcagcatctgtagcataatatatagttcaaaaataaagcattagcttgatatgatagtttatttgtgtaatgtatgtgatggttaagttggtggcatgtattgatgcacttcttttattagaaagtaacccgatcttagctattttataaagaactctctcccatgatttttctttg

SEQ ID NO: 31198 - DNA, 1606 bp, Glycine max
  Clone ID: PAT_MRT3847_128177C.1
acactacccaattgaacttgcctttttctgatgcagttggaaccttttcctttggtcttctttccttctctgtctctctgcttattgttattgctgttgtgactaaggaacaaggggttgcttcttcccttttgttttcaaaggaagagaattttcaattttcaatttttcattgggttctctgaaatggagagagatttcatgggtctcaacttgaaagaaccactagctgtggtgaaggaggagatgaacaatgatggctgcaaaaactctggcttcaaaaaaggtcggattgcacagtggccattctcgaacaaagtatctgcccttccacatttgatgtctttcaaggcttctcaagatgataagactaagaatacagtgtctgataccttatcatcttctgggtttatgtctatcttaagtcaagaagcatttgacactagtcagaaacgctctgctggtgaaccccagaagtctttcaatcatgatgggcaaggtgaccttcatttttcgctgacttcatatcctgtacaacatgatgtgaatcatcctcatgatgtgaagatgttttcagttccaaatcaagcaatttcagtttccttggggaatccattcctgaagaatcattttgcagctgctggtcagaagccgttacttgggggaatacctgttaccacatctcattcagttcttccctctgctgttgctgttgctggaatgaccgaatcatgtaacagtgtgaaaccatctgctcaacttaccatcttctatgctggtactgtcaatatctttgatgatatctccactgagaaggcacaagctatcatgttgttggctggcaatagcttatctgcagcttctaacatggcacagccaaatgttcaggtgcctatctcgaagttgggtgctggtgctggtgtgcctgtgagtcaacctgcaaatacattacctggctttggtctttcaagtcctttatctgtttcttcacataccggtgtacagtcagggagtggcttaactagcactgatgaatttctggctgctaaaacaactggagttcccaacactcctatttgcaatgtggagcctccaaaggtagtcagtgcaaccactatgttgacatcagctgtacctcaggcccggaaagcatccttggctcgatttttagaaaaacgcaaagaaagggtgatgagtgcagcaccatacaacctcaacaagaagtctgaagagtgtgccactgcagaatacgctggtgttaacttttctgccactaacactgttttggccaagcaaggatagtagcccgcccgcacctttaggaaacaaactatttcggagaaaaatattgttgtaaccttaaaaatgttgtaagcagatgcttttattttcgttgatcacaacttatgctgacattctcaggttcagcacatagataggccattaccataattatttttgtggtgtagggcttttaccttgttatttgaaaggttggttgaattttagcttcctacacggtaacattgaaccaccatgtaatgtaactcgtgatgatttgtttaaatttgtggagtaaaagcccagtttagatatttatgtttaa

SEQ ID NO: 31199 - DNA, 280 bp, Glycine max
  Clone ID: PAT_MRT3847_128178C.1
tttttttttagtgaggagagaattaaattaccccgttccttttaaaaccttagttaaaaagcccattagatcaggggtgggtggtttaataaataccccatggttaataaaagccctggattaccagttctttatgggcaagaaaatattttacttacactggcttgggcctttcattttaaactggacactttttacattttaagtttcttaaaatctaactttaatttcttttttattaacacttgacaaggaagggaacccccttggtttgatgcgc

SEQ ID NO: 31200 - DNA, 2071 bp, Glycine max
  Clone ID: PAT_MRT3847_128179C.1
cccacgcgtccggaaacacaaccccattggacttgcttttttctgatgcagttggaaccttttcctttggtcttctttccttctctgtctctctgcttgcttcttgttgttgtaactaaggaacaagagattgcttcttcttcccttttgttttcaaatttcaatttttcatcgggttctctgaaatggagagagatttcatgggtctcaactcaaaagaacctcttgctgtggtgaaggaggagatgcacgtttatggcttcgaagactctggcttcacaaagggtcggattgcacagtggccattctcgaacaaagtatctgcccttccacatttgatgtctttcaaggcttctcaagatgataagactaagaagatagtgtctgatcccttaacatctgcagggtttatgtctatcttaagtcaagaagcatttgactctagtcagaaacgctgtgctggtgaaccccagaagtctttcaatcacgatgggcaaggtcgccttcatttttcgctgactccatatcctgtacaacatgatgtgaactctgtgaatcgtcctcatgatgtgaagatgctttcagttcccaatcaagcaatttcactttccttggggaatccattcctgaagaatgattttgcaactgctggtcagaagctgttacttgggggaatacctgttaccacgcctcattctgttcttccctctgctgttgctgttgctggaatgaccgaatcatgtaacactgtgaaaccatctgcgccttctgctcaacttaccatcttctatgctggtactgtcaatgtctttgatgatatctccgctgagaaggcacaagctatcatgttgttggctggcaatagcttatctgcaggttctaacatggcacagccaaaagttcaggtgcttgtctcgaagttggctgttggtgatggtgtgcctgtgagtcaacctgcaaatacatcacctggctctggtctttcaagtcctttatctgtttcttcacataccggcatacagtcagggagtggctcaactagtactgataaaacaactggagttcccaccactcctgtttgcaatgtggagcctccaaagatagtcagtgcaaccactatgttgacatcagctgtacctcaggcccggaaagcatccttggctcgatttttagaaaaacgcaaagaaaggttagtttggatgcaatatttttctgggtgggtgttatctgatacaatttatatttctccaaaaaaggaaggtgtagtagttatcatccattggttgacaacataaaaatttatgagtgggattggaaagtaaagctaatcattcctccacctgtccaccaactctctccttttgcacccctttaaatcgaggggggcgatgaggataataactttgcttttatttaaacttgccacttacaacaacaacaaagccttgtctcactagatgaggtcggctacacgaatcacacaatgttatttggctcagttaaagaccagagtttctgcttttattgaagtttacattatcttattattgaaattttacacttgcaaccttttactatgacatttaattccccattttaatcaatccaatcaaggggaaagacaactctttcatttcatctcatcacatccttttcagttccaacccgtacctgctgaaacttgcaaacatagcattcttgtgtttatagactcgtataatttaagatgttggtgggagaggctcagctattgatactataagagattgcttctgctttgggtttaagatatttagtctagtatatcttctccttgcttaatctggcagttagtataaccaagttgcatgaaattatttatgaggtcattgtgtgtggttgcagggtgatgagtgcagcaccatacaacctcgacaagaagtctgaagagtgtgccactacagaatacgctggtgttaacttttctgccactaacactgttttggccaagcaaggatagtatcccgcccgcacctttaggaaacaaactatttcggagaaaaatattgttgtaaccttaaaaatgttgtaa

SEQ ID NO: 31201 - DNA, 1413 bp, Glycine max
  Clone ID: PAT_MRT3847_12817C.1
tacggctgcgagacgacagaagggggagcctaaggtgtatgaaataagacgacaatattttgttccgatgggaccggacaagggacgatgaaatcagtgtagtggaagaagttgtgtttttgttcgagcaattggtggctctcaaattgtgaaccgcacatatacccaccctgcttcccacgccacatcgatctcacgttctctctctttcttttttcttgttgaaactgtgagtctatgttatttgtggcggagcatgaactcctccaccaacacctcgaattctcagtcaatggctgcagcagccagtgatgggtctgggaagaaggtaagaaaaccttacaccataaccaagtccagggagagttggactgaggaagagcacgacaagtttctcgaagctcttcaattatttgacagggactggaagaaaattgaagattttgtaggttcaaaaacagttattcagattcgaagccatgctcagaagtacttcttgaaagttcaaaagaatgggacagtggcacatgtgcctcctccccgtccaaagcgcaaagctgctcatccttacccacaaaaggcatcaaaaaatgttttggtgccactaccagcttctgttggttatgcttcatcaagaaatacgcttgcacctgggtttgcctcatgggatgaaacttccctgctgatgaatgccggagctgataaacccatgacctgtcaggatgaactcaacatgttcatcatggaaatgatgggatgaacgatgaatgccggaggatatgactgtcaggatgaactcaatgttcaattcggctcgagagctgatattggatcaaaggggataacacagattaccaacagcagtctcagtggtgttggaaattctactagaacactactgacttctgagataccaaagcaagggaaacaagctccagtgcttcatggtttgccagattttgctgaagtttacggtttcattggaagtgtatttgatccagaaacaaatgaccatgtccagaagctgaaggaaatggatcctataaattttgaaactgttttgttgctaatgagaaacctcactgtcaacttgtctagccctgacttcgaacccatttgatagaatggggagacaccccaatactactgggcaaggcgccaatgacccacccaaaagattactgcacaagcttaaaccacaagtaatttgacaactactcaattagtccctagacgtcaagggatctctctgagaaggccccagagtgttctctttttctaattacatgtgaatgacgtgataggatttccatgtaataaatataggctcttgtattaatttgtgattagccccggattacttgaaaaattaaagtatttattagattagtaagtgtataaaaattttaatat

SEQ ID NO: 31202 - DNA, 763 bp, Glycine max
  Clone ID: PAT_MRT3847_128180C.1
ggctgcactatcacacacatagttctcttatctggtgcaagtgcaacaatcaagtactcatcaccatgggaatgttgttgttgttgtcttactctctccttttcctggttctgttccttacactgaaatcccttttccaaagcagaaaattgagaaacctaccgccaggtcctcctcctcttcccataataggtaaccttaacctcctcgaacaaccaattcaccgtttcttccaacgcatgtccaaagaatatggaaacatcgtttcactctggttcggttcacgtctcgccgttgtcatttcctcaccaacagcataccaagaatgcttcaccaaacacgacgttgccttggccaaccggctaccttctctctcgggaaaatacatattctacaacaacaccaccgtagggtcctgctcccacggccagcactggcggaacctccgccgcatcaccgccctggacgtcctctccacgcagcgagtccactctttctccggaatccgaagcgacgagacgaaaaggttggtacagaggttgctggccaagaactccaaggagggttttgcgcgcgtggagataagctccatgttcaatgacttgacctacaacaacatcatgaggatgatatcagggaagagttttacggagaggagagtgagttgaagaacgttgagaaagcgagggagttcagagagacagtgacagagatgctagaactcatgggggtggctaataaggggagatcacttacctttcct

SEQ ID NO: 31203 - DNA, 1003 bp, Glycine max
  Clone ID: PAT_MRT3847_128181C.1
cagaagtaaactttttaggaaggctttctcaccccaacctggttaatctattgggatactgttgggacgaggataagcttcttctagtgtatgagttcatgccaaagggaagcttagactatcatctattcagaggaaacataacaccactttcttggaacacacggcttaaaatagctattggtgcagcttggggattagctttcttgcacgcctctgaaaataatgtcatattcagtgatttcaaggcctcaaatatacttcttgacgggaattacaatgcaaagatctcagattttggctttgctagatgggggccttttgaaggagaatcacatgtatctaccagggtcattggcacatatgattatgctcctccagaatacatagcaacaggccacttgtatgtgaagagtgatatctatggatttggtgtagtgctgcttgaaatacttacaggcatgcgggcacttgacacaaatcgacctcaaaccatgcagaacctagttgaatggactaagccttgtctttcttccaaaaaaaagttgaaagccataatggatgctaagatagagggtcaatattcacttgaggcagcatggcaagcagcaaaacttactctaaaatgcctaaaatctgtccctgaagaacgtccttctatgaaagatgtagttgaggcattggaagccattgaagctatccaaaacccacaattcgcagcgtacatctcatccaccccctcggcagggtcgtaagagtataaacaaatttataagaaaaaaaaaactagaaattgagattgattatatatagcaatatggtccattgaatgggttgtatcagtcatttaataaatgtgattttctttttcttttgctggttggaggggggaatttcacaagcatgttaacatatatgatttccttttgaattattcacattctttagtgggaaaacattttgtactagaacagaattttgatgctaacatgtcacttttttc

SEQ ID NO: 31204 - DNA, 305 bp, Glycine max
  unsure (1)..(305): unsure at all n locations
  Clone ID: PAT_MRT3847_128182C.1
aatgcatattntgctnacggaatgttgtgangtnannnntagttttnatntatagtgtnngtattntgattataacaatannattngtgattctaatgnnngagattgtattatnactngcnatatnngttttgatttgttcnagtagtagtngacngaaanatnatatataagattgtgtattggnagtngttntgatttggggtttggnttagntgattgnttgnntttngtttatnttttggttgtagttnnngtngaggnnngtttttnttgtnttgntgtgtttaatgttanatttttgt

SEQ ID NO: 31205 - DNA, 617 bp, Glycine max
  unsure (1)..(617): unsure at all n locations
  Clone ID: PAT_MRT3847_128183C.1
caatattaactcataattatattcaattatcaagtaaaatgtccgcctaccattataaaagatcattttatctatatactataaactataagtttcatgcttcaattggttcaacttttcacatcaacacaagcccaaaaccacaccagcaattctttacagctaatcacagtcttcaaaaattacattggacgtcaacctgccatgttgaagtcgcctgctggctggtataagtcgtagttctcaggtgcttccatttttccagtaagatagtcactcgctgcaaaaattaatagaacattcttgattgtcaaattctttgataaagaaaggttcatgtatgaagatatagtaaccctttgccaaatttccaaattaaaactagaaggtaattttcaccacacaagaaaatgatactcatcaaaatggtttctggagatgcccgaatatgcaaagtataggataaagggatgtttaaacaaggacaaaacnttagatcaagttccttatatccttaccaatcaagttctccattcaaatgatgacatgtgaatatttctttccaataacaaataacttctattagatatgtattgaaagaattttaaataaatatg

SEQ ID NO: 31206 - DNA, 403 bp, Glycine max
  Clone ID: PAT_MRT3847_128184C.1
ctttcggaaagacccacggtgctgctccttcggagaacactggcccagaccccaactctgaggatcttgcaacacaaggatttggctggatgaacaagcacggtcgcggtaacggacctgacaccatcaccagtggtctcgaggtcacctggactggcacacccaccaagtggagtaacaagtaccttgagtacctctacaagtacgagtgggagctcgagaagagccctgctggtgccaaccagtgggtcgctaagaccgatgacaagatcatccccgacgcctacgaccagggcaagaagcacaagccaaggatgctcaccaccgacttgtcgatgcgcatggatcccgcctacgaaaagatcactcgtcgttggttggaccacccagaggagcttcacga

SEQ ID NO: 31207 - DNA, 386 bp, Glycine max
  Clone ID: PAT_MRT3847_128185C.1
tgagaagaccgcgaacacaggtaggcgtaccttaaaaccggaaacaaaagcaaacgtaacttggttctaagaaacatcccatttgttgctacttatttggtgtacgagatttataagggaaagaaaataactctgtgagctggccacagactgcgggaattactttctcttacactcttagaggattggctgaacactctgctatttgatataggacctgagagtccaatttaagcattggccggtgctatgaagagctctgctaaagtgcaagccaaagctggtgaaacaccggatgagtgcaagaactctaataattggaatctgactgcacgggtggactgtcttattcatgtacttcataccactgttttgatgcaactgat

SEQ ID NO: 31208 - DNA, 197 bp, Glycine max
  Clone ID: PAT_MRT3847_128186C.1
atcaggaccattggatccacgcgttagaatcaattgtacagaacaactgtgttactactttgaacttggctaacttgattcaattatgtgctgaatgattgattcaagttagccaagttcaaagtagtaacacagttgttctgaacaaatagttcggtgtaggggatccagtggtcctgagcaaaaaaaaaaagaag

SEQ ID NO: 31209 - DNA, 1070 bp, Glycine max
  Clone ID: PAT_MRT3847_128187C.1
caagcctgcggcggcctcggtcgcggctcaggcgctcatgtccctaacagtaccaaatgatcaaaataagaattttttacccaatcacagaggggcgcccatggctgccatagatcttgctctggcccacgcctccagccatctgcgggtgtatcggactgccaggagcactgacaaacctgcagcttcttcagatggggatgaagatttcatgtccttaacagtaccaaatgatcaaaataccagtttttttcccaatcagagaggaacttcaaatgcatctatagataatgatatgggctacacttcaagcaatctatgggttaattcttcttcgagcgctagaggagcacggatacaagctaactcaagagatttggatgagcttagtcctcaagaaatcttatcatctcagcatactgggaaactttctgagggtagcaactatatacaaacaagaatcttcaacaaggatcaaaatccaagcttggagttcaccttagggagatcaaattggcacaacagtgaacatgcctaattttaattggtttacatatatgatcactttattactagccaaattaatagaaaagattaatatgcacaggtatataaattaatatataggtagtgcttttgtcaagacaaagatgtctgcactttcccacaaatctaaaagcatctctgtatattctttttgggccaaagcttattataggttgtgttagtcattatataaatgttatagttaaaagtaaaagttgaagaaaagaaggaaccagatgtataataaggcctttgttccctcctttttaattcttttctttctttttctctccttttctctagaggttcctacatatttgtccatatacaactttttttaggctcattttgattcctgagtgatcatcagtgtgtgtgaaagcttgatagctgttatctatcgtttgtatacttttgttccttgattttatccttgacttgtgcacaaggggatatcatcaaagctaaaaagcagtgatgggtgtgaaagatttgaagaatatattagtgagttttctttcgtg

SEQ ID NO: 31210 - DNA, 463 bp, Glycine max
  Clone ID: PAT_MRT3847_128188C.1
attggcttggtattggtccttccataggttcccggcacggtgagggaaagcggtttctgttgatggaatctcagccattcttccaccataaggattgaagtacattattgccttctccaattcaatcatcttgttccaaatcccctcccaaccctccttggaaattggcttcttcacatagtcagattttcttttcaagtacttaaaagactgaggttgtctttcaagcaaaatctcaactggggttgcaatgtctatgttgtcccaaaacagcaccgatcgaagccaggttgtctcaatgcaatcgaattgcttcaaaccggctcgagcggctcgagcacaagtttacaattcctggtttgcctcatagaatagagatgaccccttcgcagctagcagagactaagctctcatgaggtctatgcttcctgataaaatgagaagcacagttggagaagctcgc

SEQ ID NO: 31211 - DNA, 297 bp, Glycine max
  Clone ID: PAT_MRT3847_12818C.1
aaaaaactcctaaaacaccaaaaggacctagttctgtagaagacattaaagcaaaaatgcaagcaagtatagaaaaaggtggttctcttcccaaagtggaagccaaattcatcaattatgtgaagaattgcttccggatgactgaccaagaggctattcaagatctctggcagtggaggaagtctctttaagaaaatagtttaaacaatttgttaaaaaattttccgtcttatttcatttctgtaacagttgatatctggctgtcctttttataatgcagagtgagaactttcccta

SEQ ID NO: 31212 - DNA, 579 bp, Glycine max
  Clone ID: PAT_MRT3847_128190C.1
atccctctctgttctcttctctgccttctctgtgtataaccccgtgacccttcttctcatttctcattctcttttgtttctcacaagagttattatgatgattgttataactattgttactattactaaacttggtgtagaatgacgaaccgtaatgtgaataacacccttgtggagttggcaatgtcgatttcaaacacaagtgctctacctagagctacggtgcctggaataatggccttgcttggtggggttttgggcctaccccacaagaagctcttaatgaaaactttggaagatggaagtgttaataaaggagggaacaaagttattaacacatggattgattcaatgagagcctcttctcccacacgatgtcaaatccacacaaaacaaccaaaaccaagacccaacaagtccttggactctttaccacccttcggcactgagcatgtttgatcatattgtatgtgagtccaaagggaagcagattgtgacttttcttgactatgatggaactctctccccaattgttgcagatccagataaagcatacatgagtaaaaagatgaggccaca

SEQ ID NO: 31213 - DNA, 195 bp, Glycine max
  Clone ID: PAT_MRT3847_128191C.1
tttctttatctgctccactcaccgctgctcaagtgcttgtggtcagctggatcaaggacactgttgacgcattaacgctgactaccgaacctactaacaatggactgttgaaaagaccccgagcagctacgggagcaaaccttatcaccaaacctgtgtgagaggtgtatctcagctcacaagcatatatgcaat

SEQ ID NO: 31214 - DNA, 217 bp, Glycine max
  unsure (1)..(217): unsure at all n locations
  Clone ID: PAT_MRT3847_128192C.1
tgaggtcaaattcgcttggaaaattcaaagaaacatggcaaagcataaacacattcttgaaagcatcaatgctatcattaaaacaaagaatcctaattttaaatcatatattaatccacaaaaacaatacgcatatgcagtaatataagtatgaccaacgcaactcattccagatcacaacggaaataagatgttgagattaacatcaatacanaaa

SEQ ID NO: 31215 - DNA, 373 bp, Glycine max
  Clone ID: PAT_MRT3847_128193C.1
cgggacatcgcccgacacggattgcgatggcggaccgaccccgggctgtggatatgcatcgagggacgagatgctctacatcgtggaaggactctggcgccctagacgcgcctaggaacctgcacgctcatgacggcagtctgtggtctcctatgtatcagtatcttcgtcccactgctgaatactgctgcaatgcgctatcatggtttaggctctgactggtaagatgcatggttatactgaacttacctccgaaaaagaagacttttactgatcaagatataaaataatgaaaccgggtctcataagacattcttttcatttaagaaagaatctaagaacaaagtcatctttacaaaaacattgattgctt

SEQ ID NO: 31216 - DNA, 333 bp, Glycine max
  Clone ID: PAT_MRT3847_128194C.1
acgaggaaagtgtgttactttggctaaaaaaggggaggggaagtagaaagtaaaaaaaaaaaaaaaaatctcgctctcatgattttgtaattaaaaaatagctcctagcactactttctcctacctgctccattttctgtttcacttatggttatgcagctgcttggtgtcatcaatatttaattgtttcatcaaaatggctaagggtgtatattatatatttttgttttcttttaccttataagaaatatgcaatattcctcgtgagcataccaaaacaaataaatgtatgtataggttgcaggaaaaaaaaaaaaaaaaaaaaaaaaaaaa

SEQ ID NO: 31217 - DNA, 442 bp, Glycine max
  Clone ID: PAT_MRT3847_128195C.1
cacgcttctattctacacgcccaatccgatggaactctacttttgtatctttctctctctctttctaacaatgtgtgacgtagcggccactcgatccattgactcatacgtcacgcgccccacctgatgatctgcacaccacatggaccacacgttgctgacgccttcaacttctggttccaaattggtcggagacacaaaggaacaacccctccaaagtttgctcccgaagcagcctcgtaaatgcgagggagtctgcgcccgctgaaggagtttccgcgtcacccgaagatgatgcagagatggacgaagagttgcaacacttgcgcggtgtgcaacgacttgacgacactgctgatggagtgtgagcaatgcccacgtctaagagggcgacaaaagctgtttgcaccattgggacttataccaacaccaggggaatgat

SEQ ID NO: 31218 - DNA, 574 bp, Glycine max
  unsure (1)..(574): unsure at all n locations
  Clone ID: PAT_MRT3847_128196C.1
ggtataagagaaacaagacaagcacaacaagcattctgaaattctcttatttgttagtatcaggactagtaacaattaaccttgaaaataaagcttcatctagttttatcttccataggtagaaaagtgatcaagagaatacacaagtcaccaggtgggaatgtaccatcatcaccaacaccaaggaaaaaacattcattcttcttccagaatgccaatcccctctgagaggcacatgttccttcaaacaggaaatggatctggtgattctggacttgtgctttcaactgatgctaagcctagattaaaatggacaccagatcttcatgccaggtttatagaagcagtcaaccagttagggggagctgacaaggcaactccaaaaacagtaatgaaactcatgggaattccagggcttaccttatatcatctaaagagccatcttcagaagtatagattgagcaagaatctgcatggacaaaacaacaacgtaacatacaaaaatcantaagnagaccaacccttttttcatttggtcttgaactaactaataaaaccagaaaagcttgtttct

SEQ ID NO: 31219 - DNA, 101 bp, Glycine max
  Clone ID: PAT_MRT3847_128197C.1
ctcgagcggctcgagatctgattggactagccagtagtagtaaatttgttggagctggttgggaatgacgtcgtaatcgaaatcaaatggaaattccaaat

SEQ ID NO: 31220 - DNA, 238 bp, Glycine max
  Clone ID: PAT_MRT3847_128198C.1
aattggttattgtatagctttttatattttaatagcccgaaaagaccccactggggaatattaggtaacaaaaaaaagaacagcccccacggaaacaaaacgggaaaaaaggtggaaagggatctttaaaccaggaacaaaatagctcccaccgaatataaaaccatacgtctaacacaagattatgttgtaccagaaatctacggagggaaagcaacaaaaaagggggggaaaaagg

SEQ ID NO: 31221 - DNA, 1680 bp, Glycine max
  Clone ID: PAT_MRT3847_128199C.1
cctacgtgtccctagagggccaagttggcggtggactcaacggttccttctctctcttctacctcttcgcagttcccagttccccaatctcctaacaaaaacaaaaaaacagcactctctctctctctatgcaatgtaggtcgccggaggatggcaaactaccaccgcaacaacgtcgaaaacgtcgtcctcggccgccaccaccaccacagccaccgttccaagtccgcctccgtcgccggccacaccttccgcctatggaatgccgcctccttccgccgcatcatcttcgacgccgtcagctgcggcgccagctcccgctacgccgcgagatccaacatctccgacgagaaacaacacctccaacaaaaacaacaacatcataagacgacgtcgatgaagaacaatgcgaacaaatttcctttcatggagtgctttagattcgaacaagcccatgattgggtcttcggcttcaatttcattcttagttagaacccttcagagtttagatgataagagcagttcccaagccaagcaagatgctctccgagcattgtacaatctttcaatcttcccaggcaatgttgcattcattttggaaaccgatttggtagtgtttctggtgaactcaataggggacatggaggttactgaaagatcccttgcaactctcagcaatatagtgtccacccgagagggtagaaaggcgatcagcacggtgccggattctatcccaattttggtggatgtgttgaattggactgattcgccggaatgccaggagaaggcatcatacattttgatggttatggcacacaagtcctatggtgacaagcaggccatgattgaggcaggggttgcatcatccctgcttgagttgtcccttttgggttccacattggctcagaaaagggcctcaagaatattggagattttgagggtggacaaagggaagcaagtttctgggagctatggcttgggtgcagctgtctctgcccctatttgcggctcttcgtcggcgaggccagacggaggaggaggaggaagagagtgttttgaggaggacgaagagatgatgagtgaggagaagaaagcagtgaagcaattagtccagcagagtttgcagaacaacatgaggaaaattgtaaagagggccaacttgcctcacgatatcgcgccatcagatcattttatgtcactcacttcaagttctacttcaaagagcctgccattttgaaaaattgaagctatgaagagagtcaaggttgaagagaataaaccatgaagttagtgttcaaatcatagttttgttgaatattgagcttttagggttgtagttatttgctagatctgccaaagtagccagccattgcttgtcaaaatcttgatagataattataaaattatagtttaagtttcttttacaaaaaaaaaaaaaaaaaaaaaaaaaatttgtttgattttgttctttagagcagattttgcttgtttttaaactgaaaacgagacctttaactatagaaatggacatttgttcccattatgtgaaatgttacggtgatgtcccttgtgttgtggggtacagtaaatttgtaatgttatcttcttcccctggtggctttaattttgttgacttttagtgtaaatatttaaatgtcaatgtagttttggtctttaatt

SEQ ID NO: 31222 - DNA, 155 bp, Glycine max
  Clone ID: PAT_MRT3847_12819C.1
aaagccaacaaccagaacgttgaaaaagctcaaacttttgacattctatgtgcatgtcagatcagaacttgaaatcgggggggcacttgttccaatacaatccaccagtatattgtaaacacaaacaaagatttggattcttttgctaaataact

SEQ ID NO: 31223 - DNA, 342 bp, Glycine max
  Clone ID: PAT_MRT3847_1281C.1
caatcagaaatgttaagtgctcaagtcaataatagcaataattttaagaacacatcctctgcaaagttatcaaacttcagctattttagctcaacatcaatcatgaaagtttgcatttatcacacacaaaattctaagttaacaccacaggaaattacaactgaacaacaactaaacaattttgcccatggccttcatgcgttcaatgatgctctcaagctctttcagattatcctcaaacacagctatgccgattatcacaaatcgtttgcgttttttgagcaaagctttgagctgatatcctttttctttaagcacgcgtggatttgtaaacataataat

SEQ ID NO: 31224 - DNA, 560 bp, Glycine max
  Clone ID: PAT_MRT3847_128200C.1
ggaattcggcacgagggtatttcttgcaaggtggacactagatcagtcaaaccacccatggaatccatcttttcaacactatgcaagttgcggcgagtcagatttgaaaaccacagttcttgcattacaagacctacagctgaatactgatggctgtcctctaactgccgtccgcacgaaatacagacaagacaagtttaaatgtgtagcggctttgtcttcaccaaaactgcttgaaactttgttctgaagacaaagatgatttgacaagccaatgctagggactcctaactgataacaaagaaatcctcattcctaatctaatcttcccttcaacttccattcattattccctgagatatcttctgtatgtacattttacattatattctaagccctctgatatatacacaacaaatatattctgtttctgtatgtacattacatgatagaactagaaccccaagatgacttgttgggtgttttgagcgtacgtgtagtaatgaccattgttgggttaacaaaaatggcatattttgccttggactaattcagtcctt

SEQ ID NO: 31225 - DNA, 689 bp, Glycine max
  Clone ID: PAT_MRT3847_128201C.1
aattaaagaccaaaactacattgacattaaaatatttacactaaaagtcaacaaaattaaagccaccagggggaagaagataacattacaaatttactgtaccccacaacacaagggacatcaatgtaacatttcacataatgggaacaaaatgccccttgatacttatttgcagcatacagctcagctcttcatcccaaccagatctaaattcttccatgccatttggatctgcggttccacggtttattctcttcaaccttgactctcttcctagctgcaattcttcaaaatggcaggctctttgaagtagaactcaaagtgagtgacttaaaatgatctgatggcacgatatcatgaggcaaattggccctctttacgattttcctcatgttgttctgcaagctctgctggactaattgcttcactgctttcttctcctcgctcatcatctcttcgtcctcctcaaaacactctcttcctcctcctccgtccggcttccccgacaaagagccacagataggggcagagacagctgcacccaatccatagctcccagagacctgcttccctttgtccaccctcagaatctccaatatccttgatgcccttttctgagccaatgtggaacccaaaagggacaactcaagcagtgatgacgcaatccctgcctcaatcatggcctgctt

SEQ ID NO: 31226 - DNA, 507 bp, Glycine max
  Clone ID: PAT_MRT3847_128202C.1
ctgcgagaagacgacagaaggggggggagaaaacacatgagatcatatggatttgagagctcatccctttctttgaaatgaccacagaactctgcagagttgatagcaaaagaaaagcaccagagagaaagaaagccagaagaaggatcataagaggagagagagaaagagagagcacacaaaatggtttccaaagagcaaaagagagcagcactgcatgagaagctgcaaaatcttcgttctattactaactctcatgctgtaattccctgcattttctcctctgatatctttctttccattggatatatttctccgtgaatattctcaaggaaatatgccaattgcctaaaagaatgttcagttagacagtaatattgttgtacacttatatatactcccctctgctattcagttcctcttccgaatttgattccatttttgttaaaggaaaccttcttcttctttgttatttttcttattattcaaatcttacatagttatata

SEQ ID NO: 31227 - DNA, 1147 bp, Glycine max
  unsure (1)..(1147): unsure at all n locations
  Clone ID: PAT_MRT3847_128203C.1
ttacggctgcgagaagacgacagaagggggtggactcaacggttccttctctctcttctacctcttcgcagttcccagttcccaatctcctaacaaaaacaaaaaaacagcactctctctctctctatgcaatgtaggtcgccggaggatggcaaactaccaccgcaacaacgtcgaaaacgtcgtcctcggccgccaccaccaccacagccaccgttccaagtccgcctccgtcgccggccacaccttccgcctatggaatgccgcctccttccgccgcatcatcttcgacgccgtcagctgcggcgccagctcccgctacgccgcgagatccaacatctccgacgagaaacaacacctccaacaaaaacaacaacatcataagacgacgtcgatgaagaacaatgcgaagtcggagaagctctcggatctgctgagcattgcggaagccgaaaccgacgtggaaacgaagaagaaagaagagaagctggaagacttgaagcgcctcgtgaaggagcttcagcagcacgaagaagattcgacgaagaataaaaaaagtgaagctgcggcgaaagtgaggttgctggcgaaggaggagttggaagtaagaggaacgctcgctatgttaggtgccattcctcctctcgtcgcaatgctcgatgaaaccgaacaaaacgacgtcaattcgctcgtctcttcgctctacgcgctgctcaacctcggcattggaaacgacgcgaacaaagcagctattgtgaaagttgggtctgttgagaagatgctcaagttgattgaatctccagatggtctagattcttcggtttctgaagcaattgttgcaaatttccttggattaagtgctttggattcgaataagcccataattgggtcttcggcttcaatttatttcttagttagaacccttcagagtttagatgatgagagtagtccccaagccaaacaagatgctctccgagcattgtacaatctttcaatcttcccagggaatgttgcattcattttggagactggatttgntagtggtttctggtgaactcaataggggacatgggaggtaactgaaagaacccttgcaactctcnagcatatagtgtcgacccgcgagggtagaaaggcgatcagcgct

SEQ ID NO: 31228 - DNA, 699 bp, Glycine max
  Clone ID: PAT_MRT3847_128204C.1
cggtccggattcccgggtcgacccacgcgtccgctctcttcttcttcgcagttcccactatccaacaaaaacaaaacaaaaaaagaaaaacacaacacaacacattctctttctctctagtttttattttttctctctctatagtttactctctctatgcaatgtaggtcgccggaggatggcaaactaccaccgcaacaacgtagaaaacgtcgtcctcggccaccaccaccgttccaagtccgcctccgtcgccggccacaccttccgcctatgtaccgccgcctccttccgccgcctcatctttgacgccgtcagctgcggcgccagctctcgctacgccgcgagatccaacacctcctccgacggcgagaaacagcaaaagcaaaaacctaagacgtcgtcgaggaagccgaacaatgcgaagtcggagaagctctcggatctgctgagcattgcggaggctgaagccgacgtggaaacgaagaagaaggaagaaaagctggaagaactgaagctcctcgtgaaggagcttcagcagcacgaagaagtagatgattcaacgaagaaaaaaagagaagctgcggcgaaagtgaggttgttggcgaaagaggatttggaagtaagaagaacgctcgctatgctaggagccattcctcctctcgtcgcaatgctcgatgaaaccgaactaaacgacgt

SEQ ID NO: 31229 - DNA, 167 bp, Glycine max
  Clone ID: PAT_MRT3847_128205C.1
atacaaaaaaaaaacaaaagctttcatatatgtccacccattatcataattaagaatgagtaaaatcaattgcccccaaaatttttcgtgggttacgccaacatctgtacaaagccccaaagcatgggtttacattaaaacacttttatcttaaaatcccgggtaca

SEQ ID NO: 31230 - DNA, 608 bp, Glycine max
  Clone ID: PAT_MRT3847_128206C.1
cccacgcgtccgaattgcagcggattactgtctgcggtgaaatatcatgtcgaatattactgggtgcgcgcgctttaggccttcgaattcgaaagagaagcaaaatggcaacgactctggctgcattcggaacatagactccgaaactttcattttcaaggacgagaaggatgaagaatttgtgtttagctttgatagagtgttctatgaaaaatccgagcaatcggatgtctaacttatcctagctcaacccatcaaaaatgactggagctgacttgacatatagtatggagaatgacaattatcacgaagcaaggacctggaatacttgaatgtgaagaacagaacaaggggcttcttccaagagttgtagaaggactttttgattccataaattctttggatgaagagaagacatattcaattaaattgtcaatggtacacagctacatggaaaaacgtaggaacttagttgaaatcatcaagttataggaaataattattctgaatttggttatgattggtccaagttgaaatctacatggaaaaagtaaggcttgcatagaaaaaacaaagaatttttcccgatatatgtacttgagcatatt

SEQ ID NO: 31231 - DNA, 744 bp, Glycine max
  Clone ID: PAT_MRT3847_128207C.1
agtggaactcatttttccccattttgtgaaattcaattccaagggtttccattttccatttcaatgtcttcccattcgcacaaaggcacctccttctacggcgatgccgccccttatcgatccagagaggggcttagcactcgacccgttgcatcctccgatgaaatccaattgcacatcgatcccggcatcgacttcgacgacgaaatcaccggtcttcgtggccaagttaaaaaaattgaaaaatgttgctgaagagataggttcagaagtcaagtttcaaagagattttctggaacaagtgcaaatggtaatgatacaagctcaagctggggtcaagaataacttaagaagattgaacaagagcatcgtcaaaaatggttccaacaatattgttcatgtgattgcttttgcattagtctgtttctttatagtatacttctggtcaaagatgtccagaaaatgatggctcgtagttgaaagattttattcaaagcttttttcggttgactcattatgatgcctaatcttgtacagaaaagctacacttactgttgcagtttacagttaaaaattcttcgacttcaaagttatgtgtcttggtcgaagcagtagttttgtgtaatagacaggataattgcttgtttaatagattgcaaaagcctcttttctcttaaaaatatcatgtgaacgtctgtagtagttaataaaatccttgaactttattcaaaaaaaacacacccc

SEQ ID NO: 31232 - DNA, 295 bp, Glycine max
  Clone ID: PAT_MRT3847_128208C.1
cgtcattggtgacaagttgacgaccatcaacaaaatgtgagcatatggactcaatacgggtattgcagggtctggtctattgcgcaccatacctgactccatttgacaacagactgtttcgaatcaaacggcaccagcgagaacaccaaagaattgtgattctagcatgcagagcttctgacagttctctattgaccttctagacggaggaatcttataggacaaaactgtagattggatcacacttatacaactgtctacaatttataacttattgagagatgctgattggaag

SEQ ID NO: 31233 - DNA, 409 bp, Glycine max
  Clone ID: PAT_MRT3847_128209C.1
tcaattccaagggtttccattttccatttcaatgtcttcccattcgcacaaaggcacctccttctacggcgatgccgccccttatcgatccaggtttgtttgttttttactctctctttccctttctcttgttcaattcaatttcttgcgtgaattgcagagaggggcttagcactcgacccgttgcatcctccgatgaaatccaattgcacatcgatcccggcatcgacttcgacgacgaaatcaccggtcttcgtggccaagttaaaaaattgaaaaatgttgctgaagagataggttcagaagtcaagtttcaaagagattttctggaacaagtggtacgtaatttcttggatcacctatatttcgcatagtttttggtatttttatttatttattcgtttatttt

SEQ ID NO: 31234 - DNA, 371 bp, Glycine max
  Clone ID: PAT_MRT3847_12820C.1
cgcaaacgacgtcgtctcgcccgaaacgcggaacttcgaactctactacaacgacgccgtttcaggttcctccggcccaagcagtctacgtgctttaccacagggagtatgagaattgatagtgtgatcctggttgttccgtgtttgagtgcgaatgaaaggaaggagcttgcgtcttatggggggggtttgggggataagctcaagacccagttggtgggaaagtctggtgttacgcccaatgttgccacctctttcattgggaccctcgaaggcaacgagcttctgaggattaaaatacataggacctgtgcaatcgagttgagtgatgtggtgagagggttgagacaagcagctggttcagtgagtgg

SEQ ID NO: 31235 - DNA, 174 bp, Glycine max
  Clone ID: PAT_MRT3847_128210C.1
ggccgggagctcctagtcgggggttccctccggggggagccccgtttgttggagagagggctcccattatatgaaagggcatggaagaaaagaagcgcagaggccatgagtacatccaatgtgctctgaccctccacatgaaagccagagaccaaaagaataccccagcacccg

SEQ ID NO: 31236 - DNA, 147 bp, Glycine max
  Clone ID: PAT_MRT3847_128211C.1
gtcaggtcatccagatggcttaaggcgcgacaagctaggcctgattcttgagacctatatggaacgcatgatgtgattcctcaaagctgtcctgtgacgtaccatggctgtcgcccaaaagattcaacaagcagctgagagagtgca

SEQ ID NO: 31237 - DNA, 541 bp, Glycine max
  Clone ID: PAT_MRT3847_128212C.1
cgggatatcaccaaaattgcaacactatggttgcatgatagatctactagctagaagtggaaagttcgatgaagctaaggttctgatgggaaatatggaaatggagccggatggagctatttggggttctctgcttaatgcttgtaggattcatggacaggttgagttcggtgagtatgttgcagaacgcctctttgaattggagccagaaaattccggggcatatgtgcttttgtcaaacatatatgctggagctggcagatgggatgatgtagcaaagataagaactaagttaaatgacaaaggaatgaagaaagttcccggttgcacctctatagagattgatggtgttgtgcatgagttccttgttggtgataagttccacccacagagtgaaaatatttttagaatgctggatgaggtagataggctcttggaggagactgggtttgtgcctgatacttctgaggtactctatgatatggatgaggagtggaaggaaggggctttgactcaacacagtgaggagttggctattgct

SEQ ID NO: 31238 - DNA, 331 bp, Glycine max
  Clone ID: PAT_MRT3847_128213C.1
gcttacgggtcccacacttggaagactacggcccgtggacaaatttttaaacctcttatatgcatgaaccatggaagggcatacctaaggtaaacaacaagagccctgtctgtttaccacaggtaatagaaccgcggggtgtataacagaatatttgaatcactaccagagaggaatgaacctaaccttgggatggggaatttactatgagggagagacagaaagacaggcactgaccgaaacttctaccttgtcaagcttgggggtgaaagaaaagttggaacatactccatccactaagatagtggttagagcaaaatggcgtattttt

SEQ ID NO: 31239 - DNA, 499 bp, Glycine max
  Clone ID: PAT_MRT3847_128214C.1
gcgaacatctcactaggatgcggccgccctaaatacacagcttagagttggaacagacaagagctgctcaccacttctgaggtgggtttctgcatctacagacacacgtgagaaaggctcaacggacaagctgtcttcctctggccaggaccaagaaaagagaaagggcatgattggttgtcaccaccgtcagtcatctaagccctctaagcaactccaccgggattggggcttgcagggcaacaacagaagctatactcaactccatttgtggtgcctgccacaactggggacagctgcgcagtccctctctgaagaggaaaagataaagctcatttgcctaacgtggcaaagaaaaggtcaatactacatcaactactttgggacttaagataccactaaccacccgcatggcagccaccctcctgtattacttgggcatggctacagcgccttcgtccctcactggcgcaggactatgagcacactggcccataat

SEQ ID NO: 31240 - DNA, 330 bp, Glycine max
  Clone ID: PAT_MRT3847_128215C.1
cgtttgcgtggggagactctgataaaccgcgaacacaggttgtctagacttaaaaccggagacaagcgcgatcgtgactcgattacaagaatgtttcagatccttcatactgggcgcgagacgagatctaaagggaaagaaaataactctctgtgatgagcacagactttgcgaataaatgtcttctccactattagcgcatgtagccgaacactgtcctattcgataaaggacttctggcgagatataaactttgtgcgcgcctggatcagacctttggtaaaggtgaagtgcaagcctgtgaagactaggactagcgctacacactgt

SEQ ID NO: 31241 - DNA, 479 bp, Glycine max
  Clone ID: PAT_MRT3847_128216C.1
acttggttcaaatatctttttttttaatattctcatgccaaggaaaaaaaacttggtcccaaaagcaaaacagggaatacccccaaagttttttttgggctaaagcaggaatggggttctttaaaggcaagaactttttttacgggggtggttcaaacataagaccaaatttttctaaccgggtaacccagacctcaaccaatacaaatgtaaaactggagggggctcaaagatgctttttttcagccatagcttccacaacttttttttcaaaattgcctttttaaatccacgccgaactttggcggggcaaaaacttttttttttcaacctttttcccttaaagcattttgactttcatcctccagatttaaaggttctctggtttttttttaaataggggttctcaaaactggtggcgttagaggtcgcgttcctgtgctttaagctgcgcgggttgagccttgagctttttgcgc

SEQ ID NO: 31242 - DNA, 309 bp, Glycine max
  Clone ID: PAT_MRT3847_128217C.1
acacgcgtcccatgcataatagactttattacagataatactatcaagataaccggtgggcattatttatttatttgggtcataatctttatataatagataacagatacttctatttagattctcatgatttatttagctagaacttaaatggtgtatccctatgattcctattcgaattctatttataattttaaatcacaatacttttaatttatattaatttgatctcttctctaactcttaacaactataacatcaatttttatcctacattctacaaatctcatatattcatattcataatat

SEQ ID NO: 31243 - DNA, 119 bp, Glycine max
  Clone ID: PAT_MRT3847_128218C.1
cttatttaaggatccatgctgacacatctcgtatcttgtcaagtacttgctgcaagcatgtcgtgtaaaacgatactagctatacatagatccgagcccataccacccaaaatggctaa

SEQ ID NO: 31244 - DNA, 1258 bp, Glycine max
  Clone ID: PAT_MRT3847_128219C.1
ttaaaactaaaagagtgtttttttttttcaaacaatgggctgtgaatcataacttttttccccctggcttgagtgtcttatcctagaggagctaaattctaaagatgggtgctgcattatgtccgatatagtttagccatgtgtgattttttgagtaggtcagttgtggcattagtttgtgtgtgaagtcctataaacattgcttcatcagcagtattaaaattgtttcgtatcattctaggcatgatctttttgtactttacctattgtggttgttgccccaaggttttatattttgcctttttctacaagaccccccatgttgtttcataattatgagtacatgccgcttataacactagaacaatgcaaattgatgacactgcttgttgcccttttttcctgtttgttagcttttgattttttcttttttcttgtagagtaagcgccctacgtttagttatatatattcgtatgttgtggaacacggaatgacgattgtgggttttttcatcatgttccgacgttcacattcaggaatcgttttcttcagaaatttgccatcgttgagagaagcgtgagagccttagtcgttcaagatgagagctaagtggaagcgggacgttcacattcaggaatcgttttcttcagaaaatttgccatcgttgagggaagcgcgagagccttcgttgttcaagatgagagctaagtggaagaagaagcgcatgaggaggttgaagaggaagcgccgaaagatgagacaaagatctaagtaggtgcttgaacaaggagtggagatgatgtgcttttccatctgctaccagcttcatgacattttatgctgtcatggctcttatgatgatcttgaggtctagtggcgaggggagcttccatcttgactttagtttagctttactggtctaaagattgctgttttagtgtgggttaagttatgatattgagagttttgtgttatctaattatgtactggtacgttttgtatactttttggtttatcttaatagcttaaatattagtattttgagacgtgcatgaaaatttgatcctttttatgcattatgtgacgacgcctaaatcctaatcatcagctcatattaaatcatgttttggtgtctattagatgtatgcaatgttataatttcttttttgagatagttatgcataattattttgtattaggatatgaatcaatgaattttacgctgaagtgggtgtcatgaatgtaacataaaaaaga

SEQ ID NO: 31245 - DNA, 248 bp, Glycine max
  unsure (1)..(248): unsure at all n locations
  Clone ID: PAT_MRT3847_12821C.1
gatcagcaaccaaacatgtgataggcaacatggggcataatgcttaatgatactagggggaacaaaaaattactcttgaccttttgaaaggtaccccgtntcttcactaccagaagagctgtgtcacaaatcatcagtgaaagttttgcttgggggggatttcaaatactgaaactagggttgaatactttttaattcttaaagaaatagctacactggaccaaataccatctacaggaaaagagtag

SEQ ID NO: 31246 - DNA, 455 bp, Glycine max
  unsure (1)..(455): unsure at all n locations
  Clone ID: PAT_MRT3847_128220C.1
agagtctaggtgccctccttataccaagaaacgtttgattccagattccactgtcatttctacccgccatgcctctttgagatcagcaaagaagcttattgaaactagaggaacatctgttgatgtagctcaaatgaaaaaagcgagtgaggatgagaacccggtggctaatcactcagttcaaatggaagagcacaatgcatttgaagcccaatttatcccttttgagcaggaacatttggaagaggatattgaagcatctaactctggggaaagttcagacaagaacaatgacaagtccatttcaatggttggacatccatccttctgcctcaatttactgaatttattaatatggggaacaatgaggttaattttgttggacaaagatcatggattgacaaggttgaaggatactaagtgaagaagccagaattcatccncatattaagaaa

SEQ ID NO: 31247 - DNA, 266 bp, Glycine max
  Clone ID: PAT_MRT3847_128221C.1
cctatgcgtatgtccgggcgttcaatcacaagcgattatcgtcatgcatcatgatgatagctacaagcacaagaagaacagttgcatttcgtgcgggaccaacggatcccgtcactgtcccaaaccatagtgtatccactttgctcagctctcactctgtcaactacccatgtgcataatacctcgcactccatttcgagcgatcagattatgaatatggtggacgaccgctattttattatacctttatcacatcaacattcatg

SEQ ID NO: 31248 - DNA, 762 bp, Glycine max
  unsure (1)..(762): unsure at all n locations
  Clone ID: PAT_MRT3847_128222C.1
tttttnnntnacaaaattccaaccatacaaaaaaataataacaaattaatttatttgtggcagtgacacagtgaatcacacacaaacatattactgtatgattattaatactactattattacattatttttctcaagactgtatagtgtagttattttggtgggtgaatagtataccaagtttggacaaaagttagggcaaggcccacaactgcagcatggaatgcaatgatagcccaagggttgctgaaataggtatgataccctagagccagccaagtcctactcttatcactgtaatgcttctcaatttcatttctaacatcagcatatttcaccatatcaggaaccaagtcagtgcttatggtattgaagaggttggccacttcctcatcactccctaatgaattgagcaaaatctgttctgatctcaatgccttcacgtcatctgggtggtctatgagtgagtccaagaaggacacataagagcaaatcccatagtcgttctcaaaatcaggacacatctcatatgctattaggtttagcacagtagcagctgttgtgtcatctacaacaatctcaggaagctttaactccgaacggatccaaccataggagaatgatacatctcttggcctacgtgtcttgcttgacttcaatacaatccctgcttcttttaactcctttatgttcctgtatgttaccatgtcnnnnnngttttcatttggattctttcttttgnnnnntggcaggcaacgtcta

SEQ ID NO: 31249 - DNA, 199 bp, Glycine max
  Clone ID: PAT_MRT3847_128223C.1
aaatgtgggacctgcaccataagctcagtgacgccattcactccgtcctcagatcccactttctcactttcgtcaaatccctcaaacactacaactctccatccgaccttcccaacgccgccgtctccactgccgatgaccgctccttcggtttccgtttcgtcaaagactttagaccggtcgccttcaacaataacca

SEQ ID NO: 31250 - DNA, 555 bp, Glycine max
  Clone ID: PAT_MRT3847_128224C.1
ttacggctgcgaaagacgacagaaggggagtcaaacaatgtcctaaagaaattcaattgaaactcccaatttctgaacgacacactacactatactactattctatgccctttccccctttttcgtctctagggttactgcaactgctacaagaagaagcttccgcaatggagcgagacggcgtcgtttcacagccagttgcggttatcgcttgcatcgcagtggccgtgttctacgtggccatcctctacgctcccaccgtgctccttcgtctcccacctcctccttccttcaaaacctacatgattcgtcgcttcctatgcgccgtcgtttcgtctgttctttcactcttcatttccgctctcatcctccccgtgcaaactaaagaactgcgccacattcttgttgtatttggcatccggagggaccatatttggcaggctgtggttcttcctctatgcttgacctctctaatgtatgctgggtctatattcctcaagtgtcttctgttgctggcttttggaggcaacactcaagttctgaggccctttccct

SEQ ID NO: 31251 - DNA, 453 bp, Glycine max
  Clone ID: PAT_MRT3847_128225C.1
tttatattttttttttattcttttttttttgtctcttaaaaggcaaaaaaggccctaacttttaaatagccgtgcaagacaacattcattcaaactaaccgggcaatttacctcttctgtggttataaaaaatgggtggaaaaagtaagaaaaacccttgcttaaaataaacatcctttgaaaaaggcccaccagaaactgaaattttcctaatcgctttaactaaaaccaacaggttacccaaccaaaaaatgggaaacatgaactggccttattcctatctatgacacctaggcgaaaacctaggtttttacatatacctgtgaaaaaacttgcaagtgactcacttcggaccttttccagcaccccccattccaaggaaaatgtcctccaagccctggacgccacccctatataattactgctgtaaaatattgaaataggtggttaaca

SEQ ID NO: 31252 - DNA, 170 bp, Glycine max
  Clone ID: PAT_MRT3847_128226C.1
tccgggatcctacagcatttgtctataacagaggggatgatgactcttgtaaatctgtgaggctctgagctagagtgaccatgatgttttagttctattgttattccttcattgttgtaagctgttggcatgttctagctttggagaagacactcattcattattcccgg

SEQ ID NO: 31253 - DNA, 296 bp, Glycine max
  Clone ID: PAT_MRT3847_128227C.1
tttttttttttttttttttttttttttttttttttttttttttttttttttttttttttttttttttttttccgcaaacaaacaaaccattatttgtaaaccaacaggtacaaacatccaaaataggcaaatgaatgacccccaaaatgttttgttcggccccaataccaagcaatcataacctactaaattggtaagatttgtaattttagcaaggtgccgaaaaaaaaacccatttatacatttccaccctaaagggaaagccaaccacaacttataaaaacacttccttgact

SEQ ID NO: 31254 - DNA, 1454 bp, Glycine max
  Clone ID: PAT_MRT3847_128228C.1
ataacaggtggcttcctttcctcctcttctgttcttttattctagggttacaaagttttccttccatacttgccggcagccgtgtggtcttgatagagcgacaccgtgccaccgcgccaccacccaaccttgcagccccaagtctgcgtttccgcagatccactgtccgcacataaaggtgtatactctgctcagttatatcatttgctaataattttcactatctttacgacgccgccaccgaccccaagcccgccgtctgcgccgcgcactccgacgccgcggcggcccatctgatcaagatcaacgggaggtttactcgttcgtgtcaagctcaaaggttgaaacaaacacgaaggcgctgaaacaaccctaagaagtaagaaccagattttatctccatacagtagaagtaaaacagtatattgtagccattcggttgagttcaaattgaaagagacaagatggccgggcaatcaaaccatgacctttcattgttttcagctgaggagcttgagttcattgctgaagatgagatcgtggacattgtacccaatctcaaaatgagtgctctcaatttcatttctggagattttggcccatttacgccccagattgttacccaagtaccactgtggttggccactgctctcaagaagagaggcaagtgctccatttgccctccccaatggatgtctgttgagaagttgagtcaagttttggaggcagagcgagactctcaagagatgtcagatcaattgccatttcattatgtggaaatctcaagacttctttttgatcatgcacgtgacaacattcctgatgtatatatggtgaggtctctaattgaggacatcagaaatgttcggtttcataaagttgaaactgatttggaagcatttaatggtcgtacaattgctgttaagattaaaaatttatctgcaatggaagtgaatattgttcgtccatttattggaagagctttacaggcattttataagcatgatagtccagagctgataccagacccagagagagtttctgataggcgcccccaagttatcaacaatgctccaagaagacaactacgaagatagtcattgtcacctattggtaacatctcttctagaatcataagcatttggcccgcttcaaaggggcatctttcatgagaaatacttcacaactttctttgctgctgacttcagtgtaaatgaatggcttgagacatggtcgaatcttcagaaagtaatgttctctcaaaatattctcataattatttgtcaagagtctgaaaaagcaaagcacttcatgggattaacatggccatgcccccatatactttatgttgttaattctattagtagtgttaagtatttaatgtctatcttttgcttgctattatagtgattgaggattaaatacgaatgcagggagtatcggtcatatttttt

SEQ ID NO: 31255 - DNA, 254 bp, Glycine max
  Clone ID: PAT_MRT3847_128229C.1
ctcaagtttcttccacacgtatactcaggctctacattcatattgttttgggttcagtgggaccaaaaatcagtcaggtagtatcattcccaaaacttttccaggtcattctttcaccttttcaaagacatctgcctcctcacctcatgtatcaaagcctcgaacttggcatcgtacaggtaataatcctccggcttctctacctagaatcaagccttcattaggaacagttcctcccaaaaagccaattctag

SEQ ID NO: 31256 - DNA, 1227 bp, Glycine max
  unsure (1)..(1227): unsure at all n locations
  Clone ID: PAT_MRT3847_12822C.1
cggttcggccgcacgcgtgggccgtagtatactcgaattgttgttgttgtggtgagtgtttgggcacgatggcggaggctcctccgtctctattatctgtgtgcatcgacgctctcacacaacaacttctccgtccatgcgatgatgatcttcttccttgtatctacgatcttccttctcacttactcgacaccttaatcacgcgtttgccccctctcgcactccgcacattccaccaccacctgccattcgacgaggaagggttttctcacgacgactcaaccaaaaagcgaaaacgcgcaagggattggaatttaaattcagcttggcagaggttgtttcagctacgctggcctgatcgcgttaagcagattcatagaacggattgggagcaactctattgggaaactcatttgcaagattgtttagatgaagcagtggaggtagcactaattccatcttttactggatatattggtgacatacagatttcagatagcatactgaaatatattggctttgtggggaatacaaaccattctacttgtgaccattcaaaattgtcttaccattgcctacaatttggcagccatgtgagttgcctggggctgcaaaatgttctatgtactgcagaaactagtgttttgttgagggaatgcaagctacagagtctggtacttagatgtatcagatccaaggaacaaattgatggattatgcaaacttcttgctcaacattgtagaacgttaacgtctctggaatttgttcactgcacactctcaacagattttattaatgcaatatttggttctttagtcatagagagagtacaaaaacatgggatccaacatttgtcaatcatcgccacaagttttcttgaaccatgtgcagtttctttacctagtggactcatgtcatttttgtcttcgggaaggtacatgagcgtaaattcacctttttatatttttgttttcttgttggcaattttattcacactttgtagttntattctctgagtaatcagaactgcttcaaagacttaatttgattntaatataactaanactaaacaactgctgagagctgacacatcttctttttctcaaggaattctatttataactntttctccatgtttttcccctttggctagcatttgggtggcagagaaggaaatctcagatgtatattcttccacttgaatggtatattacaagataatatgat

SEQ ID NO: 31257 - DNA, 1963 bp, Glycine max
  Clone ID: PAT_MRT3847_128230C.1
ccattcttctctctcttttcttctggtttctaaggaacgtgaaggttgtttgggaacagtcttgaaaggtgttctcgctgatggtagagagattgctgtgaagagattacttttcaccaacagaaaaagtccagccgatttctccaatgaagacaacattcatactcttgtggatatcggatgtaaagaaagacctagcggcaacaattaacaatatgcaaatacaataccaggtttagtaccattgataattctcatagttctcataatctgtacaaattttatgcattaatttctcaaggtcctgcaaaagagatatgaaattatcattgggacagccgaaggattagtttatctgcatgagaactccaaaacaaggataattcacagagatataaaagccagcaacatcttattggatgcaaagcttcgtgctaaaattgcagattttggtttggccaggtcctttcaagaggacaagagccacataagtacagctattgcaggaactttggggtatatggctcctgaatacctagctcatggtcagttaacagaaaaggcagacgtatatagttttggagtgttgctgctagagatagtcactgctagacagaacaacaggagcaaagcatcagaatattcagacagcttagttacagtggcatggaagcattttcaggcagggactgctgaacaattatttgatccaaacctagacttgcaggaagatcacaatagcaatgttaatgttaaggatgagattttaagagtggttcacataggacttctatgcacccaagaggtctcttctttacgaccaagcatgtcaaaggcactgcaaatgctaacaaagaaagaggaggatcttgttgctccctctaatccacccttccttgatgagagtaccatggaacttcatgacacaagtggtgacccattttatcctcttactgcacctgattcaattgccactatgtcccatagctctttttatcccaggtgaccaagagaatgcagagaaaatccctgacatgacatgtcggcagcgcagcttgtgattggcaaataacttggtctgcctcagaaatcagacctatgtcacttaaggttgttaacaaagcaatcgatcctttgctatttaaaatacatacttaagacacggggagattttgagccaaatgtccaatacggttatgggaagcaaacagtgtatactgtatagttccatgattaacattattaaacaattttagattaatctgatatatgtaacaagtcataaatactacgtttggatacaactattaattcatttgcgcaagaatagttttcaatgggaaaaatataaagcaaagattgtaagctttttggtgtctttggatcatgccggttgtttgctcctgtccctggataatcattactctccaaatcaatccttctctctaccatgaactcttctgccatatcaaacatttcttctccatttttcaattcctcaacaccctgaaactatagacacaaaaaattgtatttagttatacccttttgttgcatgcagatagaggaactcttgaattttggaatatattgcaaaggactatatatatataagattaaattatgttcgtgtgggggtctaaattatatataaccttatctgatgtaatttgggtaggggttttttctttgtttggcaaaagccttcctgcagaccatgaaatttcaacatatagcatgaaaattaattttgaatataaaaaattgagatgaaatagttccatgttaatcataggaaaagtaatttatttaatttcattcttacttgttgtttggagagcagcagaagagagaacaaatgaaaaaaccagaaggatgatgagcaattgcaggggggatttgaacctcatgttgaagagaaacaaattggagatctgaaagatgacaaattcggacgcgtggg

SEQ ID NO: 31258 - DNA, 960 bp, Glycine max
  Clone ID: PAT_MRT3847_128231C.1
agaagaaaaattagaaagtaatgacatgtcccggagaaacgaaattcaccacaacataatctaaatgaaaaaatattatgatatacttcatgctagtggtgtgtaacttccttcaattatttaaggcactattctacaatgagtacaacatagttacatactgatactagtttagtcactactcactagaagttcaattttggcgaacacccctaaggtatctaaccttttaacttggctaacagctgcgtaaatacaagaaatttgtacaactaaagcattatatacatgtgcctccaggctccaatagctcacccattcccttccaagggctcaattgctgttccagcagtatccttcataataatagcatccagtttcctttttttttttttttttactaaatgaaagaaacctttgactgcaataaaatagtgaggtccgcaagaacggaagcaaactatctgaacttggggggtcatgaattgtcctgaatgagctcaagttccctagagttgacctcaattttatcttcacttgatctctaccagcacaaccttatatacgtcttgacttctgctgtggagggtatcctggcatacccatttgatcttttcttctcaactgttgctgaggaacacctcgttgcattgggatgccaccaggattcattccagcacccatccctgcctgagatgagagattataaccctgcattgcctgatgaggtattctctgcatgccaccaacattcattggccgagggacagatctattcgaaacatgaccaccaggcatgttgccagaaactgcagctccagacgaaaccggctgtgaaggttgcatgttggctgtcccttcaaaatctgttgttgtatccactggacgtgtgggataattcacaaatgtgtctccaggttggcagggtacaagtgcattccgaacaggtaatggttcacg

SEQ ID NO: 31259 - DNA, 809 bp, Glycine max
  Clone ID: PAT_MRT3847_128232C.1
ggtccggtccggattcccgggtcgccacgcgtcctcataatccatctctcaagtctcaactcgactctgccctttagaaaatcaaacaagcttccccaacacgcagttttgaagcaaatcttaaagcttcgttcaagcctagtaaatttgaacgggttcgtaaagaggtggcacccactagatatccaaaaagggcactttgctgtttatgttggcgaaaatgtcacaaagggtcacgttgctgtttatgttggggaacaccgacataggtaaattgtgccaatctccttcttggctcaccctgagttccaatcactccttcgacaagccgaagaagaatttggatacgatcacgaaatgggcctcacaattccttgtgatgaagatgtcttcaggtctctaacatcctcgttaagatgaaaacaaattacaacgagggacgaggtttatttatattagatatgatggttctgactgaagtggatggccaagatgaagcacaccactttttgcttctttttttctcccttcgtcattgccactttcattggccttctcctctcatcaatattcttcttcattagctctatttttaagatccatctctcattcttttttctttttttgtgggtttgttcgaacaacctgtcatgatgatgtcaattatgtgactctaaccttgtttccatgaagatttcattggtagaaaattgtacaaaggtttcaagttttcctcgcagaggtttctaaataatatataccctgtgagagaagttctatgtcaatgaaagcaagttcctttatgttct

SEQ ID NO: 31260 - DNA, 151 bp, Glycine max
  unsure (1)..(151): unsure at all n locations
  Clone ID: PAT_MRT3847_128233C.1
atcagactagagagagtaagagtaagagnagagatggaaagagtancatcagtatcttcggccantgaaaatatacttcctcccantcttctnaacggggnanctnatncctctngtncaactngntngcttngtngcggnacnaaggcaa

SEQ ID NO: 31261 - DNA, 368 bp, Glycine max
  Clone ID: PAT_MRT3847_128234C.1
ggctcgagcccagacgcaaaccaaaaagcagcgagacgtacattctaaagagaagcccacgagaggccacagcgaaggcgccagatggaacacggagcacaccgcggcagcgcccaacagagccgcacaaggaagacagaggaccggacaaggacgccacagggacgacacatgggagcacgatcgaggccacagacacagtcggcactaagcacgccgcaagagccagcacagagccggagaccgggcccaacacaacaacaatacggcaggcgcaacaccgggcggacgcaggagacacggacgccagccacatgcccagcaaaacagcacacgcgccaagaccagacgccgacaaaccgaaccca

SEQ ID NO: 31262 - DNA, 675 bp, Glycine max
  unsure (1)..(675): unsure at all n locations
  Clone ID: PAT_MRT3847_128235C.1
gtacgcatggcacgacgctacgctaagnctaggaatacctctgagaagacggccgcccttcttttttttttattattttttatttattttttatttttttttcttttttttttttttttttttttttttttttttttttttatttttttttatttgttttttttttaggggggaaaaaaaaaaaaaaaaaaaggaaaaaaaaaaaaaaaaaggggaaggaaaaaaaaaaaaaaaagaaaaaaaaaaaaaaacaaagaaagggggaaaaaaaaaaaaacaaaaataaaaaaaaaaaaaaaaaaggaaataattggaaaaccgtgaaaaataaaaatttttaacgggggacccggtgaaaccacgaaaaagggaaggggaagaaccaaaaaaaaaaaaaaaaaaaaaaaaagaaaaaccgggcccaagggaaaaaaaaaaaagggaaaagggggcaaaaaaaaaaaaagggggcccacccaaaccagggggaaagggaacaaaaaaacaaaggcccaacccaccaaaaagggaaagggggacccaaaaaaaaaaaaaatcttggccacgagaaatggggggccccgggggaggaaccggaaaaggacggggggaaccagcaggaaatccaggaccgccaccggggaggggacaaanaactccaaaaaagaaaggaaa

SEQ ID NO: 31263 - DNA, 859 bp, Glycine max
  Clone ID: PAT_MRT3847_128236C.1
ggaaaatgcaggtaatgtatagacttgctcacttttgtgttattagtacatctcaaattgcatttgctagtaatgttagtgagacaatgaatttgaaggtaaaaagagttcaaaagtatgttgaaactctggatgtgctgaaagttaagaattccatgcctagtagcaatggaggccatgccccagtgcagcctcaacagaagcattcaaatgggcaaaggcagggaccagttcaagagaaaaaacaacaaaagcattcaaatggacatcatagattggccttagcaccaattcaggagcaggaacaacaacaaccctcaaggaattccacctcaggagttgtagttaccacaaattgggaattgtttgattctgtcccaccattaatccctgtgccatccacatccccatcaccacaccccccggtgaccaataattcaggtcctcacaagttcaattgggaattcgtcaaccaattaccatagtgttttacttgtgttgatatgatttgggtttgtcttccacttggagtgttatatgttttacattcttttctgtatttagatttgtttagcaacccctataatctgtcatttacttcagaaataaatggggttgatatgatagtgattatcataaaaaaagttacatttctgtgattttggtgtccaccgaattcatttacctgtatgggcctattttttatggatatattatatacaatattattgtaagcatttgtaactttgtttatagaaacattaggatttagccacatcttaagggcaggtatatttcaagagtcttaaatccattttaaaatgaatttggcttttatccatttccattattactttag

SEQ ID NO: 31264 - DNA, 1553 bp, Glycine max
  unsure (1)..(1553): unsure at all n locations
  Clone ID: PAT_MRT3847_128237C.1
nnnnnnnnnnnnggnnnnnngcccacgcgtccgcctatttgttgaggtgaagcatctattttggtagtgtaacatcaaaagcattcaaggaactgtatccaagttttgtccttttttgttttggttacattggttattgtgtgtgtgtttaatttctggggttggaggggagttgaagaaaatgctgtctgggccaactgggttacaccatgaagatcaaaagctgttatattttttataggagagggattcaaaggcttttcttgacatggttggggtgaaggacaaatccaagatagtgctagtggaagaccctattagtcaagagaagaggttgttagagagaaggaagaatgctaagatggagaaagctgcaaagtcgatctcagaaatcagcttggaagtagataggcttgcaggacgggtatgtattatggntattaatttgttttaatgttttttgaatttttccttataattttcgaacacttaattatgattgaggtgagattgtattaaatgcttgagtagttggaagctgataagtgattggaattggttaggtatcagcctttgagtcaattattagcaaaggtgggaaagttgtggaaacagatgtgcataatctgattgagttattgatgaatcagttgctcaaattggatggtataatggctgatggggatgtgaaactacaaaggaagatgcaggtaatgatggagacttaggtgcattttacttatttttgtgttattacttattagtatatctgaaattgcatttggttatgcactcatggttctaatggcagtgaaacattaattttgaaggtaaaaagagttcaaaagtatgttgaaactcttgatgtgctgaaagttaagaattctatgcctagtagcaatggagaccatgccccagtgcagcctcaacagaagcattcaaatgggcaacaacaaaagtattcaaatggacatcatagattagccttagtaccaattcaggagcagcaacaagaacaaccaaggaacccttctgtcgtcttctcgcagccgtacttcgagcaataacaacccccaaggaattccacctcaggagttgtagttaccacaaactgggaattgtttgattctgtcccaccattaatccntgtgccatccacatccccatccccacatccctcggagaccaataaatcaggtcctcccaagttcaattgggaattcttcaactaagtaccctaccatgtgtggatatgatttgggtttgtcttccacttggagtgttatatgttttgcattcttttctgtatttagatttgtttagcaaccccctataatctgtcatttacttcagaaataaatggggttgctatgatagtgattatcatagaaaaaagttacatttctgtgattttggtgtccaccgaattcatttaccaaatgtatgggcctattttttttatggatatatataatattattattagcatttgtaactttgttattagaaacatcttaaagaacatgtatatttcttagtctaaaatcccattt

SEQ ID NO: 31265 - DNA, 328 bp, Glycine max
  Clone ID: PAT_MRT3847_128238C.1
aaaagttgtaataaaagaatgggaaaaaagacaacatcacatcatcaataatcaatatagaatttcttttcattttattataaagagatacacagaaccagaacggtcctatatatcctgatcgaagtatagaaggacacacaataacaatcgactttttacaaccaagtttaatcaatacacgtcaattcttatcttccttctaagcaaatacctaaaatccatcctgtcttttatctcaattattcctttcatcttaatctcttctgtcactgggacctcttctggggtttcctcttcttcctcctctggggcctcctctgccacc

SEQ ID NO: 31266 - DNA, 1127 bp, Glycine max
  Clone ID: PAT_MRT3847_128239C.1
ggctcgagagtagataggcttgcagggagggtatcagcctttgagtcaattattagcaaaggtgggaaagttgtggaaacagatgtgcttaatctgattgagttattgatgaatcaattgcttaaattggatggtataatggctgatggggatgtgaaactacagaggaaaatgcaggtaagaagagttcaaaagtatgttgaaactcttgatgtgctgaaagttaagaattctatgcctagtagcaatggagaccaagccccagtgaagccccatcagaagcattcaaatggtcaaaggaagggaccaattcaagagcaacaacaaaagcattcaaatggacgtcatagattagccttagcaccaattcaggagcagcaacaagaacaaccaaggaactcaagtgagaattctctagcactatatcaagagcaacaagaacaaccctcaaggaattccacctcaggaagtgtagttaccacaaattgcgatgttgtttgattctgtcccaccattaaatcctatgcgcaatggagaccatgccccagtgcagcctcaacagaagcattcaaatgggcaccaacaaaagtattcaaatggacatcatagattagccttagtaccaattcaggagcagcaacaagaacaaccaaggaactcaaatgagaattctctggaactataccaagagcaacaacaccaaccctcaaggaattccccctcaggagttgtagttaccccaaattgggagttgtttgattctgtcccaccattaatccctgtgcaatccacatccccaccctcctcagtgaccaataattcaggtcctcccaagttcaattgggaatttttcgactaagtaccatatcacgtgcttttacttgtgtggatgtgattttgggtttgtcttccccttggagtgttatatgttttacattcttttctgtatttagatttgtttagcaacccccttataatctgtcatttacttgaaaaataaatgggattgctatgatagtgattatcataaaaaaaaagataaatttctgtgattttgctgtccaccgaattcatttaccaaatgtatgggcctatttttgatggatatatgtaatattattataagc

SEQ ID NO: 31267 - DNA, 752 bp, Glycine max
  Clone ID: PAT_MRT3847_12823C.1
ccacgcgtccgcttgacgataccagttttttgctaactcaaaaggcatataatacgttattgacaccgaacgaaagaaacgcagcagcgtctgtgagctatggcggaggaggaggaagacgacgagagcttcggcgagttcacgttcgcgtcgtttccgagtcaaccaacctcaaacgacaccaatcccctcgacgacgacgattggggcgacttcatgaaccattccaaccggatcaacggacccttcgactcgttcgggcttcccacggatcccacgaacaaacacgtgaacgacgacaaaggcgttgccgttcaggccgaggcagcgaaaaatcccaagggagctattccgctttcgatcttcggcgaggaagagggagaagaagaggagaaacccgcttctgccaatgttttctccaacggcggcggtggtgcggtgaaaaggggatccggttcgaacgggtctgttggaatcagtgatttgatttccagtttgtataatcagcagcgccctcaggtggattctcacaacaacggatcggtttcggtatccaatgttgctgctcccaatccgacgtactcgaacggaagcaaattaaattcggatgaggatgaggatggatgggaattcaagtctgcggaatgggaaactggaaccaagagccaggatgttaagggctgagagcgcaaagcatgataaatgggattatagaacttagagctgaagagaatgctggaaatgataatcat

SEQ ID NO: 31268 - DNA, 396 bp, Glycine max
  unsure (1)..(396): unsure at all n locations
  Clone ID: PAT_MRT3847_128240C.1
gggagtcggctcgagaaaacacaccaaacaaacaaacaactaattatttcagagtcacagacacacacanagggggggatctttggttgcaggaggttagaaattgaagggcttgttaattagaaggagactaaagtgggtcagaaaacacacgtcgtgttcaggcaaaatctatgtgcccacatggatgattgagagagagagagtattatatttatgacctcaacatcaccacaagcagcagcagcagcacctgcagtggcagcaaaaacatagtattagtagaagaagagagacacaagagacccaccaaggaaaatttgctcaaaaccagaacttgctacaaaagttagcatcttttgatgattccaagtgacttgagcttttaaagtccat

SEQ ID NO: 31269 - DNA, 646 bp, Glycine max
  unsure (1)..(646): unsure at all n locations
  Clone ID: PAT_MRT3847_128241C.1
cttgatgtgctgaaagttaagaattctatgcttagtagcnatggaggccnagcnccagtaaagccccatcagaagcattcaattggtcaaaggaaggggccaattcaagagcgccaacaaaagcattcaaatggacgtcatagattagccttagcaccaattcaggagcagcaccaagaacaaccaaggaactcaagtgagaattctctagcactatatcaagagcaacaagaacaaccctcaaggaattccacctcaggagttgtagttaccacaaattgggagttgtttgattctgtcccaccattaatccctgtgcaagccacatcaccacccccaccctcctcagtgaccaataattcaggtcctcccaagttcaattgggaattcttcgactaagtaccataccacgtgtttttacttgtgtggatgtgatttgggtttgtcttcaacttggagtgttatatgttttacattcttttctgtatttagatttgtttagcaacccccttataatctgtcatttacttgagaataaatggggttgctatgatagtgattatcataaaaaaaaaaagttacatttctgtgatttttgtgtccgccgaattcatttaccaaatgtatgggcctatttttgatggat

SEQ ID NO: 31270 - DNA, 632 bp, Glycine max
  Clone ID: PAT_MRT3847_128242C.1
cacgcgtccgctccctccgatttcgaattcggctcgagggagaatcaattcctcatcgctgcaattcttctttcactctctagtttctcttctttctttcttccaacctcttctcttctatacccttcagaaaagaaattaaaaaacgtagcttcagattattctagctcttcatttttccatgttcaatattatgctgtaaatttctcaaactcactgtttcagccacattttggtctaaagatccgtgctttgacccttggcaggttcagcttttgaaggggttggagtttttcttcctcataagccattgattagtccatgtttttctttttctctctctaaagttcaaagtttttgttgttttccccccgtgtctttctctctcttgtggtggacttgaggaatgctggggtcagaggtttctgagacatgttctagcagacttttggtgaattgggtcactgtggtttctgtcatgggtggtagagaatctgagtcctcagagatctaagcctctctggctggggggttggtcatcacagacccttttgcgggggcatagttgtgaaagtgaaaaagtgagagaagacgatgaagatgaagaattttattgtagcaacaataataat

SEQ ID NO: 31271 - DNA, 354 bp, Glycine max
  Clone ID: PAT_MRT3847_128243C.1
ctgttcggtgggtaagagaccaagcggcgctttcagtatacggtttgtatcgatcgcctcctcgagactcaaagtgcacccataaaggactgaacaaccaagatttgtcatgaagaacatgtagtttgagatgcgtcagtaatacctgtagctatacgttggatgaggaatgttatataggattacattagatgcaaagcgtatgtacagtcgctcagaaagtgattcgggtaacaaaggaacaacagaatgggtcgtttgtgattatgagcttacacaatgataattgatgtgctataaatcagcttatgtgaacgtgaactgactaacagatgctgtatggcacgcaagttg

SEQ ID NO: 31272 - DNA, 293 bp, Glycine max
  Clone ID: PAT_MRT3847_128244C.1
aagaggagtatagcattacgcacgacactgtaattcattactttacatttcgtggaacagtgctaacactagttgtttgaatggatcttgagctacaaacacagacataagaaaacagataactggactaacaaattcagagttcaaagaggccctgccgctactaagataccaccggcatgaacgaaacagaaaacgttgcctgcgaaatgcgacttgccggtggcaatctcaacagggccaaatacagatggtgacgacccaatagacgacagtgggggcagaggaatctg

SEQ ID NO: 31273 - DNA, 3745 bp, Glycine max
  Clone ID: PAT_MRT3847_128245C.1
aattcggctcgagtattaattagcataagggaagtgaaaattaaaattaagtgcatccttacttttaattattttcaaaacaaattatttcagacttgcacaaagtcaaaatgatctaaaaagtaaacaaaaataattataatttgatcagcgtgagatgcttcttcatcttcatttcattagtcgggcacaagaaacaaaagaataattgatcatatgatattttttaaggacaattattaaaaacttaactatttaaattaattaattaaatgcatagtatatatgaatatcacagggtgtcagcatggctcgcggggctctaggattattgttattattattattttgtttttccatttcaccactttcttctccctccgatttctccagaacagcaagggagaatcaattcctcatcgctgcaattctcatctttcactctctagattctcatctatctttcttccaacctcttctcttctatacccttcagaaaaaaataaaatagaaaccatagcttcagattattctagctcttcattttttttccttgttcaatattatgctgtaaaattctcaaactcacagtttcagttcagccacattttggtctaaagatccgtgccttgacccttggcagtttcagctttcaaaagggttggagtttttcttcctcataagccactgaatagtccaaatttttcttttttcttttttttcccctctctctctctctctctaaagttcaaagtttttgttgttttccccccgagtctttctctctcttgctgtggacttgtggaatgctggggtcagagacttctgagacatgttctagcagacttttgttgaattgggtcactggtttctgtcataggtggtagagaatctgagtcctcagagatctaagcctctctctggtgttttgttcatcacacacaccctttttgttgtggcatagttgtgaaagtgaaagagtgagagaagatgatgaggatgaagaatattagtagtagcatcatgaatggaggtggttcagttggttgtagatctgagccgggttcaaaggaatgggagatgaggccaggtggaatgttggttcagatgagaactgctgattcgggtcggaacccagcacttttgccaacaattagagtaaaggtcaagtttggttcaatttaccatgaagtcaacattagttcccaagctacatttggggagttgaagaaaatgctgtcagggccactgggttacaccatgaagatcaaaagctgttatacaaagacaaggagagggattcaaaggcttttcttgacatggttggggtgaaggacaaatccaagatagtgctagtggaagaccctattagtcaagagaagaggttgttagagagaaggaagaatgctaagatggagaaagctgcaaagtcgatctcagaaatcagcttgccgatttctccagaacagcatgcgagttctccagaacagcaagggagaatcaattctcttcgttgcaatttttctttctctctctagatcctcctctttcctctcttctaccccttgagaaaaaaccagtattcacaatagatgtatatctagctcttcatttttcttgctccagattatgctgttatgctgtaaaactcacagtctcagcctcatagtagacttaaagatctgcccgttgacccttggcaggatcatcttttggtgttgttcttcctcatattggagtgattcttcctaataacccttttttcagaacagcatgggagaatcaattcctcatcgctgcaattcttccttcactctctagtttctcttctttctttcttccaacctcttctcttctatacccttcagaaaagaaattaaaaaacgtagcttcagattattctagctcttcatttatccatgttcaatattatgctgtaaatttctcaaactcactgtttcagccacattgtggtctaaagatccgtgctttgacccttggcaggttcagcttttgaaggggttggagtttttcgtcctcatatgccaatgctaataatcaccattacatatttattattacgattattaggaagtagatagagaaggtaagcgtgccagtctggggtataagtctttgagtcaattattagtggaagtgggggagaggtggaaacagatgtgcttaatctgatttagttattgatgaatcaattgattaatttggatgataataattgcagatgtgatatattaaacttcagaggtaaaatgtcagtaatggttttgaagctacatctgtggagctgaataaattgctggaagatgagaagagtttgcatattaagacgagaaacagatttagaggaaataggagagatgtttgaagtttaatggaaaagagttcaaaagtatgttgaaactcttgatgtgctgaaagttaagaattccatgcctagaagcagttgagaccatgccccagtgcagcttcaacagaagcattcaaatgggtaactacgaaagcattcaaatggacatcatagattacacttagtaacaattcatggagcagctacaagaaggacgtggaaaaacttcttgtcgagatctacttagtctgatcgtgatattgaagaatcaattgcttaaattggatggtataatggctgatggggttgtgaaactacaggggaaaatgcaggtaagaagagttcaaaagtatgttgaaactcttgatgtgctgaaagttaagaattctatgcctagtagcaatggagaccaagccccagtgaagccccatcagaagcaaccagatgaacagagaaaggcacacataagcgatcaacatcggacagcattgataggcacgtgcaccaattccggaacagcaacttcaacaaccctcaagggattccacctcaggagttgttgatactacaaattgggaattgtttgattctgtccaaccatcaatacgggattcatccacatcaccttcactaaccccaaatggggacattgtttcagtttgtcccaactttaatccctaatccatccacaaactacccccctgttctacttgtgtagaaataatttaggtttgtcaaccacttggagaattatacgtcttagatacttttatgtattttcatttctgtagcaagaaatccaaggaacccaattgagaagctctggaactataccaagagcaacaacaccaaccctcaaggaattcccctcaggagttgtagttaccacaaattgggagttgtttgattctgtcccaccattaatccctgtgcaatccacatccccacccccctcagtgaccaataattcaggtcctcccaagttcaattgggaattcttcgactaagtaccatatcacgtgcttttacttgtgtggatgtgatttgggtttgtcttccacttggagtgttatatgttttacattcttttctgtatttagatttgtttagcaacccccttataatctgtcatttacttcaaaaataaatggggttgctatgatagtgattatcataaaaaaaagaagttacatttctgtgattttggtgtccaccgaattcatttaccaaatgtatgggcctattttttatggatatatttataatattattgtaagcatttgtaactttgttaatagaaacattaggatttagccacatcttaaggacaggtatatttcagagtctaaaatcccatttaaaaatgattttgctttc

SEQ ID NO: 31274 - DNA, 580 bp, Glycine max
  Clone ID: PAT_MRT3847_128246C.1
agagaaaataaaccatttacttaacattcatttcttcgtgttcggaaccccgacttaacaagttcaaagttaaataatcaaattgcaagtagatatcgacctggttatgtacatgtactgctgaattacatgttcattgctactctacttatccttcaagcttctccaaatcgtctgcagccttgcgtaatgcatagagacacattttcttcaccccaagtttgtcttcctttgctttatggtttttgggaagagaacgaaattcctcagtcagacgaatacactcttgaatattttcaggagagacaaaatctagagcaaccttaatgcacgactttaagtttctaacttgatggggacacccggcaggtataaaaacagcctcaccaaggttttgtataaaagtccaaggttcaactcctgtaaaaggttcctcaaatgcataaatacaaagatggtgaaattctatcaaggccacaaattaaatatagataaagtactaaccaaattcttgcttgagcttacttttatgataagaagtcagataaaaaacttgatcatgaatggggtgaaaaaccta

SEQ ID NO: 31275 - DNA, 515 bp, Glycine max
  unsure (1)..(515): unsure at all n locations
  Clone ID: PAT_MRT3847_128247C.1
ttaggagttaatgtatcgttggaaagttagaatcataggaaatagtttaattctttattattattcttttaaacgcaaaatgtttttattatgataaattcttataagcatcaaggatttctgactgctgagtgctcttacccaatcaaagcacataatttttgtctagtttctaaaagattattacagcttcaagtgtattaaactatgttatgtggtcttcttttatgtattcctcaggtgaacccctaattttcattgaagttgcactactgaaggatgttgctcagactatacaggaagttttgtgggatagtcctcctatacctgaaggngaggcaacatgtgccttgttctactccatatcatcaactcagcctggcttacaaggatcaactcgggaaaatttctcatcaaacgggtcgtaacacaggtgaaaagagagatgccacatatttctacctttgcaccctaagtccatcccgggatcatgttgtggttttattcaagtagca

SEQ ID NO: 31276 - DNA, 1396 bp, Glycine max
  Clone ID: PAT_MRT3847_128248C.1
tgattctcaggaaaactttgcagcactagacaagaagctgaaggaacatgagggtgggagaacttctaatcgcctgttttatctttcaattcctcctaatatattcatagatgctgttaaatgtgcaagcttgtcagcttcttctggtaatggttggaccagggttattgttgaaaagccttttggccgtgattcagaatcttcggctgcattaacaaaatcactcaagcagtatctgacagaggatcaaattttcaggattgaccactatcttgggaaagagcttgtggaaaatctttctgttctccgattctcaaatctcatctttgaaccattatggtcaaggcagtatataagaaatgtacagttgatattctcagaagattttggcactgaaggacgtggcgggtactttgaccattatggtatcataagagacattatgcagaatcatttacttcaaatactagcactctttgcgatggaaacccctgttagtttggatgcagaggatattagaaatgaaaaggtcaaggttcttcgttcgatgagacccctacgacttgaggatgtggttatagctgccctcttcatagataatgcaagatgggatggggtaccttttctgatgaaggctgggaaagcattacacaacaaaagagctgagatacgggtacagttcaggcatgtgccaggtaatctgtacaatcggaatttcggtactgatcttgatcgggctacaaatgaacttgttataagagttcagcctgatgaggctatttatctgaagataaacaacaaagttccgggtctgggaatgaagttggatcgcagtaatctcaatcttcactacgctgcaagatattcaaaggagattccagatgcatatgaaaggttacttctggatgccattgaaggagaaagaagactcttcattcgtagtgatgaactggatgctgcttggtcactctttacacctgtactgaaggagcttgaagagaagaagataattccagagtactatccttatggtagtaggggtcctgttggtgctcactatcttgcagccagacacaatgtgcggtggggtgaccttgggacagacgtagaccaataatcctcactgatgttagctatgatgcatgctattttgtggtttcttcttggcttgcagtttcttttctcatcatattatcagcagatggttacttctctggtggaagactaccaggcacacatgaaaatcatgtaaagcaattaaagcatcaagtttcaaagtagagtaataaagctcttacatcattgatatttttttgagtttttgttgctacttgggatgtgggatttgggacagtttggacaggagcaaatatttcatttagttggcagtcaatct

SEQ ID NO: 31277 - DNA, 429 bp, Glycine max
  Clone ID: PAT_MRT3847_128249C.1
gcggccgtccttcttttgttttttttttttttattttttattttttttactatcttgcatcaacttggagactggtctcttttaatgcatgtgagactaaactgttttagttgactatatattcctggacgctcctaaaattaccaagttacctttgcttaatagaaggaatcaccttcacaaaatggagaactgttatgaaagaaacctgtctggctacgcacacgttgctgccactgcttaacctcttgccactacaatacaccggattccgaatgtctaacttgatacctcaacactacgactgcatgatccaatgcatgccttatgcacagtagaaagagcctagttgccgactgcaccatccctggtagaagataccacaagctccaaagggcgctgcacagctagcaaatcacacggaagaaa

SEQ ID NO: 31278 - DNA, 1040 bp, Glycine max
  unsure (1)..(1040): unsure at all n locations
  Clone ID: PAT_MRT3847_12824C.1
ccacgcgtccggttgttgtgtggtggggcacgatggcggaggctcctccgtctctaatatctctgtgcatcgacgctctcgcacaacaatttctccgtccaagcgatgatcttccttctatctacgaccttccttctcacttactccacaccttaatcacgcgtttgccccctttcgcactccgcacattccaccgccaccacctaccattcgacgaggaagggttttctcgcgacgactccacgaagaagagaaaacgcgcaagggattggaatttaagttcagcttggcagaggttgtttctgctacgctggcctgatcgcgttaagcagattcagccaacggattgggagcaacactattgggaaattcatttgcaagattgtttagatgaagcggctgaggtagcactaattccatcgtttagtggatatattggtgacatacagatttcagacagcatactgaaatatattggctttgtggggaatacaagccattcaagttgtgaccattcaaaattgtcttaccattgcctancatttggcagccatgtgagttgtctgatgctgcanaatgttctatgtactgcagaaactagtgttttgttgagggaatgcaagctacagagtctggtacttagatgtatcagatccaaggaacaaattgatggattatgcaaacttcttgctcaacattgtagaacgttaacgtctctggaatttgttcactgcgcactctcaacagattttattaatgcaatattgggctctttagtcatagagagagtacaaaaacatgggatccaacatttgtcaatcattgccacaagttttctggaaccatgtacaggttctttacctagcggactcgtgtcatttttgtcttcaggaaggtccttgtgctcattaaaattatctgagaaccaccatggatggacttttgccaaagatctttttgtgactctattcaatctttcatgtggcatatctggccttgacctttctcggatagagcttcaagatatcaggatggctttt

SEQ ID NO: 31279 - DNA, 2812 bp, Glycine max
  Clone ID: PAT_MRT3847_128250C.1
cccacgcgtccggcggagagttgaagagcaagagctagggaaagggacaaacagcccttcggagatctcaagggcctttccctcgttctctccgaactctcactttgtcttcttatttgctccttttcttctctcttccctccccaattattcattccctcatggccactgcgctttattcgactcattgtcgttcactcgctacttcctcttcctcgtcgtcgttgcaaccctctcctctgtcgtctaacctcgcttaccttcaacgcctcaccttctcacagcgctttctcccctccaaggtttctctcaaatctcaaccccaaacttatcagattcccgttctcacccagcagcaggaaggtacagtagcagctgctgtgacccctgttgaaaacggcacttctcacaagcagttgaagcctgacttattgtctgttaagtccccagaggagtctcgggctgaagacggttttgaaaaggatgaaaatgagtccagtgttagtattactgttgttggagcctctggagaccttgctaagaagaagatatttccggctctctttgcgctttactatgaggattgtctacttaagctcttctacttctggggttgttcatgaagtctgttgtgtaatgaaacacaatgtgctgtgggttgaaattgctacagatgtagactatgtagaatcaattacttcaaagataagaccggctatttttgaatatgattttgaggatatgtttctctaagcacttcaccatcaatggttatggacctagtcagatgactgatgcagaactgagaaatatggttagcaagaccctcacttgtagaattgataagagagaaaactgcaatgagaagatggaccaatttctaaaaagatgtttctatcattctggtcaatatgattctcaggaaaactttgcagcgctagacaagaagctgaaggaacatgagggtgggagaacttctttttgctttccccccactctgcacctctttttttgcatgatattttaatttgcaccaagtcctatattttaacagttaaaggaacttactcttctatttttttttttgtctgcatagttgaagctaatctgagcatttttataatttaaccattctgtttgaatatgaaaattgtttttgtagggtgggagaacttctaatcgcctgttttatctttcaattcctcctaatatattcatagatgctgttaaatgtgcaagcttgtcagcttcttctggtaatggttggaccagggttattgttgaaaagccttttggccgtgattcagaatcttcggctgcattaacaaaatcactcaagcagtatctgacagaggatcaaattttcaggattgaccactatcttgggaaagagcttgtggaaaatctttctgttctccgattctcaaatctcatctttgaaccattatggtcaaggcagtatataagaaatgtacagttgatattctcagaagattttggcactgaaggactgtgtgggtactttgaccattatggtatcataagagacattatgcagaatcatttacttcaaatactagcactctttgcgatggaaacccctgttagtttggatgcagaggatattagaaatgaaaaggtctcacatgattatataccttgaactcaactgttctaaatagtcatgttttttttttttaccagaatttcaattacctgatggatgtcaggtcaaggttcttcgttcgatgagacccctacgacttgaggatgtggttataggtcagtataagagccacactagaggaggagttacatatccagcatacgttgatgataaaactgtaccaagcggcagcttaactccaacatttgctgcagctgccctcttcatagataatgcaagatgggatggggtaccttttctgatgaaggctgggaaagcattacacaacaaaagagctgagatacgggtacagttcaggcatgtgccaggtaatctgtacaatcggaatttcggtactgatcttgatcgggctacaaatgaacttgttataagagttcagcctgatgaggctatttatctgaagataaacaacaaagttccgggtctgggaatgaagttggatcgcagtaatctcaatcttcactacgctgcaagatattcaaaggagattccagatgcatatgaaaggttacttctggatgccattgaaggagaaagaagactcttcattcgtagtgatgaactggatgctgcttggtcactctttacacctgtactgaaggagcttgaagagaagaagataattccagagtactatccttatggtagtaggggtcctgttggtgctcactatcttgcagccagacacaacgtgcgatggggtgaccttgggacagacgtagaccattaaccctcgcattttgttgcacttctgatcggcctaagatgttagctattatgcatgctattttgtggtttcttcttggcatgcagtttcttttctcatcagcagcatggttacttctctggtggaagacaggtaccaggcacacacgaaaatcatacaaagcaataaaagcatcaaatttcaaagtccagtaataaagctcttagatcattgattttttttttttagtttttgttgctatttgggacagtttggacaagagcaaatatttcatttagttgccaatcgatctagttaggtgatgtattttgattttgcattttgcattttgtgaaacacaattaaagagaaaatgaagaaagttagcaagttggtatgaatctcaacccattcaaaaa

SEQ ID NO: 31280 - DNA, 317 bp, Glycine max
  Clone ID: PAT_MRT3847_128251C.1
ggctgcgagagacgacagaagggcccatgtttgcttgttgctgcttcacataatttattttgtacttcttggacacaaccactcaaatcacacgggatcttcacactaagtcattcaataagagggaaactgaggacatggaagcagcataactaatactactatcttttaacttgtaaagaagttcaattgtagatttcctataatcatctcatctccataatgatattgttattggtgcattattctataatatttattggaaagtatgtatagtatcttgaagtattactttctctgttttcgaggagcgctgg

SEQ ID NO: 31281 - DNA, 174 bp, Glycine max
  Clone ID: PAT_MRT3847_128252C.1
ctctctttcactcactttgactccaaacccatcaccgtttcaaccaaccccctcaccccatttcataaatttcgaaactttttcgcggctaccccaacatttcgagacaacatcatttcactctctctgttccccataaacagagttcccctgttccgaactaaacctcatgga

SEQ ID NO: 31282 - DNA, 323 bp, Glycine max
  Clone ID: PAT_MRT3847_128253C.1
ctggagccgctggagcagctcgatgccgttcgagtagcgagtagcaagacgacgacagaaggtgcagatctaatagagcgcgaaggctaaatagaaccattactaccagctccatatccgtagtggctatgactattaagcaagaacacgagacagggcgaggtctagcttgctcaagcttggccttagtcttatcaataacagagtgagcatagacagagagatgacgatgaccatcattctgagtcaggggtgtggagggcaagtccagcgatgccgaagctttatataattattattcgcccctgacctcaaattacatt

SEQ ID NO: 31283 - DNA, 163 bp, Glycine max
  Clone ID: PAT_MRT3847_128254C.1
cggtaccgctgccacaataccacagaatgggacagcacagacaattgggtaccatcactttcaaaaacaacatggtggtcctaaatgtctctttgttgcttcttttccttcttggggttacatctcctcacattgatctcaccttcttcaaacctcatcactc

SEQ ID NO: 31284 - DNA, 409 bp, Glycine max
  Clone ID: PAT_MRT3847_128255C.1
gcagcaacagcaggtataaattgattgatccagccagccaaaagcataattatctttttttttgttttctttaaccaaacaagactgagaaaaagacaagataaacatccattcttgttttagcaaagtggtatgtagataatctataattagcaaaatattatacagagagcatgagcgaaagattgattgtgcaaaagcttccaacattttcttatacaaagaaagacacaattccttaaaaaataacaattgggggtacaaagtacaattcaggctttgtttttttctagtaaataagctcgggtaagataaggcctggaaattgaaacattaaaagaaatgtgtaggggaaaggacaatgccaagtgtagcgaaggagtacccaaaatttgtaaacataaatact

SEQ ID NO: 31285 - DNA, 212 bp, Glycine max
  Clone ID: PAT_MRT3847_128256C.1
aggaggacatgatggttatgccattataactcgctcgttcacacggtaatgtttttgagatgcctgaaacactgcaagtgaatcgtactatgatgaaagatggacactacagaattgcagttggggatccaagcctgggccacctgattgctcgaggaccaagttccaaccaaatgcgtaagctagaataataaactatcacagttatacat

SEQ ID NO: 31286 - DNA, 125 bp, Glycine max
  Clone ID: PAT_MRT3847_128257C.1
atgagaactgttgctgctgttgacatggaatttagtgggacggctaaaactggtgtggcagccactgatttaaatgttgcaaagcttaaaatgatccttgatgagtatcaattatgatttcgttt

SEQ ID NO: 31287 - DNA, 472 bp, Glycine max
  Clone ID: PAT_MRT3847_128258C.1
tttttttttttttttttttttttttttttttttgagaaaaacttggtaagtatatttaatttttgatagaaacccatctttcctaattgaagattctctcaattttcttgaatgaaaaattgtttggcatgaatggaaaacagaaagagacatagcatgtaacaccacccatcaaaaagttctgctcaaggcgttgccattatctcctttctacatatttcaaaaagaagaccataccaatctttcaccttttttgttaacaaaataatagcaaaagctacctcacgaggggtacaagatcaaagcttatctgaaatataattgcggaagaaaaaggacctaccaaaaccatcaaaacaatgacacccctgtagccttttacacctagctagtgagattcacttcacctcagccaaagtcatcattaccgatacctcgccataatggtctccttgccccccaacaccacaag

SEQ ID NO: 31288 - DNA, 186 bp, Glycine max
  Clone ID: PAT_MRT3847_128259C.1
tgttgttttacccgcccgcgagaaacaacaccggggatggtttaattggataaagcgggcgctcacacaaacacacgagacaaagggctgaacccccgagaaaacaaggggatggaacctgacccacgcctatacataatgtgggaccagcacaatgaacgacagcatgacaccgaaagaaagagg

SEQ ID NO: 31289 - DNA, 310 bp, Glycine max
  unsure (1)..(310): unsure at all n locations
  Clone ID: PAT_MRT3847_12825C.1
attaaacttgattaattagagttttttttgcttataatatgtctttgctcgatacaaatcgccgacttatgttaggatcttgtcggggaactaattcacaaacaaaacaataggcataaagttaactacaaacacaactaacgcgagtatctattcatgggatccatcattttaatagctttgatataaaataacccatgcatacaaagtagcgctattgagttctagatatgacttgcaccagagtgaggaaacctagtgttgcttgcccttcaggcctacctgcatcttccacagncttcttgaccct

SEQ ID NO: 31290 - DNA, 449 bp, Glycine max
  unsure (1)..(449): unsure at all n locations
  Clone ID: PAT_MRT3847_128260C.1
gcggagacgnngctgcganaagaacgacagannnagggggagtgtnntcgtaagaatnntaggtgttttgtgtcttcttcttcttcttactgatgtcggatgcgggatttacaaaattgtgtggaagtggcatgggacgatcacnnngagnnccttgtacccgttgacananccgatggtgcgtgcgcgcgttatttacctgacgtttcattctactttgcgttttaatgtccnngaatggattgtgtagcgagttcccttccacacgtgcccggcattttcctttggtcaatcaacattatgaacctggcgctctgaaaatatanttgaagggaatctgtaaattacccaagtcattttctccgaaggatgctagcgaaaatctaattttaatctgaagcagggctggtgcaaattttcttgtgcgaaaggaaaagaaaaatttcatg

SEQ ID NO: 31291 - DNA, 418 bp, Glycine max
  Clone ID: PAT_MRT3847_128261C.1
gaggtttcattacttctcttcatattcatatacacaacaacaattcaacgtcaatcataaacataactagttagtggcatgccatgttttttcttcttatctatagtttactgttttatatatccgtattattaggccggtccaaccaggagtgaggtttaaaagaaattttaatagaaaatttttttctttaaataaaagagttatatagtaagcatttttactaaaaaatgtaattttttttgttaacatatgtgacatttttttctttataaaaattaatagcaaacttttttttgttggtgagcttaaagcttaagctttagttattataccttggacttactttacatattatataacttggaatgtgaaatattttaaactatagttgatcattcatatataaatttaatag

SEQ ID NO: 31292 - DNA, 384 bp, Glycine max
  unsure (1)..(384): unsure at all n locations
  Clone ID: PAT_MRT3847_128262C.1
tttagtcattagaattttacttgtttactcggttcgaaagttccatctcgctggtctcaattactattaaaaaatctcatattgcttacctcaattagtgggatgaggtttaagtacgtgatgaacaacttcacttnntgctaattagtttgaagttataatgtaacatgctctatccttctttttggttggttgcttggggggagctcccnnnnacatggaattattgggaatcaagcttccataattgtttcttcacttcttgatggcctaattaagctgcatgtgctagagaactcagaggggctgtaggacacaccaatcttcttaaatgtgtttgatgaggagctgtctatgctaaaacctaatggagatgtttgatct

SEQ ID NO: 31293 - DNA, 382 bp, Glycine max
  Clone ID: PAT_MRT3847_128263C.1
gaacctttgggctgatgtatgtgcttgtttatgtgcttgcttatctgcttgcttacctgcttgcttatgtgcttgcatggtcgtgaggggatcatagaaggggagcgtgtggatgtagcgatcaaattaaatcctctatctgttgctgcagggccctcttccctgcccagtactaataataaccgccgtagttaagaaaattaagaagatttacgagagtactaataataggtctgtctccgctacgaacagcggaaaacctacttctgcccataagatcgactcgaaaccaccctcgaccttaaagggaaaccgaccactaccgtcaatactcgttccttcccgacgaaactccacaccgaacatcacgtcacgcccgtta

SEQ ID NO: 31294 - DNA, 1155 bp, Glycine max
  Clone ID: PAT_MRT3847_128264C.1
gtgactttgagagaatggttgaaacacgggaactttaaagcaaacaaggtggaaagtttgaatatatttaggaagattgtggatttggtgggcaattctcactctcagggagttgcactgcataacctgtgtccatcttatattaaattgacgccatcaaaccaggtcatgtaccttggtttacctgttcaaaaacagatggtggatagtgttgtaaattctgaagttgtccacttagataattcttttattagaaaaaggttgtcagagcaagtaacacttccctctcttgatatggggtcaaagaaacaaaaatttaatgagaatgtaagagttactggtggtgacttgtgtcttgaaactgcaagtgataggaaacttcatagtcatacagttggatcacaagattattacaatgaatatgaggaaggtacccaattctctaaatataacattggaagaatgtctagcatccctcgtgtatctaatgcaggtcaaaggccattgacttcatgcgaaaaatttgaaaataaatggtacacaagtcctgagggaggctacacaacatcatcaaatatctactgtcttggtgttctcctttttgagttacttggtcattttgactctgaaagaacacatattgcagccatgtctgatcttcgtcataggattcttcctccaattttcctatcagaaaatcctaaggaagctggcttttgtctttggctgttgcatcctgaaccatcatcacgtccatcaacaagggaaatccttcaatctgaattgattaatggattgcaagagttgtttagtgaggaattgtcatcaagtattgaccaagaagatgcagaatctgaattgttattgcatttcctcgttttgttaaaagagcagaagcagaacaatgccttcaaactggtagaagaaatcaagtgcttggaatcagatatagaagaggtggagaggaggcatgactcaagaaaatccttggtttcctcaggcttgcagaatgattaactcttgtcagaaagagattatgcctcttaaaaaggattctttgagttttgaaatgctgccctcgatatcccccatctctaattcaataaagggagattgatgagaaattatgccctcctgaaggggcctattttttcc

SEQ ID NO: 31295 - DNA, 171 bp, Glycine max
  Clone ID: PAT_MRT3847_128265C.1
ggaaaaaaagcctttgaccacagaaggggatgtaattcttgccacgtagcgacaaaggcaaacaaaatccccacatgtttctaagtgaccccatttagaaaagagtcttaatttaatgtctccaccggtgactcgaaacttgcttcggagctcccatacacatttctcaca

SEQ ID NO: 31296 - DNA, 374 bp, Glycine max
  Clone ID: PAT_MRT3847_128266C.1
gtacggccgcgcgaacacgaccgacagaaacccacatactgatacatctaaacacccctcgaggaggttaatatatcacggagagacgcaacgtctctcactttccccatcaaaaatcaccataactataacgacatatgatcaaccactatgaatctcacactcatatcttcttaatccaacgaatcctctacaatctaagtccctgattcctattctctgctgcatctcatacacaccgaatctcccaccatctctttttattcctcttctcatcatatatccctaaacatcaatgacaaaaatttataccccttcatcatataagcccttataacttataattatatcctaccactatctaattacctact

SEQ ID NO: 31297 - DNA, 928 bp, Glycine max
  Clone ID: PAT_MRT3847_128267C.1
cgtacgttccaacgttgcactatatataaagagaatatacttaccatgataccattgcatcccacaaattacaactgaagatcaacatctcccactacaaagttgatactctcattcagaagtcaggaaaatgattgagaacatacttctgaatttgcagcttttagcacctttcttcctcttattcatcttcccagtgcttctgttcttctttttctcgtcttcaggttccaaaaagaaagaggcaagcataaccaccatcccaaagccatacccacttattggtcactacttagacctcaaaggcgtcggtaaccgccgtatccagtggctatccgatatcgtcaaaatctcaccggccgccactttcaccctccaccgccccttgggcagccgccaagtcatcaccggcaaccccgccaccgtagagcacattctcaagacccgtttctccaactatataaagggctccatctttattaacaacctctccgatttcctcggcaccggaatcttcaacgccgacggcaacacttggaagtttcagaggcaagtcgccagccacgaattcaacactaagtctctccgcaaattcgtcgaacacgtggttgatgtcgaactctccgaccgtctcgtccccgtcctcgcttcagcagcacaacaagaccaaaccctcgatttccaagacatcctccaacgtttcgcgttcgacaacatctgcaaaatcgcgttcgggtatgacgccgagtacctgacgccgtcaactgaacagagtaagttcgcagtagcgtacgaagaagcgacggagatcagcagcaaacggttccgcgagccgttaccgttagtgtggaaaatcaagagattgcttaacataggttcggaaaagagactaagaatagcggtgaaagaagtgcgcgcggacgcgtgg

SEQ ID NO: 31298 - DNA, 514 bp, Glycine max
  Clone ID: PAT_MRT3847_128268C.1
cttctcacctgcgacaacgacgaagacaagctcctccagagcggtagcgagatgtcaacactcccatttcctcaacctcagggaatgatgaaattcaagtctatgaaaggatggaaatctattgtaccacttcatttgaaaggaaaatcggcaacccgtttttctttatttcgcaaagtcaatttagctggagacctaaattttaatccttgtgttatataataccattttaagctggccaagttttgctaggtcatatgctgtctaagtaacttcatgactagagaaggttattctttggagtgcgcgataatggtgatttatcaagcctaatgtgtgtgtgtgtgtcttttctaatttaactttagttttacactaataacttgagggcagtttgagtgagcacactggaaaatatcaatttgcaacttccacagagtatttgttcctataattttctgacttctatttgtccttggtttcaagttccccaaatcttctgtgcaatccaaac

SEQ ID NO: 31299 - DNA, 504 bp, Glycine max
  unsure (1)..(504): unsure at all n locations
  Clone ID: PAT_MRT3847_128269C.1
gctcgagcttcctcatctcaaacttttgcatctatgcccacatgaatcggagtattatattcaagtataaaaattcatactgtgagaacaagcttatatgtgcattcacctctgtctacctccaaccattttcattaagcgtttagatgaacttgctttcttttattttgaatgcaaccaaaaaaatatttgtgtcttgacttcaaatacaaataaatttcaattaatcttattttatttaatagcgttagtgagaaacatttgaactttgttacttgcaattatgtcacatgattctaatcatgtgattgatactttagctaattaggatatgtgttcaagtgttttgatgccaaagatgagatttttatcctaaagtcatcatagagaaaaattctttggtgatgtcttgaattttgtcgnctcttactttttatattcatacttcatccaaaagaaaaattataagatttaatttgctatatttttttaccactatgtttt

SEQ ID NO: 31300 - DNA, 679 bp, Glycine max
  unsure (1)..(679): unsure at all n locations
  Clone ID: PAT_MRT3847_12826C.1
gaagggattttgtactgctacgattatntggggaaaatcaaagggttcaatgtggggcgcggggtgtgggaggagttgaaggggttggagaagggtttgcccaggtttctgtgtggggctaccatggctgatttgggtgggaaattgtgtgtggtttgggagtgccaggggaatgagaatgaaatggagatttggtgcgctgagattggagtgaagaagaattcggatggggaattgtggggtcaacttgtttggttcgggaaggttctttctgttcccaaaggctcttccattgtcaactgttcttctgtttccttgtgaccatacattacatgtaagcattctttgattttactacattgaattgctgccacttgctcttaggcgccatttcctgctccgatgtttgtatgtcaaatcgtgaatgataaataaacaggagctcctcaactagtactgcgctttgaagtgaatcaagtcatgtgttaatggaatgaaagtttgtgtatgagtgtctctgcgaccttgaatttcagttactggatgatctgagtaagcaatactcttgttcttgcataacatgacatttgtttgtcagtattcggataatcataggaaatgtgtatttataccggtttatatctgaataaaatatattcctattcatactagtcaaacc

SEQ ID NO: 31301 - DNA, 588 bp, Glycine max
  Clone ID: PAT_MRT3847_128270C.1
ctcgagccgaatcggctcgagtataggtgccaggatgcactagatacctatctgaaacttccacagaagcattacaacactggctgggttctttctcaggttgggaaagcatactttgagctagttgattatttagaagctgatcgtgcctttagtcatgctcgtcagattacaccttatagtttggaaggaatggatatacactcaacagtcctttatcatttaaaggaagatatgaagctaagttacctggcacaggaattgatttcaactgatcgcttagctcctcaatcttggtgtgccatgggtaattgctacagtctacagaaagatcatgaaacggcactgaagaattttcaacgggctgttcaactgaatcccagatttgcatatgcacacaccctatgcggacatgagtatgttgcactagaagattttgaaaatggaattaagtgctaccatagtgcactcagggttggattcaaggcactataatggcatggtatgggacttggaatgctatatcttcgccaaaagaaagtatgaagttcttctgaacaatcattttccatatgggccttaccaaaa

SEQ ID NO: 31302 - DNA, 399 bp, Glycine max
  Clone ID: PAT_MRT3847_128271C.1
aaggaaggaaggggaggggaggattcgtttcctaagatgggggccccttaaccttaaaggttaattccacaccaaatggggggggtccaaaccgccccccttggattcggtttccatggagtcaagagcgccatcgtgggttttaacccttttaaattttaattccattttacagggggattggatgaagcgttgaaaaggcattgcaaagttaacctgtccggacctgtttttcccatgagggaggagcttgccaggcaaatcttgtccaggttccagcggcctcctggaccaattcctttttaaatgctgggtttggggactgttccaggaagtgttgatcacttgggttttggggattgtttaaatgcccccctgggtgaagagactttccggcct

SEQ ID NO: 31303 - DNA, 1434 bp, Glycine max
  Clone ID: PAT_MRT3847_128272C.1
attgaatataaaaaaattgtgtaggttatactcatttaaaaaaccttccaacgactaaagcattgatttataggcaaatgaatagataaactaatggtacacctatttatccctaatgcaactatttgtacaagtataggagcttctcggtacctctattacatcatatctctaatcctaatcaactttcctacaaaactgtatgcagttttaaagttccgaaaattagatggactgattgatgatttgtttgaatgaatgctcgagcatttgtgctgcttctatacacaactagccgaaagtaaatccttgtaattcaaagcttgcacttaaaaggtatagagctacgagtcgtcttcgtcttggaactcatcaggtataatcaatttctcaacggcagccttaatggtagcagcatctgttacagatggtttcaaatccaaagcaacaccataatgaaacattgctctctcatgcatgtgacgccttctatagatattgcccatcaaagcatagacactactttcacgaggatgttactctttcagctcctctaggacatccaatgcctcgtcaaacttttccaagctcatgagtatattggctttttgatacattggaaggggatttttcttatctgctaaaatagccttctccattaccatcagtgcttcctcgcttctctttaaagcatgcaaagctgtaccaaggtatgacattataacagatgagcgtggattgatatggaaagccatccgaaaatgatgttcagagaactcaaacttttcttggcgaagatataccattccaagtccataccaagcattataatgccttgcatcaactgtgagcgcactctggtagcatttgattccattctcaaaatcttctagtgcaacatactcatgtccacaaagggtgtgtgcatatgcaaatctgggattcagttgaacagctcgttgaaaattcttcagtgcagtttcggggtccgcttgcgcgcttctgcgattcccctgggcaccccgtggttgaggcgccaggcccgctgcatgatctttctgtagactgtagcaattacccatggcacaccaagattagtgagctaagcgatcagttgaaatcaattcctgtgccaggtaacttagcttcatatcttcctttaaatgataaaggactgttgagtgtatatccattccttccaaactataaggtgtaatctgacgagcatgactaaaggcacgatcagcttctaaataatcaactagctcaaagtatgctttcccaacctgagaaagaacccagccagtgttgtaatgcttctgtggaagtttcagataggtatctagtgcatcctggcacctatactcgagccgattcggctcgagttcaccaagaactcttagaagggttaatatttctgaagcgccagtgatg

SEQ ID NO: 31304 - DNA, 392 bp, Glycine max
  Clone ID: PAT_MRT3847_128273C.1
aggatacattctttcagacccctctgtctactctattaacgtgataatcgacttgatatgtcgcggtgataattatgcggtcaagggggacaattgccatattctgccttttattacaaagctgaaagctcacacagcgcgttctgtattctctgctggtcactgaatattgacttatcatggcaactgagtctcaaacaccaattgataacaactatcttacaaacgctactgaacaggaattacactgtctgaacgctattcatgatcggcttccaattacttctttaatgaaagcacaatgttgttactccgccttacacaatgtcactgtcatgcgatgtgctcagtactactaatcccccatatgctctgtctgcgctttgatggaa

SEQ ID NO: 31305 - DNA, 464 bp, Glycine max
  Clone ID: PAT_MRT3847_128274C.1
tagtgtgctttgttggatttctaactgaattgtttgatttcctggttccattgattctcttgccatagttaatgaggttccacacttttttcttggctacttgaatttacaggctgtaaatgataatgacatccacaacattgttctgtcatatcttatacataattgctacaaagaatcagtagaatcattcattgcttgcactggggcaacgcagccggcagattatttggaagacatggataaaaggaaaagtaggtttgtggttatttttgggcacacaagattaattcaagtgttggttcctgatcatattttatctgcttgctcagcctaggaagttttatgttacctagtgttcactcataaccactctctgcatcatctaaaaatgcacattggaatagtcaagtcaaccccaactcgagggatgcttaactgttgtatgctttaataccacttaa

SEQ ID NO: 31306 - DNA, 274 bp, Glycine max
  unsure (1)..(274): unsure at all n locations
  Clone ID: PAT_MRT3847_128275C.1
aatttaattttgtaaagctttnttctagaccacagtccacaccacccatattcaccaccgttaccgtctaatccagccaccgtatgcggcttccaattgagtccgagaacgcaatttgacaggctttatattgaaacttgagacttgaaaggaagctgctataattggtcagtcttcccatggcgtatcccttctcagatttcaagtactcatatggcctcactgtaatagatttctccttcttcacaacttttgtctgtgatactatcttata

SEQ ID NO: 31307 - DNA, 258 bp, Glycine max
  Clone ID: PAT_MRT3847_128276C.1
ttttgttcttatagataatagttcttccaaatcaagagcggtttgcagatcttataaaatttgtgtccctaaacaatctctaaattcttttctgctatcatcttatcactcattgccatttccattcttcaaacattatttattacttctaattatcaattattccacttttattacaacaatatcaaaatattaattttcactatcaatacataccaattcccatcacaattctctattacatatatccaaacccaa

SEQ ID NO: 31308 - DNA, 272 bp, Glycine max
  unsure (1)..(272): unsure at all n locations
  Clone ID: PAT_MRT3847_128277C.1
tcatagatcgctgctgtgtttgtcttagtgtgtttgttattcactatccgtcattcctgttcctcaaggtcattttttgtttctttatgatcctccactccattaatcaaactattgtttgctaattactcatctgaattagggtttatttgccactaatcaatcttaattcatcaatatcagtggttgtttagttctttttaatatttttnnntctttttgtatgacggctgtcggagttgaaacggcgacgcttgatgatggccaatgca

SEQ ID NO: 31309 - DNA, 293 bp, Glycine max
  Clone ID: PAT_MRT3847_128278C.1
gttctgcttgacttccacactcacagagcagccctggtctgtgcggaaaccaaacatggccagagtgcatgctctccgacagaaccggctatataaatattccttaccatcctgtgattctggcactagacgaccagactgtggctcttcttgagactctgatgaaggtgctgctgtcactaccatttatgtacgtctacacgatgggcaccatgatgcaagctatgatactaggcaccatgactatagaggggtgaatgtctacgctacttgtcaaagagggttagcatgtg

SEQ ID NO: 31310 - DNA, 1140 bp, Glycine max
  Clone ID: PAT_MRT3847_128279C.1
catccataaagtggatatgaatggggaatttgaaatatcctcaaaaataatggacatttggtatgataaatacataatcaaattggttactttggcgctattaacacaacgttctacccaatggaactaatagatcaataaatccagggatactaactaaactttacactggattaaataaaaatcacaaaatatacaaatttgatggggcttaacacaaaagggagatatttttaccattttgcgcaaaaaaggctatactaacaagcaaaacatgttttcaaaaccattccactgggcatctgggatataagtctttatctgcagcaacatggggggcagctagcagttttttctgaaccttccgcctctcataaaacaccaagcatgaaagggacgtacacttcacaccattttccaaaagcctatccccgcctccacaatggggacatacagcaacaagatgtggcatctcttgctctaactttgaagtcttactaatcactgctgttgcagcagctacttcattttcagaacattgattgcataaacgggctgatgcctgaaccaacctatcacataatacacaatgttttgaaagatagtaataatcaattctggtttgatggaaatttgtagttaatgtatgctttgcagaagcttcccttgtggggcggggcatctctgaaaaccaatggtttaagtcagcaccaacaagtccaaatacccgctgtaaagctggtattatttgtttattaatgtaatataaatcatttattctaaatggggaatcaattgccaaaacttccaatggatccacaaccatatcaaccaggcgagctccaggctctccatgaattacaacatacggtattctctcagcataacgtggttctgccctagggtcaaccgtcattgccttagtggctacaattgcagcaggaggaagtgatgagattcttgcactgtaggtacccaagcgaacctcctttgcaaagataaaatctttaaggcagattcttcctgaaagaatcctcttccactgacgatgcaaataagtcttcacctccaataaattctgatgctcaaagaagagtctcaaagactgctccattatctttcaactgcccggacgcgtgg

SEQ ID NO: 31311 - DNA, 438 bp, Glycine max
  Clone ID: PAT_MRT3847_12827C.1
aaaaacactgtcattccatttttcaccgtttcccgcactccaccacaacgatggacaacgaccgcgtctcccgccgcaccgaggtcctcaccaaccacctcctccgccgaacacccccaccctacgcccttttccacccccacccctgccttagctactcccccccggagctctccaacaccatctccttcgacacgcgtgagatgcgaaaactaatggatggcgactcactggaggagcgcgactggatcttctctcggatccaaaatggcctcccacataaccgccgccaccgcgcctgagatacagtcgacaaacaagactaccgccagcccatggaacaccagcgccagggcaccatgaagcgcatcgggtatctcctccaaacaggggtcttccgaggatggctcacgggtaaatggccccgaacaagagctc

SEQ ID NO: 31312 - DNA, 370 bp, Glycine max
  Clone ID: PAT_MRT3847_128280C.1
ggtggggtgaagtaaacaaaacccacccctgacccgtcccggtgccattcctactaaaggtgccagggccaaggaagactattggaattgaaaaggaagacacaaaattattaaattattattcactccttcactttgtgattacacacagtatattttgtgtatttatacacacaaacacttaatggcctaaacacataattttaaacgcagaattgtgctctaaatggggatatatggggttagataaaaaaaaaaaacgctgcacataaaatgggggggataaagttttcccgggttttccacaatcaccacacacacgtcaataaaacgagtataactctgatttcccaaaaagaggaggttattt

SEQ ID NO: 31313 - DNA, 135 bp, Glycine max
  Clone ID: PAT_MRT3847_128281C.1
tctggtttctctgtgtgagacaataattatgttcacgggtgccaggtggtacaccacaatgtatcaaactggaacattttttgtttggacttccacagtcttagtctcattcattgccagcatgtagttactcat

SEQ ID NO: 31314 - DNA, 622 bp, Glycine max
  unsure (1)..(622): unsure at all n locations
  Clone ID: PAT_MRT3847_128282C.1
caacaccgggtaagagagtcatggacatacagagagagcgataaacgaaagtgaaactcgtaagagagaaactttcgccatcagaaattgctgataaaaaaactcaaacagagtgagagaagtcttctatcgcgttcgcggatgatattttgttccttttctgatcggaaatgttgtttccggcggcggcggggaaagtagacgcggctgagggtggcggtgccgaaggagaaagagattaatcattatgaagacaggaaaggggaagaacaacggcttgttgccgaattcgttgaggattgtctctctatgcctcaaaactgtgtcaacgaatgccaccaccgttgcttccaccgtgcgctccgccggcgcctccctcgcagcttctatttcctcgtcttcggaggatcacaaagatcaggtaacctgggctggttntgatacactggagcttgattcatctaacctcaaacgtgttcttttacttggttatctgaatggatttcaagttcttgatgttgaagatgcctctggcttcagtgaactggtctcaaagcgcgatggtccagtgtcttttgtacagatgcagcgctatgctggaggttgtgatggtcaggaggga

SEQ ID NO: 31315 - DNA, 1381 bp, Glycine max
  Clone ID: PAT_MRT3847_128283C.1
atgctatctaactttggtggcaatattgaaacgcatggcactctggattcaatttctttaaggcctgttgatgctcgtgtcaaagcaaactcaacaatggcaggcgtcgttatgtgcatggaaggaatacaacataaccctattgtttatgagttgatgtctgaaatggcatttcgtgataagaaagttaaagtttcggcgtccatcaagagttattgccatagacgatatggtaaagttattcatcaagtcgagtctgcttgggagattctttatcatacaatttacaattgtaccgatggaattgctgaccataatcatgatttcattgtaatgtttcctgactggaatccatccacaaattctgtaactggcacatccaacaaccagaagatatacctgttgccacctggaaatagaaggtacttatttcaggaaacactatctgatatgccacaggcacatttgtggtacccctctgacgatgtaattaaggcattacaactattcctagctggtgggaagaatcttgctggaagtctcacatataggtatgacctggttgacttgacacggcaagtattatcaaaattggcaaaccaggtataccacaaggcagttacttcttatcagaagaagaatattgaagctttgcaatttcacagcaataagtttcttcaactgataaaagatattgatgtactgcttgcttcggatgataactttcttcttggaacttggcttgagagtgctaagaaactggcagtgaatccaagtgagataaagcagtatgaatggaatgctaggacgcaagtgacaatgtggtttgataccaatgaaactactcagagcaagctccatgattatgctaacaagttttggagtgggcttctggaaagctactatctccctcgagcttcaacctattttagtcatttgacagaaagcttgagacaaaatgacaagttcaagctgattgagtggagaaaacaatggatttcacagtcaaacaaatggcaggaaggtaatgagctctacccggtaaaggccaaaggagatgctctgaccatctctcaagctctctatgaaaagtattttcaaaataagttgataaaccattaaactggagaatatgagtgcacagaactatttacattgttccatattcttcatacaaaagtaatattgagccccctaccatattgggctggttgtgttgtgttcttgtgatacttgcaattattttcccaatgcttgacagtagttgacattatctcagcaattgagctttcagataaatgtgcgtttcgaatgaattgttagctaattattttacatgcgtttattaaagatttaaatatatttttggtacctagaatat

SEQ ID NO: 31316 - DNA, 218 bp, Glycine max
  Clone ID: PAT_MRT3847_128284C.1
cctcatcacaccttacacacgctctacatatcacgacactactaacgcaagttcaatatacaacctacacgactcaacactacgtcatgaaatcattctttatactcaacaattccacatcaaggtcctacttatctgatccaaacttcattcttcgatttatccatcgtaataaacctaccaaccttataaaaatacaatcttgaattccaaattat

SEQ ID NO: 31317 - DNA, 817 bp, Glycine max
  Clone ID: PAT_MRT3847_128285C.1
cggctcgagctaaggggtgccctgaggtatcatgctaagctcctcttctgctttcttcgattttcgccttttcaattcactctctgatgatcaccgattccgtttttcgttttcatttttcctcccaacattctatttctctttttttgcatttcattttcgatcatccgcagatcgcttgcgtttttgttctacgacgctgatcgtatctttattttttattttatttttttttccttctgttacttcggttttttttttagaaatatatatatttcttattcatttattttgttgaactcctgctattatgcatatggaatttggaagaatttgattcagtaatgagttttgcaagtctcgtttggtgttattagactgatctactgaatagccagctagtttgtgtatttggaattttacatgataatctgtgtttacttacggtcaactcaatcggttccttctcttatttaggattaacatcagaaacttaatcaattgaacataattacacatggataccgaaagttttagagtttgtaagatcttttttgtgtttggattgccttctaactcaattgatttggttacctgtggtcacatcactacctaaaaaaaagtcatcgacatttatcttttaatcttgactatttaagtatgattcaatggtctatattcaccgttcttatttattataatatccacgatttcttacctgatactatgtatgtcacgtcacgcgtcagtattttactcttagatgttttgttttaaatggctgttttcttgttcagatcacattgaacaatggtga

SEQ ID NO: 31318 - DNA, 227 bp, Glycine max
  Clone ID: PAT_MRT3847_128286C.1
tttttctattacgaagcgtaacatctatatttgcatctaacaaggaacgggcgaacacgcactttcataccccaccacgccacaccggtctggtaaacaatccactgcccatacatcagtacatggaagcacactaatcctatcttggacaaccaaacgcaccttgataaaccctacagcggtggtaccgagctttgcaaacaaccaaaagattcgggatccaaaaa

SEQ ID NO: 31319 - DNA, 348 bp, Glycine max
  Clone ID: PAT_MRT3847_128287C.1
agaaaattaagttacatttttttaatattgagactcaggaatcagcttaggacttcccaccatttatatatatatatatattcttcgttgtaattttatgcaaaaagggaagtttcttcctccctttaactttctaattccccaacgagatattgcggaatcggaccttaaatcacaattacaataataaaaaagggacataatgaaactttcgtgcggagtgcactaggcatattgaggatagctcgtcggtcggagcaacaaacatcatgatggtgctgaggttcattgggttcatgtacattttagaacctgacataatttgttccaccaataagccgattggcc

SEQ ID NO: 31320 - DNA, 780 bp, Glycine max
  Clone ID: PAT_MRT3847_128288C.1
cacgcgtatgggcgatgatttgtatttgattttgatgattccaataataatattcatctttctctctactctctagtgctgggacttgtctcacacatggaaactactacgtgcgtaggataacaaccaacaaacctagcgcacgatagccctccatcacccatgcttggagtactctgcgccactcgctccaaaccttggctcttctccctcgtccacgcctcccttcctcgcctatcccatgcccctctctcaccttccgcctcgccgccgccccgtcgccgccattccaccgcctgcaaactctttctctccgctggcggcgccgcctccatatggcacgccatcatgccccgagtgaatgacgacgacggattccgacgcggcgttgttgcgtttcatgacatgaagggagagggatcgtggaatgtcgcttgggacgcgcgaccggcacggtggctccaccgtcccgactccgcgtggctcctctttggcgtctgtgcttgtctcgcgccgccgtcgagttgcgtggacgctgacaccaataccgatgcaatcgctgtagacgaaagttgccgccttctcgataaggaacgggaggagtatgaggtttctgctgattacagagtcactgcggtaccggcagaatgtcggttgttctgtttgtcgggagctcttatggcttgcgtgtactgaggggaaaatgaatcggactaccggcgcatggtcggtgttttgttagagcaatagctcatggagcttgcttgagaaaggggaaaa

SEQ ID NO: 31321 - DNA, 774 bp, Glycine max
  unsure (1)..(774): unsure at all n locations
  Clone ID: PAT_MRT3847_128289C.1
tctttantnnaagcaacaaaactgctcaacaaaattgtacctacaagttaaaaaaaaaacctactaaactttagttagcacttagcagagaccactagcttctagtagctatatatgcctctatccgcaggttgagtatgcacattttataacgtttactaccagttaaagctaaaggattcaaaatgcagattttctcctaaatcagatgagcaaatggcagcaacctcttgcctcattttcttgggtccagaaacaaaaactcccactcttgacccttcaagttccaatagcagtcttcttagatcaggtcttgctccataatgcacctttgtagcttgaacaagggattgctgtgggaggctttccagttctttatctccttcatcagtattcaactttggggattctgctgatgatgatccttctaagttctgaatctgttttgcttctctgtcgttgtatttcttgttccaaagaacagctgcactagctgccattgatatggacacacatattgcaaaaatgttgaggaatgacctcaaaggttgtgaaaatattttattagaattatggtctatagggaaaatgatgaatcgggtaatgatcccaattaagatgaggaaaattatgaacgaggacgagattatagcacaaagccaaagccaattgtttggacctaaaatagctgatatgggtgcatctgttgccttgggtttgaaccatatttgttgaaggtgaatttggttttccaatctatgctcctcctttctt

SEQ ID NO: 31322 - DNA, 395 bp, Glycine max
  Clone ID: PAT_MRT3847_12828C.1
ccgaggtataattgggtatattgttccagcatcaattcgggggtatgtagattcctagattatacttctggggacgtaacaacccaaaagtctagaagcagaagacctgatcttccagcttgctgactggccttgccttggcgtaccccaaactctcagtcgccttcttcatggccgggaccataggaggcggtccacaaatgaggatcttaacgtcgttggcaggtgctggcagcttctccttgatcatatcggcagtgacaaagccggtaccaccagtccagttcttgggtgggttgttcaaaacgtagtggacattgaatttgggatccttggccgctagcgagtcaagctcgtccttgagtaggatgtcttcggggttgaccttggcaaaa

SEQ ID NO: 31323 - DNA, 195 bp, Glycine max
  Clone ID: PAT_MRT3847_128290C.1
ggcgcgcaatgcgaaaaagaaaagggcacaacgcgcggagagacgctgtgcgcatagggcgctctttcgcgttctcgctcacagagactctgtgctcggtcgctcgggtgcggcgagcgggatcagctcacacacaggcgcggatacggggatacacacagacacgggagaacacacgagagaacacgtgagccc

SEQ ID NO: 31324 - DNA, 368 bp, Glycine max
  Clone ID: PAT_MRT3847_128291C.1
aattcgtgcgcgcggtcttctggattttttttgaatgtcttttttactatcgggggcgggtgataaaatgctgttaatgaactctatcagtgaagatagctaaatgatgtggtacttagcttataaattatgtggtttacttatatagagctagcgtttttggacattgaatctcatagagattttaagtttactaatattatacttgcatgcacctatatatgtactatgggacttagtgagactacgttcttcataccttatattcatgatgacacacaacctttattgccggcggtggattaagcaaaaagacctggcttgaattctattaacaaatatcgtcccctgcataagataattggagg

SEQ ID NO: 31325 - DNA, 469 bp, Glycine max
  Clone ID: PAT_MRT3847_128292C.1
cttggggggggggggggggggggggggggggggggggggggggggggggggggggggggggggggggggggggccccaataaatgggagtataggcaaaagggggcattaggggcctttgatatagcaatgccgggcataggggattcaaaaacaaaagggggggaaaaaacacagcggatagccaataaggggttaaaggaaattttttagcaaaaggtaaagcaaccctaaataaatgggagttccaaggactaaaaggggtgttttggggggggggcaataattttgggaggcttacttactagtagagggggagtttgttggccaacccgcccctatgtaaatttgaaactgggacttaatgcctgggccagccaagggcttatggtagcatggcattgattggtactatagcccacggtggggccaattgggttaaccctggcaagcctaaaggggccttaacc

SEQ ID NO: 31326 - DNA, 266 bp, Glycine max
  Clone ID: PAT_MRT3847_128293C.1
gacacagaaggggacggtttaacaccgatgcatgttcgtttgcactgttacctgtgataccgcacactcaatggaagctgctcaagccgacgagaaccatgtgggtcatgtatgtcgcagagtcgagtgcaaggtcgagctcgccctgtatgtcacaggagttgactatgcagtcttagatctcgttttcttgatcataagtgatgcggatctcaattgcaatcccgttcacagcaacgtgcatgtatctgttcacgatacgtatg

SEQ ID NO: 31327 - DNA, 441 bp, Glycine max
  Clone ID: PAT_MRT3847_128294C.1
aacttcaaaaccctttggaaatataaaaaaaaaaaaaagggccccttaaatgggggtttttttttcctaaaacaggacattattttgggtagaaagcaaaatgaagggattcaacccaaaaaatttaatatttcatcagagctggaaggccaaatggggctgaaacggaaaacccccccttacgggggaaaaaaaaaaattgggagccccaacctccccttttatggcattaacaagggcaaaaaaattttgtttagggggaaccccccacccccgccaaaaaaattttccaaaaagcccttgaaaccaactttggggttaaaaaccaggttcccgggccaaaaaataaccggaatcaaatggacttgatttgctaaaaccccgccccttaaaaaaaggacaaacatttgtttgggcaaggggggtgcttatggggggacc

SEQ ID NO: 31328 - DNA, 569 bp, Glycine max
  unsure (1)..(569): unsure at all n locations
  Clone ID: PAT_MRT3847_128295C.1
gtccggaattcccgggctcgacccacgcgtccgaaattattatgattgcctttattttgcattcttttccttgagtcattttggatatgcttccttttatttaccacctataagaatttgtttactgttggcgtgtgactgaaaatcaatactctttctccccccacgttcatgaatgaatggcttacttaaggcctttatatggttctttctgtttccactttataggattgatattctgcaagaaatgtggaggttctggctattcccgtctgctatgagctgtgaaattcgtgttatatctaaaaaccatctgttctgaaatatgtaaggtcttgtaacacttttattgtccatagtgtcttttttctgcgaatcaagagaaaaaaaaaataagaaagatnacataagaaaggacttagccttactgagtagaatagctgagtaaaaacaatagttagatagccaagacttagagacctcaactgatttacaaaagaaatagaccttactgaaacacaattttccttttgacaaggtattactattatgaaaaagtttaaatagcc

SEQ ID NO: 31329 - DNA, 1422 bp, Glycine max
  Clone ID: PAT_MRT3847_128296C.1
ctccattttgcgtttgcttcggttgacttccggcctctccggccctgctgtctcctcgcgaagaccacatcaagtgacctatattgtcaacttatgcaaattaagtgatcacaattggctcttcaacaccaaaagtcttgcatctctcatatattcctcgtgtaatacaaaatacgatgcggcattaactattttgaatttattatcgttcaaaaagaattgtttcggatttggaatttcatgtttgaaatggctttcgtagtttccctgcaggccggaaatcatccttctagtctgttgctcatacttccaatcctcaaatcattttgcactctgtcaaagatttcttagctactttatgcacactttcctatccatatgcaatgattggcttagcattatgtgcactttcttcgtctctccttgcagtggaaaaactatcagacatatctctatcattttttgttgggtgtgttacaagctgcggtacctcaattgtttttcgcaatttatagtaatgctctaaatcaagtgtctgaccttgaaatagataagataaacaaaccacatcttccattggcatccgggcaattatcccttaaaactgttgtcatcattgctgcgtcatttttaactttgagtttttggcttagctggatagtaggttcatgacctttgatttggaatcttgtattgattacttcaatatggaccgcttattcagtcaatgtacccttcttgagatggaagaaaaacccaatactcgcggcaatgtgcatggtttcatcttgggcatttgtattgccaattacattttttcttcacatgcagacttttgtgttgaagaggccaattgtctttccaagatcacttattttggctattgtaatcatgaacttcttctttgtgggtatggcattggcaaaggatatacctgatgttgaaggagataaaatatatggcattgatacttttgcaatacgtataggtcaaaaacaagtattttggatttgtattttcctttttgaaatggctttcggagtttccctagtggcaggagcaacatcttctagccttttggtcaaaatcatcacgggtgtggggaatgctgttcttgcttcagttctctggttccaagccaattctatagatttgagcagcaaaacttctggtggatccttttatatgttgatctggaagctaatgtacgcatcatacttcctcgtggctttaattagataaaaatgtaacagaaggttaaagcagtgaaacaacaaaaactatagcgatatatgttttcccggatattatttcttgtatcattaatatttttctttaattgtgtaaagacttcttgtgtatttacacagagacttcgatctattgttaaatatttcataaatggaacagcttgttatgctg

SEQ ID NO: 31330 - DNA, 236 bp, Glycine max
  Clone ID: PAT_MRT3847_128297C.1
taaaccataaacggcttataaaacttgaatagaaattaaaggcagcctaacacatcccgaaacagcaagggaattgggctaaaaccctataactgcccgtgaaattcgaaacatctaaaactcttcttaccatcaaaacaaaaaacagggcccatcaccaacctgcagcattgataatcgacccccgccgttcaagaacctatttttgaaagtgcccgcttcctgaaatcggcaga

SEQ ID NO: 31331 - DNA, 712 bp, Glycine max
  Clone ID: PAT_MRT3847_128298C.1
ccggaatccgggtcgacccacgcgtccgtaattatgtaactctcgatcgtgttgatctatgtcactatatatcaatatatataaataaatgcagctattataaaaaaaaaaaaaaaaaaaaaaaaaaaaaaaaaaaaaaaaaaaaaaaaaaaaaaaaaaaaaaaaaaaaaaaaaaaaaaaaaaaggaaaaaaaaaaaaaaaaaaaaaaggggggcccgtttaaaggaaccaaagttaacgacccggggaaggcaaggaaaaagtttttttatggggcccccaaaataaaataaaggggcgggggtttaaaaacgggggaaggggaaaaacccgggggtacccaaattaaatggcttggaaaaaaatccccttttcccaagggggggaaaaagaaaaaaggcccgaccgaatgccctttccaaaaattggccaaccctaaagggaaaagggaaccccccttgaaggggccaataaagcggggggggggggggggtacccccaaggggaaccgtaaaattggcaagggcctaagccccggttcttttggttttttccctttcttttttggcaaggttggcgggtttccccggaaaagtttaaaatggggggcccctttaggggtcccaattaagggtttaagggcccctgaacccaaaaaaattggataggggggagggtccacgaaggggcccatccccctaaaaaacggttt

SEQ ID NO: 31332 - DNA, 163 bp, Glycine max
  Clone ID: PAT_MRT3847_128299C.1
gtatttatcactcgaacgaacgcacgaaatgacggttacatttttggggcaaggctgaaggatgatcccttataatgccaaacctgataatgcagttgcgagtaatgatgacgcgcctttcagaggaggaaggcccattcgggtggttaccatttccgaatac

SEQ ID NO: 31333 - DNA, 690 bp, Glycine max
  Clone ID: PAT_MRT3847_12829C.1
agagaagccaaaagtaaaagatcaacaacaactaatagtaacaatggcacaggcacaatcagcggctaattttgattaccaagattttgatccctttttcgaatggtctgaagacgaaggaagtgccacgctcattgtaatgctgccaggattcacaaaggaacaattaagggttcaagtgacttcaactcctgtgctaaggatcaatggtgaacgacagatcgttgagaacaagcggcgtcgtttttctagagaattctccattcccccatattgtgacaccaatgatgtgagtgctaagtttgagggtggcgtcctaagcatcaagtttccaaagctcatcacccctgctgctaggtctcagccacagccacaggaagctccaacaatgcctcagaaagagaaagaaccatcacaacaacaagatcaggttcataagcaagagtcactacagaaagagaaagaaccaataactagtgatgagaaagaagagaacaaaacagaagagtcgtcaccacagaaagagaatgagccaattagtgatgatgacaaagaaaaggataacaaaacagaagaagtagttgctgaaaagaaagtgaggactaatggggtgccagagacagcaaaagaattatgaacatcaacatcaacctcatcaaaaccaaagataacccagagactgaaaacaag

SEQ ID NO: 31334 - DNA, 297 bp, Glycine max
  unsure (1)..(297): unsure at all n locations
  Clone ID: PAT_MRT3847_1282C.1
gtagtttgaatgtccatttttttgttctcctcttctacttttgcataaaaatgctgtatgccttaatctgcagaaatcatagggtttttttttttaggtgtatgctgtatgctaaatcttcggtctctatttccttcctaaaaaacctaaatgttctttaggaaggaaatagagaccgaagatttagcatacagcatacacctaaaaataaaaaccctatgatacctgcagattaaggcatacagcatttttatgcaaaagtcgaagagggatcanaaaaatggactttcaaactac

SEQ ID NO: 31335 - DNA, 227 bp, Glycine max
  Clone ID: PAT_MRT3847_128300C.1
cgagttcgactcttactcgcacctttcctccaaacccaaccctaaccctaaccctaacccttattccaatcctaatccttattacgatgctaaccctcatccgtaatcccgaaacgtcgtcggtgtgctcccctcctatcgcctccgttcctaccgacgtcgacgccgctgcatcctctactccgccgtgctcttcctagtcctcctcatcggcggcgccgctttcc

SEQ ID NO: 31336 - DNA, 417 bp, Glycine max
  Clone ID: PAT_MRT3847_128301C.1
gaattcggcacgaggtggatagaaagttttatgaggcagttcaagaggctttacaacaaccacaacaacaaaatgggaatgttcttgaggtcagcacaattgaagcttgtgatggtagtggtagagttaagagatcattcttttcttttggacatggaagcagatcaagaagtgctgtactacctgagacccctgatttttttatttaataaaatgtattttagttctcatattttcgctaaaaattcatcttagttactatactttaaaaataataattttggtcttcaattttttttaataatcggtgaatttggtctttaaaaaaaaaaaaaaaaaaaaaaaaaaaaaaaaaaaaaaaaaaaaaaaaaaaaaaaaaaaaaaaaaaaaaagataaaaaaaaaaaaaaaaaaaatt

SEQ ID NO: 31337 - DNA, 462 bp, Glycine max
  Clone ID: PAT_MRT3847_128302C.1
ttttcgtttacgcccacgcgtacgcccacgcgttcgtccacgcgtccgtctgagtgggccccaattaactgtcgagttcattgacagccaattgacataagtgaaggaatttatgtcagagagcaagatgtcaacattgaatatgatgcatgtacaattacaaatgatagcggtacattggttgctgccaaggttggaaatcacaaacaaattgctggattcgatgctgctggaagcaaaggaagactgggatatgcttcattgataccatatgttgagccagttgtgcaagctcaatgtgctgaagtttactgtgacttctaccctgtggaggttgatagacaagagggagtcgctcacactggtgaattgaaatctggtgtctatgttccactggctacaaatactaatttggcggaaactcccaagggatggccactggttctaccttgtgacaaaatt

SEQ ID NO: 31338 - DNA, 579 bp, Glycine max
  Clone ID: PAT_MRT3847_128303C.1
ttgccgctctacatcgttggagtgccgcctgcttggggggggggggggggggggggggaatgaaacacaaaggagtagagaagagtatagaaaggtaacaaagacagtaataagagaagaaagaaaagaaatggtgaatggcgagaaggaagtaaagagtggaggaatgaccaaaaggggcagcgaagtgggtaggaggtttttgctagggcgagaatgagtggtagtgggcgaaactatagttagtagctctctaaccggcataatatctagaacaaagggtaggccgatggcacgaccaggaacataactgctaggaagcgttggttaactatgtgtaattaatgggacgacggtggtaagccgagtggcttggcaccgaggagcggctggtagagactaagtaacctggcaaattatagcgttgtgggtggccgtagatgtatgggtaataagcgtagttagcacttgacaaagaaggcaacttctgctaataagggggcccgtatggcgtctttagagcacaattgttgcgcggcgcgtggttaggttaaccaaacagataaggcgtactagact

SEQ ID NO: 31339 - DNA, 248 bp, Glycine max
  Clone ID: PAT_MRT3847_128304C.1
gggcagaaaaaaaggggctctctaaccttcctcttggtaaaaaaaagcacctgcccgaaatttttttttttttccaaaggctctcaaaataccccccccttacacaaatttttaaccctggtctaacaaaggagaaagcttacttacacggatggcgttgggcaaactccccaaattctattcccccccccgggggtgccaattaaataaaagaagctcccttctcacaaagagaggcaaacatgggt

SEQ ID NO: 31340 - DNA, 3774 bp, Glycine max
  Clone ID: PAT_MRT3847_128305C.1
gcttgtcgcattttgagtctctgtgggtcttttggggctctctctctcgccgagctccgcactcttcagggaatttcctcactcagattccagctgaaaagtgcgcagtgcgctcttttcgaattcagtgatgctaaaccgaattgtattcaattaaaagtgcaataactcattcctgagtctaattctagcattattacttctacaagtttagtggatgtgtcatgacatttgtaacattgcctaaggaagtgcattgatagattttttcaaatctgactgcactccttctaagaaacttgcgtgccacatctcaatttataaaatacaaatatgcttacatggtggggaaaatcatcatcaaaagaaaccaagaagaaagcaaataaggaaagtttctttgacacactggaccgaaaacttagaatttcatccaaaggtaaagtaagcattagatctggaggatcacgtagacattgtaatgacacaattgaatattactgaggtcattcaccatgtggatgaagatccacttctctttccaaagtggctaggtgtcatagttttattcaaagagctcctactgaaccacataaactgactgatatgcatccttatcgtataggccgagtagattctgaaattagcacattatgcaaccctgttacgaatctgcagattcctccttaatgtgtcttcatcattccacctgacagttcaatatcatgtagatcaaaacgtccatatatggattttggtacagaaaatggttttgtattttgctttttgtctgcggaagccatatcgaggggtgaattatgctggatttggcctctgctaaatgactggttctggtcaaaattctgggcataattcaatgggaggggacatgtcaggacagttaatttggcaacttagcaggaatagcccagaatattcctccgtacctagtcccagaatgactagccctggtccaagctctatactccaaaatgtagccctttacgcaactatgttacaaatcttcaggttcctcctcatggtgccttctatagtgctcctgattgttccttgtcaaatccatcatgaagcccattctgggcttttggttaagattaggtgttgaattctgcttttttggctggaaagccatatccagagatcaattttgttgggtctgggcattgctctagtccaggttcaggtcacaattctgggcacaattcaatgggaggggacatgtcaggaccgttactttggcaaccaagcaggggtagccctgagtattctccagtacctagtcccagaatgactagccctggtccaagctctagaattcagagtggagcagtcacacctattcatcccaaagccgggggaacacccacagaatcacagactcatcgattgcctcttcctcctttgtcagtttctaattcctcactgttctctcattcaaattctgcagcaacatctccgtctatgccaagaagtccagctagagcagataatccaaactctggctcacgttggaagaaagggaagctgcttggcagcggctcatttggacatgtctatcttggcttcaatagtgaaagaggcgaaatgtgtgcagtgaaggaggttaccctgttttcagatgatcccaagtctatggaaagtgcgaagcaatttatgcaggaaattcatttattaagccgcttacagcatccaaatattgtccagtattatggttctgaaacagtcgataacaagctttacatataccttgagtatgtatctggaggctccatacataaacttcttcgagaatatgggcaatttggtgaactagttattcgtagttatactcaacaaattttgtcagggcttgcttatttgcatgctaaaaatactctccatagggatatcaaaggagcaaatatactggtagatccaactggtcgggtcaagttggcagactttggcatggcaaaacatataacagggcaatcgtgcccattgtcattcaagggaacaccttactggatggctcctgaggttataaaaaattctaatggatgcaaccttgcggtggatatatggagtcttggatgcacagttttggaaatggctacaaccaaacctccttggtttcagtatgaaggggttgctgccatgttcaagattggtaatagcaaggaactcccaaccatccctgatcatctctcaaatgaaggaaaagattttgttaggaaatgtcttcagcgtaacccacatgatcgtccttcagccagtgaattgttggaccacccctttgtaaaaaatgctgcacctttggaaagacctattccggctcctgaagctttggaccctgtttctgggattacacagggagcaaaagctctggctattggacaaggaaggaatctttctagcttggattcagatagactttctgttcattcttctagatttttgaaaactaatcctcatgaaagtgaaatccatattccaaggaatatatcttgccctgtttctcccattggaagcccacttttgaggtcaagatcaccacagcacaggaatgggaaaatgtctccttctcctatatctagccctcggactgcttctggggcatctacacctcttgctggtggcagtggtgccattccatttggtaatcactctaaacagtccatttactttcaagagggttttggaagcattcccaagtcctcaaatggtgtctacattaatggccattctcatcacgactcgaatgttgacatttttcgaggaatgcaaatggggtctcacatttcaccagaactggtttccagtgaaaatgatgttttggttaagcagtttgcaaggcatcctcatgcagagccatatgattttcagtcggtcttggcagatcgtgttggccggcagctgctgggggaacatgttaagattaacccatccattgatctcagtcccaactcgtctttgcttagccggccaaacggtttatgacatcaagatttttccttaagtttctcatagtacctttggttatgcagatctgttcattgttctatttgcaagaatataactatacaataaggagccaaagcacaagagaatcgatgtaaataaatttgtatctgagaataggctacatggggcacaaaagtgcattttgcatggcttcggctcgggctgatggagttcattcgtgccacagcattaaacattctgacaatttgtccatatcaagcaatcaactcatacaaatgctcacttgttcgaagaggaacttcttgttgtatgtaacatatttaaagcatcaacgcatgagaggtttctctcctgcacttaagatactagaaatgacagtttatgcaatgacaaatgcatcttctagaattggaacaccatatagatgccagagaaagggttaaattgatacaaaacttaacttgcagacttttttttgggaggttagacattgctgtacggtagatgggaaactgtattgtgatcatgcatttatggatggggaagtcaaggtttgtagagagtccatgcatgatgcatgttatgtttaattgtgggagatgaagtattattgtcattgtatagtctacaactggatttgttctgtacattattattcaacagtaaaatggaagaaatctaaaaatcttatgatcctcatcggattatacagggctttggaacaaatctggttgggtgagaaaaattggatgctttgaaagcaccactgaatatatattactggccatc

SEQ ID NO: 31341 - DNA, 511 bp, Glycine max
  unsure (1)..(511): unsure at all n locations
  Clone ID: PAT_MRT3847_128306C.1
tgagtgtatcttactattggttgatgctccttgaaatttgagtgcatttctactgcgttttctgctatatctatctttggattaacatatttgaaatcaattattttaacaaggtggatcaatttgataaaagatgaatgaaagtagaaggaagctccattgagagaatgaatatttgccaaaagaataacatgtcttgtacttgattatatttaagaataaaaggccttgacaaaacataccgtatgacacttctgcgaagatgtgtgggactcctactgatgggaccaaagtattttgactgttgttcttgctaggagattaactgattaatagaggtaaggaatcgaagattgtgtttgatgattgcattgcatccatggagagcaaacgtcttataaagagatggaaattatatgatagtgattgtgagttacttagtagtagtatgagtcatgtatcaaattaccactatcaattntcaccgtgaattattaatttatgtacacct

SEQ ID NO: 31342 - DNA, 1085 bp, Glycine max
  Clone ID: PAT_MRT3847_128307C.1
gatctcccaccaggttttcgattctacccaacagaagaagaattagttttcttctatctacacaaccagctagaaggccaaatacacgacacaagcagagtcattccagtcattgacatcaatggcgtagagccatggaaccttccatcacttgcaggggagctttgtcgtggagacacggagcaatggtttttcttttcaccgagacaagagagagaggccagaggaggcagacccaacagaaccacagcaagtggttattggaaggccactggttcccctggccatgtttactcttctgacaacaaagtcattgggatgaagaaaaccatggtcttttacaaagggaaagctcccaccggaaggaaaaccaaatggaagatgcatgagtataaagccattgaacactctgatcaatccaacactgcccctccaaagttgaggcacgaattcagcttgtgtcgtgtttatgtgatatcgggaagctttcgatcgtttgatcgacgcccactggatatgccaagagttgagctacgagttgttgatggggacagaggtgctgcttcaacaagtgctcaagctcaacagagaagttcttctcatacttcccactctggtggtgatgctcatgtcacagatgctggagcagggtcaagtggaacaaattggaatgcaagtaatagggttgaggaaccactttgggaatgggaacaacttgattggccatgacccaaaagtcaagaacatgctcaaacctagcaagactttcttaattgaataacgtcgtttcaattaaattaatcatataagttgtaggcgtagtttggttcgatttccttcacctcgaagggccatgtaatgtaacataatcattagtatttgttgtttaacataggattggttttccccgggaaaataagttgggaataagatccaagcataaaaaggaaggtggtgtggatcttgtaattttgtttttgtgacttgttgtcttgtaacgataatcaatctccttttcaaccctagaaattttctttcttgtttaggaattcaaatgaaattaatcaatctactatttgcttatg

SEQ ID NO: 31343 - DNA, 195 bp, Glycine max
  Clone ID: PAT_MRT3847_128308C.1
ccttcttgtgctttgggggggggggggggccgaatagctagcaatagccgaggaacaggcagcacaacgcatgttatggaggaaatgcatagaagaggctataaaattggcaaaccttgactgttggacactactaaatgaggtggggcgagaaggaggggccgctatcgtccgctggaagatgccctatagaag

SEQ ID NO: 31344 - DNA, 1662 bp, Glycine max
  Clone ID: PAT_MRT3847_128309C.1
tctttccacgcgtccgcccacgcgtccgcccacgcgtccgcccacgcgtccggaaaaacatggatgatctcccaccaggttttcgattctacccaacagaagaagaattagttttcttctatctacacaaccagctagaaggccaaatacacgacacaagcagagtcattccagtcattgacatcaatggcgtagagccatggaaccttccatgtactactacatgcataccactttaattctttaattttgttagttgttaccactcattctttagtatgtttcaaacccaaatgagttttgctaaaatggtttggtttgttttgttgtaatcagcacttgcaggggagctttgtcgtggagacacggagcaatggtttttcttttcaccgagacaagagagagaggccagaggaggcagacccaacagaaccacagcaagtggttattggaaggccactggttcccctggccatgtttactcttctgacaacaaagtcattgggatgaagaaaaccatggtcttttacaaagggaaagctcccaccggaaggaaaaccaaatggaagatgcatgagtataaagccattgaacactctgatcaatccaacactgcccctccaaaggtatactcatcattattatagtaaaacttcattccattttttcttttcaatttcgcgaatttggtcctttcatgttatttttgtcaatttgaacttcactattttaattacgtaattttagcctacgtgttaagttaatatttgatattttgacaggaaatgctgacatgacgatctaacaatactgtcacgttagcaatacaatgtgacattatgctatattatcacgtcaacgtttttgttgtatattatatgttaagttagctgatagactaaaatggagagtagaggtttgcaaaattgagaattatgaaagtaataagattaaaaaaaaaatgcatatccaacgtgccaatctggtagtatagtggtagttgctgctgttggttgcatatttcacacaaattctggtgctaatatagtttgtgtttttgttatgtataacagttgaggcacgaattcagcttgtgtcgtgtttatgtgatatcgggaagctttcgatcgtttgatcgacgcccactggatatgccaagagttgagctacgagttgttgatggggacagaggtgctgcttcaacaagtgctcaagctcaacagagaagttcttctcatacttcccactctggtggtgatgctcatgtcacagatgctggagcagggtcaagtggaacaaattggaatgcaagtaatagggttgaggaaccactttgggaatgggaacaacttgattggccatgacccaaaagtcaagaacatgctcaaacctagcaagactttcttaattgaataacgtcgtttcaattaaattaatcatataagttgtaggcgtagtttggttcgatttccttcacctcgaagggccatgtaatgtaacataatcattagtatttgttgtttaacataggattggttttccccgggaaaataagttgggaataagatccaagcataaaaaggaaggtggtgtggatcttgtaattttgtttttgtgacttgttgtcttgtaacgataatcaatctccttttcaaccctaga

SEQ ID NO: 31345 - DNA, 282 bp, Glycine max
  Clone ID: PAT_MRT3847_12830C.1
cgaccgcacgcgtacgatatcatcttctattaaacaggatctcacctaaaccctaatcatgtccttctctctcgaagcatatctatactgagggagttctcacactactctcctcctattaatcttacctagatcccaatcctacttttattataagcatccaaggaaaccatcctaacagcttattttgcttattgcttttttcgctttaaataaattttacaacttactttatacttatccgttttcaacataaacccaatcctatacccaaacctacac

SEQ ID NO: 31346 - DNA, 1217 bp, Glycine max
  Clone ID: PAT_MRT3847_128310C.1
cttagcctataatataacttagccaacatggagtttctcccacctggttttcgattctacccaacagaggaagaattagttgtcttctatctacacaaccagctagaaggccaaatacacgacacaagcagagtcattccagtcactgacatcaatggcgtagagccatggaaccttccaagtactaccaccactttaattttgttactattcattctttgctgctaaaatatatagtttggtttgtgttgttgtaatcagcacttgcaggggagttttgtcgtggagacacggagcaatggtttttcttttcacctagacaagagagagaggccagaggaggcagacccaacagaaccacggcaagtgggtattggaaggccacgggttcccctggccatgtttactcttctgacaacaaagtcattgggatgaagaaaaccatggtgttttacaaagggaaagctcccaccggaaggaaaaccaaatggaagatgcatcaatacaaagccattgaacactctcaccaatccaacactgcccctcccaagttgaggcacgaattcagcttgtgtcgtgtgtacgtgatatcgggaagctttcgatcgtttgatcgacgcccactggagatgccaagaattgagctacgagttgatggggacagaggtgctgcttcaacaagtactcaacagagagcagcagtggtggatggattaagttcttctgatacttcttcccactctggaggaggaagagggggttctcatatctcagaggctggagcagggtcaagtggaaccaattggaatgcaagtaatagtagggttgaggaaccactttgggaatgggaacaacttaattggccatgacccaaaagtcaagaacatgcttcaacctagcaagactttattaattgagaaacatatcgtttacatcaatttaatctaagttggaaaaagcagggcgagaaattgattaattaatcatctaaattgtaggcgtagttgggtataacttccttcacctttaaggggcaagcaatgtaatgtaacataatctttactatttgttgtttagcataggattgatttttcccaggaaaataagttgggaataagatccaaacataaaaaggaaggtggcgtggatcttgtaattttgttttagtgacttgttgtcttgtaacgataatcaatcaatctccttttcaccccttg

SEQ ID NO: 31347 - DNA, 345 bp, Glycine max
  Clone ID: PAT_MRT3847_128311C.1
agatgtcgatacgttctcatattttgatattaacaatgatcgtgtcccatcccaatttccaattcctctttgaaacaattccatttcatacatcatttaacaaattagatggaacacatcctacaccaagccagatacttcaacaaataccccaatttataccattcatcataaaccaccctcaaacttattgttttcttattgactgattaaacgatcattattgattacttagccctcaacaaaagcatactttagaaaccagcttaaccagctcatcttccaaaactataatccaccctatttaatctcacatacccttttagttaccttctataattctaa

SEQ ID NO: 31348 - DNA, 229 bp, Glycine max
  Clone ID: PAT_MRT3847_128312C.1
gttcatacatgaacttggacaaagtaattaagaaggtgttgcttcattagacattgttagattgaaggttttttttttctttttcataatgctttaatttactatgatagttcgttgatcttctctagaatttctgcattgtagaaatagtgccctggttacaggtgctagtttgtggcatgtaatatgtaagtcttggcatttcaatcagtgattttttcctgtcttt

SEQ ID NO: 31349 - DNA, 206 bp, Glycine max
  Clone ID: PAT_MRT3847_128313C.1
gttcaatccttatgattgggacactcacccatgtgaccgcatcaggaggaatcatcattttctggcaatctttagccagacccgatcaacaacaacttattgcattggggaggatttatttgcatacacagaccagccattccgttttcatctaccttacctttgtatatagattttttacactttaggcctagttcatactcaat

SEQ ID NO: 31350 - DNA, 351 bp, Glycine max
  unsure (1)..(351): unsure at all n locations
  Clone ID: PAT_MRT3847_128314C.1
ggggggccgggggggggcnncgnnnggggaaccgccaccaaaagggaacacaagcccaaaaaaccgggggagggggaagaancccaaccaacggaaanccaccccccgaaagacaaacccngaccaaaagggggaccnccggcgggaaaaaccggaaaggggggggaaaccaactccgctgcctgggcagggaccaaaccgcnaggcaaaacaaagaggaggggcggcacncngcagccccccaagaagacccccgcaccaccaaggcaaaaaacaaacccaggggccaggaaccccccccgcaaggaaaaaggccccagagaaccggacccnaggcgccaaaacaaggaa

SEQ ID NO: 31351 - DNA, 432 bp, Glycine max
  Clone ID: PAT_MRT3847_128315C.1
cccattcgtccggaaattaaagtaattgcgcacttaccaaagggagataatacaccatcagcaaacatgtgatacttgaatggaccttacttggctcttgctatgaaaactggcattatcacagggatcttatgtcttactgaaggaatggcaatataggcgaacatttgcttgacttaaaaactaccaggtggatggaaacaaagaaaagatggccattgctctaatgaacatagctggctgttgttcttcatgttatgatacaacaggatcctttcttcgatcggctgttaactataatgctagagcacagacagcaggtgcaaatatatatatggctgccactgttctagagacacttatgcttgttatgcctcttttctactacacaccaaaggctgtcttagcggccattatcagtactggtgggat

SEQ ID NO: 31352 - DNA, 383 bp, Glycine max
  Clone ID: PAT_MRT3847_128316C.1
actaggcgttccattactcgatcttgacgcaatacgcactatagtgctaagtatccgtattggacactaacggacagttctagcagggcgcagccatcggataggaccatggcctaaatcagatagctggaagatggcccgacaatgcagctctgcaattcgcgcgtcggaagatttgtgcggtatatgacaaaagtattgtactctccgcggtacagaaccgacgctatcccatacgtggctggagttctcgaataccgaaatgactgcggtggttgagttcgctgctactgcagtatgtgacatcttgtaaagcaagcactattacaagacgctctcttatgtcagacaggatctacaaggagttcttaaaatgagttgcc

SEQ ID NO: 31353 - DNA, 493 bp, Glycine max
  Clone ID: PAT_MRT3847_128317C.1
gaatagagaccaatatttgttttattgggaaaaaaccgttaccagatcacctgatatttgtccattgtaattggagttacacattacatgaaacaaaaattgtatcttctcaatcatctcaagtgaagacatgacatatgccagagtactgaaccatgatcctgtgacattccttcttcaatagtgtagcaaccctttttatataaaaaaataccttatgacgctgagaactatataccattatgcctgaacttgcagaaatatgctgttacacaagaccagcctcttgtgtgtgcatcctgtgatttgctctgatgtggccaacataaagatcacataccatgggaatcatgtgccgaaaatttctctctacaacgaccctgatacatgcttcttacaacatccaataggcgccgacggttgccaactcaaaccaggcttttggccattcttagatatatgaatgcagcccatccactgccggatcctgact

SEQ ID NO: 31354 - DNA, 2592 bp, Glycine max
  Clone ID: PAT_MRT3847_128318C.1
ttcccgggtcgacccacgcgtccggcagaacaagacatttagagattggaatcatccgtgttcctctctctcatctctctttctctctgttccctcggtttccttactttgaagtttaatccaatccaataatccaataactacatacaaagttgaacaataccaccatcatagcgtatcatcatcagaattccaaggtggatttgcttcatcttttactccggcttcatgctgcatgagtaaaggccgttatgttatgctcatggtggatttttgtgcaactgggactaggggaattgatgatgtggtggtggtgagaatgatgtatggggagtagaactaccaggagggttgttggtgttgaagatgacaagggagctgaaagaggaatgcctagctccaattctgagttatcccactgatcctttgactttcttcttctctctacatccagaaattggattgatcctttctctctctctctctctctatctccattcaaggcctcttcctttcactttaatccaacaataataattattcgcaaaaaaaaaaaaaaaatacacgttgaacagataccatcatcattcatcttcatctcccacatcatcagaatttcaagactcagtttttgactcactaagtaagtagccaaacaatttctcgggttcctgttcaagttgattcctttgataagttaccaacttcactcgataaaaacccattaacaaaccaaacagagtgacaaagtttgcaattacaaaaggttcaattatcaaatctggtcagtggtgatacggaacaccaggaagagtctgccatggctgacgccagtcctagaactgatatttctacagatgttgacactgatgataagaatccacggtttgatagaagtcagtcccttgttgctgtggcttctgactccagtgacagatcaaaggataaatcagatcagaagactctccgcaggcttgctcagaatcgtgaggctgcaagaaaaagtcggttgagaaagaaagcttatgttcaacagctggaaagtagtcgcttaaagttgacccaactggagcaagagcttcagcgagctaggcagcagggaatctttatatcaaactcaggtgatcaagcacattcaatgagtggaaatggggctatggcatttgatgtagaatatgcaaggtggctggaagagcagaatcgacaaattaatgagctaagagcagctgtaaattctcatgcaggtgatacagaacttcgcatgattatcgatggtataatggcacattatgatgagatatttaggctgaaggccaatgcagctaaggctgatgtcttccatttgctgtctggaatgtggaagacaccagcagagaggtgttttctatggcttggtggttttcggtcatctgaactcctcaagctcctggtaaatcagttggaacctctgacggagcaacagttagtgggtattaccaacttgcagcatggtatcttaacaagcagaagatgcattgtctcagggcatggaagcattgcaacagtccctttctgagacattatccactggatcacctggctcctctggttcatcagggaatgtggcaaattacatgggtcaaatggctatggccatgggtaaactagggacacttgagggattcattaagcaggctgacaacttgcgccagcagacgttgcatcaaattcaccgcatattgacaactcggcagtcggctcgtgcactacttgcaatacatgactacttttctaggttgcgtgcccttagctctctttggcttgcccgcccaagagactgatgggggtaaatagtgtgtcattaattttcatggatctggcaccagaatcctttggcataggttttttactcttgcaattttactgtgttgtagttttcacattactgatattagtttcagtaagttattatctagaaactgaattggtgacatgacaagggtatgtattttgtttattactactaacgtaataatattgtctattgtaacacagttgaaggaatttagatgattttatacaaaaaaatggttgggatgtgatgaataagatagggacacttgaagggttcattcaacaggctgacaatcttcgccaacaaactcttcaacaaatgcaccgtatactgacaactcgccaatcagctcgtgcactccttgctatacatgactacttttcgcgtctgcgtgcactcagttcactctggcttgctcgccctagagattgatgggcgcggtaaatagtatggcaaattaattttcatggatccatcactagcaatacttggtcatcataactcttgacaagttttcttgtgttgttttgttgtactctttgtatcactgatgttagtgcttcattgagtcagtctagaaacgaaattggtgacaagaagtatgaatattactaataatattgtccattgtaattgaagggctttgttttttccatataaatatagttgggccatatgatatattttaagggttgtttcagtcgccatagtttacccttggatctgagttcatacaaaattgttgagtttattctttt

SEQ ID NO: 31355 - DNA, 655 bp, Glycine max
  Clone ID: PAT_MRT3847_128319C.1
taagtcaattggagcctctcacagagcagcagttgatgggtatcaccaacttgcagcaatcctctcaacaagcagaagatgcgttgtctcagggcatggaagcattgcaacagtcccttgcagagactttgtccaccggagcacctgcctcatctggttcatcagggaatgtggcaagttacatgggtcaaatggccatggccatgggcaagctagggacactagaagggttcattcaacaggctgacaatcttcgccagcaaactcttcaacaaatgcaccgtatactgacaactcgccaatcagctcgcgcactccttgctatacatgactacatttcgcgtctgcgtgctctcagttcgctttggcttgctcgccctagagattgatgggtgcagtaaatatgtcaaattagttttcatggatccatcaccaggaatacttggtcatcataggttttactcttgacaagttttcttgtgttgattgttgtagtctctgtatcactgatgttagtgcttcattgagtcacatagtctagaaacgaaattggtgacaagaagtatggatgtgtctactaataatattcaccattgtaattgaagggctttgttttttccatataaatatagttgggccatatgatatatttttt

SEQ ID NO: 31356 - DNA, 518 bp, Glycine max
  Clone ID: PAT_MRT3847_12831C.1
aaaggatgagagaagcgattaaaaaaaattatacgatatctcctacaatatgtggttacagttaaaagcattataagattgaacttgtatttggtcttaaggtaaattttctcaatagaaaatttggaatgattggagacggtttgaaggaaacagaaagttacatgcttcctttttgaattgtaaggtcttaaaattttctatctatcttggtatttctattggtacaaactctaatacgaattgacccaatcagattattgaagaagagaaatgcttaattgtacaattttctgttcgtcatatacgcacgatcgtgcttttcatccaattatcattttatatttttttttaactttttaattaatatttattttaaaaagcaatattctggcacgtacgtgtattttcatactattcgtgtacagactattcgaacttaatagcagcactgctactgtttgaagcatcagtgtgataaatgcataatgaaaacaaccttctagacaattaatcaa

SEQ ID NO: 31357 - DNA, 860 bp, Glycine max
  Clone ID: PAT_MRT3847_128320C.1
gaaattggactgatcctttctctctctctctctctctttctcctcaacgcctcttcctttcaatttaatccaacaataataattattcgcaaaaaaacgttgaacagataccatcatcatcacccacatcatcagaatttcaaggtcttgtattgcaaggttattgaggatatgatggtgtgtgtggagtagagccggtgtttgtgtagaagatgaaaagggaacagcaagagggatgccgagctttgattcacaattgcccaattccaatgcatgctatacagagggaagcgcaattgattctttttgtgtgtttgactttgatcaatcagttggatatcgcatagaggattgtgttgccttgaggggaaactcagtttttgactcactaaaagtaagtagccaaacaatttctcggggtcctgttgaagttgattcctttgataagttaccaacttcactcaataaaaacccattaacaagccaaacagagcgacaaagattgcaattacaaaaggttcaattatcaaatctggtcagtggggatacggaacaccaggaagagtctgccatggctgacgccagtcctagaactgatatttctacagatgttgacactgatgataagaatccacggtttgatagaagtcagtcccttgttgctgtggtttctgactccagtgacagatcaaaggataaatcagatcagaagactctccgaaggcttgctcagaatcgtgaggcagcaagaaaaagtcggttgagaaagaagcttatgttcaacagcttgaaagtagtcgcttaaagttaacccaactggagcaagaacttcagcgagctaggcagcaagggaatcatta

SEQ ID NO: 31358 - DNA, 1119 bp, Glycine max
  Clone ID: PAT_MRT3847_128321C.1
cggaatccggcaagagccaaacaaacagagccacgccagcagagtcgttccgttctgaaattccgaaagcagatgcactatagcatttttagtacctgctccactctgtttccatgcttccaatcctaaaaatcgttactttctctattaagtgtgagatgcatgctcctgacaaattcccagtcccttttgagcgagtgagacccatctaataatcaaacttcattaaccaaaatggactgctccatcaacttccacaagctccaaacaaagaaaaccacgaaacctcggaaacatcatccacagctccgaaagatcgcaaacatgttgcgttacgcggagttgtgcgttgttctggtcttggtttcgaggctctccatcaacctaccctacacaaccgagtgtttccgcaacttcatgggtagccctcgcttcgtttttctcctgggaaacgtcatcatcataacgctcttcgcacaatctggccacttttcatcttcagccaaacgtgccccagaacctgcagatctctatctcgagttcctccaaaacaccaccatccatcagaaacttcaagtccacgtcagcaaaccaaagccaagtgcgagagtattggagagtgttataataaagggcaccaaaactgcagagactggtttggaggtgaagaaggattatagaaggtctaaatcggatattgttgtgaagcgcgtggagagtgagaaggtgcctccacgcgtgttgcagaggtgtgagactgagaaagttcttgttaataataactcgtaccctgaagatggcatgagcaacgacgactttcgtcgcaaggttgaggctttcattgctcgccaacagaggctacgaactacagaactctgtaattaattaataggagtataggactatgagtattggtaaaaaaaatataaaaaaactcaaatgtctgtatattattgcttctactattggggtcaaaagtgaaaaaactatacacatgcagtgctattgcttcggtttaatcaataaacaaacaaaatatgtgatgtatgtactgtatagattaaatgaaagtgagtaaaataatgttttgattgatcctataatatattgcatttattt

SEQ ID NO: 31359 - DNA, 447 bp, Glycine max
  Clone ID: PAT_MRT3847_128322C.1
aaaggaaaccccggggggttaaacggaaaaggggaacggggggttttttcctggggaccccaacattacgggccttggggggggcaaaggggcctccataattaaaggggcaaagaaacaggtttgggttttttttaggaaaaaaggggggacaattaaacatcctcaaaaaagggccttttccattgggggcggaaaaaaaacacccccccccttttagaaccgggaataacaaaagataaggggaacggggggggggccataaccaggtttacttccattattcctagccccttaaagggggaactttggggggacggcaaaggcatcaaaggcatattttgggtttttttttccagccttaaaaaaaaacaacggggcgcatgaaatttggtcggcgggcgcaaaaaggttccttgagagggccattttttttgggatggggga

SEQ ID NO: 31360 - DNA, 314 bp, Glycine max
  Clone ID: PAT_MRT3847_128323C.1
tgagatcataggtagaggtatttataattttatacacgcacaaacagatagttcttttatctgagattaacattgtatgtatcaaggataaactgacagctaactgagcttaacggttaacagagaaataaccaactaattgaaaactatctattacatgtaaagaagaaaccttgaaagttggttcaagcaccttgacaatgacctttgtcacagtacttgcattatctgatctgtgttacttcatggtgttgtcaggtaaactacgacttgccatgtactcccagtcccatgcaggacaaccgcttgaattt

SEQ ID NO: 31361 - DNA, 307 bp, Glycine max
  unsure (1)..(307): unsure at all n locations
  Clone ID: PAT_MRT3847_128324C.1
ggctacttttttccgaagaaccaatcgtgggcgttaaaatcggcaccagaagtatcccaccttcttgcccgcaccggaaatggtcaaacttcctcaagcacccaaaaaataacccaatccgcctctacgaacccaaaaccgacatactccgcgccctgtcgggtacccacatccacgtcaccatcagcgtccccaacaaccagctcctcgccatcgcctcctccaacaccaacgccacctcctggattcgcagaaacgtaggcgcnctaccacccctccacccgcatagacgccgtctccctcggcg

SEQ ID NO: 31362 - DNA, 521 bp, Glycine max
  Clone ID: PAT_MRT3847_128325C.1
aacaaaattgggttcttaattttacgttctcctatgcagtttctcaaattgaaataacattcgtagatgttccaaataaacaaaattgaagcctaggatctaccctgttcctagttacaacatacaactacttacaatagataccaaaactgtgctctaacctgttgctgcaatcaaggaaatgtagacaaattattccttattgcgagaagagcgccccttcctttgacctccaagaatacgggaaatttgcaaacctcgactgaatgcttggttgaacaacatacgggtctgaaattctgtagcattccccagccagttagcatgaaggcaagaatgcaaacaataatgtcctggattgtcatatgagggagggcaatcatggtgactagaattgagataaatgttaagaatatcaaccccttgattagccggaagacaagttgaaaatctgcactgaatttccgcctcccgacagacaccgtcttgagacaaaatggaaaagaaaatcagaaagaaag

SEQ ID NO: 31363 - DNA, 1355 bp, Glycine max
  Clone ID: PAT_MRT3847_128326C.1
ggtcattgctaattgattgcgtcggccattgctaattgattgcgtcactctttcactgacgaacacaagaatcacaagtgtgaatccctttcccatatagaccccttcattctccccaagaggcgactgtcatgacatctctgccacttattcaacctgaaagtatggaggcagaaccatcgattccctcagattcactccgggcccagatttccaaattttctaccatgctcactgaagcacacaaaagaaagccaatccattattggattcttcttgttctcagcatcttggcaatgcttgtggcatttcctgcttccagcattctgtctcgtgtttattatgataacggtggccagagtaagtggatcatatcttgggtagcagttgctggatggcccctaactgccttaatactgtttcctgtatactttatcagtaaaacctttcctactcctctgaacttaaaactgagtctgtcttatatcgttttgggtttcctaagtgctgctgataacctcatgtatgcttatgcctatgcttacctccctgcatccaccgcctcacttgtggcatcatcatcccttgtgttttcggcactctttggatactttcttgtgaaaaacaaagtgaatgcttcgatagtgaattccgttttcatcataaccattgcattgaccatcattgccctggactcgagttcagacagatatcccagcatcagtgacagtgaatacatcatgggatttgtatgggatgtttaggatctgctttccatgggcttattttcgctctctcagagctcgtctttgtgaagttgctcggaagaagatcctttatcgttgttctggagcagcaagtcatggtttctctatttgcatttctgtttaccactgtagggatgattgtgagtggtgattttcaagggatggcacatgaggctaccactttcgaaggtggtagaagtgcttattatcttgttatcatttggggtgcaatcacttttcagctgggggttctggggggcactgctataattttcttgggctctactgtgctagcaggtgtgcttaatgcagtaagaacacccataacaagcattgcagctgttatactgctaaaggaccctatgagtggtttcaagatcctctccctagtgatcaccttttggggatttggctcatatatttatggcagttctatgggtgaaaaatcatcataaggaaatgtggccacagattccagttcttaagaggtgattgttgtaaggtatatgattaaatctccgtacataaaatattgggaatgttgttgggtaaatcacaaatatgattctttatattaatgctttaaag

SEQ ID NO: 31364 - DNA, 1373 bp, Glycine max
  Clone ID: PAT_MRT3847_128327C.1
attgcgcgactcttcttcactgacgaacacagaagcacatgtgtgaatctctttcccatatagaccccgtaggcgattgtcatgacatctctgccactgcttcaacctgatgcagaaatgagttcctgttgttgcattataagaggcttcattatcaaactaggatgaaaattgaaattatggaggcagaaccatcaattccctcagattcgctccggagtcagatttccaaattttctaccatgctcactaaagcatacaaaagaaagtcaatccattattggattcttcttgctctcagcatcttggcaatgcttgtggcatttcctgcttccagcattctgtctcgtgtttattatgataacggtggccagagcaagtggatcatttcatgggtagctgttgctggatggcccctaactgccttaatattgtttcctgtatacttcatcagtaaaacctttcccacctctctgaacttaaaactgagtctgtcttatattgttttgggtttcctaagtgctgctgataacctcatgtatgcttatgcctatgcttacctccctgcatccaccgcctcactcgtggcttcatcatcccttgtgttttctgcactctttggatactttcttgtgaaaaacaaagtgaatgcttcgatagtgaattccgttttcatcataaccattgcattgaccatcattgcactggactcgagttcagacagatatgccaacatcagtgacagtgagtacatcatgggatttgtgtgggatgttttaggatctgctcttcacgggcttatattcgctctctcggagcttgtctttgtgaagttgcttgaaagaagatccttcatcgttgttctggagcagcaagtcatggtttctctgtttgcatttctgtttaccactgtagggatgattatgagtggtgatttccaagggatggcacatgaggctaccactttcaaaggtggtagaagtgcttattatcttgttatcatttggggtgcaatcacttttcagctgggggttctggggggcactgctgtaattttcttgggctctactgtgctagcaggtgtgcttaatgcagtaagaacacccataacaagcattgcagctgttatactgctaaaggaccctatgagtggtttcaagatcctctccctagtgatcaccttttggggatttggctcatatatttatggaagttctaaaatatggccatagactccagttcttaagatgctctctttagaaattctaaggaggtgattgttgtaagatgtatgattaaatatccgtacataaatattggtaatgttgttgtttggtaaatcacaaatatgattctttatatttaatgcttta

SEQ ID NO: 31365 - DNA, 713 bp, Glycine max
  Clone ID: PAT_MRT3847_128328C.1
cccgcgtccgctttcagatctgagttgcctccatctctccatctgcgttgatccaccatttcatcaacggtccgacgaggaaatactccgacattaagtcgcagtgcgctcatggcagtacccatagttgctgtgaagtacgtctcagaagtccaaccacacgaacggtgatgcggaggaccaatgattctgacgtcggcgttctcatcggatttgtaggtgaccgtcaatggcgccgttggaatccagaaggatctccgccgttggcaccagttggaaaatgatcgctccatgtgaccatcgcctcgccatctcagacgggcgacggagtgtggcgataatgccctccagatccaaatcgtgttgcagcgtctcaaagcactctcacttctctgattcttaagtatgtgtctcacagccagcttcaaactcgatcgtctgtgccttttgatttttttttattatatatatttgcaatgacaatgcctcgcgttctatgttgatttggtatcataaatttttgtagttggattttgtacaaatttctcagatttgaaatgaaattgattttcttcatagcttttatcattagatttttttgttctctgttgtttgtcgcttacttcaaagccattgatggccatggagaagcaatgcatctatcagtgacaaaaagacatttgtgatggagagagagaaaaactggatcgcgg

SEQ ID NO: 31366 - DNA, 145 bp, Glycine max
  Clone ID: PAT_MRT3847_128329C.1
aaaaatgcagtctacaagaaattcagctcagtttgtatttcataccttggcctgctatgctgggtggtcaaatttggcacctctacgttggaagccataaagctttggaattgttgagatagatattcagtgggtagtagtcact

SEQ ID NO: 31367 - DNA, 254 bp, Glycine max
  Clone ID: PAT_MRT3847_12832C.1
cctcaatacccacgcaacacaaagttccctctactctctttcccataatttttcactatcattccttcccactcgctctttcttcgacgctcttcctcctcattgctcatgtcctccacgacgtcgttttctctctctcacgctgttgttcccttctcctgcaacacaaagcatggtcatttatctcacaaccgccactatctctccctcccaaaacccatttccctgaagcccctccgatcgccttccttcaa

SEQ ID NO: 31368 - DNA, 389 bp, Glycine max
  Clone ID: PAT_MRT3847_128330C.1
ctcttagagtgcatatggagcgctggatcgctctggtgctgtcaacagtggaaacggtattgtgtgcagaagatgatttaccttttgatgggagtactctgctcccatcactatcgattccccctttctaatcctgatttaaattgatgatcgcatcctgattaattgcatcctaaacctaacattctgtggaataaagccgttgaaacatttcaatcatgatccactcataaaacatcaaacgctggtgattatatcccaacctcttccaaacaaaaaataaaagggggccgccctcttattggctgggggacccggggacttatttccgaacgtggccttcttgggctcccccttttcctattttccagccctttctatcttagggg

SEQ ID NO: 31369 - DNA, 394 bp, Glycine max
  Clone ID: PAT_MRT3847_128331C.1
tcggaattcggctcgagagaacacaaggaaatatccaaaccgctctcaatggcgtctgagaattacagcactaattgaatcacggacaccaaactcattatgactaatgagggggtgcaggtgcacccaccatcaaagaaaagaatgaatgtgtgcccaaaccccaccttcagcgatttgatggggactaaccatggacactcaccgagcatgactactgatgcagtgtcttgcatgaaaccaatgcaggagactatgttcccgtacatcattagacttgatctgaagactgattcttctgatactatccttattgtgacagatatgtaccaatggaagacatacctacactttgtgaccataaataacccttaccctagagcatatctgatgt

SEQ ID NO: 31370 - DNA, 1738 bp, Glycine max
  Clone ID: PAT_MRT3847_128332C.1
aaaagtagaaaacagtagaacatttattttactgaaaattatcaaatatctcaacaaattatagtttttgacaggctgatgcatcaaaaaaatgtcgcttcaactgatctatccgtgacttcaatggttaaacttgttctggtttgccattaactgtaataattttgtttatatttcctatatgaatcaaatgaataaaactattacatgaaaggaattattaaacctcccaaatcattcttggaaccactaagtagtgaggagaaatacatgaagcagaaatcagaaaaacctataacacaaaaatgtgtatagcaaacaatatgtctccatgtcgagggtttccatgagggaagctcgctcaatataagcaagacatgttagtgcactgcaagacccaacaataatttgtaattcttctccaattcaagcaaagcattgttaagtcaggattaagccttaagcgccctgtagatttttccccccttcctttcatgattgatttcttcgctcattcttccaagagttttttgcaacttcagcagatgaatcattggaatctccattaccatcctttggtttggagaagaaaggatcccattcatgaggtcctacctcgtgctctccctcaggcagcaaagcatatttccaactgttctcctcaatgaagttgtcatctgtacggccttcaataatatccttcctcaaatttgtaaccttgtcaattactgcttgcaccgcaacatcaaatgcatctttaagagtttctaatttggagcgaggatcagcatacactagtcttggaatgagactaatgacctcttctctcatgatcttcacttgctcagggggtatctgactaagcctttcctctatactgatattcctcttacgaatatcatcctcgggaatgaagacagaatactttgtgaaattcttgggaagatgccaagtatactgtgtatatgctgagcctggatggaagaagacaggtatacaaccagccagcattgaatcaaaagcagatcttcgcgtgtatgaatcaccctggggttgcaagcagaaaagcgagctttgaaacatctgcattatgctgctgggagaatgacatttgctttcgccaaagtcacattccaacagtttacaaacatttgaccgtctgcattgatcaattaactgacccctgattgatttggggttgccaggacggggagcaccggcaaaggagaaaagccacttcctatctagttgcctcattcgatcttgccacatgaacacatcagcatcctttgcagggtggaagtatgtaggatacggaattccaaaatcatttgcattccaagggctggactcaaccacaagcattgacatattctttgctgctggtaaaaacagaagcttattgccccaatccgattcttcctcagatagtctcctgaaatcccatgttatccttcccgcaacaagaaaatggtctcttccattcattgtgctccactccggcctcttcatgagccagtcaaccagatcaagagaagctgcatccctcgttgaaatattataaccccaaaggtaacgcgctatgtcaaatccagcataaaagggcacaaaaaccgcagcagcaatggaggaatcatttgtcaagcactcatactgcttcatccggttgccaaatatcacatcaacagcaaactgattagtagcataccagccagtattagagaacaccccttcagca

SEQ ID NO: 31371 - DNA, 486 bp, Glycine max
  Clone ID: PAT_MRT3847_128333C.1
tgatgttttatgtatactttactgttggcacttgcacacatgatttgccctgaacatgacgtgatcttagacgcactgtctggcgaacatgatacgggggaacatgattggagcgcactactattcgtagccactgtctcaacaccctattgaatacggaaaactatgtagcactccaatttcaaaacttactgcctacataagaaaattatccacacagtagcatgaccgatcatttgataatggcaggtgcatcggaaggaaatgatgccacctaccagacagcatacagttttattagatagagaggctgttggcaattcctctgaaagtcaggcctttcccactggtaggaataagcccggtgtatggcatttgggccggtccattacggttcctaaggcttgaattcgcgttgctccctgagattttgacctgaatttccttcaagtcggatccaaactatttaaaggcttgaattgcctt

SEQ ID NO: 31372 - DNA, 357 bp, Glycine max
  Clone ID: PAT_MRT3847_128334C.1
gaagacaacatcttttaaaaagaggaaaggggatcaacatgcggaacaaaattatctcacctcatcaacaaatgcaaaatggtcggcacccagctcagtaacacattactgaacttcatcactatgccgatattaccacaccgtaccgatgatattgaaattagcaacccatccgtcagtggcatagcgcctcacctaatgatgatgactactattaagggcaaccccgcttacatcttcttgaattgattacgggttaggacacagcatcaacattctaacgaccaggccccggtcttatgaaggtatgctgttacaaacacgtgtagaagatcattcgatgacttgtacacaaac

SEQ ID NO: 31373 - DNA, 248 bp, Glycine max
  Clone ID: PAT_MRT3847_128335C.1
tggcatttgagggtttcatgcttctctaccagcaacgtgatatgtgttagcttgactatagagactctcctccaaattggcatgatatgctggatgaatgccagattatactatgggaagcaagtgccaaccccaaggagcaaaaattgcacattaatttccctactgataatggacactttgcgccgaaagatctcaaatatctaccttgatctgcaaagtctctaaccttgggatgttaattacat

SEQ ID NO: 31374 - DNA, 279 bp, Glycine max
  Clone ID: PAT_MRT3847_128336C.1
gcttatttcgccacacttcttggtaaaacttatcaaaataagcactttttagtttatttcaatgagtttcttaattaaatttgtaacgaaagctcttacatgacaaaaacttattgaattagcacttcagtaagttgcttacctaacacacctatgtgaatcagttgaaagtagaagagttgggcaagctggagttgtggcccttgtccatggttagcatattgcatctcactaaagaagttctaaccaaaaacactgtcctcaaatgtttctgcagga

SEQ ID NO: 31375 - DNA, 432 bp, Glycine max
  Clone ID: PAT_MRT3847_128337C.1
ctgtatgacgtcctccttctttggggggggggggggggggggggggggggggggggggggggggactacgtaaaatgggagttaaaattagagggaatagaaggcagaagttggaaccatagtaaatacaaaagttttggaaaattaccgtggggacggtataaaaccagatttgaggagaaaaattgagagagacgttgagatgatggtaggactgataacagaaaagaaatgttatagaactgggaaataccgggtggctgcgccatgttaggattaatagtatcagtataaggttgcaacctaaaggttaaaagtaaaacgagaagaagagatagagataggtacaaataggtaccgaggtaaaaaaagaagaagaagaaaatggcaactagaagcaaaaggatcaatggcgaatgggagggatagaaa

SEQ ID NO: 31376 - DNA, 219 bp, Glycine max
  Clone ID: PAT_MRT3847_128338C.1
ggtgtgtgggatgagaagatgatgaggaaacattggtagaagaaattgaagagagagagagagagagagagagagagagagagggttggattgcatttcttcttgctttgctctaaagagaatctaatctcaatcctcattacaaattgattgattcctatctcagtcttttgtgctttctccctttgacatactcgttttcgccgaaacataaacaac

SEQ ID NO: 31377 - DNA, 199 bp, Glycine max
  Clone ID: PAT_MRT3847_128339C.1
acgaataaacccctttatttttttcggtcccgaacatccatgcaaagcatttttcgattgagtcagtgctattggagctggaaatattgaataagtctcagatgagggcgacaaattgttattgtcactcacttccacactacatgcgagtcggactcatagtgtgaacagtctggagaatcgagtgatttagctcacg

SEQ ID NO: 31378 - DNA, 444 bp, Glycine max
  Clone ID: PAT_MRT3847_12833C.1
agaaaattacgaaagagtattgaaaaattggggttaaggaaaaggtgaagggtgaagagctgtttatctctcgagtgctgaaaaaaaggtgccattgtccatttctcgatccgtaaattttgctgtgcgttttcgttattttcgcatgttctgcaccgatcttttgtttcgcatgaatataataagctcctgatattattcggaactttcttcttcgtttttcttttctcgaacaatttcggaatttctggtctgagtttttctcgtttccccaaatattagggttccttcaacgctcttttcgagatgttgatcgctgactgaaacaaatcaattgcatgataattaaattgattgataataatggaattgtctttattgatgttgatcccgtggattcaaaccagttccgtacactttggtttgaagagaaacaacgacaat

SEQ ID NO: 31379 - DNA, 214 bp, Glycine max
  Clone ID: PAT_MRT3847_128340C.1
ctcaaatcccagataccacatcacaacactacactttggtcgtgtttcatcttcttctccgagaaagagtcactccacggttcactttcactttttattttctgcattgggaaatgatgccattgtcgtccctcgcaaagcaaaactccatcatcagactcaatccaatctcgcttgcctcttccacccttttgggcacgtaagaatcctccga

SEQ ID NO: 31380 - DNA, 361 bp, Glycine max
  Clone ID: PAT_MRT3847_128341C.1
cttacatacctacacatgtttgctcattctaaaaagatatcatgaattcagtccaaccgttcctagcatatacctcacaggagagcttatgtcatcagtactagagctccaatggctgcctactactatctctcgctagggatcaaatgtgctcctacacgttctggctgctgatctatgtgcatacttttacttatgcacctgcccatacttgctgcctatactgaagaatggagagcccaaaggactacaaaatgaaccactcatgggcgctctcttactccgactgcctttgcatgactgctttggctaccgttgggaagcatctatgctgttggatgatgcacgcatcttcattgaa

SEQ ID NO: 31381 - DNA, 260 bp, Glycine max
  Clone ID: PAT_MRT3847_128342C.1
aactcgaaagtacggcttcgagaatttcccaatttgtacatctttgggacctttgagatgccttcacatgtgattttaatctctgtcacactataatgagaggtcctacataatgacaacgaatctttacactgaaggttgtctaattcagacaacactagttcttagatctatggatgattcatacactcagaacagacttgagcgtctggcttaaaaaagaaatcattttggggcacaagcatcttcatctattttag

SEQ ID NO: 31382 - DNA, 406 bp, Glycine max
  Clone ID: PAT_MRT3847_128343C.1
ggggcttattccttaatctccattgagcgccgaagaccgaaaccaaaaataccgggtgctggaagctcaaaaagtcaaaaaccaatggcaaaggggattaagttcaaacaaccaacatgcggaggggggtacaaatgctttacacttttttaacacttaaaacccagagggctgtggggcgatgaaccagaagcactgcgctctgcgaacggtgaccaatcccaagatccagaataagcctgagggggatggagtcttaacctttagaatctccttcctcacctgagaagggggagggcaaccaaccataaaccatttccacatggcccaggagccaccatcgggcattcctggagacctgggaggctcacgggctcacgggaacccgactccaacttcaatttca

SEQ ID NO: 31383 - DNA, 248 bp, Glycine max
  unsure (1)..(248): unsure at all n locations
  Clone ID: PAT_MRT3847_128344C.1
catgaactgtngcgccctgcggcaanacctgtgccaaaggcccggcaaactcactggcaacatgcagcgccggcgtctgtggcttctcatgcaatgagttctacggtgtttcgactgacaagacggcgctgtgtctatctgctgaccagcttcttgaactgtggatctgttggcaacgtctgcacgccntccgaccagtggacagtctgcatgcaacaacggtgaatgcgagtatgtntgccngangg

SEQ ID NO: 31384 - DNA, 263 bp, Glycine max
  Clone ID: PAT_MRT3847_128345C.1
gggaggaaaaccatcaaaggggtttggggggaacaatcagcccctcccctattttttttttttggataaagaaaagtttttgggattgggccccaagggcccacccggggcagggcaagccccaagggtcaatggtcccttccagaagtccttccaaaaaccccaaagggggggttgcctttgtttaaagaaatttttaggcccttgaaatagcgggagaatgccccctcgggccgaattccgggtttacctccccgggcatg

SEQ ID NO: 31385 - DNA, 1011 bp, Glycine max
  Clone ID: PAT_MRT3847_128346C.1
ttacggctggagaagacgacagaagggtacggctgcgagaagacgacagaagggtacggctgcgagaagacgacagaaggggaacttttaagttattattattattatgaacactattgtgttaacaatgctgccattttttctcttcctgttagtttggcttcctagggttacctgtggctggacggctgcacatgccacattctatggtggtgcagatgcttcagggaccatggggggagcatgcggctacgggaacttgtatcagcaagggtatggaaccagtacagcagcattaagcgctgcacttttcaacaatggacaaacttgtggggcgtgtttccaacttgtttgctacaattccccattctgcattcgtggtgctggccctataaccataaccgccacaaacttttgtccccgtaatggctccttttctgccaacggtattggctggtgcaatcccccattgatgcattttgatatgtcacaaccagctttcaccaagatcgccctttatcgagctggagtcgttcctgtgctctttagaagggtggtgtgtctgaagaggggaggcataaggttcaccataaacggcaacccatacttcaacttggtgttggtgtacaacgtgggagggttaggagatgtgaaggcagtgtcaataaaagggtcatcaactgggtggcaaccaatgaccagaaactgggggcaaaattggcagagcaagacatatttcgttggccaaagcctctcctttatagtcacaaccagcgatggtagatctgtggtcagttctaatgtggtacctgctggttggaaattcggacaaaccttccaaggtggtcaattttgaatgaagattggttgtttgtgtctttgtgtatgtagttgttgacaaaatgttgatgtggatgtgctgcatgtgtgagcccaattgtgacattgattataggtaataaatgaagtgcatgtttgatccaaaaaaaaaaaaaaaaaattttcccacca

SEQ ID NO: 31386 - DNA, 174 bp, Glycine max
  Clone ID: PAT_MRT3847_128347C.1
aataagtggaggaaaaggaagcagcaccagttcttttaatatgcttaacaaaattagttcttaaaagacaagcagcaaaacaggctgtgtcatgatgaccattcaaatgtaacatacctaaaaagccgaagctgctggaccatctgcaagctcttgctcaaactacaaaaactc

SEQ ID NO: 31387 - DNA, 1111 bp, Glycine max
  Clone ID: PAT_MRT3847_128348C.1
tttgtcgccctttttttttttttttttttttttttttttttttttttttttttatcagtgacagtcccagtgaagcaacttgatttggtctccatgatctatcagagacaataaataatataagaaatcaaaaaatctgccgctaacaaaaaaagacaaatacactgtacaagtttgaaatgtaccaatagttgccaaaaagaaagtgatagatccatatattctctcctataggggggaaaaacaatgaaagaataagcaataaagcttgccttgatcacaaactccattttactgtaccagagaatctgtgcttcatgagaattccatttaggcttcagatgattgttttactgaccactaattgccagtttattacgtttcttatgtgcgtgcgagccattgaaaagcagctgataaaatagcttgcaagtgaggcattcttcaaaacagaaggaagtaataattgacttaaatgttcgttgatagaatgaaataggtaatgccatgaaccatcaaatccgaagatagccccctcgctcctgctctcctattcttaatgatctcctgagcaatgacttcctgttcagtgaccagcttcttcccatagctctcttatttcgccaggaagccgctatacgggtataaagggccgggaaaatgaagcagagtagtacaagaaataacatagcaacacaaagtaatatgacattacgaaaaccgtcttttagctctggagcattttgacctgtccatggaactcctccaacattcatgccaaagactcctgttatgatggacaaagggaggaatattatggaaaggaacgaacgtctggcctgcgtcccgtctgtgcgctcccaccgccagctgtctagaccagccggtcctgctgcgactcgatttacccttttcccctcttgctcctccagcctcctgtcccgtccaatctggccctcaaccgggcgaaggccgtcactcgctttccaccctttagtgctgcactttacattcttattattttataaaccagctataccaggaattattcccctagtttcaccttttggctagggaacagtggtgtaagcaattaacaactgaatgtcca

SEQ ID NO: 31388 - DNA, 105 bp, Glycine max
  Clone ID: PAT_MRT3847_128349C.1
cgcttgaagaaagacgcaaacctatttacattggctttcgtagcctgcctgatcaagatccagaccggatgacacaaagaatcgtagatgcctaggatatcactg

SEQ ID NO: 31389 - DNA, 260 bp, Glycine max
  unsure (1)..(260): unsure at all n locations
  Clone ID: PAT_MRT3847_12834C.1
gnggaacgggaagcccctccactanaaggggtcgtccttccaacgngtgatcccgagtttcatgtgtcatggtggcgattcancgncggaaacggaaccggcgccgagtcgatttatggcgncaagttcgctgnngagaacttcgtnaanaagcataccngtnccgngatcttctccattgcntncnccggtccnngnatnaanggatctnagtttcttnatttgcacggagaatnagagtcgctcnncggaaagcatgt

SEQ ID NO: 31390 - DNA, 317 bp, Glycine max
  unsure (1)..(317): unsure at all n locations
  Clone ID: PAT_MRT3847_128350C.1
ttcggcaacttnatacctcnttctctcactttctactcaacttcaattaatcaaatccctgactttttttaaaatgtcttcagccctcaattctattttggaaaatcataatcaaatacagttaaaaatacataacaaacatctcactcaacatcaacacttcatatctacttttccactctcacaacaactaaaaaggaaagaaaaaccgattctacatctacaacaatgaactaaagaactatcgatttctctaagccccctcaaaatggctcgtgcacccttcacttcttttcccttcgtcctcattatccttc

SEQ ID NO: 31391 - DNA, 543 bp, Glycine max
  Clone ID: PAT_MRT3847_128351C.1
atattgttgtttttaaaaagacaaaaagaataaaaaacaagcccaaaagacaaagataaaaggtgagggggggaggaaaaaagaagggggggggggggggagaaaggaaaaaaaaaaaaggaaggaaaaaaaaaaaaaggaaacaacgaggagaacgggaaaaaaacggaaaaaacaagagggaaaaaaaaaaaaaaagagaacctggaaaaaagaaaaatggagcaaaaaaaagggaacaagggggggaaaaaagggaaaaaaagggccaaagaaacccggaaaaccaccacgagaaaaaaggaacgtttccccaaattcgaaaatcccacgtggacaaaataaagaacacaggccgaagaaaaggaggccggcaaaaggcggccaataggggccccaagagcccgaaactgggaaacaagtaatgggccccccttcccaaaaaaaagttttcgcattgccgctgacccggggacacaaacccccttacatggatttgaacaaaaggctggaaaactaggggaggaattttgggaacaaagc

SEQ ID NO: 31392 - DNA, 671 bp, Glycine max
  Clone ID: PAT_MRT3847_128352C.1
tttttttttttttttttacacagtagaaatctaatttgataaacggggcattgttacaaactctaggcacactttacaagtttacatcaatacagattagttaaaggtgggctgtgattcacctcgaggccaataatgtagttagaatggggatctaatgggaatggccattaaataggaaataaaaattcattagtagacaagcactaaatcagcgttcacagtactacttcctgataaatggcagtaaaataaacagcaactcatggacacttcctttggatatatgaagctccatgctcttcatactcggatttggagaaccacatttgctggaaggagccaagagatgccaatatactacccccgatccaaacactaaaccttctttcagtagcattcccactggccaatacttttactctggcagcttgaggggattcctctaacaagtctttctcaaggcgttcctttagttgttgcattgaagctgtaccaccagcaagcagtatactattaaacaactctcttcgaatgtctacatcacacttattaatgctttcaatcaccatttggggcaggccacgaactgaaggagcaatttctgcaaagctctccatgccaggaattgactgaaccagggatggattgaaaagaacatctggtatctt

SEQ ID NO: 31393 - DNA, 2085 bp, Glycine max
  unsure (1)..(2085): unsure at all n locations
  Clone ID: PAT_MRT3847_128353C.1
ctttgggtttttttttttttttttttttttttttttttttttttttttttttttttttagagacgtacacaggagagatctaatttgataaatggggcaattgttacagactctaggcacactttacatcattacaagattagttaaaggtgggctgtgattcatctcgaggccaataatttagttagaattgggatctaatggaaatggctattaaataggaaataaaaatccattagtagacaatcactacatcagcgttcatagtacttcctgataaatggcagtaaaataaacttgtacaagtaccaacagcagctcatggacacttcctttggatatatgaagctccatgctcttcatactcggatttggagaaccacatttgctggaaggagccaagtgatgccaatatactacccccaatccaaacactaaaccttctttcagtagcatttccgctggctaatacttttactctggcagcttgaggggactcctctagcaagtctttctcaaggcgttcctttagctgttgcattgaagctgtgccaccagcaagcagtatactattaaacaactctcttcgaatgtctacatcacacttattaatgctttcaatcaccatttggggcaggccacgaactgaaggagcaatttctgcaaagctctccatgccaggaattgactgaaccagggatggattgaaaagaacatctggtatcttaaatctgtcagctccaatttcaactgtctggccatcaggaagctcatatgaggtcattggaatgtttgaatacgcactctcatcatatggagtatctggagcacggcacacacattccttgatatcactagcaatcaccctctgggaaaagagtttgtagctttcagtagtattgggaaattcaagatcaactgtctgaaactctccagggcgtatttcctttctcctgaaggaataccgaggttttatcgtaatacccttgctttccaagcttttcatcaagcagtctgtaagaaattctcctccaattggagaggtagccacagccttttgaagaacataaccatcatgtactggtgcaactgtaattgatcctccaccaccatcaacaactaatgacgtagcacgccctgatgcaaaagaagtcagaacagcatttttcgccaaaaataatgcaggtgctttgtacttctcaaacatcagctctgctgtcctttctctctgttgttgagagttagaagaaggctctgcaagaagcataggatgctctttaggatcaatcaataggcattccctgaaggcgtgatcccatatgctgtcaacaatatcccagtcagcaacaactccatccttaaatggagacagcacctccatatggtctctgcggtaccccaaggactgggatcctacatacaatttcctctttcccttggccttgtcagaatcagcatttctaacattattattatttgattccggagcagagccagggttcttttcaccattatctgcttcatcaacatccatttgatcaattgctccaacaacagagggaaacacagccttgggagcatcttcaccggcataaccagctttacaagtgtgtgaacccaagtcaattactatagctgatacttcatcaccgccatacatggctgtgactgtgctacgagcttgacaggggaattagggtttatgattttctctctctagggcttcagtagagagagaagctgcggagacaaggagcgccgccgcgggaattcccggcgaggtggtcggaggaggaaagtcgaacactcgaagtgaggagcgcgcgagatttgaagaaagaaaattagggtaaggtaagggctaggttacttggataagcccacaaaaagaattcacgagggtttcaccggacgcgtggnctcccnaccccgatttggcagtgtagcttttactcgagccgaatcggctcgagcggctcgaggatttggcttgtagtgcctctttgtgttagcctttgtatgggatgtaaaacagtgtcctcttgaaggaaagaaaaacaatagagaacaactattgtttcaaaa

SEQ ID NO: 31394 - DNA, 292 bp, Glycine max
  Clone ID: PAT_MRT3847_128354C.1
attaattatagcgagttttaaaaaggaaaaaacagaaaatcacacagaagggcacagacaagcaaagagaggggacaaaaactcggaccataacacgccccaagaacagggaccccaaggaaaaaagtttacccatatcggaaggagcgcagactaaagggttaccgcacacggggcctcacccccacatgaaaaaacagggcacagctgcctaaaccaatacaacaaaacggagccacaggcggtgggacgactgaacttaaaagggaccctgaccgggaaaaaggatgcg

SEQ ID NO: 31395 - DNA, 594 bp, Glycine max
  Clone ID: PAT_MRT3847_128355C.1
ttttcaaagtggatttgtttctaccacatgtgtctttcccttgtcgtctctctcttcctcctttttgttaaccattttgttttgctaaagttcaatgatgtcttctatatactctctcaacatcttccatgtcttcttcaccttcacctccgtgacaattcacgcactcatctttctcttgagcaagatagcataaagtggcactgcatgccttgttcaacatgggaagagtctgcagcagaggtttccttaatctagagatctcttttagctaacagcaaccatgaaatggaaggcctaaactccatccatggggaattatgcactcctggtccgaatggtttttacttcttagtatattggtttccttttttcttcccacttttttttcatggtgttttgaagaatgtgcaaccatgcatacaactatatgcagctagtgcgctatagcttggtgacatgcatgttgtgaagttcattcagattttttgtgcacctttactgctaggctatagcttaacttgtagatgagtgaatagctagattactagtcctgaataatggcttgcgccgacacgaagagttaccctacct

SEQ ID NO: 31396 - DNA, 512 bp, Glycine max
  Clone ID: PAT_MRT3847_128356C.1
ggcactgcgcgttgttgttttctgttggtgaggtatatgtttgaaggccgaagtggacgaaaatgaagataattctttgattttgattctctaaagttgaataatcttttttagttattcccattatatcataacattttgttgttgattacttgatttcacaaaagtcgattgatttttgttcatggttgatgcactgcatctgtttaccctctccaattttgtccagcttcaatggctgtggagttaaaactgatgcaaagattcaaaaaggttgacttaccagcccattgcaccgatttttaaattgccatgggtcaaatggatttaccgaaatccccatatagaaaaagtttttttttaaagcaaatgtgtcacttgcattctgttttcagtgatttggcagacgatgatttagtattaaaccccttattgatatactgatacgctgtgatgaccataaactccacttatctgataccatataacattagtatttttgttttatgttt

SEQ ID NO: 31397 - DNA, 113 bp, Glycine max
  Clone ID: PAT_MRT3847_128357C.1
taggacaaacgcggactgccgtcttgtatgacttcaccagcttgcttggggcctaccaatgacagaagagcgacacacattcacttgagcacactacaccaacaaccgccacg

SEQ ID NO: 31398 - DNA, 295 bp, Glycine max
  Clone ID: PAT_MRT3847_128358C.1
atcaggatatattacattaagaaagctccccatatagacgcatatggcttgcgatcgcaaagtgaacagctgacgccctgtgccggattcagtgcactgcctgtgactaaacacatgtctctctggcagacaacaatcataagaccatattgataagaccatatcccaagtggatattgcctaccttcaagtcatttagctcatgactatcccttcaatccaccaaaagttgcttctcggactctagtgttccacccaaacattcaccgtgattgcactctatgtcttgacattc

SEQ ID NO: 31399 - DNA, 3067 bp, Glycine max
  Clone ID: PAT_MRT3847_128359C.1
gtcgaaaccgtggctataccctgctccaacctatcgaactatagaaaccttctgggtcaccgatgaagacgcacccggccctcgctgtggccacaccctcaccgccgttgccgccaccaagactcaaggcccccgcttgatcctattcggcggcgcaaccgccattgaaggaggatcttcctctgcccccggcattcggttagcgggagtcactaataccgtccattcctatgacgttcaaagtagaaaatggactagtatcaaacccgccggagagccgccgtctcctcgggctgctcatgctgctgctgcagttggtaccatggttgtttttcagggtgggataggtccagcggggcattctaccgatgatctctatgtgcttgacttgaccaatgataaatacaaatggcatagggtcgttgtacaagggcaaggacccgggccacgctatggccatgtaatggacctggttgctcagagatatctagtaactgtcagcggaaatgacgggaaaagagttgtatctgatgcttgggcttttgatactgctcaaaaaccttatgtgtggcagaagctgaacccagaaggtgacagaccttctgcaagaatgtatgcaactgctagtgcccgctcagatggaatgtttttgctctgtggtggaagagactcttctggagctccactagcagatgcctatggactgctcatgcataggaatggccagtgggaatggacccttgcacctggagtttccccttcaccaaggtatcaacatgctgcggtttttgtcggtgcacgattacatgttacaggtggtgttctcaggggtggacggtccgtggaaggtgaagcatccattgcagtattggacactgctgctggggtttggttagatagaaacggcattgtgtcctcctcacgctcaaacaaaggtcatgattatgacccttctttggagcttatgcgtcgttgtcgtcaagcagctgcagctgttggtgttcatatatttatctatggtggtttaagaggagatatactactagatgatttcctagtggctgaaaattcgccattgcagcctgacattaattcttctgagagagcttcacctgttacaagctccaaacaaaatcaatctaacttgacttataatgtaacagcaccaaatttggatggtggaccagatactccttcatttggtcactcaggcatggacaaaaattccttggagaaactgagggaagcatcagctgctgaagctgaggcagcgggtgctgtctggcaagctgtgcagtctatatcaagtaatccagctgaagaaacatctctgtcagatgaaaactcacaagctgcagaaacagtttcagatggaagtgacactgagggagatgtccgccttcatccttgagccgttgtagtttccaaggaggctgtaggtaacctaggtggaatggtgagacaattatcgctagatcaatttgaaaatgaaagtagacgcatgattcccgtaaataatgatttgccatatcctacgaaaaagttcaccaggcagaaatctcctcagggtttacataaaaagataatttcaactttgcttaggcctcgcaactggaaagctcctgcaaacaggcggttcttcttggattcttatgaagtgggtgaactttgctatgctgctgagcaaatatttatgcatgaaccgaccgtacttcagctgaaagctcctgtcaaagtatttggtgatcttcatggtcagtttggtgatttgatgcggctatttgatgaatatggatttccttctactgcaggagacatcacctatattgactacctgtttttgggagattatgtcgatcgaggacagcacagcttggaaaccattaccttgctacttgctcttaagatcgaatatcccgagaatgttcacttgatacgtggaaaccacgaagctgctgacataaatgcactatttggttttcgtattgagtgcattgaaagaatgggtgaaaatgatgggatatgggcatggacacgattcaatcaactttttaactatcttccattagctgctcttattgaaaagaaaattatctgtatgcatggtggcattggaagatcgatcaattcagtagaacagatagagaagcttgaaaggcccataacaatggatacaggatctattactttaatggaccttttatggtctgatcccacagagaatgatagtgtagagggtttgagaccaaatgctagaggcccagggcttgttacttttgggcctgatcgtgtcacagaattttgtaagaaaaataaattgcagctcattataagggcccatgagtgtgtcatggatggctttgaacgatttgcccagggacaattaatcacccttttctctgcaactaactattgtggaactgcaaacaatgcgggagctatactggtagttggtaggggtttggttgtagttccaaaattaattcatcccataccacctccccttcagtctcctgagacatctcctgagcgtgttatggatgaaacatggatgcaggagctcaatattcagaggccaccaactcctactcggggtcgaccacagcctgaccttgatcgtggctcactagcatacatatgatataattcatgacttgaataaatactgcatattcgggatttttcatcatcgcttgatatcctgccaaccgaatgttctgtttgtatacctgtcattgttgacagaatacatattttgtactatattcttctttagttgcagaaaagcaaactctcattagcagcatgcaaatagcttgagagagtgcattattttatgttagccaattagcgaatggcttgtggagattgggtttacttacaaggcatgggacatggataaagtggaagagatgttagtgtcttctcccccttaacatggggattgataacttagtgagggaataccaatgtttggtatatatattgtatcatagagaaatatatatatatatatattttttcctttatataaatgttcataacatttagatccgagccctctatt

SEQ ID NO: 31400 - DNA, 245 bp, Glycine max
  Clone ID: PAT_MRT3847_12835C.1
gtgcgcaaacaagaatgacgccatcgttttgagggggagaattcatagaagaggcaccactacgaagtgagataaatgcctcgaagaaaatgggccacgtaaatacgagaccagccacagaaataaatgagtgaaatcagatagatgagaaaagaaatatataaagttttttggtttaaaagaaatgaaaaaaggaaagtagattataaataaaaatggtgctttacctttataataattgttgt

SEQ ID NO: 31401 - DNA, 557 bp, Glycine max
  Clone ID: PAT_MRT3847_128360C.1
cccacgcgtccgatctggttaccacttctaggcaaggatggaaaatccagattcttattgagccgactcttccacgcgtgccaattgctattggtggtcccggattggcccctggtgtaagattccgaaatgatgttccaaccggcgggcttgccaacgttgctgcaactgtgatgaatcttcatggattcgaggctcccagcgactatgagacaactctcgtagaagtggttgataactaggaaccaatagatgaatttttataatttgaaaaacaaacagggaaagctgtagattgcagccctcaaaataattgaaagttttcatccttattccacatgtgtggtggttttgttcttatgagttaccaataccagtctgcagttgacagaaaagtatacctaattaatggcattttggcactctcttttaactttctatgattatgctgaattacatttgagttaggtattttgtgattggcaatttgcaaggccatctttaaatcatgcttgtgaaatgcctttactagggctgattcgtgtgttatgatgttg

SEQ ID NO: 31402 - DNA, 351 bp, Glycine max
  Clone ID: PAT_MRT3847_128361C.1
aaaacaaacaaaaagatctggcttcatagacctatcctattttaacattatccaaacccatatatatatccactggcaaataaatctattagaagataaattagccctaccatttggattttttttttttaccaccctaaatcagagaggacaatccccagcatcatctttttctctccccttagttgggttacctaaaaacatcatggaaagagcaaaagttccacaaaatctcaaacaaccattaggggaaataggggggacaaaggaggcccactaaagatggtccccataacatcagggccccaaaagcctttccaacatgagggagtcaaagggccctcttctttc

SEQ ID NO: 31403 - DNA, 350 bp, Glycine max
  Clone ID: PAT_MRT3847_128362C.1
cggacgcgtgggtttccggtgaccttgatgttgctaaggatgctcttgtgcaagcacttacacggctaagagcaaatctttttgataaggagcgtgctgtctcaggattccttccggtgcttccatatcttcctgcttcagttgatggatcagatggtttgaactatgacagtagagatggtaaacgacatggacgtggtggatatggcggcggacgaggtggctatggtggcgggcgtggtggctatggcggcgggcgtggtggcgggcgtggtggctatggtcctaatgaacataacgaggctggggttgatgctaaccctcacaactaagaaggcaactttctaaag

SEQ ID NO: 31404 - DNA, 250 bp, Glycine max
  Clone ID: PAT_MRT3847_128363C.1
gcggttgcgaaattcctccggcggttccatttccgactccgccccgtaattctggcacgaattttcgcgtaatcgacgacgatgatgtcgaagaaggagaaattttcgaagacgacgacgatgtcgcgaaacagcacgcgcaatctgaagctgagcctggcgaaattgacccgaccggagatcgaggtgttcgatccgataacaaaaatctggtatagccgattcaaacttcgtggaatttgtgtattga

SEQ ID NO: 31405 - DNA, 771 bp, Glycine max
  Clone ID: PAT_MRT3847_128364C.1
gttgaggacctgtttccattttgatgagcattaagagatagtcgtctaggagtaccatttgtgcctccgttgggacaaggaccaactaccttcttgttgccaagtggccttgtagggcttggtcttgaaccaaaaccaggttcctgatctgtgttttgttgttcttgatactttttatggtcctaaagaatgtgatatgaactctttagatagttcactttgcttacttttttattagcaagtgctaaaattattttgataatcaattattctaatcatcccatcaatgaaacttacctgcatccttcattcttcctcttcccatacatgcctgagcatggcatattcatccaacatagcaagaagaggaacaccatcatatgtgaatgacatgtcaggtgcttcttcccaaacacgagttttagcaaccaatatatcaaccaaagctgaatttttcaccaaaaaaagatattgtgttcatgcatgccaaaaaaccatgatagtatactaatatctaccagccaaatccattgttaatgcattgtatctacttgattagaaaaaatttcaccaactactaatgataacaatccatcttgacttgacttgtataaagtacaatatatttcacaaaagaaaacatagtttacaaatgaaaacattaaaaatatgacaaaatatatctttattgcaatcgtaatattttgccagtccaatgatattgcaccttcttttgaccaaatcatgtaaggagttttatgctaatgatgg

SEQ ID NO: 31406 - DNA, 404 bp, Glycine max
  Clone ID: PAT_MRT3847_128365C.1
tttttggtatatttgtttccaatttcaaagggttgggtgcttaataatagaggcatattttttttattcattatattatttgggaaaccgaaaaaaaccttccccatcttttttttaaccaggaatataaaaaaaaaatggtcactacactctttttaatggggaatgagaaaacatggattttccccaaccactctaaagaaacaaaaaacccttttcttctatatttcggaaatacctaagaaaatcccccaaaaaattctttccccccaaaagggaacactatactcgactctaactaaaaaaccacggacttttttttttcctggattttaaaaaattctctccacaacaactggaatgctacgtttggcttcgggattattaacaaaaaaaaagagggc

SEQ ID NO: 31407 - DNA, 281 bp, Glycine max
  unsure (1)..(281): unsure at all n locations
  Clone ID: PAT_MRT3847_128366C.1
ggaaattgaaggtgttggcatgtggttgataatgatactaatgatggatacggtgactgttggaagagtcactcagaagaatttgcttacaattcttagttagttgaattcaatggtgttcattataagtcaagttcttagttaatttaattccccccaaaaaaaaaaaaaaaaaaaaaaaaagcaaaaacaataaaaaaaagggaaacacaaccatcttataaattnttnntacggggggtgcgccaacttcagatttctttaacccagggggggggccc

SEQ ID NO: 31408 - DNA, 450 bp, Glycine max
  Clone ID: PAT_MRT3847_128367C.1
ggactcaaaaatctgctctttaacttgagattgaattaaaaggaaagaaagaggataacccgacctgattgaccatgctatgctgctttctcccaaaaataaccccccccccaaagggggtaatgtgtcaggtctatggccttctcgaacaaataaagccccggcaccagcaacaggcaaaccccaaaagaaagaattacgaggacgaccaccctccacttacacagcaaaaaacctttacttaaagacacagtttactgttaagggcgaaagcataaactacaaacaggctgataggctgaaggtacaaaaaataatctgaaaaggtgcgggtggcgttaccacccaatttgactgggagctggatcaaactgaagaaaattctgatccatagtcgctcctatttcaaggatggcagccaaagtcccacatcgaacacccaattgggag

SEQ ID NO: 31409 - DNA, 175 bp, Glycine max
  Clone ID: PAT_MRT3847_128368C.1
ctcacacgttcgctctttctctctctgtcttagctatgcaaacctagagactctactctgggcctatgactatccctaaggcatcctcctacatgaccatcggcggttaacgtggccgcctcatcaccatcgagctgtatacccacgtgactgatagcaccttcgagaactttcg

SEQ ID NO: 31410 - DNA, 1147 bp, Glycine max
  Clone ID: PAT_MRT3847_128369C.1
tctatgcgtccggccacgcgtccgcccacgctcccacgcgtccggtttctcccgcaaaatgataggaaagaaattcttatgcgttgttgtagcggtggcctttgttatgataacaaaggtgccccaaaatgtgagtgctcaaaactgtggttgtgctgaagggttatgttgcagccaacatgggtattgtggtaacggtgaggagtactgcggcacagggtgcaagcagggtccttgttattcgagcacaccaagtactaacaatgttaatgtggctgacattgtcacaccacaattcttcagtggcataattgatcaggctgactctggctgtgctggcaagaacttttactcacgagatgcttttcttaatgctctcaattcctataatgactttggtagacttggttcccaggatgactccaagcgcgagattgcagctgcttttgcccatttcacacatgaaactggacatttttgccacattgaagagattaatggtgcatcgcaggactactgcgacgagaatacgatttcacagtatccgtgcctttctaacagaggctactatgggcgtggtccgattcaactaacatggaacttcaactatggacctgctggacagagcaacgattttgatggattgaacgctcctgaaacagtgggcaatgatcctgtgatttctttcaagacagcactgtggtactggatgcaacacgtgcgccctgtcatcaaccaaggctttggtgcaaccatcagagccattaacggtcaacttgaatgtgatggtgccaacccttccacagttcaggctcgcgttaattactacactgactactgtagacaattcggtgttgccaccggtgataatcttacttgctaaggtagcaagccacgctacctatacacatattatatagaataaattatgtatcttcttataccactcattttttcttttcaataaagaattgaaggcttgttccctcgctcaattcacttttaggaggagttttaaacgtatatatcttcattcacacttgtatgagagagattaattcttctagatttctttatgtccatgaatttgaaactcaaatataataagattacgtgtttaatatattttaaaaaaaaaaaaaaaaaa

SEQ ID NO: 31411 - DNA, 677 bp, Glycine max
  unsure (1)..(677): unsure at all n locations
  Clone ID: PAT_MRT3847_12836C.1
cggggggggggcccacgggaataacccaccgggaattccaactttatccgggaatcccaccaactaaaaaccccccaaaaaaggataattttcaggacaaacgtaggggaaaagttaaacccaacctaacccaaggggcctttgaccctaccttcaactatttttccattaaaaaacccaaaagccaacgggagccctcaaaaaatggctggggggcaaatttgcattccatgaaccaggcaggaattcaaggttcggaaaggcaaaaaggcagggctagttgacaaattattttgggggctagcaaaccaataaaaaaaaaggagggaaaccctgaggaccaggccgataatcagggttgagccaaatccactttcatccttaaaaagggaaaaattccttttacccaaaaaaccaaatttcctgcaagttttcggaaaaacttccaaccggcccaaggcttaaattgcattgggaacatttttggcaaccttggcccccaacntaaaacccaaacccaagaaggccccctaaccctcagccaaagccgaagttgggccaatnnctttggcagttaaaccccgcccaattttaactacccnnntgaaaaccccaaggttattnnagcaaaaggcaagggttccaattgccattatttggggannngnncaaaaccg

SEQ ID NO: 31412 - DNA, 463 bp, Glycine max
  Clone ID: PAT_MRT3847_128370C.1
gtacccaggccttcgtatgacaatgaaagaaaaaaaaccttagtgatagttagttggctggtcatgtgtgttctgatttgcaatttatgcctgattagtgatccttcatatcacaaaatgtggcttctatattccacatattacccttgttcatagtacgaatggtcttttgttttttatgaggtcaatggcttgatcaagtcaagtagttttagacttaaagccaaaaagaaaaataaaagagttaaaacaactagtcatttcaaaaggtgcatttccacgtaatgtgtagcaactgtgttatggtttatgctatattgaaataaattttcattgactatgggtgtctctgggaagtggattaaagcattggttggtctaaagaaatcagaaaagccagagaaggatggaaatgttggcaagtttcaccatcagagaaggcatgatgtcgaatttaataatg

SEQ ID NO: 31413 - DNA, 505 bp, Glycine max
  Clone ID: PAT_MRT3847_128371C.1
cccatgactggcctgttgcgcattcctttccgtgtatctgattatgtgcgacaacctccttttggcaaacaggtgctgcgtcgtattgatgaagggtttactactacacgatcaccgtactcaacgcgttccctcacgacacacaagccttcactgagggtcttttttatgatgaaactgacaccttattagagtacagctggcctttatggggagccatccggccgtcaagatgctcttgcgactgtgaaaggtgagaatattcataagatgcatgatactatattgggagaaggcttaactgtcctgaaaaaaaggctgatccagcttagttgcctgcaaaaagatggatgcttatatgagccccggaattcaacccaactagggacatttaagtatgatatgaaagagggttggggtctggcaactgatggaaaagccttggtgggaagtgatgctctgttctcttggtgacaattcgagcccctaccatgtgatgatgaat

SEQ ID NO: 31414 - DNA, 461 bp, Glycine max
  Clone ID: PAT_MRT3847_128372C.1
gaaaacacccccgggggtttttttttattaacccctattttatggccaaaaaaaccaaaaccggccccccgggggggggaaaacaagggccatgggaaaagggggccccctcaaggccaaaaaacggcccgggccaacaaaaatttaaacccccccccatcccttgttttggggggaaaaaggccccccaacccggggggagttgccctttaaccggaggaaaccccattctttcccataaatgggggaaaaaaaaaaaaaattgccggaaattcaaaaatcataaccaaaaattttttgctgcccccacccaaaatttaaagaggaccaaggatggctttgggaaatccagttgtctttaaaccgcccccaaaaacaggggttcggaccttcccttctgcaatcggggggaggaaagctttcaaaaactgttctgctttgccggggaggcccaaagggcc

SEQ ID NO: 31415 - DNA, 354 bp, Glycine max
  Clone ID: PAT_MRT3847_128373C.1
gatcgacaaaaagataaagggtgaataattagcagctccttctagttccggtgtcggtgtgggtgtttgaaccgggttaaggatcttcatatgttcaatcatatacggtaatctgatcaggaactacctcatcgaatcctacaaggcatgatcgctatatctccttcagaacgtccattttgctctctccaaatgtgtcgacgccaagcctgaaaaacctactattctttcagacaccccataacaatgatacggaatagctggaagctttcaatgcataaatcgttgagatctggcagttcattgtcattttgtatccttctgtgatgtttaattcaattgcatcgttttttt

SEQ ID NO: 31416 - DNA, 382 bp, Glycine max
  Clone ID: PAT_MRT3847_128374C.1
catgagactcccgcgcacctcgaggcctcacaaggaactggtgagttcctaacggccgatgttgcaagagctgcaggtggctacctctccggagctttagtgatagaccagtctaaagcttggttgatctcacttgaggcactggttagcaaactcgtgatagaccccatcaattattaatgcatccgttctgaaaaaggcgcagatgaccatatatctgagcaccaacctgaaatattgaaagagcgagagggtcctaaccatctgaagacaaaagctggttctttgtagcaccaggtaggacacctgagatctgctatagagactgctgagacttaataccacgaggaacagatccgtagcatggagcccatcacgaatg

SEQ ID NO: 31417 - DNA, 304 bp, Glycine max
  unsure (1)..(304): unsure at all n locations
  Clone ID: PAT_MRT3847_128375C.1
anttgnatgnangngtangtaagntnggaattnngagnttnnatantntagagnggnngntgantagtganntnntnganatgggaattaattanngannggtanatgnaggtgtannagtttnnatatagtgantnntattaganattagngtaatnatggtnatanatntttaatgtntnaaattnttattagatnanaattnnagagaanataaaagnnnnaaaatntnntnnaattnnnaaatnnantnnnanattantaatgatngtantnanannatatannaaaaaanantaaattn

SEQ ID NO: 31418 - DNA, 199 bp, Glycine max
  Clone ID: PAT_MRT3847_128376C.1
acgctgaggccctttccttgtgcttcctgcgtcctgacagacccactttctctaactcgcttctccttcatagtcaaattcctatacttttgcagtaataccttctcagatctcatcaaaagtagggggtgaaaccctacttattattattaaacataaaaacccttcttgagaaaggccacgagaggtcactgactct

SEQ ID NO: 31419 - DNA, 247 bp, Glycine max
  Clone ID: PAT_MRT3847_128377C.1
tgcttgctcagactcaaaggtgtccccatctcatatgctacatctccaaccattataagcctttataatcaaaaatgtttctaacattatcccaccatatcaccattcaaaatactctagaactataccaacagttaactatactatttcacatcttgaaatatctcatatgatcatcattaaacacaatacttatactgatattgaaggacttgtatctttcccatatgataaaacctactctact

SEQ ID NO: 31420 - DNA, 371 bp, Glycine max
  Clone ID: PAT_MRT3847_128378C.1
gcgagcgggttttttaaggagcttcactggaagaagtggttgcattgtggcaagtgaagttaaacttggaacattgggatgcttgatcctaccagaaaaggctatttatcctatcttttctttttggtcatgcagaatatatgtatcggctgtgaggtgacactctaaaattgattagctcgcggattggctaatatttttggcaattatacggcgatagctaaaatccatgttggggcgacatagttacttactggtgtaatactagacttaagatttgtgtttaatcaaacagggaattaagatttatgtgaaaaagtagatgctggtgtaagattgacccttgtgcacagagaataataatggttgtg

SEQ ID NO: 31421 - DNA, 715 bp, Glycine max
  Clone ID: PAT_MRT3847_128379C.1
gtaagcaagaggcatatgctggaccaaccaaacgtggccttccggatggtgggatattgatgagtggatgtcagaccgaccaaacttctgccgatgcaagtcctgcaggaagcgctgccagtgcttatggagcttttagcaatgcaatacaggctataattgaggagactgatggtgcaatcacaaaccaagaacttgttcaaagggcaagagagaagctgaagaactccggtttcactcaaaaaccgggactctattgcagtgatcatcatgttgatgctccttttgtgtgttgatctgttctcatctgatgcagagaaagagagaataatatgtgttgtttatagtctgcttgtgtattgctgtatagttggagactcaaaatgaagttaatgttttcatccagttatcatatgctgctctattatcaggaattatattccttcaacattttagcccttgttgtgtctttgctgctacatgaccattgtgctgggagaccaaactatcagagcaagttccatgcaccaaaccacagattttggctttggaagtctgaatatattggtgtatgtgaaattattaatatcattatttataaaatatatagttaaattttgtatgtcgtttgaaacattcttgcaactttgtaaggattttaatttgttgaacaaagtttgtagtatacttacaatgtcaagtgtttttgtttctc

SEQ ID NO: 31422 - DNA, 338 bp, Glycine max
  Clone ID: PAT_MRT3847_12837C.1
tgtacattgtattaatgttgccaatgtattgagattgaaatttagggtattccctcacagtaattttactcctgaatcgtagcttgtctaacaaatatatacagtcttccccgccttgtattttgcttgattgcaggttcccattttcttatttgcataatttatcatgattttttgaactgttattgtcctgtacattgtattaatgttgccaatgtattgagattgaaatttaaggtattccctcacagtaattttactcctgaatcgtagcttgtctaacaaatataacttttttatatatgaaaatgtataaagtactgaagttttattacatc

SEQ ID NO: 31423 - DNA, 362 bp, Glycine max
  Clone ID: PAT_MRT3847_128380C.1
cagggattcggaatggggtagttgggcatgtttaacgggtaataaaaaaaaaatacagcatgcctcgacccggggggggaaaatataaaaatattaagttcgtgaaatggtacttttttgctttaggtcaaaaaaggaatccccccttgattctaataaaaaaccttggtttgtgcttccaataaaaaaaaaaggtgggaacaaaaatgggaactttttatttaaaaacagcgggggaaagggggggtcccattttccaaagattaaagacaacctgtggggggaaacccgacgcccaaaaccccaaggggtgaaagagaaccggaacccttgggggggggtggtaccaattttgggcaaac

SEQ ID NO: 31424 - DNA, 920 bp, Glycine max
  unsure (1)..(920): unsure at all n locations
  Clone ID: PAT_MRT3847_128381C.1
tcggcacgaggtgtttgaaagatattacatcatgcactcctacaagaaagattgttgtaaatgaaggggtgattatgaaaaaagaatgaggtgtatcaacgtaatttactctaatgtataaagtgaatgtaccaacactaatcatatgttgtacccgtacctcgtacatggtaattatggtactagtagtagttctatagtttcattttgagaaagccaatttcatataatataaagtcaatatgaaactaatgggaaaaagtaaatacgcagtaactaaatgtgaaattcattgctcagggatgcgaggctcgagttttgcttgatgacacaatcacacttaaaggtgagaaaaacgccgctaccaacatccactctttaaaaggcttgggaattgttgataagatcaagaacatacttgaatcagagtgccctggaattgtttcttgcgctgatattctcactattgcagccagagatgctgttattctggtaggtggaccttactgggatgttcctgtgggaaggaaggattctgtcactgcaaattttgatcttgccaacaccaatcttgccactccagatgagagccttctgtctatcattgccaagtttctttaccaaggactatctgtcacggatatggtagcccttgcaggtatattaatgaataaaactttgaaggtttaaatatgtttttaattttcacaaatatgacaaattttgattttagtcctttaaaaaatcttttgtcaattttagtcctcataaatttatttattttaaatagtatctatcatcatttaatgatgataagacatgcatttagatatgtcacattaacaatcattctaagatctgatatactttagatatatgctcgtcattngtaatgatgatacatatatttttgaactttg

SEQ ID NO: 31425 - DNA, 645 bp, Glycine max
  Clone ID: PAT_MRT3847_128382C.1
ttggtccggaattcccgcctcgacccacgcgtccgctttggtcgaaaaatctggctcggacattgcagtttaaggtaagagtaatgctgcctcctacttcgcttcatttgtttttttgaaacattgtatctttgtgttcattggtatttatagtagaactgaaccagcctttcattttggttacaaattttaattatttgattgattacatgtattctcaaaccaaaatttttttaagggacttagttcagttgattgaatctcaaaccaaaaaaattttaagggacttagttcagttgattgaataagattacttgagttattgtaagttttctgaaatggtctttgattttcactaataaaaaaatccaaaaaaattattcacatcagtcagaataatttatttaataggagaactttgtgttggattctcaccttgtgaaaatatccttgggccaaccacagccacaatccgcgagtgtgattagtctctgatctagtggattggggcatccgtggtctctaacccaagataaaagtaaaaccaagaaaattgttcatcaatgaagtcgttactcgttagtctaagtgacattaggcacaagatcgttcaagcaaggtcttggattcaagaagttgtgaatg

SEQ ID NO: 31426 - DNA, 340 bp, Glycine max
  Clone ID: PAT_MRT3847_128383C.1
ggggaaagggaaagcaattgaaacccagtaaaggtttagttgtgctacacattaaaactcgcccttccttgcgggggaaggggaacctttgttgaaaaaaaaaaaaagttgttgatcgcttgagaacaaagtttattttccaaacggggtacaaggcaaggtgggggctcctggaaaaatttaaacccccccacctccgggtattgaatacctgagggggcttgaattgccgcccttgggcctttgaatactttaaaaataccggggaagggggggtgttctcggcgggccttgtttaacttttcaaacccgggggcgaaaaaccaaaggggagtaaggg

SEQ ID NO: 31427 - DNA, 230 bp, Glycine max
  unsure (1)..(230): unsure at all n locations
  Clone ID: PAT_MRT3847_128384C.1
ctttagtttgatcgctattgtggaaacccactgtcctgcagcgtaggtcacagctgcactgcagggctgtggtctgcgagggtccccagctctggccgtgtgtcgcccctcattctccagggcgaaccttcagcatcaccctcagaagctgtcccttagcacctcgacgcagtnaggacccctggctataccttcccagagtcccctctgatccctgctaatgaacactg

SEQ ID NO: 31428 - DNA, 426 bp, Glycine max
  Clone ID: PAT_MRT3847_128385C.1
tttttatttttacgaatataaataaaattaattaaaaatcagttaaattaatatgaaccttaatgattgaaagcattaaaaggaatcccagtgacccagtagcccttcctggggtcttcaaaaagatgactgcaaagtaattttctttactgctctcaacattttatcaaaacatagcagatcaattacatgccattcatgcataagtggagtcggatgatgatgcagccctcttcttggcaaagtattcctcaacttgagcaaggttctttgcaactgaaagcttaacccaatttttgcgcccaagcaatacggtgagagagcaaccggcagcctcgagcttttcctttgcagatgctgaaaaggcacgggccttcaagttcagctttaccttcagcttcccgtcaccaagaatcttcaaaggga

SEQ ID NO: 31429 - DNA, 359 bp, Glycine max
  Clone ID: PAT_MRT3847_128386C.1
cgcaggcctttatagcataaacatttgagacttcattgctcactgtcttcctctagccttcagggtaggcgcctctcttgcatgtcaccagccaaaacctctctcatgactgccacattaagactttctgcatatgcaaccgttctcactccttcttatccttcttcttcaccttcttcttccttcccttctttcattcaagacaggcctgacttagctgtctatagctcccatattcacccctactgtgatagattgatatagcaaattgaaaactatcaatatattgcagatctccacaaactgctgagggagaagattgaactcactgactcaacttctgatatcgatgatcaaat

SEQ ID NO: 31430 - DNA, 368 bp, Glycine max
  Clone ID: PAT_MRT3847_128387C.1
tttttatataataaaatttgggacatattacagtttattggaaattttaatggttgtttgataattttattaagcttatttaagttaaaaaaaagtaatttccatgcccccctcaagggaatgaaaaaattttttaaaaaacggatgagatttaatcggggacattcttgtaagctgataaaaagagtttctctttttttcataaaaaaaaaaaaaaaagtctcccgaaagaacaacactacatgggcagagcctgggacctttattgtggctccacataaaacaatctggaaaaaggggggccttctttgaaaaaaaaaaaaaaaaacatcctgaagataaaagtcaaaaaaaaaatttttttttta

SEQ ID NO: 31431 - DNA, 292 bp, Glycine max
  unsure (1)..(292): unsure at all n locations
  Clone ID: PAT_MRT3847_128388C.1
gatagattctggcgccggcgccacacaaacacacagcagggcaaggnaaggaagcccgcacccagacccacacgaggagcnccacgaaaagaagggcgacnggnaccacagcacacaccagaagcacccgcgcggccaagaccacggacacagcacggccacgacagcacgcgcgcccgangagaggccagacaggccacccaagacagacagacgagcgagggagcacaaacaggcggacacaagccaangggggaggggaccgcacgccgcaccnggggaacgaagggca

SEQ ID NO: 31432 - DNA, 2344 bp, Glycine max
  Clone ID: PAT_MRT3847_128389C.1
ccacgcgtccgccccacacaaacaatgtcttcttcttttctcttccctcaaactcaatccacagtcatcccagacccttcaacctacttctccccaaacctcctttcatctccactccccacaaactctttcttccaaaactttgttattcctaatgggacacagcctgagtacattcatccttacctcatccaatcctcaaactcttcactctcagcctcataccctcttctcctcttcaccacagcactcttgtaccaagcttttgtgccagatctcactatctctgcctctaaaacatactcatcatatcaacaaaaccgtgtaatctcatcctacagtgaccttggtgtcactttggacattccaagctccaaccttagattctttcttgtcagaggaagcccttatataactgcttctgtcacaaagccaacacctctttccatcaaaacagtgcacaccgtagtttccttgtcttcagatgattacaacaccaaacacacccttaagcttaacaacactcaggcatggatcatatacacctcctctccaatctacttgaaccatgttccttctgaggttacatccaagccattttctggcatcattcgtatagcggctttgcctgattctgattccaagtatgtggaaactcttgacaagttcagttcttgttaccctgtgtctggtgatgcagcactcaagaaaccattcagtgtggagtataaatggcaaaaggaacgttctggggacttgctcatgctggctcaccctcttcatgctaagcttctgtcatatgatcgtgatgttactgtgctgaatgattttaagtatagaagcattgatggtgaccttgttggtgttgttggagattcatgggtgttggaaaccaatcctattcctgtgacatggaattctaacaaaggtgtggagaaagagtcttatggcgagattgtcacggcgcttgttaaggatgttcaagcgctgaattcttcagcaataggaacaaattcatcttatttctatgggaagcgtgttggaagggctgcaaggttggcgttgatagcggaagaagtgtcttatcctaaagtgattcccacgattaagaaatttctgaaggagtctattgagccttggttggatggaactttcaaagggaatggttttctctatgaaagaaaatggcgtggacttgttacctaaacaaggctctacagattcaactgctgattttgggtttggaatttacaatgatcaccattatcatttgggctacttcctttatggaattgcggttcttgcaaagattgatcctcaatggggacaaaaatacaagccacaagtttattcacttgtcacagatttcatgaacttgggccaaaaatataactctctttatccacgtctaaggtgttttgatctttacaagttacactcttgggctgcagggttgactgaatttgaagatggaaggaatcaagaaagtacaagtgaagctgtgaatgcatactatgcagcagcattggtgggtctagcatatggtgactcaagtcttgttgacactggatcaacgctagtggcgttggaaattcttgctgcacaaacttggtggcatgtgaaagcagaagacaacttgtatgaagaagaatttgcaaaagataacagaatagtgggtgttctgtgggctaacaagagggatagtaaactatggtgggcccctgctacgtgtagagagtgtaggcttggaatccaagtgctacccttgttgcctattactgagacattgttctctgatgctgattatgtgaaggagcttgtggaatggacagtgccctttttaagtagtcaagggtggaaggggatgacctatgccttgcaaggaatttatgataaggaaacagcattgcaaaatattagaaagttgaaaggttttgatgatgggaactcgttgagtaatctcttgtggtggattcacagcagatgaggagtgttgcacacaagtttctggactagataaattgagccgaatccaaaaaatgtatgatgtttcaatttgactcattatcaatgctgtaatttgcagtcatttacgaaatactacatcttgtatcagtgattgttaatgtgatgggggtaaatttgagctttgggaattttcaagaatttaacaaaatttgcagtatagcagatttttctactgtattagcagttcagtttcctgtaattttcaacagtgtttctagtgcaaaaaacacactttgcttatgttgtcaagtggtgttaagagacaattgaatcaaatcaacaaatgatgttcaagccgaaaaaaaaaaaaaaaaaa

SEQ ID NO: 31433 - DNA, 189 bp, Glycine max
  Clone ID: PAT_MRT3847_12838C.1
tctgaatacattcactatactttatactgattgaagggattcaatatgtccttacggatcggaggccttttagtcatgcatcttgtggtctactctgacggagcatacacaaatacactacatgacgcaaatggagcacatgatgcctaatatgcacatgcaagcctataaggaggttacccatgctat

SEQ ID NO: 31434 - DNA, 651 bp, Glycine max
  Clone ID: PAT_MRT3847_128390C.1
acaacataagcaaagtgtgtttttttgcactagaaacactgttgaaaattacaggaaactgaactgctaatacagtagaaaaatctgctatactgcaaattttgttaaattcttgaaaaaccaaagctcaaatttacccccatcacattaacaatcactgatacaagatgtagaatttcataaattacagaaaataaaaaatgttgacaagaatgaaatttaaaataatattgcaataaacaaaacttgtccagaagcttgtgtgcaacactcctcatctgctgtgaatccaccacaagagattagtgaacgaattcccatcatcaaaacctgtcaactttctaatattctgcagtgctgtttccctatcataaattccttgcaaggcataggtcattcccttccacccttgactacttaaaaagggcactgtccattccactagctccttcacataatcagcatcagagaacaatgtctcagtaataggcaacaagggtagcacttggattccaagcctacactctctacactcagcactggcccaccatagcttactatccctcttgttagcccacaaaatccccactatcctgttatcttttgcaaattcttcttcatacaagttgtcttctgctttcacctcgagcc

SEQ ID NO: 31435 - DNA, 684 bp, Glycine max
  Clone ID: PAT_MRT3847_128391C.1
gtccaagtgaggctgtgaatgcatactattcagcagcattggtgggtcttgcatatggtgactcaagtcttgttgacactgggtcaacgctagtggcattggaaattctagccgcacaaacttggtggcatgtgaaagtggaagacaacttgtatgaagaggaatttgctaaagataacaagatagtgggggttttgtgggctaacaagagggatagtaagctatggtgggccagtgctgagtgtagggagtgtaggcttggcatccaagtgctacccttattgcctattactgagacattgttctctgatgctgattatgtgaaggagctagtggaatggacagtgccctttttaagtagtcaagggtggaaggggatgacctatgccctgcaaggaatttatgataaagaaacagcattggaaaatataagaaagttgaaaggttttgatgatgggaactctttgagtaatctcttgtggtggattcacagcagatgaagtttctggactaaataaatttagccaagtccaaggaatgtatgatgtttcaatttgactaattatcaatgttttaactttgcagtaatttatgaaattctgtatctcatatatcagttatgtgaaattgtgttttgggatttttcaagaatttaataaaatttgtagtttaccatattaaacc

SEQ ID NO: 31436 - DNA, 232 bp, Glycine max
  Clone ID: PAT_MRT3847_128392C.1
gacactcaattttccttaccttttttcacctagttttattgtggtcttgctattatactgcgtccttgcttgcttgctgaattacaatattgttctgagcactactctctaatgcatctgagacacacaaaatgtgatgaatctcaaagatctatttactattgactgtggctggataacatttggagggataccatttgatatctggaatgtggtaggaaaacttgtgggg

SEQ ID NO: 31437 - DNA, 433 bp, Glycine max
  Clone ID: PAT_MRT3847_128393C.1
ggattaaaaaccatcctaaaaaaaaaaaacccatcaaaaaaacattaagccccaaaagggaatttccccaatgggcaaaaaacggacagctgggccaaaaaaacgtagagcaaacaaggaaggaaacttaagggagtaaggaaattaaaagctaaaaaaaaatctctttcggggcccaagaaagtaaaatatcagcaaaccaaaaatctacatcagcaattcccgacaaaatcttcggctatccacaaaaaatttcaagccccccaaccccccagtagctacagagtcacaaaaatagcagtgggctttccaggaaagggaggattttgatttagaaaaaaagctaggggcccagctctagccaaggaatcagcatcggctgcaaataaaatttccacatcttcaaaaccaatcggtccctggatcaattcca

SEQ ID NO: 31438 - DNA, 552 bp, Glycine max
  Clone ID: PAT_MRT3847_128394C.1
gcggaaagagaaactgaaagaacaacaacctacatacagcactgatcagcaacggggggggggggggctttctataattatatcttctttagtggggaaaggtacaagtgagactggcgatccacctagaacagaagaggaagctgagccggcaggcggggaggctgcaataatttcaggggagggagattggggcacgggaactgtgctagtagaaaataataaggcaaagattatattggatgatgcaaaaaagggagggggacgatctctgccacaggctgggggggggccaacaacagcagaggcaggacagattttctttgcactggatcataaaaaatccgaagttgctgcgggtgtggctgataataataggacatgagactaacgccgcaatggctgagaagactaagatgctttccacaagcccagaactttcgatgatacaacaagcttcatccctagaaagcaatatttgtgctgtgggcgccgggaacaaaacatgtcgatgaggatgccccaaccccaggaagcggaaaaagaacaagt

SEQ ID NO: 31439 - DNA, 206 bp, Glycine max
  Clone ID: PAT_MRT3847_128395C.1
gtgatatttcaaaatgaattccaccggctaattaaaaaaaaaaaaaaaaaaaaataatgagaaagagaaaaaatacaaaacataaacggacaaacgtataataacgtcccaccctttattcgctccccactttctttcatgtgctttctcctcattaactctgattttgtgtcacctatgtttgtttctctggctctctcttaaca

SEQ ID NO: 31440 - DNA, 324 bp, Glycine max
  Clone ID: PAT_MRT3847_128396C.1
ggattgtcaagattattaagctgctcctaaatttgtttctttttgctctcacacacgatcgaactcttagtctctttcttgagaggatattagccctatcctttgatgtataccacccacctaacattttctaaaacatgtctgaggaagaggacgatctcgacgatccaactttacgtacgcgaccatgctacgaaatcactctgctttagggactgctaaattcaattgattgttgagcacatgacaacgcagctactgcaaacaccctatcatcccataactcaatcgccttacgtattatacaagtttctgcagcttgcg

SEQ ID NO: 31441 - DNA, 474 bp, Glycine max
  Clone ID: PAT_MRT3847_128397C.1
ggaagcataaaagcaatgcatccaaattaaaaccacatggggcctgggccccatttgaacatcaaacacaacaaaaaacagaccacaagaacaagaatctgaagaaaattctaggggggttaatccttttcctggccctcaccaaactaaacacccattttttaataatccttctaaagggctggaagggcctcacgggcttaaaaaaattcacctttttccataccctcacccacgtaccaggggacaaaagcccgctgggcatacatgaaatcaaacttgggatcaagggggccaaacacttaagccacactgggggagtttgaaataatgcaaactgccctttgcaccttgggaagggcgcctccaggaacaacggggggggggtgggagttaataccacacttgaaaccaggggggcaccaatccacaaactgaaggggccttttgggcttgaggggggcaacagcagcg

SEQ ID NO: 31442 - DNA, 268 bp, Glycine max
  Clone ID: PAT_MRT3847_128398C.1
tcggagttctccccggcgggatacagtcccgttttcccttctttatcctgttttcctaaaagggtgatgttcctaatcgaacgggccttgagctctgacccctacgttctggaactcgtctaaaccctagacgactccttcccattctatccctccaccccactccctctccagaaccttcgcctctcctccttccaatcccttctcttcactccatggcccttcctactcgacgagcccttccgcttcacctacctatgcttcattc

SEQ ID NO: 31443 - DNA, 587 bp, Glycine max
  Clone ID: PAT_MRT3847_128399C.1
aaaacaaacggggcaaatattttaaaaggtacctagactaaaacccgttttaaccccaaaaaccaggggtttttttgggtttgggaacaacccctttttcaatctaagccttttgggggaaaaccctttttccgtatttttttgggggggggggggggccttttccccaaaaccaccccaaaaaaaatttttttaccctttaaaaaaaatcctttgccaaaaaaaaaacgggtttatttgagaaaaaattcccacatttttggggggggggccttatttttgggcgagctggggaatcaactgccacccagggaaaacttaaatttccggtttttccaaaattataagccttttggttttttggggatttattttgcaaataaggggtttttttccccccctcaggatgatttgtcccctgatccccggccaaatttttttgttaaaaaaaaaaattttttttttcccggcttaattccccaacctcggaattcattttctaaaagggggcccaaaatttttttttaggggccctggaaaagggctttaccctttttttaaaccccccttggttccaacggggggat

SEQ ID NO: 31444 - DNA, 442 bp, Glycine max
  unsure (1)..(442): unsure at all n locations
  Clone ID: PAT_MRT3847_12839C.1
cggggtatngttgtatnggagtagtgagatatttgtaataatgagaagagcaggactgggaaatggagcacattggggaaagngtcatgtgatggatggtaaaaagaatggaagagggaatgatgtcataattaagaattggaatggtgtgttgaaaagtggacatggaattaaagtggtgaggaggatgagttatgagatgaatgtgattgtgagtgaaatatttatgttaggaaggtaaaaatagaaaagtaaaggaagaatggaatggggaggttgataagaagatangatgtagattaagtgaaagtagatgttaaagagggagggatatgtaatttggatgaaagaaaaaaaaattatgaaggatttgaaaaaataagataaaaataaattatatgataaagattattaatggttttagttagtatgaaagtgatgt

SEQ ID NO: 31445 - DNA, 418 bp, Glycine max
  Clone ID: PAT_MRT3847_1283C.1
agaaaataattaagaaatctaaaaattaaaaaaatattataattatcgaaggagggagtataattataccttatttgccttaaaaaaaactagaggctcatgttcttttatatacattgttttgatttttacccttgggaagagaaatcatatggaaaaagtgaaagtgagatagtcagtgcacgacacaagcaggttgagagacagtttgcaggaataattgtcagtgtcatgtttatttgaaagaaaaaatttacatgatcacttgcagtctacaaattacttccaaaataaacaatagcctttttagtgatgacatgaccctcaacattaggagtcacccatttgtagaagttgttgaaagaatttgtcttttttgttgatttttttaaagtgtctcatgaaatggtatcattcg

SEQ ID NO: 31446 - DNA, 1828 bp, Glycine max
  Clone ID: PAT_MRT3847_128400C.1
ctctttcctctccccttctctatcaaacattaaagctccagcgaaaatggtcaccatattaggaccctctttctctttctctctcttttttgctcatacacagcttcgatgacacgtccctttttcatgtattcggggactctcttctgggctttcttcggtttaagccttagaagacggagattattaaaacatgggttgctttcgttgcacaggcaaatcaagcaaaaaaaccaacaacaataacattaatcacgccgagaagcacaccaatcacaacgagaaacatactgctgctgataaggtcaaagttgatttgaatgtgaatggtaaacaagaagataataatcctaagcctgatcagctatactctggacgtggagaatttgaatttaaaagaggtttccaatgaaggaaaagttaacagttaccgggcacagacattttcttttgctgagcttgcagctgcaacagggaatttcaggtcagattgctttctgggtgaaggagggtttggcaaggtttataaggggcgcatagagaaaataaaccaggttgtagcaataaagcaactagatcctcatgggcttggaggaattagtgattttgttgttgaagtggttacattgagtttggcagatcaccctcatgtaggtcagtaacctattagaggtttggaccaagatcttgctatagctgccatgtgtgttcagcaactgcgatctttgcggccccaattgcatgatgtggttacagctctaaatttccttgcatccgttggatagaatcaaggttttaaattgatgttgcagttgtggggtttgtagcaatccttaacagttgagggaaattgctgacaatgtcgctcatgtaggccgcaattgtaatcgtggagactttaaaaactttgatgttgcggccaaaatcactgtcgcatattgttttttaaaaccttggatagattagaatgtactggcaatggtattctttgtccccatggtttgtatctttttctttctttcattttgccagatcttccgcgtggtagaaaaccgattgactggaatacaagaatgaaaatagcagctggtgcagctagaggcttagagtatttgcataataaaatgaaacctcctgtcatatatcgggacctgaaatgctccaatatcctgttaggcgaaggatatcattccaagttatctgattttggcttggcgaaagtaggaccaagtggtgataaaacccatgtttcaaccagagttatgggaacatatggatattgtgccccagattatgcaatgacgggtcaattgacgttcaagtctgatatttatagctttggagttgttcttttggagatcatcacaggcaggaaggcgatcgacaatacaaaacctgctaaagaacaaaatctagttgcatgggcaaagcctttattcaaaaaccgtaaaagattctgtgagatggttgatccattgcttgaaggtcagtatccaataagaggtttgtaccaagctcttgctattgctgccatgtgtgttcaagaacagcctaatatgcggcccgaaacaactgatgtggttacagctctaaattaccttgcatcccagaaatacgatccccaagttcattcaatacaaagctgtagaaaaggtgtagcttctccaagggtgagaagtgatggtcatagacattttgttagtaatggttctgagacagacagttctggagattagaaatgtgatgtgtttttggatattcatattgtaaaatgcttagttatccaattttgcttcatataaagaagattcttctttttggctcctct

SEQ ID NO: 31447 - DNA, 756 bp, Glycine max
  Clone ID: PAT_MRT3847_128401C.1
cttggaggcatgacatataaacagcaacctagatttatcccaataggtagggtttgcttcgaacaaagccattgggctgttttgaaaatataataagtagttttattaggaaaagaatgcccaatagtcggcatgaaaagaatcttcaacaatggagtctggctgccacttttttcatagaagatagaatgagaaaattggctaggaaaagaaggaacaactgtagagggttagaattcttgcaagttgcaatggaaacaggaagatgccaatctattcccacttccccacctaggtcacctgctatgtaaccaaaacaccagagaaagaaaggagcaagaacgtgcaaaattgatgaacagtctatggagtattgagttaataggattctgtgattactgaagctcaccatggccagtcatataatcaatgttaataaattttcatatcagaagttcactcttattgtttccgggtttattgctttagaagatttgttgatgtagtaattattaattcatgagttattcaaagtactgctggagaagggagctaaacttctatccttattgccttagcttttgcagattcaactttatctgaggagacaatggaaaaaattttggctggtattttcctatctaacggtgcttattatttgttgcaacttgcatgtgttgtctgattgctctgcctgtaccagtaacactcgtgttatgtccatctcatctcagctggtgatggtgagttgatttt

SEQ ID NO: 31448 - DNA, 516 bp, Glycine max
  unsure (1)..(516): unsure at all n locations
  Clone ID: PAT_MRT3847_128402C.1
acaaaagatcatttacataaacctttcaaaaaccatcactctttcatgagatccactcaaagagggccattaatggcttcccaagcatccctatgcacaacaatcaagccctaaacacttgtataacatttccaatctattaatctactcaataaactcttgaatctagcctaatcatacaaaaatccctaaatcttctaacttagggttcaagaggaaaaaggagaaaacatacaaattaaggggataaagaaggataaaggggaagcactcattttacggttcttgaatttgagctccaagacattggatctatctatgctccacttttcatcttttcctcttcttacttcttactccttttttttttgcaccttatctttatcttcttttctttcttttgccttttctctctaactctccattttcctccttacttgaatcatgggtatgtgtgtgacttagtggtccttaacctaccttaagctccttaatttgggncttgntatcttcttt

SEQ ID NO: 31449 - DNA, 368 bp, Glycine max
  Clone ID: PAT_MRT3847_128403C.1
atggcttctttatttctttatgttcaaaaaaacaagattttttagatacagaagacaaaggagaaattctggggggttttattccccaattattatactaaatactatacttggagagtaatgagtataatctttggctcagacgatgacactggtatattatatggcggagggtctaaaaacaagcaatttattttgggccgttatgactttggtaggttcattggagctattgttcgttggagattccaggtatgttggcatggatatgatctttatttctgataaaattagagatttttcttttattccgaacattatttattttccatttattccacaaggggccacgatagctttttatggaa

SEQ ID NO: 31450 - DNA, 499 bp, Glycine max
  Clone ID: PAT_MRT3847_128404C.1
gtcgacgaggaaaagaggagtttcagaaaatggatccacaaaaagcacaagcagaagcctcaaagagaccaccaggtcatggtgccactgaagtgcttcatcagagaaaatcacttcctttcaacttcacaacaatgactatagctggtttggttattacagctgctgtgggatacactgtcttatatgtgaagaagaagcctgaagctagtgctaaggatgtagcaaaggttactcttggagttgcgaatcctgaagagactcaccctaagagatagataatatattattagctttatcatatagtagtatacaacttttgagttcaagggcagggtcaatgactactctttgttctttttttttaatttcattttatatagtttttttctttgtgtgggttttaaattttattcatagcaggtttgtgacagtcatacaatttcacgatgctaaatgaaaccataatgccttgttctactaaatacatatgttagta

SEQ ID NO: 31451 - DNA, 881 bp, Glycine max
  Clone ID: PAT_MRT3847_128405C.1
cacgctgtgggaggcacgcggccggcggtatattcggcgtgcgaccccacgccgtcgcgccagaaaaccctcattagtatgtatgtgtggatgtgattttgcttgtcttatgagatgttgatagcgatggtgcgaacctttggatgcacccaatcaaagcccaactcattggactgagcatgcaattgcaattgcatatgcccatacacgctgtaaagggttcacaaaagtaagccagttaattatttttctccatttgatggaaacaatttgggcatgaataatatctgtccacctcaatccacctttggacttgaagtttcccagtcccaaaagaagccatcaagtggattccagttttcacctattggttctagccagcttggtagtgctcgaagtttcaggttgaatgggacttttgaagagcgtggatcccctaatgctacttttcaagcccctggaggatgtagcttacacaagaatatcctacatcaggatgatgaagcttctcgcatctgggcatccctgacttcaaattcccaaggatatgattttcccaaaaaggttgtttcttctcagcatcctagtagtagtgtggacataacttcacaccaatctggtgcatttcaaaagcaaaacatgaagagggatattgatctaaactacatgaatctgaatgctgctggactagaaaagcttagtaggaatacaggttctgaaaccttcaacaggatgaatggagaatattcatttccttgcaaacatagtggaatggagcctcatcaaaatttgagggggatctcttgatttgtattctaatgaaacaataccagccatgcatttactcagccttatggatgcaggcatgcagtcccgtacag

SEQ ID NO: 31452 - DNA, 354 bp, Glycine max
  unsure (1)..(354): unsure at all n locations
  Clone ID: PAT_MRT3847_128406C.1
gnnggaagctnnccagnnnnncaaccacaccgaggggcgncngggcactaannnagaggacagagcgaaaccgnagccanaagcaaaacacaagacaanacagancgaaannnncagacnccacacncccnnnanncnncaccnccaaggggccggaaaggaancgaaancgggaacgaaannccgaggacgccncggggaaaanagcgaaaaaaaaggggggaaaggaggnanannnannaannnagnngggnanannnaacaanggccncgaccnaanccaaaaaaaaaaaacccncnccgaaanncagcnnncccaaacgaaaacganaaccgaacaccgacgnggaaaac

SEQ ID NO: 31453 - DNA, 450 bp, Glycine max
  Clone ID: PAT_MRT3847_128407C.1
gtcccccccaaaaaaacggatttttgaaatttacccttcgaatttccccccaaacaacaggggaaaggatttatatttttcctaaacccttccaacttaaatcactccttgttaagcccctaaacccaaacaaagggttaagggtataataaaacacgcacaaatctttgaaatgctggaaactaaataaaattttgaggttaatcgcaaattacaaacttaactccatagtgctttttaaagtaggggggggcttaaccagactcattggggtccctcacttctagatggaaaaagccctttgcagcatccttaaatagagggccggacatccttgttccctggttaaccttaaaaatttggaaacctgaaattttgaaaatttggacatcctaaagggctggaggcctatataaatgccccaaacgtgtctgcccattctttttgcct

SEQ ID NO: 31454 - DNA, 1040 bp, Glycine max
  unsure (1)..(1040): unsure at all n locations
  Clone ID: PAT_MRT3847_128408C.1
tcggtgtagagttcacccccacctccaccacctccgccgccgttgcctgcggaggaggcgaggacagtgtcgggtaagaagaaaagagggagtgctactaaagaatttttgatatctttaagagggaagaagaagaaacaaagacaaagaagcgttgaaaattttgatatcattctaggttctgaatcattattttcacaaccccctccaccaccgccactgccaccacctaaggtttttcagaacttgttttctttgaagaaagggaaacacaaaaaccgtcacattgcttctgtggcaacaacaacaacaagcgtatcaaacaagagggatcatggttcttcctctaggttgcaagataatgtgacgatggctggcaatgagtcaccattaaaccctattcctcctccgccaccactgccgccgttcaagttgccggggtggaagttccgggtgcagggtgactttgttagggtagacagcatgggtagttcacgtagtggatcacctgatgatttggatgaagttagtgtggacacaccgacaactagtactcatgatgaaacaagccaagtcaatagtccctttgccaaagacagtgaagattctgcaagtgtgagtgcaccctcattgttctgtcctagccctgatgttgataccaaggctcacaacttcattgagagcttcagggctggtttgaggatggccaagatgaacttcatggaggaggattgggaggtccaatcttgccccttcaccaaaccatgaatggaactagctagaccaagttggagttacaaaggagatgctttgcttagtttatctaaactttttttttttaaaacagtttttatgagagttaattgttcacacacatacatagggtttaaattcatatagaggaatgggaggagtggttcttgtgtaagagaattctgactagtagttgttggaatgctcttttttttttgggtggagttggtttatgcatgcgacttgtgtaagattttcactgtgatgccnagcttttgtacaaatgt

SEQ ID NO: 31455 - DNA, 473 bp, Glycine max
  Clone ID: PAT_MRT3847_128409C.1
ggctcggacggctgcgagaagacgacagaaggggacttccaatgatcacaattcacaacaacactcactcaccttaatcaaacaaaaccacacactccactcccaacaacaacaatggtgggattctacgacctctccgacaccgacaacgactccgccgtcgaagaaataatctcgcaggcccaagacgcagtcgttctggaccaagtctccgccatcaactgctccgccttcactgacgactcccttctcccctcccaccttgaaacccgtttccgcaacctcaaatccttccctcccaccaaacccaaacccaacaccatcgccaaagctcgcaccttttcttccaatctctcttcagcaaacccccaaagtcccaatttttcaccacccaaacagaacccagattctgggtacacctcgtcgcacgagaaaaagagtttcagagaaaaaactaaagacgggtctctttc

SEQ ID NO: 31456 - DNA, 508 bp, Glycine max
  Clone ID: PAT_MRT3847_12840C.1
ttttttttttttttttttttttttttttttttttttttttttttttttttttttttttttttttttttttggaagggaaacccaaatttttttaaacccaaaaaaaaaaaattagtttttttttgggaaaaaaccaaacaaaaaatttaacaacggcagggcggaaaaaattttgggggcaaaggaacggcttattttttaaaacaaggcccaaaagtccgaagggatttctacaaaacccccgggggggtttaaaaacaaacgtacttttttggaaaaaaaaaggggaaaaagttctaagcccaaaatttttataggacccggccaaatcattttagggggttaaaattggagaaatggttttggaaatggaaaaaggaaaaaaaccggcctttataaaattgggggaaagttaaaaaaaaggttttctaaaaaaagtctcgggctaaaaaaaggactttggctaaagggaaaggttaaacaatgggaaagggttaaggttggggtt

SEQ ID NO: 31457 - DNA, 307 bp, Glycine max
  Clone ID: PAT_MRT3847_128410C.1
cgcaagagccttttgttgctcttacaagtgaggaggaagatgaggttgaatgtgccttttcttccaactggaggaaaatgttcatatgtataagaagttgcttgaggatgttgggaggagaagtggcacgcttcacaggctgaattttgagattgatttgaatgagaagcgcacggaacattataatttgttgcgggcgaagaaggaattggttgaggaacaggaaatgccgcaagagccttttgttgcgcttacaagtgaggaggaacataaggttgaaagtgtcttttcttccaaatgggggagg

SEQ ID NO: 31458 - DNA, 214 bp, Glycine max
  Clone ID: PAT_MRT3847_128411C.1
ataacgtagatggacgaagaactctccactctgggctatgaacacaaacccctcacatacaccgatcgatgggcaccatacggctaccatgctaatgagctcaaccctatcagacacgaattatccccactggtatgatatcactgccgacaggagtaggcagagctggaaagcaccgcagcactacacatttaatatactaaccgccttacta

SEQ ID NO: 31459 - DNA, 329 bp, Glycine max
  Clone ID: PAT_MRT3847_128412C.1
ggaaaaataatctttttttttgcaaaaagtttttcttttaaggggctgacaaaaataaacgattttttttttaagctaaagtcccaaactaaacgcctgccttatagccctgggacttttgaaggggtaaaaataaaactcttaatccccccctggctttgccatttttttaaagcgccccttaaaaaacataattagtaattaacccccccccttcttggaagggactgaattgataatggggcccaaccccggaccctttaatgaagccccccccccacagaaatccctctatttttttttggttttgaagctcaaaactggggggt

SEQ ID NO: 31460 - DNA, 1773 bp, Glycine max
  Clone ID: PAT_MRT3847_128413C.1
cacgcgtccgggtttttgcgccgcgccttattacaccgtcgtccgaaagcgtcgttgccgtgaaaccctagaaagaaacgacgacgtaaatggaggtggagcccgtggagccgcacatcaacctcctcctcgcaagtagagtcgctgaagaagctaagcttcaagtctctgaagcgcgctctcgatctcttctctcccatccacggacacctcgctactcccgatgccgaaagcaagaaaatacgcactagccacaaggtgagcgtggagtatggtggaatcaaaagcactgcctctgccacccaggatccagggtcctctaacactctggctcttccaggtcccggagattccaaggattctcagaaaggaggaccccaaaatgccttggttgttggtccaactatcccatccacaacaccgaatgatactggttttcagaacaaaagtacagcggttgtttcaacctctggttcatctgaaagaaatttatcaacatctgctttgatggaaagaatgccaagtaaatggccacgcgtccggcaagtggagtattgaagctcacattaacaggattgaacaagttagaggtcttgctgttagcaacagacatacttacatgttctctgctggtgatgataaacaagttaaatgttgggaccttgaacagaataaggttattagatcttatcatggtcatctgagtggtgtttattgcttggctcttcatcccacaattgacgttttactaaccggaggacgtgattctgtctgccgggtttgggatatacgaagtaaaatgcagattcatgctctttcaggacatgataacactgtctgctctgtgtttacgcggccgacggatccccaagttgttacgggttctcatgacactaccatcaagatgtgggaccttagatatggtaaaacaatgtcaactcttacaaaccataaaaaatctgttcgagcaatccagcatcccaaagagcaagcttttgcatctgcttcagctgacaataaaagttcttccaaaaggagaatttttgcacaacatgctctctcaacagaaaactatcatcaatgcaatggctgtcaatgaggagggtgtgatggttactggaggtgacaatggcagcatgtggttctgggattggaagagtggtcataatttccagcaatcccaaacaattgtacagcctggttccctggatagtgaagctggtatttatgcttgtacctatgatcttactggctcgaggcttataacctgcgaggctgacaagacgataaaaatgtggaaagaagacgagagtgccactccagaaacccatccccttaacttcaggcctcctaaagacatccgtcgattctagacatgctcctcatatatctcaggctatttattctgccaatacacagagtggatgtgctataatctggagggcttggtgtaaatttacgtgttgggagattcacagttctcttttaacaggcttttatcgtcatttttgtatcattggattgattttaagaatattcctacatagatccgtccgtatttctatagctttcctacaaggcgtcttccttgtagaattgaatagaatgatgcattttagcttttggagaagttaaaagttaaagtatataaattgattttaatttattaaagaagtttgatttgttttattattttgttttcttataggtatttattgaaaaacttgtctaaattgagcattaatgtcccagttgacttgatttttttaaaaa

SEQ ID NO: 31461 - DNA, 628 bp, Glycine max
  Clone ID: PAT_MRT3847_128414C.1
cacccgtccgtccggctagcgggtgaaggtttctccgccgcgccttatcacgccgtccgaaagcgtcgttgctgcgaaaccctagacagaagcgacgccgtagatggaggtggagcccgtggagccacagtcgctaaagaagctaagcttcaagtctctgaagcgcgctctcgatctcttctctcccattcacggacacctcgctcctcccgatgccgaaagcaagaaaatccgcactagccacaaggtgagcgtggagtatggcggaatcaaaagcactgctaatcaacctcctcatcaagttagttctgccacacaggatccagggccctctaacactcttgctcttccaggtccaggagattccaaggattctcagaaaggaggaccccaaaatgccttggttgttggtccaactatgccatccacaacaccgaatgatactggctttcagagcaaaagacagcggttgtttcagcctctggttcatctgaaagaaatttatcaacatctgctttgatggaaagaatgccaagtaaatggccacgtcctgtatggcatgcaccatggaagaactacagggtcatcagcggccacttaggatggttgagaactggttgcagttgat

SEQ ID NO: 31462 - DNA, 2181 bp, Glycine max
  Clone ID: PAT_MRT3847_128415C.1
aaaaaaatcaagtcaactgggacattaatgctcaatttagacaagtttttcaataaatacctataagaaaacaaaataataaaacaaatcaaacttctttaataaattaaaatcaatttatatactttaacttttaacttctccaaaagctaaaatgcatcattctattcaattctacattttttttattttagggaaatgcaaagctattgagacacacgaactatgtaggaataatcttacaagcaatccaatgatgcacacagaagtgttacacactctttaacacatactttctgacaccacactctcctactagttgaaaattatcagaaaatacaaaataaggaggttcgttaaatatgtagcatccaccaatttgtgaaaattttcaatcaataagaaagattgtgttcaaaagagtatttgagagtattttcctaacatttctcgtgatacaaaaatgatgataaaagcctgctaagaagagaactgtgaatctcccaacaagtaaatttacaccaagccctccagatagcacatacccactctgtattagcagaataagttgcctgagataaatgaggagcatgtctagaatcgacggatgtctttaggaggcctgaagttaaggggatgggtttctggagtggcactctcatcttctttccacatttttatcgtcttgtcagcttcgcaggttatgagcctcgaaccagtaagatcataggtacaagcataaataccagcttcactgtccaatgaaccaggctggacaattgtttgggattgctggaaattgtgaccactcttccaatcccagaaccacatgctgccattgtcgcctccagtaaccatcacaccctcctcattgacagccattgcattgatgatagttttctgttgagagagcatattgtggcaaaattctccttttggaagggtgaactttttaatattgtcagctgaagcagatgcaaaagcttgctctttgggatgctgggccattgctcgaacagattttttatggtttgtaagagttgacattgttttaccatatctaaggtcccacatcttgatggtagtgtcatgagaacctgtaacaacttggggatccgttggccgcgtaaacacagaacagacagtgttatcatgacctgaaagagcatgaatctgcattttacttcgtatatcccaaacccggcagacagaatcacgtcctccgtttagtaaaacgtcaattgtgggatgaagagccaagcaatatacaccactcagatgaccatgataaggcctaataaccttattctgttcaagatcccaacatttaacttgtttatcgtcaccagcagagaacatgtaagtatgtctgttgctaacagcaagacctctaacttgttcaatgtggcctgttaatgtgagcttcaatactccacttgccaagtcccatatcttgatagttcgatctgcagaaccagtacaaaaccatgtgttactgggatcaactgcaacagatctcacccatcccaagtgaccgctgatgaccctgtagttcttccatggtgcgtgccatacaggacgtggccatttacttggcattctttccatcaaagcagatgttgataaatttctttcagatgaaccagaggctgaaacaaccgctgtacttttgttctgaaaaccagtatcattcggtgttgtggatgggatagttggaccaacaaccaaggcattttggggtcctcctttctgagaatccttggaatctccgggacctggaagagccagagtgttagaggaccctggatcctgggtggcagaactaacttgacgaggaggaggttgattggcagtgcttttgattccaccatactccacgctcaccttgtggctagtgcgtattttcttgctttcggcatcgggagtagcgaggtgtccgtggatgggagagaagagatcgagagcgcgcttcagagacttgaagcttagcttcttcagcgactgcggctccacgggctccacctccatttacgtcgtcgtttctttctagggtttcacggcaacgacgctttcggtcgacggtgtgatataagtctcggcggacagtctgataacacgcgcgcggcgcaaaaaccttcacccgctagagcagacctcaccctctttaacactatattcttc

SEQ ID NO: 31463 - DNA, 375 bp, Glycine max
  Clone ID: PAT_MRT3847_128416C.1
gcccattaaagaaacatgagaccattaaaaaccatgcgggaacgtctaataccacccatattaaacaaaaaataaataatcacgatctttttatttatacaaaccaaatcactatttgtctattatccaccgaccatgatcgtgtacctatcaaccttattgcaataattactaatgattttcaaccaggctctcctacacacacaaaaaatagattcaactaatgtaccatatctgcgctggttttacaacaaagccttaccaaatgcatccattttattatatttctcacaccatcctgatagattaagaaattcctttatgtcaacgttgaatctcttaatagctgtatcaacactaggtgctaaaaacaaa

SEQ ID NO: 31464 - DNA, 239 bp, Glycine max
  Clone ID: PAT_MRT3847_128417C.1
cgatcaagaccttgactcctttccttatcaaaacacaatctccttttgaagcaaagaaatcagatatggggcatacacaatccaaaaaataactattggtagcaatcaataaaaactgcgaccaaaaacatgctaaggatgaaaatctaaagaatggcagagactagaccaacacgatgttaaccctggaaaaaaagaaattatgtcatgacttaacggggcaacaatgtaacaggaga

SEQ ID NO: 31465 - DNA, 456 bp, Glycine max
  Clone ID: PAT_MRT3847_128418C.1
ggatcgagtgagagagtgtgcgcattcacattggacggacatcacgatagacgtgaggaggcgtgtcacctgccaaactcctatagaaccattggtgaccaaggcgatatagctcacaactgctcgaccctccatactttctttaagtatggtgttgtcccaagggggtattgctccgactctggcggcggtcctattgatgacaggatccaccctactctacctcctgagccgtttctcaaccgaggcggaggaaactgccgctcaagaagccgtttttggactatagagcgtggcgaaactgatgacacatctctcccgaaggcaagcccaagcccaagacccaccatccacttgacatctacaatatctctagtgacgacaccctcatcgacgtggactgcgaagcccccgctgacgtggcagtctccaagttccaaaatgaaatttgccttc

SEQ ID NO: 31466 - DNA, 546 bp, Glycine max
  Clone ID: PAT_MRT3847_128419C.1
aaccgggccgtttggtggaccggaccaaatccagggctaggaccgtaccgtaaagataacggcgccatttttcagcgtaattggtagaaattccaacttcgtctcttctctcctaaatctaagacctaataaagattcgttcttagcacttgggtatgtccgattctgatgtcacacagtcaaaaatttatgtcaccgtgacacgaattgttgatattcaacactgttctgcatatatatcctatggagtaaaatttgtatattatgaaggcaacattttgaagctgaattattgttggtccgaaaggtactgtgacatatgcgtttggagaaattagtgcagatcaaagtaattggtgggtggtgcgggatcagttcttggcatcacagtgcggactacggattcctcgacatcaggttctgcttgtgaacgtgatgtgtgtattttttttttcttttcatttctactttaactacgctccttctattctattaggatctcccacgtatacaacgaggaatatgtatgagaaagctatgccatga

SEQ ID NO: 31467 - DNA, 387 bp, Glycine max
  Clone ID: PAT_MRT3847_12841C.1
agaacgctctccctcaccgtccagatcgtaatcaagagaataggagcgagttttgtttttctttgcagcctaaggcatggcgcctctgatcctggtggtgtaaaatccaatatatattcttacaagacacttattgcggcggagtatgtcgactgtccaagttgactatgccccaaattttgtgatgggggtcttctaataaactcctgaatttcttaagatcaatcctattggcaaggttcctgtgttgaaatccatctttgggccattttttgatagcaattgtcattgctatctttgataccttacctttatggtgttgctactttgtagggattctttgcggttttgaatattagctccattggatcaattgtgttggttttt

SEQ ID NO: 31468 - DNA, 805 bp, Glycine max
  unsure (1)..(805): unsure at all n locations
  Clone ID: PAT_MRT3847_128420C.1
ttacgaattcgagctctgtacccggggatcctctagagtcgacctgcagcaaggtatgttggaaaacacatagatagaacattgaggtgcaaacagagggtggtgcacctgggttatttcgattgatgtagggaaaagcctgtctcatgccaaaaaaagggggttgaatcacaaaaatctccctaaaagaatgggtgggcaatggaaaaaatgggtagacaaaacagggttttgaccctgttcagagctacagctgctataggtgtgatattgtctacaaaatacagacttgaaagatgtcagaatccactttgcgctgtatagccacaagcgcatgaagtgcaagattagctgccatcaactactaaagtcattattaagaaaattagtcattaccgtttcagaatcttctttctgctaaaagaacttcaggtattttacaatatatatatatatatatatatatatatatatatcttacatagactgatatacataatacatgaaaacacctcaaatatcttacacatggtacagcctttntgacaattgttacacggaattttatcatttcaaacttctcattattactatgccaaaaataagatttaaatttaactattttcttaccattaaacatgtcgactccaaagatagaagagcaaactgccaaacttgcaccacatttattacttacatacaataatttaacaaaaccaacacatccctaatgacagcaaatcttgaattgaaaatattaatgaaaattcactcaaaatgagggaatcattggattcaatgataa

SEQ ID NO: 31469 - DNA, 652 bp, Glycine max
  Clone ID: PAT_MRT3847_128421C.1
agtaagttacatccgaacaatctctgtcattaaccaaatttgctattatatccaacggcataaaaatctttttgcactgtgcaagacctgagatggttttgctggctagaatccgtcgagaaccattatcaaaagtgacccataaaaaaaacccaacttaatggtgagtcagggtaatcgtccatgcagaaaataaagtactaaaaaaaacagaagcccatgtattactgttctccaaagttaaccaaaaaaaaaatcaccaagtgcttccaagtacagtgtaaatgctatcactctatattagccaattgacagtaatgtttccaagccatgtgaacaatgggaactgagccaaagcaatgaggagcaagagatagtggtgtttgcttgaatcataactcctaacttctgcaaaaaggactctcttcattgttttaaccaagtacactgccatacataagcaggtccacagcatcagaaagtagtaggagtaactccatattattcttccagaaacagccaaacacaagccaggaaaagtgtacccggcgtacgctataatgtccaatagaggtgcttccccactgcctaatgaaagtaaagtaactttaagcagtgctgtttgcataaaccaaccaaccaatcccttgat

SEQ ID NO: 31470 - DNA, 1045 bp, Glycine max
  Clone ID: PAT_MRT3847_128422C.1
cagatcacacgtgcctaaaaattggttaatgatgtgctacgcttaccccaaaaaacatagaaaaagagaaaaggagtgtgcttgtatgtcggtttcttagtttgagagaagagggtgggggcaggaattgtgttccttcttctcttttgaccttacagtggatatcatattcatatggtagcttaaagccctaggtatagatattttgattttgactctgacgctgggtttcataaacaatttagaattaatgcgaacatcctataatcttgttctctttcgctctcgcctccgccgctctcaccatttccaagcttatcggtccctctccgtcgcattcctcaaaccagaccaccatccaccagctatcattccctcacattcactgttccttcttcacggcttcaatgctcatcatcgcagtttctttaccagggcgaagccagcaaccaacattgaattcaacgatcgccacagtcagcgagctgttaaaactgccttgtggtgtaactttcttgttttttcactcaagtttggagtatggttagcttcctctagtcatgttatgttagctgaagtcgtaggctccgttgccgattttgcaaaccaggcgctacttgcttatggtttatctagctcgaggcgtgcaccagatgctattcatccctatggctattccaaggaaagatttgtttggtccttgatatctgctgttgggatcttttgtcttggttctggtgccaccgttgttaatggagtacagaacttgtggattgcacagccccctgagaatatgcagtatgcagctttggtgatatgcggttcattcatcattgaaggtgcttctcttattgttgccatacaagctgtcaagaaaggtgcagctgcggagggaatgaaattaagagactatatctggcgaggccatgaacctacatctgttgctgtgatgaccgaggatggtgcttgagtcactggtctttgtatttgttgggcatcattggttgcagtgaaacgtactggaaaatgccatttatgatcccat

SEQ ID NO: 31471 - DNA, 834 bp, Glycine max
  unsure (1)..(834): unsure at all n locations
  Clone ID: PAT_MRT3847_128423C.1
ggagatagcatttgcactggaggtatcaaacagctggcatgttgganacagtattangggcaangtgttcctgggagaagatgacactggtgaagaatcaccaagatatcttcaagcttccctctcggcgaccttctgttgtatgtgagaattgcctgtactctctagagagagatatgcgagcaagagcctttcacattttggagccaaaaggcactgtagatatgcttatccccttcctagatgatagatgtgatggggctcctcctcttcatgtacttttgaatgataagcagagaaggattataccttttctcagtaaatggcctttccctttacctgcatatgttgtagacataggatgttttaaaattaacaccccttactcaacacaagaggttttcgttgttgatgctgttattggatatcaggatgttacttcaagttcaacttttgatggggaaaatgttactaccaatgtgcattggactggcacagtatcagactatttggttacatttgatggaggttatcagatgatactattacccggtggcatgtacatggggtgcccttgtgatgtagcaaaaagtgtggcagaatcaaaatcgttccatttggagttctgttggttggagacacctgacaagaggcaaaggcttgttcgcacgtatgatgtgcaaggcttggctgtctcatctacttattttcttgagaccaaattgtgaatcctatgttacctttttctcaagtcatccaaattgttggctcctgtaataaatactcatatttgtctttgcatccgttgattgaatatgattggttagtatattt

SEQ ID NO: 31472 - DNA, 286 bp, Glycine max
  Clone ID: PAT_MRT3847_128424C.1
ttttaaaaaagcacactggcattattcatcaaagcatcaatcaaagcacacttgcatcgcaaacagcacacgtacagtaaaaaggtgaaccaccagatcttgcacaccatacgcaaaacaccacaccccattttatatacaatctttatggagacaaagacgcagatgcctcgcctattttttcctcttcgcaagggggataagcgccgaccatacctgagctgggtgcccataaaacggccttgcttccaaggaagtggcaaaaagggctagttccaggatcaac

SEQ ID NO: 31473 - DNA, 515 bp, Glycine max
  Clone ID: PAT_MRT3847_128425C.1
cacgcgtccggccgtcgtcgctcggaacgccttcgccgcaggccattccggctacgccttcgccctcaagaacaccggcgccgccctcagtgactacgcccacggcgagacctacgacctccacgttccccccctcgaccctccctcctcctccgctgaccctccgcctccgcctccgccgcccattgacgacagcctccctccccctccgccgcctctcccggagttctcccccgcgccggctccgcttgctcgctccgtcaccatgcccgccggtgtcatgcaccaccaccaccgcagccccatccccctctccatcgccgaggaggacgaagaggaagaagcaacccccaagcaggcgaagaaaaccgccggatcgccgccggagatgaagacaccgccgccgccgcctccggagtcgaagggcatggcttgggattacttcttcatggtggagaacatgcctggaccttctctaagtgctgaagatgataatgataggcatattcatgatg

SEQ ID NO: 31474 - DNA, 1500 bp, Glycine max
  Clone ID: PAT_MRT3847_128426C.1
ttagagatgatcatcggcataacagaattttcataaaataaaatggtatcgaaattaagtatgcttttgctttgcctaaaaaaaagtccaatgttggggagggaagaatagaaatacaaaaggaacaaatttcagtgtttaaacacctttttttctatttcccatcgtattccgtagttctttgcttctcaagagttactttacacgctgcagtgtcctaaattatgcaaaagaatctcaagttatgatttagacttgtgggggttggaaatactttcttccttatccaataaccattattttggcactagaatatacatgaattatatagtctcacttttgaaggcaaccaagggagcttcttgctacaacctcactatttccttcataagagcaacaaaaaagattgactacagaattagtgcccatttgttgttttcacagccaaattgttatctgtcctattttgatgggctgtctgcctgtgattaatatctttcctgagacattgccatagtgcatcataatgaagaagaccaacaattctcctcttcatttctctactgtgatctacaccacgtttaaccactggtaattgcttaatgtccttggcctccatcaactctttggccatagccaaactagtatttggatagcaggttaagattcctcgctctcgtccacgatagctcatccctcgagtacaaacagaggaaacaaggcatgtgtttgcatccacaatccctgaatcgccattcgaagtgtcattagacttctgggacagacaccttttaacgtcaccatctgtcaatattccttctaccatcattggcttgtctccagttatcatcattatcatctcccgcatgtgcatgcggagaatatcctcttgctgatttacttgaatcaggtgtctcactctccttcacctggtttgtcactgagggtacccatattgccaatccaacagctcccatgagtggaagcagtatcctataatcttttgtcagctcaaaaagaagtagaactgatgtcaaaggaacagaacaagcagatgctaatgtagcagccattccaaccagagcatatgctgggggctgagcaacagcagtatttccaggaattgctgaattaataacttcagcagaaaagcctccaaatacagcaccagctgcggcacctatcattaaactcggtgcataaagaccacctactagcccagatcccttgcaaagagccgttgcaataaccttagcagctaccaattgagccagaagccatattccaggagctgaagcactctttccagtgcgtagaatttcttccacatttgggaaaccccaatacaatattccaggatatttaagagcaatgatcccagctccaaagccacctaaagcagggcagaccacagtaggaatgccaaacttatcctgaatagtcttaaataatttggtgaaccaagcaaccaaacgagtcagggccacacttataacacca

SEQ ID NO: 31475 - DNA, 265 bp, Glycine max
  Clone ID: PAT_MRT3847_128427C.1
gttgtccgcttggcaatttttgttgtaaaaccaccgcttaagcacacttccaaaaccccaccacccacaaaaagcgaagaagcttaaccaccacccaacggtattgaagacagaatggaccgcgtgtcgttcacgacggaataattggacggggcccttatgaccccggaaaaaaatttcccggcggggtacccaaacttcctaatggcctccgccccccggattccgattttcggaaccaaaaaggtttttttcgccgtaaccg

SEQ ID NO: 31476 - DNA, 465 bp, Glycine max
  Clone ID: PAT_MRT3847_128428C.1
cccacgcgttcgcccacgcgtccggcaactcccagggggcaacgacgagcagtggaaggagaacgatgcccaagttcgaaaggagtgggaaagtaggcggaaagagttgcacagccagctggttgccgagactaagaagggccatcagctggatatgcacatcagggcgttgacggaacaactggcagcccttcaacaccaatccggcctcgcctactacaaccaggcagatcctgcggccctggaatatgaaccaccggtgtcaactcaggacaagcggcatagcgggaacagcaactctctttccaacctgaacttgtcgtctccgcccggccaattcgccattcccgaagacagcttccccgtttcgactggtttcacccgcgcaggttttggcccacggttgttcatggatatgactgctgataaccccgacgatcaccagtcagaatcggactttagatc

SEQ ID NO: 31477 - DNA, 307 bp, Glycine max
  Clone ID: PAT_MRT3847_128429C.1
aaaaaaaaaaaaaaaaaaaaaaaaaaaaaaacaaaaaagaaaaaagaacaaaaatacataacaaacccaaatgagagagaaacacggacccaggttctaaattgcgaccggcccccaaaaaatgggcccgtggtcccagaaattaatcccggaccggtatcggcaggcctaccacctttcccaatccggggccgtattataacgggggcaaaatttggccaaacctgtttcccgtgagaaattggtttccgcccggaattccccaatccatgcgaaccgtaaccataagttctaaaccctgaggggc

SEQ ID NO: 31478 - DNA, 913 bp, Glycine max
  Clone ID: PAT_MRT3847_12842C.1
gcagtccacgcttcagccactcagtcaatagacacgaattgcagtcccaggcgcagttacctgttctgttattgagtcaaagggtgtgagtgagtgtgagcaagatgggttctttggcaaagaagggactcaacaattacgtcaaacagctccagcaacaccctttgagaaccaaggtaatcactgcaggggtactatcagcgatcagcgatgttgtgtctcagaaacttactgggatacagaaaattcaactcaaacgtcttcttttcaaagtgatttttggagctgcttatcttggaccctttggacacttttttcatttaatactggataaaattttcaaaggaaagagagattcaaaaactgtggccaagaaggttctgattgaacagttgacatctaatccttggaacaatttgcttttcatgatttactacggattagttgttgaaggccaaccttgggtgaatgtgaaagctaaagttaagaaggattatctatcagtgcagtatacatcatggacggtctggcctgttgtggggtggataaatcacaaattcatgcctcttcatttccgtgttgttttccaaagcttagtagcatttttctggggagtattcttgaaccttcgagcacgatctatggcattgattaaagcctgaagcaaagaagattactaggacactgttactctttccagagtagtttgcatcagttaaaacaaatcaaaagaagatctgctgttcaaattaatgtgttggcaagatcttttagtttgtctgactatttagacatgatcaatttgtagtgctaggaatatggaagtttgtgaatgttaatttgagtatggatgaacgatgatcaaattgattttgaatgaaattaattttgaagcaatgtaattcaaaaaaaa

SEQ ID NO: 31479 - DNA, 576 bp, Glycine max
  Clone ID: PAT_MRT3847_128430C.1
ctttttttttttttttttttttttttttttttttttttttttttttttttttttttttttttttttttttttaaccacatataatcgtataaagggctcatgctatgatcatagctccacaacagctcccactatgtttgggaaaatgtattgttcatctctaaaacaaaaacatgaaattgcaaaaaattgcaagtaaaaaaaaataatttgaaatccatattcaatgaaaagaacatcagatctgtgaatcaatgacagaaacccaacatacccgggatatataaaaacctttttcctgaacatgaacccataccctagagactaaccattttactccatgaccttttcatgtactgccaataattattataactataatcaaaattaaaaaacaggtaataaaatattgcccccaccaccactaaaaaaaatgtaactaaattcacaagctttgctattttaaatttcctaaacagaaccaacaaagaccccacagaagcaagcatcacaattcccctatgaccatttcttgagaaataaatgaggccaaaaatgcttaaaaccccataaccc

SEQ ID NO: 31480 - DNA, 357 bp, Glycine max
  Clone ID: PAT_MRT3847_128431C.1
gtctttgtgaaaaacccggatggtggaagccacgcctacgccatccacccacttgacttcgtcctgagcctgaagcagcagatcgaagataggcagggccttcaaagccaggagcagcagctggagttccagggccgcgtcctggaagactggtttgactttaaatcctatggcatccaagatagtatcacgatcatcctatccaggaagagggaggggaaagccccatctgcgcccagctagcttcctctgcctcttttgctatctcatcctaaagtcagcctagtcacccctccttccggtcctcagccgggatgatcccggcagggagccagaagggaatactgccagacgctc

SEQ ID NO: 31481 - DNA, 451 bp, Glycine max
  Clone ID: PAT_MRT3847_128432C.1
gatctatgcgttcgttttttttttttttttttttttttttgtttttttttttttttttttgttttttgtgtgggatcaacaaaaaaggaagcaaaggtatacataagatgtgaagtagctaagcccccggcggcgtccatggacgaaatgggaaggcactggactcacaatgcggaagtatgaatactcgccaaaaaaaatatactcaagcatgggggcgcccgacatacagtttgaaagaaaacagatgattatgacaggtgcgtgactctacccgaaaaatagccacaaagagtcggaagagggacgacgggacaagggaaaaaaaaaggccataatcccaagggggcacccatggccgcgttgagcaaagggaacaaagggattggggaccccccccaacacctacatattgaagtaaactcaagcaaaacccccccgcccgggggac

SEQ ID NO: 31482 - DNA, 583 bp, Glycine max
  Clone ID: PAT_MRT3847_128433C.1
gggacccccaaaaaaattaaatttaaaaaaaacccaaaaaagggaattaaaaaacaaaattaaggctaaaaccccccttttttaacttaaaaagggaaattggggaaaaaaaaaaaaaaccggggggggggggtaaaaaaccccccaaaagggggggacccaaaaaaaaaatttggggaaaaaaaatccccaaaaattaaaaaaaacggggggggggccgggaaaaaaaaaaaacaaaaggggggggggcccaaattaaaagggccccattttttttttcgggggggccccaggcaacacccgccccttgaaaaggaccaggaggacctcccaaaaagggttcacggccaaaggccctatgggggtcttggggccggaaaaacccttgcccaactccaaaaatggttttaaaacacccaaaaaaaattggcttgccaggaaaggaataaattcccggcgggggtccaatttttggtgggaaaaagacccccccaaaaaaaaagagggtggaaaaaaaaaaaaaaagggcaagaaacccccccaaaattggcccatccttgggggaaaccccccccgggaaccg

SEQ ID NO: 31483 - DNA, 406 bp, Glycine max
  Clone ID: PAT_MRT3847_128434C.1
ctagccatagctgtgcattgttggaatggagaaagaggaagagagggaagaaatgtctatgtttgatgagacaacaataagagcacagagagctgcaaggagtggaaactggagattgttcaagagaatattggaggaagacaccaagcgtttgctggagccttttgacttgtttggaaacactgcaattcacattgcaactcgctccaacaatccatggctcctccatgagttgttggaagtgctacctgcaaaggacaggtggcatgccctgaggatggggaattgcgtgaacaacacccttctccatgagaccatcttttgtactagggtggagatggctggcgttgtgttcaagtttgagaaggaggcgccgccggaggacgcaccggaagaaaagaaaggg

SEQ ID NO: 31484 - DNA, 373 bp, Glycine max
  Clone ID: PAT_MRT3847_128435C.1
ctaacgagctttccgagaaaaaaggggtcccttggacatataaaaaagaaaagtgtgaacaaaatatcctcccctacataactcaatgactatggatcttaccttgtcgtgaatgtaaaaaaatgtttggggtgcccaaacatagcgaccaccttaaccgttgaaccttcccctttgggacaattaaccaaagtttttcattaaacaccccacctctgttaggcggacctgtttggtactttaattttacctccgcctttttttttcggaagggttttactttattgactagaactctacatcatatcaacatcatttttcttgaccactcttttgacaacaaactaaacccctttatcttttcctcacataa

SEQ ID NO: 31485 - DNA, 369 bp, Glycine max
  Clone ID: PAT_MRT3847_128436C.1
atgaatgattcgaggtttattccgttagcaagcatactgtagcaaatgaatggtcagtcacaattatgtttagttttcaggtatggtgaagtgctgagtttccatttctaaaagtcttgttatccattgccttgcataatttagaaattcttgcccttaatattccatttagtagttagttttagtacaatggttgcctcatggttctgtattaacttgctgtcagctgttattgaaattgctgactctgaatcttttgaacttgagacaggttgtgggtgttactggtttagttttgaccaaactggatggttctgctagaagtggctgtgtggtattctcttcattttttttctctcttaatgaata

SEQ ID NO: 31486 - DNA, 438 bp, Glycine max
  Clone ID: PAT_MRT3847_128437C.1
atcctttttttttttttttttttttttttttgtttttttttttttttttgtttttttggggaaaaggggggcaaaattttttaaagccccgaaagaaaaaacaactttgggaaggcccttacatgacttggggtcacaaaattccctcataaaaagggggagccagggccccaatttgaacgcctgttattacatttcaaaagaagggggccacctacattgttgaaaggggaaggaacccctgaagggtgcccaggggattaggaaacttaaagggcctgctttcgcctttggggcccccgaggaaaaagcttcattggggtccaaggatcccaaaaaggggggtgccccggcttataaatttctctttccctgcgggtttggaaaaaaacggatttggagggggagggtcttggggatccctggaaaataattttt

SEQ ID NO: 31487 - DNA, 360 bp, Glycine max
  Clone ID: PAT_MRT3847_128438C.1
ccacgcgtccgcccacgcgtcctgaataattttatattccttaccgatggtgtaatcaataggcattggtgatttcataatgcggctggtgactaatatggaatacaaagatacttatacatataaaaatcttctctttatatcaatggcactaaacaagagtttttacataagtgatcatcgactccagatatgataaaagtgagtttatttatcgtcatatttgtaaaaagtgtttttgtaattataccctctaattcaagatttaagaaacaatgttcccatttaaatataaatattacaattatgtttctaatggttgcttacccttttgctctttttttctaattcattattttt

SEQ ID NO: 31488 - DNA, 190 bp, Glycine max
  Clone ID: PAT_MRT3847_128439C.1
ttttataatttttttttttagtaaacatacacttggggtgattttttaaactttattggggtaaaaaaacaatccatttgttctgattaaacctagactggcctacctccctctaggtacttgggaccccaaacagactggtccctatatacacaacacacatgggatcttaatctagtctattccaaac

SEQ ID NO: 31489 - DNA, 280 bp, Glycine max
  Clone ID: PAT_MRT3847_12843C.1
tttggctttatacgaagatacaacatcctttcgtttcgctgaatatcaatatgtggggatcctaatccttactttagcaatactaatcttcctttttctggactctgttcaacgctacactactaatatccatacatacacatatgataatatcatgctatactagccattccttgctaataaattatatatcactgtatatttctagctttattctattaacttcaatcctatcttatttactttatattaaaattgcaacctatactaatacttatac

SEQ ID NO: 31490 - DNA, 117 bp, Glycine max
  Clone ID: PAT_MRT3847_128440C.1
cacactcgtgcacttagattattaccccagtgatctgcagctgctttgtgtagatagcagggactatgattgatgtttgcccagtctctgcacccagaactaattaaccacaatcta

SEQ ID NO: 31491 - DNA, 137 bp, Glycine max
  Clone ID: PAT_MRT3847_128441C.1
ccctcgcgttcgatacacgatcccttgtgtgtgtttctggctagagaacacaacacggctaatcaaataattgtcagaacagaaaataggtcagattgcagaattaaactaggaattcacaaccattacttattatg

SEQ ID NO: 31492 - DNA, 224 bp, Glycine max
  Clone ID: PAT_MRT3847_128442C.1
tactccttagttcatcacaaccctacttcatctatgtttaacatatctatcatattcctcggattttttttccttccttcaatctactgctccaattaaatgttcctacttcactcacgctttcattttacaccactaaatttcactcttgcatacccacatcctttctcttaccattccttgtcatttttttcatctatataatctttttctctattcttttt

SEQ ID NO: 31493 - DNA, 181 bp, Glycine max
  unsure (1)..(181): unsure at all n locations
  Clone ID: PAT_MRT3847_128443C.1
cccaacccctccccaaaatagaattttctaattgcaataatnncccattaacttcttcattttcaaaacaacgcgcaaaatatcctttatttaaatttgcgtgtgctaaatcttataaaaatctgtttgaaaattcacacaataaaaacaagtattattgtaataaatctaaatccttttt

SEQ ID NO: 31494 - DNA, 387 bp, Glycine max
  Clone ID: PAT_MRT3847_128444C.1
gagcgacgctaaacggtcttttcaatgaaagggattaagctacacgacagtattcaaagtaccggacgttctataccaaattggaaaatgaaatctcttgatacaccactgatgcaacctagctcactattcgacgactacatcggtgggatgagcataggcaaagaagcagtcgggtctaaaatggagagcctcatagtaatacgatgcaaactgtgaggtgacaatggatcaatggcggaagataaccttatatatcatgaccgaaactccaggataggccactgttaaccgaaggaagccgatagcctctgaggcacaatgccggataaagggagctacattgcaatcgcaggctatagaaagcaggaactgacgggctgggtc

SEQ ID NO: 31495 - DNA, 397 bp, Glycine max
  Clone ID: PAT_MRT3847_128445C.1
gttgaatgttttaccgctggtgtctttgaatgggggctttttaatattgaatacgctagcgcataaaaaacatgaaggacagagttgagatcaatatgctgtcagatatgtcaggtggatatgcctatgtttagaaggttggatgggtaaaatattgggaaatttgctgtaacggttgaatatctgcatttgaatgctgaggtcatgtcaattgttgatgatctatctgaagatgatcaagattgtgttagattgtaggatgtggagggctgtgcttttcatggtgagctgtgggcaacgcaatattgtgttgtgcatatactatgggcttttggtaacttgtcccactataagagtttgtcgcgtgcgtgacatggtagcagatcaattggatgag

SEQ ID NO: 31496 - DNA, 297 bp, Glycine max
  Clone ID: PAT_MRT3847_128446C.1
tgactaggcaagccgcactcactcccaacctctactagagacgcttgcccttagtggtctacttctacctttccagtttaacatgcatatagctggctgagacgttcctgttaacctcacactcggtgaacgagggacaccgtgacgggttttgcaactatttttcgggtgctgctctaaaagcttgcctctagcaggaccgcaacgaaatagttaggctttatacatgcaccagggccagctcggtcatggtgttaagagaagtccctatcttggccagcgttcattagcagaaga

SEQ ID NO: 31497 - DNA, 135 bp, Glycine max
  Clone ID: PAT_MRT3847_128447C.1
aaatgaaagcctgtttcttgtgctagtctattcacatgcattgccatggctcaaccatgacctgccatgcacacctaccaaatttccttgaaatgaaaactgccatggggcactacaaccggggatcatgccaaa

SEQ ID NO: 31498 - DNA, 277 bp, Glycine max
  Clone ID: PAT_MRT3847_128448C.1
ttttcgcgttttttcccggacccagtgatgaagaggcttacaccatggcaattagtgacctcgtgtagaatgcctctacattggttgaaattgcaggttccacggatgataaacttgctcgttccaaaattttcaacatacctatggctcactatttcactattctccctatggagattacctctgcggtgcgctggacggatgtaaatattgggaggtgcattaggaaaaaacggtacacgcttctttgacaattaggaattaacccatcctgcat

SEQ ID NO: 31499 - DNA, 571 bp, Glycine max
  Clone ID: PAT_MRT3847_128449C.1
gtccttttttttttttttttttttttttttttttttttttttttttttttttatgggggaggctgggtttttcttttgggtttttctgggaatttttgtttggaaaccgggggcgggggaggatcccgttaaaaaaccggaaaaaagggagggggaccaagggggtaaccgttttctgtgtgaaagaggaatccagaaacaaggccaaaaaaaaaaaaaagggggggcaaaaggggaaaagtctggggggcaaaatgaaagaacaaactgacacttattgcgtagggctaaatggcggggttgccaaagggaaaactcaaacaacatttggtgtaaggaaccccccaacccgcgggaaaaggggaaaaccgtattggcccccgagatggataaactttcaacccccgggaagggggggttttgattggggtccaacggggggttcttattgagaaaaagaaagcgggcaaaactggtttgccctaccacccaaaaaccctaaaagaaggaggaaaacggcggcattttacatgccccgaaaagggaaaaaccggaataaaggagggaaaaa

SEQ ID NO: 31500 - DNA, 160 bp, Glycine max
  Clone ID: PAT_MRT3847_12844C.1
agcaccaaaaacagcgcatatgagtatcaaatggtttcgaacatgtaaacttaacacgttaacataaaaatccatcccgcaaaaccgaaacaagatgaaaatttgtttctagctgttaagattaataaacataacatgcacgagcgccgtttccaaccaa

SEQ ID NO: 31501 - DNA, 374 bp, Glycine max
  Clone ID: PAT_MRT3847_128450C.1
cctagggggtattcttttgccaaacttctggtctttagacaaagcgtttctggcgatctacaacttcctactgacgggatgttgtttgagggtaagcatattcctgaatctaatattagtgcaggggatgaaacatgtagttcaaatacccctaatggcacacgaggaaattctgtcttatagtgcacgtgattccacaactgcattggtgagtaaaaatagcaagcctcaagctactgcaatgcatgtggcagctatagaacttatcattgataggttctcatgtactgactgcaacatacttggtgccatgcttttggttgttactattcataccaatcctgagaatgcagtccgtatatttacggtgcgcc

SEQ ID NO: 31502 - DNA, 261 bp, Glycine max
  Clone ID: PAT_MRT3847_128451C.1
gccacgcgtacgttaatatcagatgaatatgagcgtatcacttaaagagatgatgctgctctcgcgtacttatggaatgctatcacaatactggcatgcgttcatctatccacatatgcaattgaaaacttgatggaagagctatcactctatggagcatgctcacgactagctacgatgacagctatcactgggacatgactgcacacttgtctatgtacaatgcaatgcttattatcccagcgatagtgatattgggat

SEQ ID NO: 31503 - DNA, 2109 bp, Glycine max
  Clone ID: PAT_MRT3847_128452C.1
ctcgagccgattcggctcgagtcccttgatagttaatagttctttgtgttggggagaggatgtgaggttaaaacaatgggtgtggagaagttgagcttattatcgacgacgaacctcgccgtgttagctcaagcgaacaacaaatgcagtagcaggaagcacgtgtgttggagatcatccacgacgccgtttcatctgcagcggaagccgatctcatggtctgtgttgtgcggtttcatgctatttgggttgggcctcatttctctcttgacgggccacatggtctctgatctcgaatggtactctcaccgtcgctctctctactctacaatggatgggagctatcgtgcgccaatcgatgtttggaaatcccagtattctaaatattactacggatgcagtgtaaggggacgcgcttatgctcctgctgtgcctgagtggatgtcgaatggctacttgcttattggtactagtggaggattgaaccaacaaagaactgggataacagatgctgttgttgttgcacgaattcttaatgccacactagtagtacctgagttggatcatcattcttattggaaagatgacagcgacttcatccatattttcgatgtcgattggttcatttcttatctcgcaaaagatgttactattgtcaaaagagttcctgataagttcatgcggtcaatggagaaaccaccatatacaatgcgcgtcccgaggaaatcagagcctgattattatcttgatcaagttttgcctatacttttgagacgacaggttgttcaattgacaaaatttgactacagacttgcaaataaccttgacaatgagctacagaaactacgttgccgcgttaattttcatgctttgagatttacaaaacctatacaagaacttggtcaaataattgttatgagaatgcaaaagatggcaaggcgtttcatagcagtccatttgaggttcgagccagatatgctggcattttcaggttgttattttggtgggggagaaaaagaaagacgcgagcttggtgaaatcaggaaaaggtggacaacactacctgatttgagccctgatggagaacggaagcgagggaaatgtcctcttactcctcatgaagtgggtctgatgctgcaggcacttggcttttcaaaagatacatatctctatgttgcgtcaggagaagtatatggaggggatgaaactatgcagcctctcagagatctttttcccaacatctatacaaaggagatgctagctgaggaagagctgaaacctttccttccattctcttcccgccttgctgctattgactacattgtttgtgatgaaagtgcacgcgtccgcccacgcgtccgcccacgcgtccgcaagattcttgcaggtcgaaggagatatatgggtcacaaaagaacaattagaccaaatgcaaagaagcttagcacgatattggcaggaaggcatcaaatggactgggatacctttgccaaaaaggttaagtcatgccagagaggattcatgggagagccagatgagatgagacctggtcgaggtgaatttcatgaatttccaagttcttgcgtgtgcaagagaccatatgtggatgaagaactcagcaaagaggtatatcgttccccaaaactcgttgcaattaaccttactgcaaaagcttattcctcctcgaatggaattagaagaggcaggacatgatgcagtagttaacttgaaccatggaggttatcgggaggggggcgaaagaaaatcagtgttatctctcgctctgttaatgccaacggaacgtcaattgaaaattgaataatatggtaatgtgtccattttcacacgattgatctttgtaaatcatcaggggaaaagttcttaggtgggtggctcagttaaggtcctaaggacgtcagtgcgttgcaaaatgtagatatatataatataatattataatatatgcttagcttagattgctttcaatcttttttcgccacaatgtcatacaaatttgagttagacattttctcctattctatcagcttaatctatttttgtcaactaattaattcagatatattaaattcattgatcaggtgcaacttc

SEQ ID NO: 31504 - DNA, 424 bp, Glycine max
  Clone ID: PAT_MRT3847_128453C.1
gtaccgtgtccggaattttccctttgtcgatctccacgcgtctcggagtttataacaaattatcaaattgatagtttcgcaagtggctgactgtaacaataagttggcgcaatgctttttaggttgatacttaaccataccaaatcctgaaaatgcagttcggtagtattttttgttgcgccctttcaaaaggcggaaggccccaattcgggtggttacaatttccgaatcccattgtgccaaattgaaccagaccatgaattcaaggtttaagtttttgagtcccactaccaatggtgattttgttcaaggaaaaaatctccaatgggtaaaagttaatgtaccatgtgctgttgttggtttgacatcaagttacactccaactccattgttggaatttggtttgcaaaaagacagagggtta

SEQ ID NO: 31505 - DNA, 1107 bp, Glycine max
  Clone ID: PAT_MRT3847_128454C.1
attccaaacccagaaagaaacgctgcctagaagacacattttcgctattttccgcctttcagagtctctcgtctctctcgggtcatccatcgtacgctaatggccgccataatttcgcgaaggttaaggttatccaccttagcctcctcactcctaaaaccctcttcttattctataaccaatttcatctccaacaaccctaaacccccaatcttcaaaccctcccaattccttccacccatcaggtttctctcaaccaacaacaaagactcctcctccactttagattccgacgaaacccaaaagcccagcccaggcccaagcccaagcccatacccgagccaaaacccaaacttcaagcaccaggagatagaaggcccaacagtggagcgcgacctctccccactcgcgaacgagacgcgcgtggttctggaaaccatgatgaagaacatgtactcgctgagccgcgtcgtggcggcgctgggcctgctccagctcactctgggcgcgtggataacctacctcaccaaatccgaacccatcgctgaggtttcgctgcagagtttgttggcgttcgcgtttccgttctcgcttgcgttcatgctgcggcgcgcgctgaagccgatgcattttttcaagaagatggaggagctagggaggttgcagatcctcacgcttgcactccaggtcgcgaagcagttgaacgtgctctttgttagggttcgtgcggtttcggtgcttagtgttgttggtgttgttgttggggtggttgttgctgtgggttccaaatggagctgattttttttagtctatgtttggtattctgttgcaaaaatcattctgtcaacagatccaaatcttgtttttgccctttggattaaaacctttacaaccaagttaaacttctatgtctttggaataatatgttgatgcaagtagaggttttggtttttgtttttgttttggaagatgttcgtgattccggtttgtattattcattggaattttgatgaaaatagggatggtaagaaaaaaaaaataaacttcattggttgagttttgactcgaaaaaaaaaaaaaagtatgactatttattatttatgtttc

SEQ ID NO: 31506 - DNA, 227 bp, Glycine max
  unsure (1)..(227): unsure at all n locations
  Clone ID: PAT_MRT3847_128455C.1
caggccaatactcctatgccagttgtctctnnnncacaggctactgtcagatcttctgaagannccgaatcctctgcatgaactggagttcgtgttttctttcgctgtggcgtttgctcaattcaataactgacattacgcctgaccctcttgatgactatgctctgcctatttgaaaatctccacacctcttttaatcgtcgtaatgatgtgtcacgtgtgtgtta

SEQ ID NO: 31507 - DNA, 256 bp, Glycine max
  Clone ID: PAT_MRT3847_128456C.1
tttattgttttttttttttttttttttgacattaattcaaggctatttatagcattgaacatacattaaagtagctagagagaatacaaactgctgttattattacacttcttatggtaggagtgtagggaataccatcttatttaaaaagccatgcttggtaaaccacttctacaagaaagcacttcaaattatagtattagtaatttttgcggtgggttttgatcatgctctgcccaaaccaagggtttgtttt

SEQ ID NO: 31508 - DNA, 351 bp, Glycine max
  Clone ID: PAT_MRT3847_128457C.1
aatacttgtttttttttttaatgctattgaaaggtcaacgcctcttcttatttatcttaggcccccaggaaaggaacatgggccatacttttgattataatacaaaggggattcacccgttattattgcggaaaaaggccccaccctcacaccatcatgcaagaaatttatgccactgtaacaccgggtgagccttggtgagactcagggatgaccaatggaccccaaaaccctttttcttaagctgaaacacttgaatggtgggagggcggccccaatgggcaagaacctctgttggaatagccctccctcatgcaaaaagcaattggggactgaaaacgcggccttttt

SEQ ID NO: 31509 - DNA, 375 bp, Glycine max
  Clone ID: PAT_MRT3847_128458C.1
ccccaaaaccaaaaaaaagattaaagggggttaaaaaaaaaaaaaaaaaaccatccccctcccaaaaatcccaaaaaagtcccccgaaaaagtttttaatttccccccaaccaatttttaccgaaaaaaaaccccccggggatagtttcaccccggaattttccccgggaagggtcccccaaaaaccaaaaccctaaaacggtgaaggcaccccccctttaaaaaaaggggggaagcccccccaaattttccccccgggctaaaacccccccaaccccagaaccccaattaaaaggacaacccttggggagaaaccccccccgcctttggaaaacccggctttcccatgccccccccgaaaggtccccggcccaa

SEQ ID NO: 31510 - DNA, 341 bp, Glycine max
  Clone ID: PAT_MRT3847_128459C.1
aagcgactagcaatgcaagtgggagccaaagaaattaccatcgacaagacccgaagccctgactgcaacatagttggcgcaacagctctggttgacacttaccacaccaatcctgaaaatgcagcccgtagcatttcagaagcgcctatcacaggcggaaggcccattcaggcggacacatccccgaacaccattgtgcagactgaaccagacacgaatccaaggttccagcttttagagcaccactaccaacggcgacactgatcaaggaaaagaccccgcaaaggccaaagctaatgcaacacgcgctgctgccggccagacaaaaagtcacaccccaa

SEQ ID NO: 31511 - DNA, 170 bp, Glycine max
  Clone ID: PAT_MRT3847_12845C.1
cttccttagcttggaattcgggttgagtgcttctaaaccatggtacatttcttacaaaacaagattattatttttatttttaagaattacaatggttccaccaaccacaaccagtattggttccggggaaggtgggaattaaaggaaaggttgttccctttccacttccg

SEQ ID NO: 31512 - DNA, 213 bp, Glycine max
  Clone ID: PAT_MRT3847_128460C.1
gggaaatcagccaaaccaattcaattaaaaccaaagcagggaccctctggaaggggaggggaaaaacaaacaacgggacaaacccacataggagtacaaggggaagcatcaaacaattggtccaccccccagaaaaattaaagggccaatccaagaaaaagccatatgctgcaaaagtcctttggctttaagattttccttgccccttaagaa

SEQ ID NO: 31513 - DNA, 369 bp, Glycine max
  Clone ID: PAT_MRT3847_128461C.1
gttgaaactaaaggatgggatgggacactgttcactctacgtaacaaatctatacgcatgatgatggaatcggtgaaaatttgggcgccacatatgttaaatctaaagaaggatgtggaggtcaagaaagattcaaaaaggctaagcctagacactactagggtgaccatacatataacgaacaagtggactaaatatacaagcattgactctcgttgctatccccaacaaaaataaaggcccttttaattaagcaaggtcaaaagagaatttccctcacatacatgcatactggtgcacggctataataagctaaattaaaaaagatagcttcgagtcaaagaatgatgaacaagcttgaaagtttgg

SEQ ID NO: 31514 - DNA, 675 bp, Glycine max
  Clone ID: PAT_MRT3847_128462C.1
attcaaggaagaggctgctatgcctgatggtgacattgcattactaaatcctgaagaagaatggccatcagacgatcctgaagatgatgattacaatccagagaggaaagaagacaaccacaactttgacacagaaggagctgatgaaaatgcatccaatgattcaaccagttgttccagtctgttgtctttgaatggcgaatgtcctccagtagatgaaggcatctgtcatgaatattattctgttaatagctgcttagattctgatgaatctggggaaatagcatgtggtcctaggcagcgtaaagctgttgactacaagaaactctatgatgaaatgtatgggaaggatgctccaccttgtgaacaaatgagtgaagatgaagattggggtcctggcaaaagaaagagaagagaaaaggagtcagatgctgtcaatactcttatgactctgcatgaaagtgagaataaacattctgataatgagaaaaatgatagaacgagagaaggttcttcaggcatacaaataagaagatcttgtttcaggattccgcttgatgcagttgagaaacttcgccaagttgttgcagagaatgagcttcctccaagatctgtgaaggacagcctttcgaaagagttgggactagatcctgaaatggtagcaaatggttcaaa

SEQ ID NO: 31515 - DNA, 310 bp, Glycine max
  Clone ID: PAT_MRT3847_128463C.1
tactgctgcgacaagacgacagaaggggggggtgggtttttttaccacttgtcgcgttaagaaaactgctactacaaacgtgacatgagcgaaagccttctttgccgtgaattcgtatcccgatcaatggcgattagcaaccaaagaaccactgtcaacagtaagcggaactggatgaaactaccagcgcgattactgactccatgggcaagtacgaagaatactatcaaacgaccaccgactctgccgcaaccgatgaggaccccactgatgaatcgggtggaagctccactgattactcgccgaccct

SEQ ID NO: 31516 - DNA, 141 bp, Glycine max
  Clone ID: PAT_MRT3847_128464C.1
ctccgacggtgcggagttccatatcgagcttagcatcctcatggatggcttgacgaccgatcccaataggtgccaccagatgaaggacagaatcgtccgtgtctccaaagaaaccaccaccagagtcaagaggctctacca

SEQ ID NO: 31517 - DNA, 436 bp, Glycine max
  Clone ID: PAT_MRT3847_128465C.1
aaaaattaaaactcttccaagtttattatactaggacaaacacaagcttacaggatgtttggataccaccaaaaatcgggggggatccaaaaaaatcacggggaatacgggaattttttaaagcatctaccagtaacttcaaaaacaacgggattttaaaatcgaatttgattgaccccaccgccatcccaaacataccattaatctcttcaaaacttatttttttggcaaacttgcacaatttcaagggaacgggacaaaaatcaggggaaagttgtttatataaaagttttcaggttcggataaactgagttcctcaaaagattggcatacacctgctaccaaaagggaattgttcaaggaaaaagatgtcgggggcgcgtgtcttcggaaaaatcaaaaaaccccaaaaacctaattcccgacctcccaaaaa

SEQ ID NO: 31518 - DNA, 219 bp, Glycine max
  Clone ID: PAT_MRT3847_128466C.1
tgaacacatgatggtagagcttgcataggagagaggtgacaacctatatacacggggcaacttatattctatttagagatacagggaggaagcagaacctgctgagatatatatacactagtctaaaagagcgggtacgacttggtacttccactggcagaggtagaatataccgctaggcttactgacaggtctggagaaaaagggtacgcaaggggc

SEQ ID NO: 31519 - DNA, 471 bp, Glycine max
  unsure (1)..(471): unsure at all n locations
  Clone ID: PAT_MRT3847_128467C.1
ttatatcgccaaaagccncagttgtatcatttttaattatatttaatgacataaacaaactaattatatgtaggaaaataattaactttaatatttaaatttttttctaaaataaatatattattatacaaaattcagattttgaaacaaatattcaacctaaaatatcggaaataaattaaataatgtaaaaaaataattaaattctataatatcattttgttaataaaaaaattaatttaatcaatattaaaaaaattagtaattaaataattttaaaagtaattaaaaatatttttatataatataatatttaattttttaaaaaaaagcacacgtaagaaagtcaggttgtccaaactcgactcccctataggaagcaaaacaggtgtagtttgagaaataattctcaaaatagtgtattttgagaatcttcatgagagagaaagtgtatattagtaaaaacaaaaa

SEQ ID NO: 31520 - DNA, 126 bp, Glycine max
  Clone ID: PAT_MRT3847_128468C.1
ccaagaaatggggcctggtagaaatatattcactgagactaggcccccgtagttggttggcccataaaacagaaggtggtctgactgtgctggatgttaggaccttgacgctcgatagcgaggaca

SEQ ID NO: 31521 - DNA, 402 bp, Glycine max
  unsure (1)..(402): unsure at all n locations
  Clone ID: PAT_MRT3847_128469C.1
gtttgattgggcctcattggtacaagtgtttttaacagacaggaacagtacagagcattggggtgcatgtaagtggacaaaatcagaaccacattcctgggaaatgatcttcccaatagaggtatgtggtcctaataatggttttgaaatgtggagttctgagtgggcatatcaaactnnanggcatttgagttnccttattgacattcccaaacagnctacagtttttgttatttttttggtaatctctcaagatttttaaattgctggtaatactcttatgccagcttatttttttttcacaggctaactgctttatcttttgaaaattgcgaattctatgctatatcatgaattattttttccttttccttttttttttttatattaataatatatctt

SEQ ID NO: 31522 - DNA, 297 bp, Glycine max
  Clone ID: PAT_MRT3847_12846C.1
gaagaaaaggtaactggtgctggtgatggcttgtcagcgaggcacacttgctctccatggtgggaagctgaccagccaagagacaaacgggatggcgtagaggactaacaaaggatgtggtacggagctaataacgatgacgagacggacacgaaagatgtggtgtagggagacaaggactgcgatattgaaagaaagatgtagatagaagaaagatgtgctatacacaagcacaatttggttgacagaaaaaccgtaataacatgatataatgagatgctgattcacatatattta

SEQ ID NO: 31523 - DNA, 996 bp, Glycine max
  Clone ID: PAT_MRT3847_128470C.1
ctgttcagtcctcttctactaattacaatgactgaaccatcatctaatgctgcaacaagaaaaaataagacagactctggttggaagtattgtcatccacttgtgaaaggggatacaaacaccattgtttgtaattactgtggaaaaatcacaaaaggaggaataacgagagccaaagaacacttgattgggaagtcgggcaacgttgcagcttgcaagaaaactcccccaaatgtagtcgaagagttgaaggaatatatggctaacaaaaaaagtgggaccacttacagtacttctggcagtggtaatgtgccaaatataagagattttgaatttggtgaaccgattggatgtgatggaagtgaagaagatgagtttgcggactcttgtaatgctgctgcaagtgcaaagacaaagtgtgggactaaaaaaggaccaatggacaaattttgtaagaatccagaaaatgcaatcaatcggagaaaaatggagatgctgaggcaaatgaacataagagagtcaatggataagaatgaagtattgaaggtgcatcaacatattgctcgcttttggtaccaagcaggtttgtcattcaacctcattaaattgaaaagctttgagaacatggttgcagccattggtcaatatgggccacatttgcccattcctagctatcatgacatcagagttccactcttgaagaaggaagttgaatatactgaaaatttgatgaaaggccatagggagcaatgggtcaagtatggttgtactattatgtccgatgcatggactgatcggaaacaaagatgcatcattaattttttgattaactctcaagctggtaccatgtttttgaagtctgttgatggctctgattttgtgaagacaggtgaaaagctttttgagttgcttgatgccattgtggaggaagttggagaagagaatgttgttcaagttgtaaccgataatgggagcaactatgtttcggacgcgtgg

SEQ ID NO: 31524 - DNA, 458 bp, Glycine max
  Clone ID: PAT_MRT3847_128471C.1
cctaacttgaagatccaggaagaaattctccctccctccctccctcctttgcaacaaaaggaataggatattagccctgctcgctgggaagggaaccaccaggccaggggattaggggactggacacattctcttttgtacactaccttggagctagatgcaacaattgcattgcctcagctggagagtacaagaagagaatgtgatgtgatccatgtgaattgactgaccagcagggtcatcacggagagagatgaggcacaagcaaaatgccagaagctaatgctggaaaaactggaactccaacagaagcaacagctagaacaacaccaatttgttcaaacacatcaaagagattccatatcacaaagtgaagaagagcagcaagaaggcttctctgaaaagcattctgcatcttctgactgtgaagaaaacagcagcatgccctctcctggtga

SEQ ID NO: 31525 - DNA, 429 bp, Glycine max
  unsure (1)..(429): unsure at all n locations
  Clone ID: PAT_MRT3847_128472C.1
ggcgtcgtttcgaggctagagagtgaaagtagtagtgtacccacaaaccccttcttctattccattttgtttggaacactgcgtaaggctgcgccaccacctccgcctccgtcgtccacggccagttgcttgcgttcctttcactttttttataattggctaagaataataatggcgtaccggcgctgcctcttgataagagggagcctcgtggatcggaggtgccatctgtctttcagttatgttctccacagcaacgaggggaagcgcgaacgcaccaatgaaaaatcatcttcaggaggggttggtgattttactcaaacaaggtcctttggaagctctcttaatggacaagatggggttcttctcgccttcccgagatagatttctttctccatgcanccggatatggtttctgccaatatatgt

SEQ ID NO: 31526 - DNA, 129 bp, Glycine max
  Clone ID: PAT_MRT3847_128473C.1
cacaaaccagagaagagagtgaataatccagcattgtctgttctctgcaacattctccctctaacctggcttaaagctttactcatactgtcttcgctttggggggcgcgcctcgcccccttctttggg

SEQ ID NO: 31527 - DNA, 2176 bp, Glycine max
  Clone ID: PAT_MRT3847_128474C.1
cgatgtacctacttcctaatatttattgttcattttcagagaagacaattaattagtacaagctacttcaaataaatttcagtgactacagtaatcaaagttaaatcccatggttccaaaaacttcctcaagtgcaagcctgtgcagttatagagatagcatgacaccaattcatgaatagagtctaagcttctctagtttccaggtacacactatataacctaccttatgacagcaaaagaaaaaaataataacagacccttttctcttctcctaacagaaataatatgaactttaccaacaccttcaaaccccagctactcacacttgatggaccggtatatgtgacgaacaaagagcagggaggcacggaatcctacgctaccgagcatgaggaagaagccatagcagatacaggccatgtaaccaaagaagaacgaagtttgcataaaaccagacatatctgatcgtgcatagtagtaatacaagcaatagccgtagatgaacaagccagttgatccaccacaaaggaaagacctccaccaccattcatgatcctcagcagcaagttggaagtatgtcaaagccacagtgatgaaagcagtgacaatcaacagaataatgaagacaatgaagagtatgctgtagatcgtataaattctgtggccccatacactggcaaaaatgtagtacagctctatgtagatggcactaaaaggaagaaatcctgccattgccatctggggaatggtactcctgtaccaaggcagaggtggaatctctcggggatattttgtagtgcggacaggtgcttggaactcagttttgctatttttaccagcaataccacccaacacaagcaatggtgaagttaccaatgtccatattaggacaatcaccacaattgtgccaaatggcagggcagcagttgcactataagcaatcgcaactgtgttaaggaaacagaacataaggaatagggggccacaaaagaggcatcctgtcagcaataagttcctaacccaattagtcccttcaagttgaatatagaaggaagtagcagtgtagccagcaatgccagatgtgagagcatatatgaccaccagtgcagtaaataaagcacctcggttatatggataaaacacaccaaccagtgcaagcataaaaatgaagattgtaagtgtgaataactgagtaccagaaccaagggctgctgaaaagaaagacttgtgctttggaaaccggaaaacatcaccatgaatgtatttccatcctgtctcctcttgatcatcagcagcttcctcatcttgagcatacttcataaagtcattcttcaatacacgcatgagaatggttgccagaaaaccagtcaaaagaagaactgttacacaggagtttatgattgagaaccagtgaatctccaagtgatgtggcaaagaagaagactgagagtatttatccattctcttctcaaaagatgtatctgtttccttccattttgcagtgtacacgaactcaacatctacatctttatcctcagtcaggtccaccacagaatgagggtccatccgggcactgatttcaatgactcgatctttgttgtaatgaatatcgaactgaatgtgcttgtaaagaaaatacttgtactcactagggtcagttttcccttccttgtcaaccgtcccaataaatccccagatcggcaagtcatcatagtacatctggaaataatagtccttcttaactgcttctcggaactgagcaacttgctcctttgtgagcttcctcttgcatacaaccttagagtctttctccttcttgaaactaagttcataaggagcactaacaaggcgatcgccatttaacacctcaccgagggcttcagtcttatctttctcatgacctgttacacagaatggcaggtcaaagtaccgatacgtttcactggggttgtgaaagggaccgactttgttggcgtaaagaggaacggagtctccgtccttgtaacgatgatcggaggcatcggatctaacgtggggggttccctgcaaagagatcagaatcgcgagaaccaaagccaaagtgctccttcccattgccgctggcgctgcactctcgttcgttcttcgcctacgcgtcgggccacgcgtccgcccacgcgtccgcggacgcgtgg

SEQ ID NO: 31528 - DNA, 245 bp, Glycine max
  Clone ID: PAT_MRT3847_128475C.1
tgtttaacagccatatatataaattttgttcaattctacacaataataagaatggtcaagggctatttcccaccggaacaagaaataaacccatttcaaaaaaataattgtggctattttttgcgcaaaacaaattttagagaactgaggtggtgccttttaatttcaagacttaatttttcaggggaatgggcaaaacctatgttggaaaaaatggatttcacagggcccccaaccaaatggga

SEQ ID NO: 31529 - DNA, 1392 bp, Glycine max
  Clone ID: PAT_MRT3847_128476C.1
tttttggatggcccaaattgattttttgtcattggggatggtctttttcttgacgtggaaggagggtaatttcactccaatgattctcttcactatcatcacatagaaacatgcattccccttgtcccatagcgggtggggttgacttgctttgcctatttcccaatccaacaaattccaaaatctacaaaactatgtgcgctctttgccaggcaagggttcacgagacttgttttttttcctaaagcaactttttcctaacgttgttgttttaatgtgaacatttttttcaggtacccaaccccagttgcggaaccagcgcgtgcaccttcaacttgacttatggtagctcctcaatagctgctaatgtggtccaagacacagttactctagccactgaccctattcctgactacacctttgggtgtgttgcaaagactactggggccagtgcaccaccacaggggctattgggcttgggccgaggcccattgtctctgttgtcccagacccaaaacctctatcatcacatagaaacatgcattcccctactgcttgcccagcttcaaatcacttaacttctttgggtcgctaagacttgggcctgtggcccagcccataaggattaagtatacccctcttctcaagaatcctagaagatcttcactctattatgtcaacttggttgcaattagggttggtcggaaagttgtcgatattcctcctgaggcgttggcgttcaatgcggccaccggagccggcaccgtctttgattctggtattaatgcctttctacctagacatttaagaagagaaaaattcaaagattaaaatgcaatttaggttataagattagtttaattacaatactttaaataattgaatttgaaatttgaaagtggtacaatttttatatgctttgagcaaagttacaatttttagtatgtgttatgagatatggtgaccggacaacattcatacatagcactcgcgggcagcgtcacgtgcttggccatggcaccggcaccggacaatgtgaactcggtgctgaacgtgatcgccaacatgcaacagcaaaaccaccgtgtgctcttcgacgtgcccaactcaaggcttggtgttgctcgtgagctttgcacctaatacataataataagtggttcttaggttaagaattttcatgacttgtgggtacaataataaaaatcgtgtcgaattggcattgcaaagttactcctatttgggaattggtattcgatatgggttgggttttggcattgctaagagtttattgctaactatttagtagaagatagtgagctaaatgtttaaggcattccccttctgtcgtctctcgcagccgcccacgcgtccgcccacgcgtccgcaaca

SEQ ID NO: 31530 - DNA, 1766 bp, Glycine max
  Clone ID: PAT_MRT3847_128477C.1
ggcattggtcattttctgtttcttgacgtggaaggagggtaatttcactccaatgattctcttcactatcatcacatagaaacatgcattccccttgtcccatagcgggtggggttgacttgctttgcctatttcccaatccaacaaattccaaaatctacaaaactatgtgcgctctttgccaggcaagggttcacgagacttggtttttttcctaaagcaactttttcctaacgctgtcgatttaatgagaacatttttttgtacgcctccggtccggaattcccgtcgacccacgcgtccgcaaaattggctctccaccccaaaccttgctcttggctatggacactagcaatgatgctgcttggatcccttgcactgcctgtgatggctgcacttcaaccctttttgctcctgaaaagtccaccactttcaagaatgttagctgtggttctcctcaatgcaaccaggtacccaaccccagttgcggaaccagcgcgtgcaccttcaacttgacttatggtagctcctcaatagctgctaatgtggtccaagacacagttactctagccactgaccctattcctgactacacctttgggtgtgttgcaaagactactggggccagtgcaccaccacaggggctattgggcttgggccgaggcccaggctcgaggttgtcccagacccaaaacctctaccagtccacattctcctactgcttgcccagcttcaaatcacttaacttctctgggtcgctaagacttgggcctgtggcccagcccataaggattaagtatacccctcttctcaagaatcctagaagatcttcactctattatgtcaacttggttgcaattagggttggtcggaaagttgtcaatattcctcctgaggcgttggcgttcaatgcggccaccggagccggcaccgtctttgattctggcacggtgttcacccggctagttgcacccgcgtacacagcggtacgggatgagttccagcgacgagtcgccatcgcagcaaaggcaaacctgacagtgacatccctaggaggctttgacacatgctacacagtcccaatagttgcacccaccataacattcatgttctcaggcatgaacgtgaccctgccagaggacaacattctcatacacagcactgcgggcagcaccacatgcttggccatggcttcggctccagataacgtgaactcagtgctcaatgtcatagccaacatgcagcaacaaaaccaccgtgtgctctatgacgtgcccaattcaaggcttggagttgctcgtgaactttgcactaaataaaatggttaacacctaagttgtcatgatactttggtgacaacgatattgtcaaattaattggctattgcaaagtcttttgggtattgatatttcttctatattggtgagtttggatttaggataatggtaatatataataaggtttcattgctaactatatatgtggaagattttggcctattatttatgttatggaattaaatttgtgcctaaagtttaatcgtatttatagctttgtaatgggggtgtgtcacgggtttatatgtctgtagctcttttgtcttttttattcaagttgattgaattgagatgagatttcagtatttaggataatcgtgcaagttcacgggttatcatgtaataaaattcttattcttcgctctttaacgaaaaaaaaaaaaagaaaaaaagggcgcgccgcccctagaaggcatccacagtcttacg

SEQ ID NO: 31531 - DNA, 242 bp, Glycine max
  Clone ID: PAT_MRT3847_128478C.1
cgacttgactcctcttcctcggttagctccctcggtccttctctctcgcgaggctatgccaggaatgcccgcggaacagtggcagtgcacgacacgactggcggagctgtcatatcgctggtacaagccactgcatgtagcggtgctccacaagctccctcgagacccctatgatcttcgcgaggactccctcgtcgtatcctcagtgtgccgcgcttgcgtactgcagagtcctctcgctc

SEQ ID NO: 31532 - DNA, 220 bp, Glycine max
  Clone ID: PAT_MRT3847_128479C.1
gacacttactattagtaagcatggagtcctcatatatcgatgcgcatctcttcctctgcatgatctttctctcttccgctactcccattcgaggttgcggccattgtggaattttccccaactctgtgactcttgctaattatattctatggacctattgtacccgttgttaagctatcattcaccatctcctcgcactaatgttcctcccgttgttctt

SEQ ID NO: 31533 - DNA, 128 bp, Glycine max
  Clone ID: PAT_MRT3847_12847C.1
aaatgcaaaattttacaaagattacctatcgataaaatcatattgctggctaagagatacatgcaatgctgggctgaaaataatgtctgcttttcttgacaatacccttcccttgtgcttgaactctg

SEQ ID NO: 31534 - DNA, 393 bp, Glycine max
  Clone ID: PAT_MRT3847_128480C.1
gaactatatcgtacgtataccagagctatgacttcactttaattacgaatttagttacaggccggaaggagtatttgtatacctctataggtctagaaggcttgtttccttgaatggatttcttgagaatgataaaaatgccaatgtgcaaatagtctgcttgctggattactggctaacctgccaaaatccgatagagaactcactttgaagtagattgagatgaatggactctacgcaatcataagcattttgtaaactgggaaatatggtagcaaaagaaaatgctctcactgcactctatatgttcacagaccctacaaatatcgtagtacaccgagatctggtttagcgcggaatatacccttatgcttgatgattatgttaacactg

SEQ ID NO: 31535 - DNA, 360 bp, Glycine max
  Clone ID: PAT_MRT3847_128481C.1
ggggaaaaaatcacccccccccccatttttttttttttgaaaaaaaaaaggttatggggttgggacccaagggcccacccggggtggggcaagccccaagggttaatgaacacttacaaaagaccttgccaaacccaaaaaggggggggggcctttggttttgaaacttctttttcaccagttggggggcatcccaaacactggggcggggcaataaaaatttttcaaaaactctttttttttttttttttttggaaaaaaagaacctttttaaatcgccctaaaggtccccccgaggggcccccctttttataaaacaagaccgggaatgggggtacttctaactaaatataatcaggg

SEQ ID NO: 31536 - DNA, 2446 bp, Glycine max
  Clone ID: PAT_MRT3847_128482C.1
ccggtcctgcattcccggaattacccagtcgacctatgcgtttagtcagaatgagtctgcagcagctttcggctgacagcgaaggcgcgtgtatggtgtgcaagggcttgccggggcaagaagagagactgttatgcgtcacgtgtgacaccccttggcacgtgccctgcctgttcgcccctccacccactctgtccgccaccgcacgatggctatgccctgattgttccattctggactctgacgttccaccagtccccgctcccgcccgcaaccaactggtggctgcaatgctggccgttgaaaatgacgcttctctcacccaacacgacaaggcccgaaaacgtcaagagcttttgactggaaaggctcccgcagacgacgacgacgacgacgaacaagagaataaatcatccttatcggatattctctccagatctctcaactgctccatctgtatccagttaccggagagacccgtcacgagtccgtgtgggcacagtttctgtttgaagtgctttgagaaatgggttcggcaagggaagaggaattgtgccaaatgccggcagattattccggccaagatgacaagccagccccgtatcaattctgcactggtgtttgcaatacgaatggcgaggcaggcttcaaacagtagtggtagtggccgaggaggagtgaggagtgttaaccatttccttcacaatcaagatagacctgatgagccattcaccactgaacgcgcacagaggagtggtcgtgccaatgcggctagcggtaaaatattcgtgacagtgcctacggatcattttggtccaatcacggcagagaatgaccctctgcggaatcaaggtctgctggtaggtgaaagctggagagacagactcgaatgcaggcaatggggtgctcacttcgtccctgtgggtggcattgctggacaatcagaccgcggtgcacaatctgttgttctttctggtggttatgttgatgacgaggaccatggagaatggtttctctacaccggaagcggcggtaaggatcttagcggcaacaaacgcacaaacaagagtcactcttttgaccagaagtttgagaaatacaaccgtgcacttcaagttagctgtctccagggttatcccgttcgagttgtcagatctcacaaagaaaagcgatcctcatatgcccctgagactggtgtgcggtacgatggaatttatagaattgaaaagtgctggcagatagcagggttgcagggtttcaaagtttgccggtatctattcgtcaggtgtgacaatgaacctgccccttggacaagtgatgatcatggagataggcccagacccttgccggtcattcgtgagctgaaaaaggctacagtcatacatgaaaggaccgaatctccatcttgggattttgatgaggaggattctcgttggaaatggaagaaaccaccgcctcccagcagacaaaaggtacaaaatgttgaacccgtagaggtagcaagggcaaagtcaaataaagaagtaaagaaattccaacttaagtcaatcaaggaacaattgcagagagggttctcgtgcatgatatgcaaggaggttatggtttcaccagtgacaacaccgtgtgctcataacttctgcaagtcctgtttggaaggtgaatttgctggtcaggcttttgtgaaggagagaagtaagggtgggagaacacttcggtcccaaaaaaatgtgatgaaatgtccttcttgttctattgacatttctgattatcttcagaacattcaggttgacatagatttgaagagtgcaattgagtcattgaaagccaaggtcgaagaaattggagaatcggtggagtcaagtgaagatgcagatggattacaggatgatggtgctggcaaggatgaagatactgactccagaaacaaaaattctgtgcaggagttgaatggtctacctgaaggatctgatgttggtgaacttgaagataccaccaataaggagccagatccagcaatgaagtgcaatggaaagagaaagaaaggtgattatggaaatcaatcgcctgatgataaaatggaaaaaagaggtaaaaattacaaaacaacagaggaagaattgcatgaagaaaatgattcttcatcaagtcctctccatcctcaatgaaatcttcatagactgaggaattttaacaactagaccttcagcttgttggattgcaacatgattctctttattttgctgatggttcagtattagtcttagaaatgctataaggactatcattgtatcaagttatactcttttcgttttagtttactttcttagtttgttatcacccttttgtgaatgttcatggttttatgggaaatggaactatcaaagaccttaaaaaaccccaatcaaattaaagaccttttttttagtaagtaatgaaaagaaaaggg

SEQ ID NO: 31537 - DNA, 377 bp, Glycine max
  unsure (1)..(377): unsure at all n locations
  Clone ID: PAT_MRT3847_128483C.1
caccggggttaagggttttaagggctttttttgggaatcaaggtttcttactttttcccgncaccaaaaaaaaacgggtgactaggctctctacatctgttaccgaggaagcccgtaaaaaaaaaaaccgttaattttgggcaaaaccaaaaatataaccaaattttggaggccctttttttttcgattggcttcaaaaaacaaccccctgaaaaatccggaaggaaacttgaggtgatttacatggcaagacatgctgcagggtgcaattttactcttatgcggagtcagctagcgctattctccctccattctggttttgatgaacgagtagagtgccacaccaccatttgcattgtttgctccaataccagtgg

SEQ ID NO: 31538 - DNA, 214 bp, Glycine max
  Clone ID: PAT_MRT3847_128484C.1
ctaaaccatcacaaacactaacaataataataataataaatcatttgcttatacgcatccttcttcatcaattacaattaccatctaactaaattcacaaatcatttctcaaaacattcaactctactttcttcattcttctaccactcatttttatttaacaattcatcatttttcacctttaaccaatttgctaaataaatatctttcaaaa

SEQ ID NO: 31539 - DNA, 509 bp, Glycine max
  Clone ID: PAT_MRT3847_128485C.1
gtacatcaagccggacgagctcgaccgagaggaggaagaagccgagcaggaaatgagtgatgacggctgttgctcgtcagaaaacgacgaggatgtgtccgagagtgagaagcccgtgaaagacccagtgcgcgttgtattgtggaaagacagcaagggcgagaagcatcatatgccagtgcttcagagcacgattgatgccgagaatggagtaggtggcaatgagaccaccaagctctagacagacgacatcggcgatatggccaatcatatcttcagtgaggaagagcttttcattgcctcccccgtagttcttgggtttgctttctctgaaaagctctggctggagttctcactgtctggtattgaggagatccagtggaatgctgaagccttcgaatcgctcgttcttgcggataagatcaagtccaacctgaagggccttgtctcgtcgcaccggttcaatgccgctcgcacgattgacgatgttattcaaggccaggggaaag

SEQ ID NO: 31540 - DNA, 401 bp, Glycine max
  Clone ID: PAT_MRT3847_128486C.1
aaagattatattgaggttttttaatatacagatcatactcaacatgagggtcatgtctaatttcctttattgaattaaacaaacgaacaaacgaaagaaaacacaaattccacaacatgcagaggattccgcattttcagaataactggcagtagccagtggaacataaaaagctggcataaaaatattaccatcaataccaaaatcttaacaaattcccactacaatatcacatactgataacagtagagtagcgtcactggagccactacatggtatggacactttagcttaataaaatcagaactacacattataaaaccattattcaggaccacatacctttataggtaagatcaattaccaagaatagtagttccgattttgtccacttacatgca

SEQ ID NO: 31541 - DNA, 365 bp, Glycine max
  Clone ID: PAT_MRT3847_128487C.1
accacgcgttcgttcactcgtccgagatactaataccacactttactgagataaatacgacaccactgacatacggcactaacgaatcagtccgatatggcgtgcacgaagcacaccgctcgaaagacgaacgtcggcacggaggcacgtcagcagctcgctaccaaggccggtcgaatgaacaagccggagaccttcggactgaagaccgcggagctgttgaagctgagaacgcgccagatgagggacatgctaatgatccagaagatcacagagcatatgatcgtgagacatacattgcagaagctcatgacagatatgcggcaccagagcaagactgatttgcgtctccagaacactgctga

SEQ ID NO: 31542 - DNA, 1098 bp, Glycine max
  Clone ID: PAT_MRT3847_128488C.1
tcttaaaaagcagctaaggaagttgctctttcagctgtcggtggcatcaactgtgagtttcttctctttgtctgcttttcctccttcatcagcatcatcaaaatccacgtaatttccttgttaacatcttcttttgatctctccccatggtgtctaattgatcagcaagcatttttgcatatggacaaacaagcacagggaagacatacaccatgagtggcataactgaatacacagtggcagacatttttaactacatagaaaagcacaaggaaagagaattcatgttgaagttttgggcaatggagatttataatgaatctgtaagggacctccttagtccagactgtacccctctcagacttctcgatgatccagagagagggacagttgttgagagactgactgaggaaactttaggagattggaaccattttacagaacttatttctttctgtgaagctcaaaggcagataggggagacagcactgaatgaagcaagctccagatctcatcaaattctaagactgacaattgaaagttctgcacgtgaattccttggaaatgacaagtctagctctctttctgcttcagtgaattttgttgatcttgctggtagcgagcgagcatcccaaacccaggacgctggcacgaggttgaaagagggttgccacataaatcgtagtttactaactctaggaactgtcatccgcaaactgagtaaggggagaaatggacatattcctttcagagattcaaagctaacccgcatactgcagtcctcattagcaggcaatgctaaaactgcaatcatctgcaccatgagccctgcaaggagccatgtcgaacaaacaagaaacacccttttatttgcaagttgtgctaaagaagtgacaactaatgcaaaagtcaatgtagtggtgtctgataagctgttggtcaagcaactgcaaaaagagttggctagactggaaagtgagttgaaaaattcagggccaacccgccttaaatttgattctgcagcattgctgaaggaaaaagacctccaaattgagaggcttaagaaagaggtaatggatgtttcgatgcagcgggacc

SEQ ID NO: 31543 - DNA, 410 bp, Glycine max
  Clone ID: PAT_MRT3847_128489C.1
gccccgtcgtaagctccgcgtacgtctgcgtgggaattctgctcgaggaaaacgagaacttacgattgagaccagtaccacattgtctctatgctacctgtcatctgatgacttgctgggtgtcgaacgagatatacccggagctcacacacgctcgcttacgactttctggtgcctcttatgaaagccactgagtcccaaagaaggcttatgcgttctaccaatctagcacctgaggagagaagaacagatagtcgctaacacgggatatcatattcatgggcatgatcaaacttccaatccacctccaaaagatatgttccaccccacataagaaaagggcctttcttgatggctgacaaaacatgccctttaatgagtcctcagcgcatcggctatggaacttactg

SEQ ID NO: 31544 - DNA, 1373 bp, Glycine max
  Clone ID: PAT_MRT3847_12848C.1
ggctcgagctcgagccgctcgagccgattcggctaacattcaaccaacaagtagacaaaaaccccagctataatatatggttctttttatgaagctcccttttcctcctcatcttccttcctcactgctccatttcacattattattattgttttttattgtgtgtaaaacaagggcagttgtgaaacttccgccaaatgtttcagttccagcagtgttggtgtttggagattcaatcgtggacactggcaacaacaacaacaacttaggaacaacagctcggtgcaattacccaccatatggtaaagattttgagggaggcaaaccaactggtcgatttagcaacggaaaggttccatctgactttatagctgaagaattgggcattaaagagtatgtaccagcatacttggatccacatctccaacctggtgaattggccactggtgtgtgctttgcatctggtggtgcaggatacgatcctttgacatcgcaatcagcgtcggctatatctttatcgggtcaactagacttgttcaaagaatacctaggcaaattacgaggagtggttggagaagacagaacaaacttcatcttagccaacagtctttatgttgtggtatttggcagcaatgacatttccaatacttactttttgtcccgtgttagacaactgcaatatgattttcctacatacgctgattttctgctcagctcagcttctaatttcttcaaggaattatatggattaggggcacggaggatcgcagtgttcagtgcaccgccacttgggtgtttgccatctcagagaacgctggcaggaggattagaaagaaaaattgtagtcaatattaacaacgcagtacagttatataacagcaaattgtcgaaggagctggattctctcaatcacaactttcaagatagcaggatagtttacattgatgtttacaaccctctctttgacatcattataaactacaaaaaatatggctataaagtcggagacaagggttgctgtggcacgggaacaatagaggttgtgttattatgcaaccgtttcactcccttgtgtcccaacgatttagagtatgtgttttgggacagttttcatcctactgaaagcgtttatagaaggctcatagcttctcttcttggaaaatatttggataaattcttgtgagctagctgcactcatcaaattcttgtgtttatattcttaaaaatcatgtgttgtcggattttctatttttttgaattaaacttcagacttaggcaatttctgagggatggttaatttgccacaaaataaagcatgtaataaatttcaaatgttacatacactttatacatgataagcttagcctaattat

SEQ ID NO: 31545 - DNA, 400 bp, Glycine max
  Clone ID: PAT_MRT3847_128490C.1
gcttgggggggggggggaagggggggggggggggggataaaacccatacccaaaatatgtggaggatggctaaattcagtcacactagttaaagatacatagatacttaagaagaattagacataacgaggcctgaggggaggtaaaactataagacagaactaaattatatatataggggacagccacagatgccgcccaaggttgggcaaatgtagtttggttgtatggcaatcagccactaagcgcgagccaactgcaatgcctttagcgtcctggggtacatggccagtaggcggttgtgcgcgcagggggtttgtaagggtgcttacggccgggttaaatgggggcaaactggttaagcttgggcaagttcgacgttaaggtccaggacttgggg

SEQ ID NO: 31546 - DNA, 644 bp, Glycine max
  Clone ID: PAT_MRT3847_128491C.1
gatacaatacaacgattgaaagtccaagtcttggggaatttccaatttccagctccaccaagatccctcttttcctacaaacccatctctctttcatccctccaatcttcatcctgtgaaaaccgcgaacgaatcaacaaatgggtggttgcgtgttgaagctagtagattccgttctgttcctgttcttcctcctaatagcggtggtggctcctctgatcgacgctcaaacctgtcttcctctctcttacttccccgacatcctcgtccaactcaaggaacagtacaccaatgactacggcgattaccttgtcgcagaaaagccgcacttttttgtaggccttgtttggcttgagcttctcttccaatggccccttgcactcctcagcctctacgccatgctcacttccaagccttggttcaacaccacttgcttgatctatggtgtttctgtcactacctccatggttgctatattatcagaaatgatgaattccaagagggcatctgagaagctattgacaatttatgcccccttcctgcgtttgggggttctggctttgctgcgagggttgctgacgtgttcatccaaatcatcttcagctctaggcaaaagatctgcattggcaacgaaaaaacgagct

SEQ ID NO: 31547 - DNA, 269 bp, Glycine max
  Clone ID: PAT_MRT3847_128492C.1
gtgttgtcccctatttcatcttcatcatctacttctccatctgactttaaacttggtgatcacaattctaatgctcatgtcaaataggcaggtttattaaaaactcaaaggccaagcctgaaaggtggcaaagaaatcaagcagcacagatatgcatttcaaacaaggagtcatgttgatatactggatgatgggtaccggtggagaaagtatggggagaagtccgtgaaaaacaataaatttcctaggtttgtcttacttcattaatt

SEQ ID NO: 31548 - DNA, 142 bp, Glycine max
  unsure (1)..(142): unsure at all n locations
  Clone ID: PAT_MRT3847_128493C.1
gacagtagagagagtgttggtacgaaaaatgtcgaagctgatctncgnggtccttngcntattnctctnctntgnanctccntctcnccagaganaccncagatacgagngcgtcctcgtnntgnttcgatgacttcgccat

SEQ ID NO: 31549 - DNA, 211 bp, Glycine max
  unsure (1)..(211): unsure at all n locations
  Clone ID: PAT_MRT3847_128494C.1
aaccagaaaaggaaagaggcgggggaacaaaagagagcgggaaggggggnncaagaaacacccnnnggcaaanccnggcaaaaaacacccacaggggggccaaaacaaaagccgcggaccccgaaccaanccaagacnncngcaaaccaaacccaagaagnggggccancaaaacagcacaaaacaagcacnacaggcgaccaagcaagaa

SEQ ID NO: 31550 - DNA, 440 bp, Glycine max
  Clone ID: PAT_MRT3847_128495C.1
ccaaactctaaatgttatgtcttgtaatgagtgattctcttacactctgaagtataacaattttaccttataagaagcccattcaatcattagaaccaaactctaaatgttatgtcttgtaatgagtgattctcttacactctgaagtataacaattttaccttataagaagcccattattcgcttcaagattctctagaccaggtgtctgacatgcctttttgatatcttttctgttttgttgttttatttaccatcattccctgcttctatcatttttcatgtaatttggaatatttaaagttaaatggtcaattcttttttgtatcagtttttacacctttgtgaatgaaaaaagggaatctttcattatggtttggttgggcctttctctttgtttcctataatctagaggatccttatcttcttcttgggttctg

SEQ ID NO: 31551 - DNA, 580 bp, Glycine max
  Clone ID: PAT_MRT3847_128496C.1
caacaccactgagtttacgtgtccgtcgagccttggaccacacggacatgccatggcagttaagatacattggtcaaccagaatatggtgatgctaagagacccactatcatacgcagtagcatagacattggatgtagtgcttctgtggtagaattcttaacagaattagggtgccgaatggactttgaatacttagccaggggctacatgtttcggaaaggacggatgaaaataacagttgccaagattgttaaaacaaatccaaataaatcccaggacagtatgcagctaatctcagaatcctacttagttgagttaagtgtccttgctccaagaggacaggatgctattgctgaagacatgagaagctttgcagaacaattaaggccattggtaaaccttgacaaggttgattacaaaagattagcccatggccctccctaagtttttgttctttttttcaaattgcatttgaggtacttttaagtctcactatcttctgatttgctggcttttaatttctcttttgtttttccgtgtgtcagcctttttgggtttgtctaccaagtatgtaagac

SEQ ID NO: 31552 - DNA, 578 bp, Glycine max
  unsure (1)..(578): unsure at all n locations
  Clone ID: PAT_MRT3847_128497C.1
atactacggatcacggaaatttctctcgggttacgactctcaacgccgttccgtatataaaaatatataaaaannaaaaaaannnaaaaaataataataaaatataataaaaaaaaaatataaaaaaataataaaaaataaaataaataaaataaaataaataaaataaaataaaataaataaaaagaggggcggtccagtattgtgggggaatccgggggtggactttccgtggaatccaacttaatagcccttttatagggtcacttaaatttaatttaagtggcacctaattttacaattttttggactgggaaaacctgggaaaaacctggataaaccccgtttaaaccaatttaattttcttcagcttacataaaatttaaaaagcccgaaaaaatccccattagaaccattttcaaaacttttttgaaaattgggaccccctttgtgccgctcttttacccccctttaagggggggttaacccgcgggttacccgttatatttcccagcgctttagcacccctttcttgcgctttattccctttttttttcgttattttcgccggttttccc

SEQ ID NO: 31553 - DNA, 713 bp, Glycine max
  Clone ID: PAT_MRT3847_128498C.1
taccggtgggagagtttagttataggggatctaagaatggctacttttcctactcttcatggcctgcacaaccctcttcctcgatctcaattcctaggccaagatcaccctctcactcaccaattccctctcaaacaacaagtgcatcacaaaacagcaccaactcatgaagttctaatgccacgtgctgcaaagttcaacatattggaaatgatgggagggagaggactatgcaacggggaaaagggtcttcagcaagagctgaaaaggcaagttgttgttccacaatcatcaatatcatcacaagaagaagcaccaagtggtgaaaaagaggagcaagaaggtgaaggtggtgatgatgatgaaggaagtgttaaggtaccagaagatggttttgagaaggaaatgatggggctaacagggggctttcctgggggtgagaaagggttgaaaaagtttattgagaaaaaacaaccctcctacaaaagcaactaataatgttgtctccctctcattttgaaagaggccattgtgaagaatattcaaaggaaattaatgttcatttttatttgatgttatatatctgtgcccttctgatttttgacaattcaaacttggatgaggtttgttttcttaagtcttatctcccccttttctgatgagtctcagaattttgtatggagggtttaattaaatgttttcctttcaattcc

SEQ ID NO: 31554 - DNA, 1486 bp, Glycine max
  Clone ID: PAT_MRT3847_128499C.1
cgagtagttgtaggacgcacctgaattggctggggggtgtccatgatagtatgctagggtgcataatagttcagtgtctacaataccaggtgattttatcaataagttttactcatgttattgcacatacatcactatttatagtacacagttacaagtagttagtttacagcccattaactacctaactaacatatacccactaactaattgaattttatctacaacatgcactgttcagtaaaaaactacacaactaagaatcaaatgcaattacagaactgtcactaatattacaaaatactgaaaatactataattaaatgctataagtaaattcattttatcttggcaattttaattcttgataattattaccaagttgagtgagattttttgggtcgcaggtagaggacatgcttaaaagaagttttgcagaattccatgctcagaaaaaacttccagaaatgcaacagctgttgaagagaaagcttaatcagcccacaaaggctattgaatgtttaaagggtgaaccaaccattgaagaatactatgatttatatttagaagcagagacatacagcaaccagatatcagaagcaattttgcagtctcctagtgcacaacaatttctcaatactggaagagttgtaattgtaaaatcagaatcagcgcaggaccacttgcttggagtggttgtggaaactccatctccaactaataagatgtacattgtttttgtgattaaacctgacatgccatcctcagtggataatgcctcgagtagcggtaatatgcagaataaaagtggtgcattcgaccaaggttattttgtaatgccgaaatcaagacgtgttgttgtagatgaatatagtacatctgtttctgcccgcaaagggaaaggtgtcatcaccatcagattgccctattctggctctgcctgtggaatgggctatgaagtccgagaagttgacagtaaagagtttctgtgcatatgcagtagcaaaattaaaattgaccgagttgggcttcttgaagatattagcagttctgtttattcgaagactgttcagctgctcatggatttgaaatcagatggaaataagtatcctccagctttggatcctgtgaaagatctaaagttgagagatgtgaaacttgtggcaacataccataagtggactagattattggagaagatgtcccagaatcagtgccatgggtgtataaaattggaagaacatctgaaattggcaaaggagataaagaaacacaaagaagaagtctatgctcttcagtttcaaatgtcagatgaagcacttaaacagatgcctgactttcagggccggattgatgttctgaagcaaattggatgcattgatgaagacctcgttgttcaaatgaaaggccgtgttgcttgtgagatgaattctggggaggaactgatatgtactgagtgcttgtttgagaaccaaatggatgaactg

SEQ ID NO: 31555 - DNA, 267 bp, Glycine max
  unsure (1)..(267): unsure at all n locations
  Clone ID: PAT_MRT3847_12849C.1
cggcaccccggcaaaaaggccacggacgggggccacaaccgcgagcaccggcggaagaacnacgacgccggcagcggcggcggaaccncacgcaaccggaaaaggcagagcggaggcgaggacagcgacggcggagaccaaagcncaggggggggccacacagagaaggaggagaggccggagaagcaaacgggaacacagaacgccggggagaaaaaaaaggcggcggcgggggaggagaagaagaagggagaggcaccgggggaa

SEQ ID NO: 31556 - DNA, 686 bp, Glycine max
  unsure (1)..(686): unsure at all n locations
  Clone ID: PAT_MRT3847_1284C.1
tgttaacaacccgttttcttccggccacccgaatgccaaaacgtaaacgcccagaagaactctcacgttcccccatttttgggcacccttttgccttatttgggtttcgcgggtgtttctttggtttcaacttgggcaaacccaatcccctattcacccggccactgggtattcaaaccctgcatcggtagtcctttggtggcttgctattcatccttcaaacaaaaagacccttgaggttggggattgaatcacatgggattctttcttgaggtaggagacccctgtacatttaggntgcatgcaactatgacagacacctgctaacacaccangggtacagtagattaaagaggcacattgccacctttacaagtgcccacaatggatgtcaaatacaaaacccaggtcattggctgtaaatccacagtcggggaaaacagacaggacgaaagatccagaaaccaattggtgttctggaggtttgcggcttgacatatgcatgcagacaatgactcctagacaatccgtgatcatgatagatgaatgacagaaaacgaagagagacagtcacaggattacgaatagatcgaggaatatgagagagtgaagagaataatgaaaggaataaatgtagaagatacacgtacgcgaggaaatagaatgataaaatagaagataagata

SEQ ID NO: 31557 - DNA, 147 bp, Glycine max
  Clone ID: PAT_MRT3847_128500C.1
gggaatgcatggccaatctggctgtcaattccggccaggtctaaatactcggccatagaccgatagcgaacaattagcgcgagggaaagatggaaaggactttgataagagagtcagagagtgcttgaaattgtcgggggggaagcg

SEQ ID NO: 31558 - DNA, 297 bp, Glycine max
  Clone ID: PAT_MRT3847_128501C.1
ccaggcgtccgcccacgcgtccgtacggctgcgagaagacgacagaagggtatgtgttgcttaattacataatgaatgccttatgttaaatttcacttagtaatttaatttagggttggattaagtggttgaactgataaaggataaactctcataacctaggataagagacttgcttgtgaatcaagggatagcaacgtgttttaattctgatattttctaattcaattttactcgttgtttaatttacaaaaaaaaaaaaaaaaaaaaaaaaaaaaaagcggccgctctagagga

SEQ ID NO: 31559 - DNA, 381 bp, Glycine max
  Clone ID: PAT_MRT3847_128502C.1
gaaatttgggtgaaccgcgatcacaggttgccgggcgttaaaaccggagacagaagcattcgttgcttgatttcaagaatttgtcagtttcttcctacttctttgtgtacgatttgttaagggaaagaaaatcactctctgtgctggtcacagacttggagaataattgtcttttccactctcaggttatttgctgaacactctcctattcgatatagagacttcgtgtcagattgaaacttctcatgtttgtttatcagttctgtgatcaatttcaagtccaagctggagaaattttggattagtgctcccactctgctatctggcataggactcattggatcgacttttctatatctgtcctttatttcactgtattct

SEQ ID NO: 31560 - DNA, 186 bp, Glycine max
  Clone ID: PAT_MRT3847_128503C.1
cggcatgaatgcagccggaacaattcttggcattaaccttatcgaccatgcaggacgataaaaattagctcatgctagtgctgggaagtcgaattgaaacgctagccgtttcagtcttagcattgtagactaaggcatccaccggagatgtcgctggtaaattccaacaagatttcgtggctaagc

SEQ ID NO: 31561 - DNA, 262 bp, Glycine max
  Clone ID: PAT_MRT3847_128504C.1
gtctctacaccctttggcatggaactgggaaaatttgaatggcaagcatcaagtctaagcagcaagtgttaagaggaaaaaagaccaagcaagaacaagataaaacagtgtctgagcctggatcctcatcagcaccagcaccacacaagaacaacaacaacaacaacaacggaagaacagcaacggaaacgggcttttgcgggtacggtggagcatgcgcaacgacgtcgtcgaggcaggggatggtgagagcaagtggtgg

SEQ ID NO: 31562 - DNA, 617 bp, Glycine max
  unsure (1)..(617): unsure at all n locations
  Clone ID: PAT_MRT3847_128505C.1
gcgagtgtatgattgacggtttgagtggtgtgatggacgtgaggggcatctcaaagttctatgatggcaagtccaagtcattcacgagtctggttgatgctggttctaccccatatatcaaagacattgcaaaatcagagaatgcttacaccagcaggggtagaaatttgatggctttcaatcacacatgggaaaagagtcaaagctaccttttaagaagcaacagtggtggcatttcaaagaaaacgacaataagctcgagccgaagtaccgtggctctcgcttttgcaatcaactatgaaagcagcagttgttgtgcgagcgaggattcatctttaagctcaaatccgaggtcacctccacctcttccgccactccatcccccaagtacagctccgtcctctcctatgcagcataatttctcatcccggaggttcttctgcttagttgatattcaaaattgttccactgctacaacaataaagaattaaagatacatcgctactccctggaccctgnggagtaaagcagctcatccatcacagtaaactgactcattaactctaccatgttttaaccaccttaaatgatatatctcgttcatgtgctatttatct

SEQ ID NO: 31563 - DNA, 402 bp, Glycine max
  Clone ID: PAT_MRT3847_128506C.1
gtcggaatctggtttgcaaaacgacagagggttacttgtggagtcttgcggaaggatgtcttacgttgctcataacgtcaatcagccccaagagaaagatttgttggagggaaatttctcctttgatattaaatctcgctctagattgcaaaaagcttcctctacataagcacaatctgttagtggaaaaaccttcaaatatgatataattggtgctggttcacattcttgacaagattctcctgaaaaggcagatcaagtgaaacccaaaaagactgatgcctgattgagacaatgaatagatcctcaattcaatgaagttcatgctcagatggaaacaaatttgcttaaattgtctcttgatgatgctgaaactcccaaaggctgcatgttggatcttaa

SEQ ID NO: 31564 - DNA, 423 bp, Glycine max
  Clone ID: PAT_MRT3847_128507C.1
accagccataatgaatgggactttataaccagaagaaaccgagacttatctgaaatattacatttatggcttgtgataagtgttaataatatatctctggctacatatattatgaagtgtgcatttccaatgccactgattagggaggcttgataatggaccagcaaatgactctagcattggaaactagcataggaacttacatacaggcgtcttatgtctgatgtgcatctatgagaaactgctgcccgatggcgcgcggaagataggattctgcttgaacccatgatctatgaacggtaggagctgctgtatattgagttcactgttctgaaacttggatgactgatgatatgtatattcgtcatcacttctctgtaaatgttccagagtgaggacgatgtatatcaacatatataggtg

SEQ ID NO: 31565 - DNA, 353 bp, Glycine max
  Clone ID: PAT_MRT3847_128508C.1
ctcctttactgctatctgtatctctctctctctatgggggagcttgcttgaagcaatggccaaagccttggcatcagagctgctgttcctactagcagctgcaagtaatgtgcatgctgaacagcttgaacttgaaactgatatcaacctctctaccattaccctcaacctgttcactaccccacaccatcaactcttcacccaccagcaaatgctcatcacgcacactaacattaccagcaccaccaccattcagcaccagcaccatcaccagcacatgttgcttgaccttctcaccacaataacactgctacccctagccctgctaagcctactactcaccatcatcacca

SEQ ID NO: 31566 - DNA, 321 bp, Glycine max
  unsure (1)..(321): unsure at all n locations
  Clone ID: PAT_MRT3847_128509C.1
cagaaccacattcctgggaattgatcttcccaatagaggtatgtggtcctaataatggttttgaaatggggagttctgattgggcaaatcaaacttcatggcttttgagtttccttattgacaatccccaaacagtcttacaggtttttgatatttctctttgggaatctcttcaaaattttgaaaattgctgggtaataactctttatgccaagcttttttcttgttccacaaggcnttactgccagatctttcttgaaaatgcccggaatcctcttgcatgaatctggcgaatttgatcgttttcttttcgctttgttc

SEQ ID NO: 31567 - DNA, 475 bp, Glycine max
  Clone ID: PAT_MRT3847_12850C.1
agaagagcgactagaatggctcccatcggtttagttgtgttgtgtgtgtcatgcttgtcactgctgccactgattgcgtgtgatgcggaagataatgtactcgttatcaactaatactgcgattaatgcgctcacgctgtaagacatcctcgaagagcttgtctagctgctctacaagcgccccgagatctctggtttctcatgcatcatacacatctgccatgactgtactggtcatacttgacaggctctactgtcgctggactcgacctgaaggagcttggctgcaaatgaaacctatggaagcttagagttgagaaacatcaagaccattgaaaccaccttagaaacggtgtgcccggaatgcccagcatgtgctgactgtgctgatatccctgccctatatggcagagatggccttggatggctccgaagtccccttatacctcttataacaggaagaagggatggcaga

SEQ ID NO: 31568 - DNA, 340 bp, Glycine max
  unsure (1)..(340): unsure at all n locations
  Clone ID: PAT_MRT3847_128510C.1
tggcgtcaagctgacgaccattaactagtatgtgtgcttttggccattaatgctgtaaataaaggatcctagtgtttttgacaccatttttctctcccttcctnaccctgcctgggggaagcagatggaaacatacacaacaccattgaatatctattcttctaaacaaatcttatgttattttattattgaccttctctgcggaggaatctaagtgaacataactgggaattgtatcacactcatacaaacttctccaataagtaacttgttgagagttgctgctcgcgacataggctgtttaccggtcaagacagctatgactaggaatgcaacactc

SEQ ID NO: 31569 - DNA, 293 bp, Glycine max
  Clone ID: PAT_MRT3847_128511C.1
ggctcgaggaacaataaatagggctcgatccttttcatcacttgacgacaatgaacgacgacgctgactctcctgccttacgatccttcctgagccagtcgggaggctcctatgacgacaggatatctgacgaacagaaaccgactgagtagatgccgactgctaactcgatcaaagccataatgaccgagtgataacaggtgctctgtactaagtcgttgaacgaaaatgggtggtaggtaccgtgtacgctgctaaagtacaagcttttcggttgagatctgaagcatctg

SEQ ID NO: 31570 - DNA, 194 bp, Glycine max
  unsure (1)..(194): unsure at all n locations
  Clone ID: PAT_MRT3847_128512C.1
gcagcgaagcaggggcgcccggcaaaaagnaancaaacagaagaagcgaacagacaggcacaaaccacaaagaaagaaagaggccgcaaggaacaaccggaacacaaggcacacaggcacaaccacaggaccagcaccccagccaacagcgagggccccacngagaacggcacccacggccccagggggggcac

SEQ ID NO: 31571 - DNA, 1619 bp, Glycine max
  unsure (1)..(1619): unsure at all n locations
  Clone ID: PAT_MRT3847_128513C.1
ggcgtgcctgaccccccccctttccggctcgcaagcttttcacatggaaatcggctcccccgcattccttaccctcgaagactattcttccttcttcttccctgacatggatcccattcccaattccaatgtcaacaagcgtcgtgcaaacaacgaccagttcgacttaaatgactccgcattcagccacctcctcaattccatcatggatcctaaccatttccaacaccaatccaaaccaatccaattcgactcctccccgaccaagagagctcgccgtgacctcctcgttctcgaagacagccacctcaaccccgcctcggccccgcaacagcagcgccgtctctgggtcaaggaccgctccaaggactggtggcagcggtgcaacagcccggacttccccgaagaggaattccggcgccacttccgcatgagcaaggccaccttcgacatgatctgccagcacctggactccgccgtcaccaagaagaacaccatgctccgagaagccatcccggtccggcagcgcgtggcggtgtgcatttggcgcctcgccaccggcgaccccctccgcgaagtttcgaagcgcttcggcttgggaatctccacgtgtcacaagctggttctggaggtctgctccgccatcaaaagcgttctgatgcccaagttcctccactggccaaacgaagccgaaatgaaacccatcaccgaaaaattcgagtctctctccggaatccccaacgtgggaggctcaatgtacaccactcacattcccatcattgcaccaaaatccaacgtcaacgcttacttcaacaagcgccacacagaaagaaaccagaagacatgttactctataaccgtccagggcgtggttgatcccaaaggtatttttagcgatgtttgtataggttggcctgggtctctctcagacgatcaagtgttggagaaaagcgcgttgtatcagagagccactatgggaaatttgaaggacgtgtgggtggtgggaaactcgggacaccctctgatggagggtgttttggttccttacactcatcagaatcttacttggacgcagcacgcgtttaatcagaaggttggggagattcagagcattgctaaggacgctttcgccaggctcaaagggaggtggtcttgcttgcagaagaggactgaagtcaagcttgaggacttgcccgtgcttcttggggcctgctgtgttttgcataatatttgtgagatgagggatgaggaaatgaagcctcagtggaactttgacatctttgatgatcagatgctgccccagaataataacgttcgctctaatgctgccgagcaagccagagatcagatagcgcactacttgttgcaccatggccgtgcagggactaattttttctagacttcttgggatatcacactttctcattaattcttttggctatgccttattattatagtcacttgcattataataacattctcatcatctacttcttatatgtatcaatttgtatcgatatcttttgccccaccaaaaaaaaattgaatatttcattttgaaagcttttggcagggccgggagggaacgggaggggggaggatgttaactgangaaagtg

SEQ ID NO: 31572 - DNA, 643 bp, Glycine max
  unsure (1)..(643): unsure at all n locations
  Clone ID: PAT_MRT3847_128514C.1
agttttggctcatactttctggattgcaatagaattcatgtcatcaatgatatcattgataaaacagacattgaaacttgtctaaggattcctcctgtagcaatcagtgggtagacaaataatcaagaatttgtcttaatacaaaatagccgaggtttgagtaaatggtggtcatatacagttctattttaaaaaaaaaaatttaaaaaattctagttatgcctaacaagtaacaagaacttctttttggtggctgtaagatgtgtaatgtgttagaaatttggaatgacatttctgtctagaaatacttgtagaatttaacactaaattaacagctattcaatggctgaggtttggggacctctgcattgagaacatggaaatgccatgctctagcaaattgcaagaatgaatatcaatcataaataattataattacacttgtaatatggcaccttttggtgcttttaggcttaggggtaattgtgtaactttgatcaggtttttgcctcttttatcatgagaatagtgaaaacagttaagccaaagattgaattttactatcgtctagtttcaatgggaatgggatgtaacatgttaaaagaacttgnggtggtttctagcattcctcttttggataaaa

SEQ ID NO: 31573 - DNA, 348 bp, Glycine max
  Clone ID: PAT_MRT3847_128515C.1
aggcctagaagaccacatacggggatccacacgactaactaagaaagcatttcatagccctactaacatgagctgctccatcatattcgctctataactgatttgagccttcaccaccttatacctaccttaaaacatggcttattataggctcgataatgaacgtaaccctctagaaaacggtcgcacatattatatctcgacagacataacaacatttgatggaatgcgaacagtccaaacgggaaatgcaagatgccctctcactgtggtacagtctagcaatgacgctcgacaaagggattggaacactcatctcgtgaccatatccaatccgcaatatcgacg

SEQ ID NO: 31574 - DNA, 512 bp, Glycine max
  Clone ID: PAT_MRT3847_128516C.1
tgtttttttttttgttttcttttttttttttattttttttttttcattttttttgggttatttgtttttttttttttatctaatttatattttgtatttttataaccattgatgaaaaaaaggggcgccacccccgcggcggtccgtagggcaaaccaccccaggaaaacgcccccctttaatagggagggcccgacagcagcccggggacaaaagagacgaaccacccttgggaccaaaaccacgataaggctttacattaaaaacggggcgggttccccgcccggaaaaacacaaagaaaccgccccccgctgggccccccattcacaaaggggggccaaaaaaacaaaaatcggggggggcccaaaaggggatcccccgcacccccccaaacaggtggggacaccccggcaaaaaacggggggggaaaaatttaccccccccgggggggccccaatcgggggtattcaccccggggagggaaaaacaagcctttttcatagggggcccc

SEQ ID NO: 31575 - DNA, 593 bp, Glycine max
  Clone ID: PAT_MRT3847_128517C.1
tctctttggtttctcaaaaatctttgtcaagacaacccaatcagggatccagcagctctaggaactccatttcctatgctctcttagatgctgcaaagcaaaaatcatttctaaaggcatttgacaaaacaggttataaatcatcaaataatttgttgattgcctacaaacctcgaagagggaagtatagtatatttatgggtgaaatgacaatagaggagatagagaatttcattagctccgttctcagtggagatgtacccttcagagaagcaacacgggggaagcctgtactagagtattaggtcataaaagtgggttttgactgttatggctgcatgctcatgtacagagtcaagagatacatagaatcttttgtttttttttatactatcaagagtacaaatgatctaattaagataacggcacataggatattattgatccatgctgattcctcaaggatgttttatctagcttttactgccattgtgaattcgccattggtggtatatttggattaggaaggaaagtgaaaagaaaaaaaatagacaatagatgataatgtaccttctttggtaaggaagaaactg

SEQ ID NO: 31576 - DNA, 432 bp, Glycine max
  Clone ID: PAT_MRT3847_128518C.1
ggaaaaattggactataaaaatggcaacttggggggcccaaaataacaaagaaaggaccgaaaaaataccccaggggcaaaaagagcccaaaaaagggcttttttttttcccgaataaaacccccagggctttagggaaaatccaaaattatcccggaaaataggggggaaaagggtaaaaaaaaacctccccccccaaataaaaaaggggcccccccatggaaaatggctcatcgggcccactttgcccacccgcaaatctaaaaaaatcggcgggaacaggaaaattaaactctgaacacacaagggggacaatttttccagggacccccccaaaggacattttgttcagggccacagcaacaaaaaagttatgggggacatcacaaaaaccgggggacccccccattcccgagggaccaagggcaaggg

SEQ ID NO: 31577 - DNA, 450 bp, Glycine max
  Clone ID: PAT_MRT3847_128519C.1
tcgcacgcacgcgtacgtaagctcggaattcggctcgaggcagccgagagaacatggcagcagatgttaagatttctctctacacatctacaggaggattcttcagcccttcaccaaggcgagaagtttctatcaaagacatgctggtttattcaaaaagatcctgcttggtctcttgtgtttagcgtatgctgcctacctcctggcagcttgcatcctgaacttccggagggcactggccttgtttgtcatcacctgccttgtcatcttcatcctggcttgccactttctgaaaaaattctttgctaaaaagtcaataagatgcttgaagcccttgaaaaacacccgcctgagactttggcttaagagggtgttcatgggagccgctgttgtcggccttattctctggctggctctggacacagctcaaaggccagagcagctgatctc

SEQ ID NO: 31578 - DNA, 310 bp, Glycine max
  Clone ID: PAT_MRT3847_12851C.1
ccatgggtgttattttaactaagacagggacttggagtgctgaatattggaccactacgcgagcctgttttaggatttcgggttgcccatagaggcgcgcgatcagttacatcttatgcatgtgaggtttagaacactcatgaaaaggacttcttgttgcttatgatcacggggcatgaggtacgcttcatgcactctctaaatgtgccactctggaacttgcgatattggctactatgttgtatcatttatgccaacggtgtttatgtaactctatttactcggatccttatcgccataggtgttccct

SEQ ID NO: 31579 - DNA, 487 bp, Glycine max
  Clone ID: PAT_MRT3847_128520C.1
tgaaaattacgttttcccttttccttttgttgccggttagcacttcaatgtaaaaattaattcaccataaaggatggttcgcatacaaaagaataaaaccttatgaaaggacacatgcaacgcaaaataaaggcatcgttccataggatatgccgatcctagtgagccataaataacgttcccaaaggcattcctctatgtgtgtggatcttcccagttgcagctgcattacagggcaagttctccattggcaggtagccactatgatatgcatctcataaatatttgcaactttcttaatgtgcaatctgccaaaggagatttgcccagcgattctcctgcaacatctgcttcatgaaaacagtattcgttagtttcttcaatcattcattagaaacatttcttgtactggttgaaatgttgcatctcgaaccattcatatgccatatttcccttgttttgtattttggtaaaaaccatttttccc

SEQ ID NO: 31580 - DNA, 1072 bp, Glycine max
  Clone ID: PAT_MRT3847_128521C.1
ttgagaaaaagaaagcccaccgtccgctcgttagtcgtttgtaacgcctttgtttgcgttttttgcacagaagaattaacacgtatatagcaagcatggcagtcacactctacgaccttagctctgcctctgggttgaagaagcttgatgagtaccttctcccacgcagctacatcaccgggtaccaagctacaaaggatgatcttactgtttatgcagctttgccaactgctccatcagatgaatatggaaatgtttccaggtggtacaagcacattgatgctttgttgagaatctctggtgtttctggcgagggatctggtgttattgttgagggatccctggttgcggagcctgttgcaactcccccagctgctgacactaaggctgctgttgctgaggatgacgatgatgatgatgttgatttgtttggtgaagagactgaggaagagaagaaggcagctgaggaacgggcagctgcagtgaaggcatctgcaaaaaagaaagagtctgggaaatcatctgttctgttggatgtaaaaccatgggatgatgaaactgacatgaagaagcttgaagaatcagtgagatctgttcagatggaagggttgctttggggtgcatccaaacttgttcctgttggatacggtattaagaaactgcaaattatgcttactattgtggatgacctagtttctgttgatactcttattgaggaacatctcacagttgagcccatcaatgaatatgtccagagttgtgacattgtggccttcaataaaatataaactacaatcggtgggatttggagatcatggcaactgggagaattgcaagttttagaaactatgttctagggggaactaccctgaattgagaatttttgtctttagaaacccgcttatattatttgtttctatatatctttgtgttgtcatcggatgatttggatagtaataatttcacctttaatgtgtcaacggattatttggatggaatcactcatctgctaaaaagactttcaaccatttgaatggaatccccatttgaggttgaagtttattatctgtgt

SEQ ID NO: 31581 - DNA, 598 bp, Glycine max
  unsure (1)..(598): unsure at all n locations
  Clone ID: PAT_MRT3847_128522C.1
ctcgttagtcgtttgtaacgcctttgtttgcgtttttttgcacagaagaattaacacgtatatagcaagcatggcagtcacactctacgaccttagctctgcctctgggttgaagaagcttgatgagtaccttctcccacgcagctacatcaccgggtaccaagctacaaaggatgatcttactgtttatgcagctttgccaactgctccatcagatgaatatggaaatgtttccaggtggtacaagcacattgatgctttgttgagaatctctggtgtttctggcgagggatctggtgttattgttgagggatccctggttgcggagcctgacactaaggctgctgttgctgaggatgacgatgatgatgatgttgatttgtttggtgaagagactgaggaagagaagaagcagctgangaacgggcagctgcagtgaaggcatctgcaaaaaagaaagagtctgggaaatcatctgttctgttggatgtaaaaccatgggatgatgaaactgacatgaagaagcttgaagaatcagtgagatctgttcagatggaagggttgctttgggggtgcatccaaaacttgttcctgttgg

SEQ ID NO: 31582 - DNA, 1892 bp, Glycine max
  Clone ID: PAT_MRT3847_128523C.1
gagtgattccatccaaataatccgttgacacattaaaggtgaaattattactatccaaataatccgatgacaacacaaagatatatagaaacaaataatataagcgggtttctaaagacaaaaattctcaattcagggtagttccccctagaacatagtttctaaaacttgcaattctcccagttgccatgatctccaaatcccaccgattgtagtttatattttattgaaggccacaatgtcacaactctggacatattcattgatgggctcaactgtgagatgttcctcaataagagtatcaacagaaactaggtcatccacaatagtaagcataatttgcagtttcttaataccgtatccaacaggaacaagtttggatgcaccccaaagcaacccttccatctgaacagatctcactgattcttcaagcttcttcatgtcagtttcatcatcccatggttttacatccaacagaacagatgatttcccagactctttccgtctctcgttagtcgtttgtaacgcctttgtttgcgttttttgcacagaagaattaacacgtatatagcaagcatggcagtcacactctacgaccttagctctgcctctgggttgaagaagcttgatgagtaccttctctcgtgctgccttcgtttgcgtttttatcacagaggaattaacatatatatagcaagcatggcagtcacactctacgaccttagctcttcctctgggttgaagaaacttgatgagtaccttctcccacgcagttacatcaccgggtaccaagctacaaaggatgatcttactgtttatgcagctttgccaactgctccatcagatgaatatggaaatgtttccaggtggtacaagcacattgatgctttgttgagaatctctggtgttactggcgagggatctggtgttattgttgagggatctctagttgcagagcctgttgcaactccccctgctgcagacacaaaggctgctgttgctgaggatgacgatgatgatgatgtggatttgttcggtgaagagacagaagaagagaagaaggcagcagaggaacgggcagctgcagtgaaggcatctacaaaaaaaaaagagtctgggaaatcatctgttctgttggatgtgaaaccatgggacgatgaaactgacatgaagaagctcgaagaagcagtgagatctgttcagatggaagggttgctttggggtgcatccaaacttgtacctgttgggtacggtatcaagaaactgcaaattatgcttactattgtggatgacctagtttctgttgatactcttattgaggaacatctcacagttgagcccatcaatgaatatgtccagagttgtgacattgtggccttcaataaaatataaactacaattgtgggacttggagatcatggcaacgggaggaattgcaagttttaaaaactatgatattgggaaactaccctgaattgagaatttttgtctttagaaacccgcttgttatttgtttttatatatcagtctttgtgatgtcatcggctatttggataataatcatctttcctttgttgtgtcatccgtattatttggatagtaatcattttacctttgatgtgtggcgtgtgttcttccccccggcctttagtcgcagatgttgatttaagaaatcttgagaactcacgttactctagttttaaattttacttgctgtgggcctgtgctttgcacagtgcagtgccggagagagaaaagagagattttaaattggttttaatacaagtatagtaatttcataactgctaaaaagactttcaaccatttgaatggaatccccatttgaggttgaagtttattatctgtgtatatggagagttaacaatttctcc

SEQ ID NO: 31583 - DNA, 328 bp, Glycine max
  Clone ID: PAT_MRT3847_128524C.1
agcagattcaaaatcaggttgttaggccattccttgactgttgcagagtagtgtcaatactttgttgaggtgactgaccattgtgatgatcacaaattgattagtgatgaaacacaaatcctgtctaaatagatttgtttgctttcatgacagcacaccatgccaatgagttcaggtggaaaaaactgtagataccattcatggacttcagaaatcagaacatacgcttacaattttgacaaaatgctggtgtaatttcaattgttgaactgctaaaaaaaaaaaaaaaaaaaaaaaaaaaaaaaaaaaaaagggcggccgcccgaca

SEQ ID NO: 31584 - DNA, 439 bp, Glycine max
  Clone ID: PAT_MRT3847_128525C.1
ctttgtccgttctctcccgtcaacgttgggtttctctctctcctcagattttgaaatagaaagatgacgccggagaatgaggaggagaaggatcaggaggtccttgatgcagcagggatgaagaggtacaggaatggtgaaatctaggagtatgaggatgacatgggtgtctcagatggtggcactggtgtcttgttgggcttggatggtggaaccacctccactgtctgcatttgcatgcccatgatacccttttctcactctcagctctaatctctccctatccttgcaagggctgttgctggatgctccaatcacaatagtgttgggttttaggatgtttggagggtttgggcattttgattgattctgccctcattaacatcctgtcaaaaccatcttttgtgtttttcaattccctttctttgggggttgggga

SEQ ID NO: 31585 - DNA, 710 bp, Glycine max
  Clone ID: PAT_MRT3847_128526C.1
ggaatccccatgctgtagaagcactccaacataatctagaagcaaattctgtggctgaccgttgtatcatacttgaaggagataatcgaattacagctcccaagagtgtggctgatagagtttgtcttggtctcattccatctagtgagcttagctgggtcacagctgtaagggctttaaggagagagggtggaatattacatgttcatgggaatacaagagactcagaggagagtcaatggattgatcatgtatcaaaatcaatatatgacattgctagatctgaaggttatacttgggaggtttctatagaacatgttgagagggtaaaatggtatgctccacatattcgccatgttgtagcagatgtaagatgcagacagatccaaatatagtgaatggtttggtatatgccaaaatgtaagaataaaaactgggttaatgcatgcaatcaacgtgaatgtaagaatattaatatgccaaaattcgaactgaattactttctgtgccagtagcaaaggtaaatgctgagttgtgattcagaagttcagaaaatattgatcaaccattagtcacggatgagatttgaatgggttgatgactgaatggcgtctcattccaagtgctgcgtattactatttgatgtatattgtgttgaactgataattttatccttccaaaaatagtacaaggaaggagggcttcaattt

SEQ ID NO: 31586 - DNA, 255 bp, Glycine max
  Clone ID: PAT_MRT3847_128527C.1
accaaaactgcctgacctccttgtcaatttctcttgctctttaaagtaactgcgcatgttgaagccggactcgcaaaccatctacgtcaatcaaatctataggattcgtggggtcaaaaatcgggcactgatatactgggaccacggctgagcggctgctactagaccctgatcagaataggagagctggaggtgaatagatatcgctctcgaagaccgctcaacaaacgtatggattcatatacagagggctct

SEQ ID NO: 31587 - DNA, 1509 bp, Glycine max
  Clone ID: PAT_MRT3847_128528C.1
cccacgcgtccgccctcgagccgctcccgcagtgtctcactcaccccagtcacaccatggaggttgctacagcagcttctagcttcgcactcaacaagcccatgctggcattgccctcttcatctcgaactgtaaccccaatcagatgcatgaacacctccacctcccccgtcaggacctctctctctaccagcttcgtcgctccttacgccggaatctgcagcgcgtctagccctttctccggccacaagctccgtccctcctccctcaatccggcgtcgtttcttggctccaacgctaaacgaggcgtcgttaccatggttattccttttcaacgaggaagtgcatgggagcaacctccaccggacttagcttcttacttatacaaaaatcgaattgtttatttgggcatgtctcttgttccatctgttactgagttgatactagctgaatttctttaccttcaatatgaagatgatgataagcctatttacctatacataaactccactgggacaactaagggaggtgagaagttgggttatgagactgaggcctttgcaatttatgacgtgatgaggtatgtcaagccttctatttttactctttgtgttggtaatgcttggggagaagcagcgttgcttttggctgctggtgcaaagggaaaccgttctgctttgccatcatcaacaataatgataaaacagccaattgcaaggtttcaaggtcattcaaggtctgttaacagtgcttaaccttgcaagaagagaggtcaataatgtgaagacagaattggttaaagcgtatgcaaagcatatggaaaaaacacctgagcagatcgaaggtgaaaagtatcgtccacctagtgaagctgttgagtatggcatcatagataaggttatatgcaatgataggggtactgaagatcgtggagttgtttctgaccttaaaaaggcacggcttatttgacagttggaattaaaatgcccttttcttggagttcagatcaattgaaatggaagaagatcaagatcagcagtcaaattgtacaaccgcgccaagcaagtagcggacattggagtctcattgttaatatcgtagactacatttccctcccccaacaatataggctgaaggatctaccattacttgttttctaattgtacacatgattggtttctgttgtgcacatcacattattgtattctggttcattctaattcaaaatgtttttctgtcaaattaatggcaatgtatgatgagtcattattgtattaaacggttgttgcaacttcaaaattgatttaatgttatcttagaagagtatacgtcccccttttgggttgtttgtgatgctcagaaattaaatgcacatgaacattggtcaattaagcaatcacctgtggttataattttttccatttacacttggcttttagcttttggtatttgtcactgtaaagtgggtaattttcaagccaaaaatttgtatccattttttcatgatat

SEQ ID NO: 31588 - DNA, 426 bp, Glycine max
  Clone ID: PAT_MRT3847_128529C.1
atactctgctgcatatcacacaccacctttgcatataagagagaacagagaggatactctgtcttacatgctgcatcgcaggttatcatgcaggactccatctcaatgaagatctaccatccggatctgatgtccgctatcttcaagggcaagctcgacatctccaacgtctcctcctctaccaacgccggcgcctccgacttactcatagagaaccgttacttgctgatgctgctgaccatctgcgttgtcatactgatccgctgcgtcatcgactgcatacagcgcagatcatcatactgcaatggcaagccttttgagccatctaaactgcgttgcaacaagcttcccgaaatcaaaatctacgactgcaccaaaaatgtcaccatgctcttccgcactcaaactcggaccgtcgaatgcttc

SEQ ID NO: 31589 - DNA, 241 bp, Glycine max
  Clone ID: PAT_MRT3847_12852C.1
ccccccccattgccttttccacaggtttaatataatgcgtttactttcccatctacagtggacctaaagtgagggggttacaataaagatgccatggtatgtctctctcaaaaaaaaaaaaaaaagggggcgccccccctcttgcgctctcgtacccccgggatttaatcccggcccgatccctgcgggcatcccatttttccctatagggagtcgtttcagacctgggcctacacatgca

SEQ ID NO: 31590 - DNA, 485 bp, Glycine max
  Clone ID: PAT_MRT3847_128530C.1
tctggttgcaaaaagacgacagaggggggttgtgtgattgaagaagcagacggagtaacggtattaaagatgcacatctgcgtgaaatctatgactgggaaaactataacccttaaggtcgggagcagctgactccatagacaatagtcaaagccagaatgtatgactggggaatgcattcctacgggatcaacgacgtttgattttacgacgagacccacttgaagatggagggaccgtgtgcggttgctgcatccacaaggaatcaagccttgatctctgactcaggcttcgtggtgacatcattgagccttgcctgatggttttggctcacaaatacaacctgcacatgatgattagtcggaagcgctatgccagggtacatcctatggctgtgaactgccgaacgaatgactgccgctatagtaaccagctgaggccttatatgacgatcaagtgaattctgcgcgattttgaagagctca

SEQ ID NO: 31591 - DNA, 262 bp, Glycine max
  unsure (1)..(262): unsure at all n locations
  Clone ID: PAT_MRT3847_128531C.1
tctgatataaaagttaaaaatgaataaatagaataaatgttactagaattccgataaagataaatttagaaagatatggaaaacatttatgctctggcaccacttggcattgcaagaanaacacaacggtaatgcattttctttgaatggtgtaaaaagatcagtgtggggcatattccaacatcagatttgttatgaattgtngattgttaaaaacagtagtctattttgttttgatgattgantatagcataatgacaaa

SEQ ID NO: 31592 - DNA, 594 bp, Glycine max
  unsure (1)..(594): unsure at all n locations
  Clone ID: PAT_MRT3847_128532C.1
cgacccgttccagacttatcnnntagatacattgttcatgtttagcagagaaagaagaaagaagtcaggggacatctgtgatcgaaaggaagaacgcattcagtacaatcatccaagaggtcccttgttctaccggctgcgctatgcaaaattttacagaagaatatcgtcagatgctgttagatcgtgagattgaagctgttgagtcatttcacatttcggtagctttacatgcccatcatgcccgacatgccgttgttcgcgtatgccataggcttgatgtccgggtgaggtacggcatcgaacttgacgtattcgggctcgtaagacgggccaaagttgatgaacgcgcccttgttctctgtcgagtcgcagtatctgggcgcagagaagacggtgatacagtgaccagcgtgttcgacttcgtagccctccatgcgcacctcgtgactgcggataatggccttgagaccgttggcctcacagaagcgcttggtaatatctgggccgaactggagaccaacgccacgcttgnannnnncgcgnnnnngcatggtctgggggtcggtccaaagcatnnnnatcatgnnnnnc

SEQ ID NO: 31593 - DNA, 230 bp, Glycine max
  Clone ID: PAT_MRT3847_128533C.1
gcacgaggtgaaacgaatccagttcgctacgctgcccaccacccaccaccatccctaacgtcactccggcgcgatcccaaccaatatccaaccgcgccgctgtggccatcaatcacggatttagatctgggttttctcacaaaggttttgagaatttgttttatggggttgaatggtgttcgaagaagacgaagacgacaaggaaagaaagattcaaaaatttgtgacgg

SEQ ID NO: 31594 - DNA, 289 bp, Glycine max
  Clone ID: PAT_MRT3847_128534C.1
ctcgagccgctcgagccgaatcggctcgagattccctttttctttatttattctggttacatgtgatcttttatgaggtttagttattctttgtgttagaattgtttggggaaaatgttaattttatcagaatttagctagtttcatgtatccgttttctagatatctgccatatccatagctagctttgtatattttgagtttctaacttgaaaggtagcaaaacacaagacatgattttttgtaataatttacccttggaagtaatgtcatctctaaagtagatggg

SEQ ID NO: 31595 - DNA, 200 bp, Glycine max
  Clone ID: PAT_MRT3847_128535C.1
ggtgaaaaaaaacggggtttgaactggtttcacttttgtcaatctgactaaaaaaaacagggccaaccttttacaattttttggacaaaaaataaagagttttacaattgcctttactacaaaactgattttttaaaaaaaaccgctccattagttcatttttctacaacaatttttggagtaagggttgggcccaattt

SEQ ID NO: 31596 - DNA, 355 bp, Glycine max
  Clone ID: PAT_MRT3847_128536C.1
ccacgcgtccgcggacgcgtgggccggaagtggtcattccggaccttcctccttctgtgcctaaaatttcttccgaatacactttttactgtttttcttctctaaaaactaaccggaaaacgaaataaacgcgtacttccgacaaaataggaacaacagccactaataaaacttcaaatacggaacacgggaccaccaaatcttcaaatacttcacttcacgggaccaccaacagactgctgaagggaccaccaccgaaacaataaaaaatgaaaaactaatctaacataaaaaaacaaaaagagggcggtcccttctacaggatccaagcctaagtacgcaggcatgcgacgcc

SEQ ID NO: 31597 - DNA, 337 bp, Glycine max
  unsure (1)..(337): unsure at all n locations
  Clone ID: PAT_MRT3847_128537C.1
ttggcttagtaacagggaggatctgagtacttgcgacagtcctcacgtccgattttgagtcgaaaccctcctcgacattgtcctgaacctaacctcgtgttgacctcgacttcgaagacagtttccaacgagaatgcgaagactgtaccactgggggcgagcccgaacgggaaagatatacaaggaatcccgcgggagaggctttttataggggagacaaatacccgcggacccgacccaagcagtacaaaaactaccagaacttctgtcgctctcnggacgacctcccgaaggggtggttgggaagtgccaaaggggggactttctatgacttctt

SEQ ID NO: 31598 - DNA, 315 bp, Glycine max
  unsure (1)..(315): unsure at all n locations
  Clone ID: PAT_MRT3847_128538C.1
tcctcntttttttttttttttttctttttttttgtgttttttattatttttttggtttttatccccaaactttaacctctgtttgttcaaaaggaaaaagaaaacactagcgaacaacagcccacccgaaactcgcaacagcaaagctcaacctaaatcccacaagcggcccctattttaaatgaaagaacgacaccaagctaattaaagaaacgtttttcccctacccagtggagtgaaaaaaagaagccggcacacgcagctctaacttccaatagatcaaaaaaaaaaaacccaatcttaaagtacccaaat

SEQ ID NO: 31599 - DNA, 144 bp, Glycine max
  Clone ID: PAT_MRT3847_128539C.1
tttatagctaaaaaaccactggggaccattaatatagagggaggtatatttcaaaatactttgagataagaatgactttatttttaagaatggaatctgaaatatttagttcacttagcaagggtaatattatcactttaatat

SEQ ID NO: 31600 - DNA, 330 bp, Glycine max
  Clone ID: PAT_MRT3847_12853C.1
cccacgcatacgaaaaaatatatttacacataaatattatcttttttctctacccccatatctctccccgcccctttatacaatacccccctccaaaatcctatctctaactaaactctctcaccatcattaaaaaccattttacaaacaaacaaacttcctcaattctcctacattcacaaacattttttacaacaccaaataccttaatcattaacatctatccaacactacatatcatcaaaacctaaatccatcatatccactacaacccatctaccctcttcataacaaattattctacacatttactactccattcacaaacac

SEQ ID NO: 31601 - DNA, 472 bp, Glycine max
  unsure (1)..(472): unsure at all n locations
  Clone ID: PAT_MRT3847_128540C.1
aattcggctcgagctcgagccgaatcggctcgagcggctcgagtacggctgcgagaagacgacagaagggtcccgcacttacggtggcaacaatggaggttcgcggtggctgaaggaggagggtagccatggcagtaatgtatcaagaacagttggaggaaatcaggaagcaaatcccattaattgcggtgcaattattgccgaggataaaaaatgggatgaaatggtaattagagatgcaaacataaattttcttgcaactagaaccttggtacacacaggtgcattatccatagcagaagcggaggccctggctttgttagcagccatcaactggaccatggacaaaggatacaacaatattgtgtttgagactaactgtaaacatgtgcatgatctgatcctctcgacgaaacgcaacatttcagatttagggctcattntagctacttgtaaaaataagctaattaac

SEQ ID NO: 31602 - DNA, 421 bp, Glycine max
  Clone ID: PAT_MRT3847_128541C.1
ccgcacctgatgtccaagctttcatactccatgttggaacgcgttcatcttcttgcggagccgctcacactggatgggacaggttgaatcttcacgtgcctaagcgacataaaaagcatgaagctggtgaggacttgttcatatcgaaaacagagattaggtatgtgaaagggcatgcccagctcatggaagtactgacaagatgcagggctcatacatgataaacggctaacaaccacatgcgcgattcgagtggacatacgttgcagtgactctccaggcaccaagatttctagacttaccacattctgtgacaaaactttacatactgagctcgacttccatcaaggaggatcacctggactacgagcaggtacttgcatgatacgtgtacgtctcaggacacttctcactatgatag

SEQ ID NO: 31603 - DNA, 583 bp, Glycine max
  Clone ID: PAT_MRT3847_128542C.1
gctctgcgaaaagtaaaatcaaccacaatggccgctatccagcttaacttcaccctccgcacttccgccaacgtcaagaccgtccacttgctcggctcctgggacaactacaacggacaacttcctctgtccaaggactcctccaagaccggcggctggaagggcaccttccgcttccagggttccaccctcaagcaaggccagcgctactggtactactacatcatcgatggctaccacgtctcccacgacccagcccgcgagagcgtcaccgagcccaccaccggccgcaagctcaacaccttggacatcccatccagcggtgccacagccaagaccgagacatcccgcaaggaagcccgccaatcttcgcgccacaaccgcacttcctctggtgttccaaagggccgcccactcgacaagagccaaatcgtctccccaaagccatacaagccacaagagtccctcaaggtccgcaccgaacagttcgctcagccaactctcgagcaattgacagccaagttcgctcagcagcaactcgtcgagtcctcagacgactccgaggatgacagcgacagcgatg

SEQ ID NO: 31604 - DNA, 530 bp, Glycine max
  Clone ID: PAT_MRT3847_128543C.1
gaacaatatagcgccagacacagggcttttccaccacgccggtgcaggtcgcgacttcaccaacgaagggggttcttgacgcgtgagatcgttcgattatacgatcctaacaaagtgagattttagggttacatagtgaccatgaagaagaaaccaagtggtggggttgttggagagggtgatgatttggagtctctcatacacaagcacgcccttttttttcgatcagttgatcgagttgatttccgccaagttctatctgccaactgatgacaaggagaagccatggattcagggtctcagcaaggctgcgaaagctgaagcaaagaaagagaccaaggagaatatcatgaagtctcggagggatcgtttagaccctgacaaaccctctgcaactacccttgaccttgtcaaggatagttttggaaaagagaaggtggatgactgtgttgatgagcatggtgccgcggcgcctatgactgttgtttctgggatgaaaagagatgatggctctgtgacttatgaagagc

SEQ ID NO: 31605 - DNA, 229 bp, Glycine max
  Clone ID: PAT_MRT3847_128544C.1
gcgctgccttgctcgtgcttcatgctcccgcttgagattaactgctaaattgtagagagagagagagagcgtttgtgagtatgtatatggcacatcttattattattattgttgattaggacacaactcagagagacctggcgaatttgcaatctctctctctctctaacgtggatctctactttacgctttgtgccgacgatcttggttgacttctttgcatcagtta

SEQ ID NO: 31606 - DNA, 270 bp, Glycine max
  Clone ID: PAT_MRT3847_128545C.1
ggccgcccttttttttttttttttttttgaacatcaaggggtgtgttctcattgataataatgagcactctatagaataaggtgggcaactgtgagctgcattttataaatagacaattttgaattcatacacagttgcgactcccaataactcgtaagattgaaaccggcggtgggtgccctgtaacataacaagcaaggagtacatcctgaactattttgaacctttaaatatgaccagggtatgcacacgacaaaggtgctaatgcc

SEQ ID NO: 31607 - DNA, 642 bp, Glycine max
  Clone ID: PAT_MRT3847_128546C.1
cacgcgtccgcgcaaaacagaaaatgcgtataaacaaaaagaggagtagagatggatgcttctgagtaagagacaagtaattggaagaatgtctctcaaatgttttggcctctaccgttcaagttcatctcagagacagtatccaacaataatagaagagttgtgccataaattttctctagcggatcttaggaagtcaaccaacgactttgatcaaaacagagtcattgacattagagcatttggtatcaaaatatataaaggttgtcttcaacataatgatggttctgattatgcagttgcagtaaagcgatttaaagtgaaagatattcaagcatgggaagtgttcaaaagcgaaatagaattgctctgccagcttcgtcaccctaacatcatctctcttgtaggtttctgcaacgacgaatatgagaagattattgtgtacgagtacatgtccaatggatctctatatgaacggctacaaggtggggaactgtcatggaagaaaagggtagagatatgcatcggagcagcacgtggactacactaccttcacgctggagccaagcgcaccatcattcaccgtcacatcaaacctaacaacattgttttggatgacaacatgaagcccaaactcacaga

SEQ ID NO: 31608 - DNA, 331 bp, Glycine max
  Clone ID: PAT_MRT3847_128547C.1
gaatcaatatccacaatcaacgaggcatgtcccaagcctccttggtgcagcttacagattggcaacggagttaactcattgctctattcctctaccatacaccactcactcacttttttcaacatctatgaccataccactctttataccataaccaaaccactcacaagttcttctgctttcatcagttgtcatgttatgccaactacatgaaacttttcttaacccaaatggatcaaggatgagattctgcacttacccagctgaggaaatgcggtgaacatcttttatcttctgcagatggttatagcgaccctacggtcatgatgat

SEQ ID NO: 31609 - DNA, 216 bp, Glycine max
  Clone ID: PAT_MRT3847_128548C.1
ataatctcttctttcaaagctttctcccgatactggggaaaaaaaaaaaaaaacctaaacacacgtcatgtttataacatgacatgccactttacaccgcacttggtcaaatttgggttgttgcatagacatgtaatctctacttgcactagtagctcttggcttgtaaattaaacatttcatgtagataattgaattgagaggctagacagttgc

SEQ ID NO: 31610 - DNA, 311 bp, Glycine max
  Clone ID: PAT_MRT3847_128549C.1
gtgccactggacgagcgatttcactggttggggcaatgggtatgcccgacaatctctgcctacactcagcgctggggcttgaccaggaaaataccgggagcaggccggggaagcaaagtccgccagtattgtgaaagaatgaacttgttggagacaggacagaccatggaggctggctgattttatatgatcgaaagcgcctttggtcgcacggaggcctttatcataaatatgtccggtatttctgtgagaggtgccctgtgcaactgtgcagactgcaccgctggagatcggagttgctgtcacgattg

SEQ ID NO: 31611 - DNA, 520 bp, Glycine max
  unsure (1)..(520): unsure at all n locations
  Clone ID: PAT_MRT3847_12854C.1
ggnacaancgggggcancanncggnagcacannnnggggaacagcggagcgganccccggngaagggnngaagcagagggnacaggcgggncnnnnngacaaggngggngaggcnnnngnngcgacnngggagcaggagggncnnaggggncccnnccggggaaccggagcnaccnggggctttttttttccannnnangnngcnggcanggggccnnangctgaatccccaaaggccgcagaacgactaccagagcgggaacccgggccccgggaaacaanggcgggnggaganctaccgggnggccgggcggcggnngnnacaacgccgnnggaggncangaaaaccagaaagaagaccgcacagggccgaaccgggccaaagaccaagaaaggcctctccatactaaaacangagggaccccttggcttgttcaaaggaggagtacccagggtctttttggattgctcctcctaagggctatgaaacttgcaggggtatgagttagcaaagaaaggc

SEQ ID NO: 31612 - DNA, 427 bp, Glycine max
  Clone ID: PAT_MRT3847_128550C.1
gttggaacctttgggctgatttatgtgcttgcatcgtcggaagctcagagaggggggggactcactataactgaaagtaaagtcacacaggaccaccctttacactaagaaaacgaaagctttcccccacccctttacttctgcgtccgccgctcctaccgtcctcggaaaataagcgtaaacgatagcggcattaaaccgcgcggcagaaagtccgctagcctaccgcgaaacacctaagaacttccgtcaatcctcccgttaataataccccggactatttgtagtatacggagtccgcggtaccaagccttacgcacgcgcccgccacccacgccaaacacaaagcccaattacaataactatagtccctacattcacccaacagcacgcaagttgacgaaaaaaacaaacacacaaacaaaac

SEQ ID NO: 31613 - DNA, 731 bp, Glycine max
  unsure (1)..(731): unsure at all n locations
  Clone ID: PAT_MRT3847_128551C.1
accaggcacgacgctgcgaagctcaaaacctcgaaggaccttgaagcgaacatcccccgtgccatatcaacgttgtcgcagtaccgccttgccgtaggctgccccgctgtggttgtcagctgtgtcgtggttggctgtttggtgttgacgtcaattgtagtgtcgtgcgcgccccgctgtgccctgctgtggaaggctacaactaccattaaacccatacaagttgaagtgtgataaagaacccttgaactgctactagaaaacgtttgagggctatcaatgaatctcgtgctcagaagaggaaggcctttgttaaaggaggtgtgggtgggaagaaaagctttagaagtcagttgaatggggaagagttccaaggattgacaataaaagaattgcagaaattggaggaacttcttcaaagacattggaccactatttcaaaaattaagtactcatgatgcaaagacagaagatgttgaacttaaactttcaaaatgctgcttttcatataatgtactgtttcagtttagttcttcagaagcgttgaactggcagtgtgcagtgtttggagacatatcaaggacgtgatttttcacagcaaaatgaatgatattgatcctagcttttacattttttcacatcaaggatgtcatcaaatggtgactgtagaaagtatttgcaaaagtggaataaattagactacataaaaagtcanagtgagaaaaaaaggt

SEQ ID NO: 31614 - DNA, 211 bp, Glycine max
  Clone ID: PAT_MRT3847_128552C.1
ttttagatcgcgagcggtcgccctttttttttaaaagggaaagtgaaaccatactgcaaaaaaacggttattgtacttttgtcatgaaaccacagcgctcttgttttttggatgcaatacaataaccaatttgggggcagctatgggttttttttgaataaaaaaaaaaaaaggggggccgctcccaatataaaactagggggggccgaat

SEQ ID NO: 31615 - DNA, 692 bp, Glycine max
  Clone ID: PAT_MRT3847_128553C.1
atgcgtgcagtacgcccttgtcttttttttttcttgagtaagattttcaaatgacacaatagcggggaagatacaaacagacaaaccaaaaacatggaccctatattcataggggccctattaaaatcagtgggcctctgtttccttagtgtctatctctccctattatgtgaaaaatacactggagagatccattgcccactaactggtaagtggtaactacacattttgttaaaatgaaccacttcatcataatagctataagaaacacaaaagggaatcgaggcagctaagttttttgaaaaatgatatacaagttttccgaataactgaataaggaaaggagggttatatacaacaatcaagaagcacctaataagaattatctcacgacttttagtttctatgcccaactccaaagtgaaacctcttgtcttgcttgtcgctaaaggcatattcaagacgcaaaggacccaaaggtgattccacacgtatggccaaacccatacccgcatccactgccaggcttcttccttgctccagcagggtcaccaggtacagttgggcctgatccaagatcagttccatagtcagaaaatataacaccttctactggcccgtacacggggaaagaaacttctcctgagccaacaacatacgaacgaccagagcccacactaccttcttcatag

SEQ ID NO: 31616 - DNA, 388 bp, Glycine max
  Clone ID: PAT_MRT3847_128554C.1
gccgtgtttctgttttgataactcgcaaatattctacttaatagcccgacatctcgttccctgaatactgattttgagctttcccctgatttttttaggtgaaaccttgttcttagttttttttttttttttaattttaaattcatgccgctttaagaattgagttggtatacgagtgacccatggagcggtagcctctgtggcttttatttttatgcatttcaaatttcatcactcatttttgttttgatgatcatttaataacttcataatcagtgtgatgcacttttaagtaattcttatcttaactgggcgattcatattgatatgttccttgcagggaaacaaattattgccccttccttttttccatcatctccagtgagaa

SEQ ID NO: 31617 - DNA, 565 bp, Glycine max
  Clone ID: PAT_MRT3847_128555C.1
ggtgttttgtttttctttctttttttttttctttttttttaaaaaggaaatatgttacggggtttcaatcaaaaaattacatgttaatcttccatagcccctcctgtaattattttgggaatacataacattgcccaatttataatcaaaacaaggggtcctaaaaccacaaaatttttttatcaatcaacgggaaaatacttcatctccgggaaaaaacagccactcttggctttttcgtttccttgaatcatcatgggggatgcaaaaatctgggtcttttttggacaataggggattgggaaattggatatcccccaagttgcttccttggttgattacatggattccaatttgtttgatggggtggggtccccatgatgtagaacaccccacatgattccattcattttccgaaagaacaagccattgaatagttcctttatgggatcaataatccacagatgatcaacgcataggtccaaagaaaaagccccctttggtaaatgttccccacccttgatgataaagctgaacgttccctttgaatccttgggtgtcaaaa

SEQ ID NO: 31618 - DNA, 281 bp, Glycine max
  Clone ID: PAT_MRT3847_128556C.1
gccagccttccgaatttactccactctattcacgggcatacaaattatctaaggaaggttatctacggcttcagctcacaccggctattaactcactccaatatgattggaatatgaagctcatcttttccttataactgtcactaaataccataggccattactcttattccaagggactcttattaattgtttcatgatccttttacaggtaaaagatatgaaagtaaagtcagaaaaatgttaaaggtatagcctatcacatatcggtctgctacact

SEQ ID NO: 31619 - DNA, 351 bp, Glycine max
  Clone ID: PAT_MRT3847_128557C.1
aattgtgtaactttttcctagggaagcatattaacaaacaggccaacttaataacaacatcagccactatcaatacaacaggcccttatgtacccaaatcattgaccacaacctactcgatgtacatttcactatactactactgcataagcctttttaacaaattcccccttcctaagtaaaaagacgacgacacccccgacaagctaaaacatataaatataatccaaacaaataagcaagctccaaattaaaaaaaggaaaaatctgaaacacgataactacaaatgaccgactattgaactctattaacttgtgcagcaacttgtcgatttttcttacgaaaacatc

SEQ ID NO: 31620 - DNA, 1729 bp, Glycine max
  Clone ID: PAT_MRT3847_128558C.1
gagaattttaactaatgtggttggcgataatataaaaatatttatcataattctcttacaaaagcagaaatactaatttgatgatataaaagctttgttttttgtttattaataaaaaacaataataaattgtgcgagataaagcacttggttcctttttacagtaactttaacttttttttatatatatttttggttaaaacgacaatgaaatgaatgaatgattttaattgagcggtttcgcgtaggaccacgacgcggcggactccggagagttggaagtagaaggcgtgagaggaataactttttttatttataattataattaccaaggtcaaccacttcgagcgtcggggcaggggcagagttgattgcagttgagagagttgtaatgagtaacgaatacgattatctgttcaagcttctcctaatcggcgactcttccgttggaaaatcctgcttgcttctcagattcgctgatgactcctacgtcgacagctacataagtaccattggagttgatttcaaaatcagaaccgtggagctggaaggaaaaaaccgtcaagctgcagatttgggatacagctggacaggagcgattcaggactataacaagcagttactatagaggagcacatggaattattattgtctatgatgttactgagatggaaagctttaacaatgtcaagcagtggttgaatgagattgatagatatgcaaatgacactgtatgcaagcttcttgtggggaataaatccgatctagttgataacaaggttgttgactcgctaacagccaaggcatttgcagatgagcttggtatccctttccttgagacaagtgctaaagactcaatcaatgtggagcaggctttcttgaccatggcagcagagattaagaagaagatgggaagccaaacaactactggtaagtcggcagaaagtgttcaaatgaaggggcaaccaatcccacagaagagcaactgctgtggttaggttctattctagttctactttctgttatatcaaaatagggagactctgttatgatatggatgtttcagtaactcttgaaatatcacctatcatctatttaaatccttggataatattattctgaatccccaatgtagcttcccgatgtttcaaatgaaaaggaatgcaatttttcagttgcattttatattagtaacatacgcgcttacgctttacatactataaaaggatatacaggccgaaaaggaaatcgtaatatccataattatcaactatcaaaagcatataaggaggtattgttggctacattagtgatattcttcgtgtccgtaatatcactgttttaatccattacagttacagaaggaggtagccaattcctgcagtcggaaaagtaattgtagattcctaaactcataaaccaatggcttaaagttttttagctaatttatattgtaatgtatgaaaaaataaaattaccgacctggtttggcctaagtttactttaccattttgtggtttaagcaaattatattttgacttttggactttgctccgtttgcataaattcacgtcttccgttttttgaatcttctatttttagatacccctgttctgattgacaattattatttaatcacaactatcaatcagtgtcacaaaatctctctttcctatcgtgtttttcactatgtttaaaaatgatacccaccatctgcggattatgggtt

SEQ ID NO: 31621 - DNA, 1392 bp, Glycine max
  unsure (1)..(1392): unsure at all n locations
  Clone ID: PAT_MRT3847_128559C.1
cccacgcgtccgcccacgcgtccgtacggctgcgagaagacgacagaagggggaatgaatgattttaattgagcggcggggcagaggaaggggcagagttttggagtttgaaagagaaaatattgattgcagttgagttctaatgagtaacgaatacgattacctgttcaagcttctcctaatcggagactcttccgttggaaaatcctgcttgcttctcagattcgctgtgagtcatcacttcccttcactttcatctctcttgttcttgttcttcacctcctttgtttcttcatttcgtttcaggatgactcctatgtcgacagctacataagtaccattggagttgatttcaaaatcagaacggtggagctggaagggaaaaccgtcaagctgcagatttgggatacagctggacaggagcgattcaggactataacaagcagttattatagaggagcacatggaattattattgtctatgatgttactgagatggaaagctttaacaatgtcaaacagtggttgaatgagattgacagatatgcaaatgacactgtatgcaagcttcttgtggggaataaatctgatctcgttgataacaaggttgtagactcattaactgccaaggcatttgcggatgagcttggtatccctttccttgagacaagtgctaaagactccatcaatgtggagcangctttcttgactatgacagctgagattaagaagaagatgggaagccaaacaactactggtaagtcggcagaaagtgttcaaatgaaggggcaaccaatcccacagaagagcaactgctgtggttaggttctattctagttctactttctgttatatcaaaatagggagactctgttatgatatggatgtttcagtaactcttgaaatatcacctatcatctatttaaatccttggataatattattctgaatcccctgatggcttcccatgtttaaaatgaaagggatgcaatttttcaaaaaaaaaaaaaaaaaaaaaaaaaaaaaaaaaaaaaaaaaaaaaaaaaaaaaaaaaaaaaaaaaaaaaaaaccccccaaaccaatatactttatttgcttaaaggaacgttcaaaaccacaaaggtttctcaagttttcttcgggggaaagttggtttcccctggtccatccacccccctcccaataagggaaaaagtttccccccatttgaaaccccaaagggttcgttttttccccaacctcagggttttctcggtttttgcccccaaggatttctccaaaattctcaccaggggggggtacccagaaccgacccaaggcgcaacaaaggggggagaaccctccttcaggggaaagtcggggaaaaacagggacttaggggggggggttgaa

SEQ ID NO: 31622 - DNA, 446 bp, Glycine max
  unsure (1)..(446): unsure at all n locations
  Clone ID: PAT_MRT3847_12855C.1
acccactaagctcttaatcngcttcagctnttaacctatccgtatgttatccgattcgtcctcaattccagcattcctttgtttatttactgtgattgcgtgttttaatttctagggtctttttcataggaccgcatattcagagtctatcaccatcgtcctgctcattaggaccatgcttatgcccgtgaatactttggacgtctggagaacacaacttacatagtccatctatatttatggaagaggacacggatgctacaggggcttgaggatacttgtcacggggaagagtgtcacccatcaaatgaaaattgacacccgaaatgcccgaggaatgatggagatggctaccaaaaaggatctaaggtgacagcttctgtcactcctgtaacacaatagggactctcacctattgaagctctagccttgtctttagatgagct

SEQ ID NO: 31623 - DNA, 310 bp, Glycine max
  Clone ID: PAT_MRT3847_128560C.1
gagtggtgcttttttacattcttcaaaaaattttcctgaaaagggggatcattaataacccaaactgatttatgccagattgagacaaataatatatccttaatacactcagattgacgctctagattaaccaacaatctataaagtgcactattccgcatattcaactacttttcggtactgactttaaaccgtaaatttaaaatgttaaaaaaaagtattcaagagctcttctaacacaaaaacgtatttttacttccctgagactttttattcatcttagttcattatctaatttgtttaattatta

SEQ ID NO: 31624 - DNA, 415 bp, Glycine max
  Clone ID: PAT_MRT3847_128561C.1
gggggcccaaaatcaatttaagggggccctttaactcaaaattttagggggagacactcccatttgaaaaaaattgtaaaatcatttcaaacttgggattttttttttgcccctaaaaaattgaaaattttaaaaatggtacacccaagtcccaaaaaaaattttagcacttggatcaacacaacctttaggaaaaaaaaaatttacttgccaaggttgttttgcccccaattaaaaaatggaaaaaaggtcccctggtaaaaacatccccgttggcatttccaagggccgccttgttcaaatacttggcaaccaaatgggcttttttgacatttttttgtttttggacaaacatgttaccatacgtaaagagctttttcaaaattattttgggctggtaaaggggggggggcca

SEQ ID NO: 31625 - DNA, 889 bp, Glycine max
  Clone ID: PAT_MRT3847_128562C.1
gctcagcaaaaataagtagcatatatataaatgagtaccagaggtactgtagatacataatgggagtggattaacacctggttctgaatgccaagatacatatgataagaaccaagctgaacccgaggaaatagaatacatttaccctgcactaattatttatattacttatattactgcagctaccatcctttcctaattacaaaaggctgcagtgagatgagaggaccagtgattgaaatgcagggtgaaacccttctccataagtttaagccatgtccatagtagaaaaattgcatctttcatcactttacttccttcaaaggtttggttagcaaagatcactccatttcgatgcttccaaatggtccatgttagtgctacccatcagcacttccatcttattgctttagttccaataggagacccacttacatgttatagaaaatggtccttaggattttttgggaatacaccccttatgtttacccattgcaaagactcccaccataaagggagggttttgttgcagttgaaaaatagatgtgctgtattctcatccgaggtgttgcatagaaggcaccttgggtcatttaacttcacttgtctacttctcaggttgattttagttggtaatcggtctctaatgagcctccaagcgaacacggctgcattggatggaatcttaagcttccaaagattcacgaaggtccaatcttcattttctccccttttttctgtcagcagtagctgatacactgtttttgctagaaaattcccactcgggtcagcctttcatatccatgaatctgaagtattttggtgaattgttagcctgtgctgtctccctctaagaaaatccagccgccatagcaaatcctcaattttc

SEQ ID NO: 31626 - DNA, 266 bp, Glycine max
  Clone ID: PAT_MRT3847_128563C.1
atccccttagcagggtccttcccaccagactcagggaagggatgccccattaaagtgacaaaagggtggggtgtgggcaccatggcatgaggaagaaacaaggtccctgagcaggcacaagtcctgacagtcaagggactgctttggcatccagggcctccagtcacctcactgccatacattagaacgagacaatcaaagccctcccagggtggcacacccatctgtttgctggggtgtggcagccacatccaagactggagcag

SEQ ID NO: 31627 - DNA, 177 bp, Glycine max
  unsure (1)..(177): unsure at all n locations
  Clone ID: PAT_MRT3847_128564C.1
cgacacgcgtcggccttcttttgttactcaacaactacagccctttctttattttgtaaccttattcacaagcaattactataacatacgaagatattgaaaacgacatcattgtttctaaaattttaattccnttttggggggttnaaattactgatgcaattttatctgcaaatc

SEQ ID NO: 31628 - DNA, 247 bp, Glycine max
  Clone ID: PAT_MRT3847_128565C.1
cacacccctctaacttccgatcactgcaccatttgcaattacacaattgcagatcaacacttcactccacaaaacagatttcaaaagggcgttttggtactttcacaagctaaagtccaattggaccagtttgtgtatcaactgcaatctaaggataagcatagatctgcagaaaccgtgaacacactgatacaagaaacagaaaacactctctttctctctcttactatagattatactactatca

SEQ ID NO: 31629 - DNA, 853 bp, Glycine max
  Clone ID: PAT_MRT3847_128566C.1
ccggaattcccgctccgacccacgcgtccgcccaagtcaagttgaaggttgaagaattgaagctcaacattagcactcaattcagcccaatcgttacccaatttctgtcctttaacttatacccttccttattcaatccatgggtgtcttggaagctcataaagagtaaagataacggcttttgttttatttatatccttcaaatctcaatacccttttgtccaacaagcctaaagtttgtgtcttgtcactctattcaccttctgttcgttcgttcgtttggaattgccgagaaaagaagatgcaacttgatctggaatcattatccgaagctacttctggtgccattggatcacttgttagtaccaccgtcttgtacccgcttgatacttgcaagaccaaatatcaagctgaagttcaagctcagcatcagcgcaaatacaagagaatttctgatgtattatgggaagcaatttctactcgtcaggtgctttcattgtaccaaggccttgggactaaaaacgttcagtccttcatttcatcgttcatttatttctatggatacagctactttaggaagatgtatttgaaaaaaacaggaaacaagtccattggaacaacagctaatttgattgttgccactgctgctggggtctgtacaatagtaataacacagcccttgcatacagcatcctcaaggatgcagacaagtgaatttgggaaatccaagggactctggaagaccccttctgagggtcatggagtgaagctatgacggacttggattttcattcttttaacacaatcctctatcagttactgctatgatcagctgaacagaatattaaggcag

SEQ ID NO: 31630 - DNA, 578 bp, Glycine max
  Clone ID: PAT_MRT3847_128567C.1
atctcactttccaaccatatagatattgccatcaaaagtggaaagaaaaatctgttttcatctttctttgtttttttagttaaactaatcatttggtccttaataggttgcactcatttaggaatcagttcatgtatgaggaaagcttaagttttaatcaccatacacccttattagtaaacattggtacctgttattactatgtttcagttttagtcttaaaaaacttaagttttagttcctatacgcccttatagggattaaagttttaagttttcttttcccggtacagggactgattcctcaacgagtttcaccgatgaggacctaatgtttagtttaaccttgtttctcttcctcactttttattcccaaaacatctagccctaatgcctacttttttttacatctatgcatagttgtttgaatagaattgttgttaagcttagtgcctctgtttttctttgttatccctagttgtgttaattgcttcctgtgtgttatctctgcaggatacttgcttaaaatagcatgcttcaatgtcaaaaattatttttatattgcaagtcaagctcctc

SEQ ID NO: 31631 - DNA, 261 bp, Glycine max
  Clone ID: PAT_MRT3847_128568C.1
cgcaagggagagatagaagaggcagaggaaattttgaggcagtccaaaactttggaagcccaaatagaagattttgctaaccagaacaagtacttgtcacttaatgtttccatggatgaacaatctgttctgtctaatcatcagtcttccaggaaaggcttgggagtttgggagttgctactgaagttgataatgcttcagcctcatctgtggtttggtcaagtaagaatagttctgaatcaacattggtttagaaagaat

SEQ ID NO: 31632 - DNA, 416 bp, Glycine max
  Clone ID: PAT_MRT3847_128569C.1
tcgttttttttttttttttcttctttttttggttttctttttgcttttttttgggggacagctatggggaaaccgcccacctaggggtgactgtaattgccccacctatcttgcctcctgggcttttgggctgtgctataaacggggtgtgtggggggggggggcttacataggacctaacggaccttattgctataatgggctcgcttttggacactgggatcttccaccgtgccaaagcaaacaccggttgttccttgttaagtagaatcacccccgcgaaaggcacgagcaatgggttgggcggtggttttgccccccctgcccggccttttccggccgctcctgagcgggggcctttcccaggagggggtgatccctccccgcgctttttggccttctaatcttccggggga

SEQ ID NO: 31633 - DNA, 192 bp, Glycine max
  Clone ID: PAT_MRT3847_12856C.1
gttcattctccttacgcaccacactatcagtgaacccaatttctccgatggcgcccgttcctaatcgcgccggcaccagcgtccaggctaatcgccgccaatgacgacgccgttaccaagaagaaggtctaaaacgaatatctgtccgatgaggatttggctttgaagcaacagctggagttgtacgtggag

SEQ ID NO: 31634 - DNA, 384 bp, Glycine max
  Clone ID: PAT_MRT3847_128570C.1
tttttggccaaactttgtcacctttcaacattaaatttggatctcattttaaatgcatgccctttcaaccctaaatttggatctcaatttcacattttgtatgcatacttggtattttatattttacatagctgctccgttctagatatacgaattttacaacaaacaataatggcatccaaatgtataaacccaagtgcctcaacaatcaaatgcgtctctctctctcccttgatcaaaatttttatataaggggaaaaatagagaaggaaaaagaaaacacaaatttacgaggtgctactgaaaggctttgtatatgttggcggagatagcaatcacacttgttatcgcagctagtataaccataaacagtgcaataatttt

SEQ ID NO: 31635 - DNA, 511 bp, Glycine max
  Clone ID: PAT_MRT3847_128571C.1
tcgctgtttttcaggcgccttatgttgtattcatatgcatgcatgcttaatgaattggcaaagtacatgtgtacatttaatgactgtgctgtgattttaaatgctgaaaggatagtccaattcattttcagctcttcaatttacttttcagtctcataatttgggtgatgctttgtcatatcaatatggagttggatatagaagaactacatatggacttgacacaccctaagtcttattagcttttacttttgagtttacagtgaaatgcactaacaacagcttataaggtccctgcctattattttctttaaagctcctgttctctataataccttctagaaagtagggatgctcaatttatgagggcatttatgtgtgtgatatgaatgttagggtcataagagctcaagttgttgattcttatcagtcacattgctagttgtcatgaggttcagataagttttgagtgcttaatctatatctagaaaatttctggctaatgtaaatt

SEQ ID NO: 31636 - DNA, 409 bp, Glycine max
  Clone ID: PAT_MRT3847_128572C.1
aactaaagaaaccacgtaaccaggctgttaattggagaaaatgctcaaatattacaacttaaaggacaaatgcaaccattgaaggagaaaaaggaatttgcagagaatttaacaaaaatacggaggcaaggaaaaactccggggaaaaagggtgagtgacctggaaatttgaaaagagaagagctgagtggcacttgccttgggataaaaggattttaccttgggaaggttattctgtaaatggctctgaaaatcacaagagcaagaaaagtttttttcaggaaatatgaaaagaaagccctgcactttttctactattcaatggggggtaactaaaatccttaaatattgaaagaccttaggttttttaattggggctggggggatgttcaacctaacagggggggtg

SEQ ID NO: 31637 - DNA, 241 bp, Glycine max
  Clone ID: PAT_MRT3847_128573C.1
gctgccaccacagccatgacaacaacggcatgaaaggcagtgacattggtattgtcatacttgatctttaccatacgattctcagactatcatggcagtggaccactcgtcatagctacggggatcatactgatgacgctacatgactgctggttgtgtttttctgcgacctcgacgtgctgtacccctggtaccatgaacctcgatgcagcaaccccagagtgtcaatggttcgctggtt

SEQ ID NO: 31638 - DNA, 215 bp, Glycine max
  Clone ID: PAT_MRT3847_128574C.1
agagcactggcgcgatgagctcaggactatgaggtactggccattttgttctctgaaggcaaggcaagcagcttctactcttcgagttctggctatgcttcttggcaagagttagatcggacgaggattgagtgggcaccgtgtacgttcgtttctggatcacatcatagaagaggaggcactatattcagaacttggtctgaagctatacgaca

SEQ ID NO: 31639 - DNA, 237 bp, Glycine max
  Clone ID: PAT_MRT3847_128575C.1
gcggcctttttttttttttttggaccagaattccattaccacttattcctggggattaggatgaaccccaacctttttcctccttttccaattggggtaccaagggtttaatacccaaactgggcttctgaattaagttggcggttttaccaaatcttaatttttttcaaaggggggtgggagaatggaaaaccaccccaatcggaaggattggaggcgaaaagcagccagaaggtt

SEQ ID NO: 31640 - DNA, 354 bp, Glycine max
  Clone ID: PAT_MRT3847_128576C.1
ggaaccagaaacatggtattatgacctaatccgtgttcgtctaaacagcaacaaaagagggaacatgttactaataatcaacaaggaagacttcataacgcagcaacgacataaatatcctgcaccggacattaagaaaaactatgactcgggagcaagttacatgcgagaccaaaaaacacaagctgctcttagactacgacctaaataaggtcttcggcacccagggaccaaagcttggcaatgtaccccaccttacatccctggggctgtacaagaattgcagaagccgaaacaaatctcggggacgtacaaaatcgaaacaccatattaggttggacttaaaagacaacc

SEQ ID NO: 31641 - DNA, 557 bp, Glycine max
  Clone ID: PAT_MRT3847_128577C.1
tggctcgagcttcaaacatggcaatggcaagaggtatcgttaggaggatgaggaatacggttggtgctgttcttctactacgctcttcaacaacaacaactcattcacactccttccatttttataaagattctctctctccattggaatcccacctttgttccttctcctctactttccttcgctccttctctcaccatttcccagatgagacaactgatgaaggtgcaagcacagatggatgggaagaggaagatgaggttgaacccaagattggtgatgggggtgatggtggtgagagttgccttgcaaaatgttccttggggtcagcgagctctctctattgctgaggaggtgcttatgcagttcagtgaggacatcaaactctttgctttcaagacaactcctcgtggatatgtttatgtgagattggacaaattaactcatgaatatgggtgtccaagcatggaagagcttgaatgctacaatcagaaatacagacaagagtagatgaagttggagcgctaggagagatacctgatgatatggctcttgag

SEQ ID NO: 31642 - DNA, 210 bp, Glycine max
  Clone ID: PAT_MRT3847_128578C.1
ataaaacgttccacgtccttttagctaccattcctaacaaactgctaaataaattcacatggggctcttaccatccaaccttaacataattaatatcataataatgtcaaatgcgctagctcttattcccccaactgaacccaactactaccgctagctctcaactacaactatcccaacacacatacaccataacagaggctttacttt

SEQ ID NO: 31643 - DNA, 306 bp, Glycine max
  Clone ID: PAT_MRT3847_128579C.1
gcgttttaacgagctcacacacacacacaccaaatcacgcagcagatcctgcggtttgggctacggtaggtgcaacagactcattctcaactacactacacaacaccgttcaacttgctgcaaaactgtctagctgtactattactagagctatatctcatggagacggaattacatgaagatttacagcacccgtggctttcttcgaatgacacgcacagtgatgatgcgagagaccacacagacgctcaccaaaaccatgatgttttgagggaagaagttgggcagattctacaagctattgca

SEQ ID NO: 31644 - DNA, 464 bp, Glycine max
  Clone ID: PAT_MRT3847_12857C.1
attcattggaaaagatacaaagtttttttatatggagttaatccaattccacgttactctctgagtacatgcactatacataaaattatatcctcacagatctcttacgctgacttgctgagtgaagtctaatgtttggtctaacttaattatggataaataatagcttaattatcaaaagctcttttagaaagttagatgaaacaagtaattgtttctccataataaatttaaccaaacttactagtaagactgtttttggattgatgaaaaggaaaggagttgagtaaaatggaatgtaatgatgttagtttcaattgtttggatttgaaataagatataatagaatggaatctaatcattccatccaatgctccctcccttttctttccctctctgggatatgagggggaactagttcttttttttttaattacatcaaacaaaaatctacaaacaataaa

SEQ ID NO: 31645 - DNA, 1279 bp, Glycine max
  Clone ID: PAT_MRT3847_128580C.1
gtgggcagagaactgaagggtttagaatcacaaactagtttatttaccctacgacaaatcaaggcagcaacaaataactttgacaaatccttgaagattggagaaggagggtttggtcctgtttacaagggtgtactatcggatggcactgtagtagcagttaagcagctttctgctaggtcaaggcaagggagtcgggaatttgtaaatgagataggcctgatttctgctttgcaacacccttgtttagttaagctctacggctgttgtatggaagaggatcaattgttactgatttatgaatacatggaaaacaatagtcttgctcatgctttatttgccaaaaatgatgactctgagaaatgtcaattgagattggattggcaaacaaggcataggatttgtgttggtatcgctaaaggtttggcttaccttcatgaagagtccaaactgaagattgttcatagggacatcaaggccaataatgtgttgctggataaagatctcaaccccaagatatctgattttggattggcaaagcttaatgatgaggacaaaacccatttgagcaccagaatagctggcacttatgggtacattgctcctgagtatgcaatgcatggttatttgacggacaaagcagatgtttatagttttggaattgttgcattggaaattgttagtgggatgagcaacaccattagccagcctacggaagaatgtttctctctcattgatagggtacatctcttgaaagaaaacggtaatctaatggagattgtggataagaggttgggtgaacacttcaacaaaacggaggcaatgatgatgatcaatgtagcccttttatgcaccaaagtctctctagcactcaggcccaccatgtctttagtggtaagcatgcttgaagggagaacacgtattcaagaggtggtgttagacaaaagagaggtattggatgatgacaaatttgagataatgcaacagtattatcaacacagaggagaaaataacataattgagtctcagaacctaagtgaccctacgggggaatcttctaaacttttcgctgatacaagttcttctggtgagcaaattgaaagttagagaacttatagaaatgaacatcttgtcgttgctctatatatatttagtgtttggcacaacttattttgcaaaaatgaagatacggttcttgtatctaaataagtaagggtttgaacaagtttgcataaccaattgtaatagaatttaatgagtggaagaatacttcgttttc

SEQ ID NO: 31646 - DNA, 1784 bp, Glycine max
  unsure (1)..(1784): unsure at all n locations
  Clone ID: PAT_MRT3847_128581C.1
tggttggtaaggcagtaattaaaaatttcacagttgttgtgactagtaacgctttggagattcggttatattgggctgggaaaggaaccacttctattccatttagatcagtttatggtcctcttatatcagctatatctgttgatcctaactttatacccccatcagaaagtggtactagcagcatatccataataagggttgtggttgtagttgtggttgctggagcaattatcatcttgatatttggtatattgtggtggaagcgctttttaggatgggaaagatcagtgggcagagaactgaagggtttagaatcacaaactagtttatttaccctacgacaaatcaaggcagcaacaaataactttgacaaatccttgaagattggagaaggagggtttggtcctgtttacaagggtgtactatcggatggcactgtagtagcagttaagcagctttctgctaggtcaaggcaagggagtcgggaatttgtaaatgagataggcctgatttctgctttgcaacacccttgtttagttaagctctacggctgttgtatggaagaggatcaattgttactgatttatgaatacatggaaaacaatagtcttgctcatgctttatttgccaaaaatgatgactctgagaaatgtcaattgagattggattggcaaacaaggcataggatttgtgttggtatcgctaaaggtttggcttaccttcatgaagagtccaaactgaagattgttcatagggacatcaaggccaataatgtgttgctggataaagatctcaaccccaagatatctgattttggattggcaaagcttaatgatggggacaaaacccatttgagcaccagaatagctggcacttatgggttatggaagaggatcaattgttactgatttatgaatacatggaaaacaatagtcttgctcatgctttatttgccataaatgatgattctgagaattgtcacttgagatgccagccgccggcagggcgtaggttttgtgttggtatcgcacatctcttggaagaaaacggtaatctaatggagattgtggataagaggttgggtgaacacttcaacaaaacggaggcaatgatgatgatcaatgtagcccttttatgtaccaaagtctctctagcactcaggcccaccatgtctttagtggtaagcatgcttgaagggagaacacatattcaagaggtggtgttagacaaaagagaggtattggatgatgtgaaattttagatgatgcaacagtattatcaacacagaggagaaaataacataattgagtctcagaacctaagtgaccctacgggggaatcttctaaacttttcgctgatacaagttcttctggtgagcaaattgaaagttagagaacttatagaaatgaacatcttgtcgttgctctatatatatttagtgtttggcacaacttattttgcaaaaatgaagatacggttcttgtatctaaataagtaagggtttgaacaagtttgcataaccaattgtaatagaatttaatgagtggaagaatacttcgttttcaacggttgattctcttttcattaagaccatgtatttccaaatagatccagagaaatttgtaaaaataaatttcttaggttaagtgaaaaatcatgagaaccttttaaacttttcgatgatacaagttctgctggtgagcaaatttaaagttagagaacttatagaaataaaaaaaaagttggcgccccccaanttgtcnccccccccccccgtaat

SEQ ID NO: 31647 - DNA, 391 bp, Glycine max
  Clone ID: PAT_MRT3847_128582C.1
agacaaaaatcccatttgcataatcatgataacaggtcaaaagctcttttatacaccagatcccatgtgataaacttccacttgatagcagccgcaaaatgatctaaatataattaccaagcgtttttgtgatacaaaccacaagaatgtttgcttgcacttaatacgatatgtcaaaatatatcacatcacttaggcgtgtttattcacatttgttaataaacgacaggtcatttaacattttctcgattgcttaatgatactgaacccgtcctgttgacttggtagatggaaccataccaatatcttcctacacagtttctgggcataggttgtcaatgacacacaccttatactcagccaattcatatatgccgagaatttctagaac

SEQ ID NO: 31648 - DNA, 463 bp, Glycine max
  unsure (1)..(463): unsure at all n locations
  Clone ID: PAT_MRT3847_128583C.1
tactcctcttcctccctttttttttttatttaatactataatcactcatcaacgaccatccttcatttacacagaccaattgttacatattttataccatctctccacacaaaaaattttcatttaattaacacacctttgccattttctcaaattcttttaaaaaacaaaaatccctttcaatatgcaaaaacaataactattatcttcttaaaaacacatcttccatatataaaatctctttcaaattgtaaatccaactattcttatccccaaattaaactaaaacactcttcaagaaaactttttttttaatccacatttantaaaaatacacaaaatttcctttatatatccccctactttttctatataatcctaacatccactttcatatattaataactccttttcttcctcctttttcccactttctattttttttaaaccttcttcctttttt

SEQ ID NO: 31649 - DNA, 332 bp, Glycine max
  unsure (1)..(332): unsure at all n locations
  Clone ID: PAT_MRT3847_128584C.1
ggtaaangnagcnaanncaagagnangagnaagagcgaaancggcagagnaggatgggaaggtgtnngagggttctcagcaagccacagttggtgctcgcggacaagctattccttctccgggcantccgntgtgcnagacgttgacaaggttcgctacaaagaggntgtcttcaatcatgtnnaggaaaacgttntggtccctntgtnatgaaaccctagtcgntgattccgtggtngnacttggatcgtgcccntttngactctatgcgcgctaaaattgncgacgagctcnccangctcgacgaaagattggtgatgncgaggtaaant

SEQ ID NO: 31650 - DNA, 1168 bp, Glycine max
  unsure (1)..(1168): unsure at all n locations
  Clone ID: PAT_MRT3847_128585C.1
attatatattaatggttaagagtggggattcagttacatgttctcgactagcgaaataccttgctagcggggatattatgagaaaggagtcattgcgccattcttcccttccatgtgatcctcttgaagaagatagatttgacaaggaaacttatcgcgttgcaagcactgaagcctttgcaaatcttagttctagcattagtttgatacacttgtattgctcacggctccctgcagatgggtactttaaaccaactctgaggtgggacaaagagactggaacattgtatcttcccaagagctgccctctacagcctattcgtgtagaaggagataaaaaaatcttaaagaatatcgcatgccttgaagcatgtaaacaacttcataagattggagctttgtcagataatcttgttcctgatattgtcatggaagaagcagaggtggaggaattagggaatgaaccttatgatgaaaaccaaccaacttttgtcccatttggattggtaaattctgtgtcaaataatagtcaaacggtctatcattgttatttcatggaattcaataacaaatttagctatgatgtatctgtccaagatatttttcttctcatgcgaattgagctcgatccagaaattggatgcatgcaatttgatatgggttttgacagaggtagcttgtcggtaaactttagatacaaaggaaccattaatctttcgcctgatcaggttcttttgtgtaaaaaattccaagttactatacttagaattctaatagatcatgatatgaataagttgactgctggtttggacagatgctatttggaagatgatcttgagattgattatcttctgcttccagctatgggtaaagggaaatatacagctattaattggttagctgttaattctgtaaatccatctgaagttagctgtaagtatcatgaaccccacataaggacaaaaagtggtttagtttgcagttgtaaactacaaaatgcattggtttgtacttcccaccctattggtaagattagcttctatattgccaccggtacaatggaattggatggaaattcacctatggaacttacgggtngggggttactacgtacaagagtactatgaacaaacaccatgcattcaattgcaatttgaacatcaacgac

SEQ ID NO: 31651 - DNA, 459 bp, Glycine max
  Clone ID: PAT_MRT3847_128586C.1
tcacgtggatctgcagaaataattttgctggataattatagactgttttgcaattctgttcacaaaatcaccctggatatttttttttttctaactgccttattgtttttcaaactatacagaaaatgattaattatccttcccagatatatacatgcttggggttgtttgaaggatgctgtaccagattaaagtgatgaacgtgagttaagaccttcaactcgcaaagaaattctgtcgatgcttgcacatccatcttcttaattgcagttttctgcatagaaatgaattatatgagaggaaatccaggaatagagtagaaaaggtaaacggttaacctgaaacggcataaaagccagaaacttgtcaatccacccttgagaatattatccactaataagtgaacaatgccatatgtacctttcagttcaatgaatagtctactgtaaaaacttatat

SEQ ID NO: 31652 - DNA, 503 bp, Glycine max
  Clone ID: PAT_MRT3847_128587C.1
ctgaaggtggtttggggttttgttccctaagtaattaatgatgcttctcttcttaagttgggttggaactcaataggattgggttttgttgtttgagggctagggtgtttcgtaattccaaacatatgctttataacattagttccttcatttggagtggcattaaatcttggaaaattggtaatggggatagaagtttacttattggcacattcctaacattcttttccaaaagcttccttgtctaagagaagaaatttgttgtgcaaccgagggagataaacactggagagatttacaccaatgagtcatgaataaccacataagtgaacttgataccacactttaacctacaaccttaagactcaggtttataggtattactttcacttatatggtattcaaccttctcattcctatacgatgtgagacttcacctcacacttgtagtccaacaatctcttccttaagtgtgagtttctttcacatggtagtctcctcct

SEQ ID NO: 31653 - DNA, 551 bp, Glycine max
  Clone ID: PAT_MRT3847_128588C.1
ggattcccgggtcgatcacgcgtcgcccacgcgtccgatttcaagtggagaaagagatggttcgaatgggagacatttttggttacaaccataaatcacatgttagcaaatgttagaattcagaaacagggtcgtgatagttggtggtggcttgatgacaacactggaatatactcagtaaaatatgggtatagggtcttgcataatttacttatgggaagtcaaccaacagaggcgttttcaatgatttggaaattgaaggtcccgaagaaagttatatgccttgtgtggagagagtattcttggattgattgccaactaaggacaatctaaggaataggaacattatggatgcttcacaggatgtgttttgcgctttttgcggacaatttgaggaaacaaccccgattgaaccattttggcagcatttacataaagttttgaaaaaagaagcagaaatgtgggtggtagtttggtgcacagttatatggtacgtttggtgggtaagaaataaatgtggtttcacggaatctgtttttgacaggacgctg

SEQ ID NO: 31654 - DNA, 1857 bp, Glycine max
  Clone ID: PAT_MRT3847_128589C.1
agcaaactctacaaattcagagatcaaattgcaaataagtggagaagtaatgaagtttaaataaaaatagaacaagtgagaaggtaaaatgttgaaataactataactgtagcctcttgcactgttgcacataccaattacatccaaaaaaaaagagaaagaaatagaatatagatggcaggaatttgaaaaatggaatcaggggtggtggtcaatcttgaaagagggtaaataacccggcatgtaaagattgacggagaacaaacgacaaagggacattttagtagagctcatataatcctgtgatgactaatgggacctttggcgggccagggttatcctcgaactattattatcttatatccctttctcactctaagatacatgacacgcaagaattaggctacggttgccttttccttctggtcaccaaaaatgcgttgccggaagtcagaaaccattagtgggaggcccttgcgcagatcaaccttgggttcccagccaagttgatccttagccctacttatatcaggctttctcttgtgcggatcatcctctgtgttcggcctgtactctatcctagcatcagggtcgattgtttcttgaaccaccttggcaagttctagcattgtaaattctcccggatttccaagattgaaaggtcccacgtgttctccttccataaggcggattagaccctccaccaaatcagagacatattggaaacttcttgtctgcttcccatctccataaacggtcagaggctccttccttagtgcctgagcaacgaagttactaacaacacgaccatcatctaagcacattctaggcccgtaggtgttaaagattctagcaattctaacctcgacgccggcacctcggtggtagtccatggtcaacgtctcggccgtacgctttccctcgtcgtagcagcttcggacaccaattgggttgacgttgccccagtaagtctccttctgagggtgctgcagaggatctccataaacctcactggtactcgtcaacaagaacctcgcgcccactctctttgcaagccccagcatgttcaaggtccccaccacattggtcttgatagtcttgacgggattgaacttgtagtggacaggggaagcagggcaagccagatggtagatctgatcgacctcgagaaggagaggctcaacgacgtcgtgtcgaatgagctcgaatctagggtttccaaaatgatgcatcacgttctcttttcttcccgtgaagaaattgtccaccacgatcacgctgtcccctctcgcaatcaaccgatccaccaggtgcgacccaacgaaccccgcgccgccggtcaccacgatccggagccccttcctcttaattcccaacggcaccttccccaccgagtgcaccgccgcagcgacgcggtggtggtacgccggaatctttgactcgcgctcgaagtaggagatcgggagagactcgtacgaaacgcttgaggaggaagcggaaggggaagaggaagggacgaatgtgaagaagagggttgctatgatgacgccgaggagaacgaagaggagtcgctgctcgcggagcatgtagtgaatcgggcgagtcacggtgagccagggcttgtggggcttcggcgagtacgcgtcgtccacgggctgagcctcgtggcctctgaaaatcagttcggagcccatttctgtgttcttcttctcagtcaattctcttcttcagccagggtttggtttgggctttgccaagtgaagagaaaattgaaatgcggaatggactgagttccgagttgggaagagaccgcgactcagtcgccggggacgggaatgagatgctgcggacgcgtgg

SEQ ID NO: 31655 - DNA, 111 bp, Glycine max
  Clone ID: PAT_MRT3847_12858C.1
cggctcgaggtgttatgcaatggagatgtattcgcaggcccaatgttgtcacacaaggacgatgaagacggtgttgcttgtgttgatgacatagctggtaaggtgggccat

SEQ ID NO: 31656 - DNA, 230 bp, Glycine max
  Clone ID: PAT_MRT3847_128590C.1
tactcgttcttcttcttttgttgttctgtgtttgtgtttgattattctctctcctgaaaatgacttgatgcggtggtaactgtggttgcggaactcctgaaagtgcaacaacggctgcagagggtaagattttcgttgtaacattgtattattcttgggaaaatagagtttttccaggaaaattttctatatggattttaaattgatattatggttacccttttggtaca

SEQ ID NO: 31657 - DNA, 672 bp, Glycine max
  Clone ID: PAT_MRT3847_128591C.1
ttgaagtaatgaagtttaaataaaaatagaacaagtgagaaggtaaaatgttgaaataactataactgtagcctcttgcactgttgcacataccaattacatccaaaaaaaaagagaaagaaatagaatatagatggcaggaatttgaaaaatggaatcaggggtggtggtcaatcttgaaagagggtaaataacccggcatgtaaagattgacggagaacaaacgacaaagggacattttagtagagctcatataatcctgtgatgactaatgggacctttggcgggccagggttatcctcgaactattattatcttatatccctttctcactctaagatacatgacacgcaagaattaggctacggttgccttttccttctggtcaccaaaaatgcgttgccggaagtcagaaaccattagtgggaggcccttgcgcagatcaaccttgggttcccagccaagttgatccttagccctacttatatcaggctttctcttgtgcggatcatcctctgtgttcggcctgtactctatcctagcatcagggtcgattgtttcttgaaccaccttggcaagttctagcattgtaaattctcccggatttccaagattgaaaggtcccaatatgtctctgatttggtggagggtctaatccgccttatggaagga

SEQ ID NO: 31658 - DNA, 1466 bp, Glycine max
  Clone ID: PAT_MRT3847_128592C.1
ccacgcgtccggcattttcagctaaagaacaaagaatatatgctaattacattataagcaaaatacaagccagtggcaattactaagaagtgatgaagaaagatattatttgcttaccaaatcagagacatattggaaacttcttgtctgcttcccatctccataaacggtcagaggctccttccttagtgcctgcaataaggtcaacaaatagagacaattattacagaaataaagccaacaacaactgctccattcctaattcaaatccaaataaacaaaacgccaacctgagcaacgaagttactaacaacacgaccatcatctaagcacattctaggcccgtaggtgttaaagattctagcaattctaacctgtaaaacacaatacacaagaggcaccgtttaaattttcactacttgagaagtccatcaaaggctgaactcaacacaagaattaaacagcaacgaaaattgatgagagagagagagacagaaaagaatcagttaaggtccgtagaaaatgacctcgacgccggcacctcggtggtaatccaatggtcacgtctcggccgtacgctttccctcgtcgtagcagcttcggacacctgtcacacatccatgcacccacacatatcatgaaaccatccatcacactcttgtcactttaagagtaaaaactggcctattttgttttacccctcttaaatatgaaaactaataatatagtaaaggcctaaatatattttttttatgtaatataacattttttaattttcgtcattataaaaaaaatcattttagtccatataaaatatttttgttatttttttatctttgaataacactttaaaaaagatgtctttcatagtaaaaaaatacatatttttttacgaaaagaaaaaaattgcaatgacaaattaataaagttctgagcattgcatccaggtactgtcttgcagccaggtccctcctccttccatagttcccagtttatagtttctacccaagtacttttaccagggctgctttgttgcaatgaaataggatatgactatggatgcgtaacaacaaaaaaatatctctacccttcattttgtggaccagcatatcacgggttcctcgttggccagaccctggaattcctactacgtggtcctctacttccgttccacgtttcttattgagttttgaaaaatatgtctcacacggagtgtgctgcagcaagtgcaaggcgtgtctctgacaattctaattctaaacatggcccagaaaggccggtggtgaccggagaacataataagagaaggaatgctaaccaattgggttgacgttgccccagtaagtctccttctgagggtgctgcagaggatctccataaacctcactggtactcgtcaacaagaacctcgcgcccactctctttgcaagccccagcatgttcaaggtccccaccggacgcgtggg

SEQ ID NO: 31659 - DNA, 236 bp, Glycine max
  Clone ID: PAT_MRT3847_128593C.1
ccactctaatatcttctggtcatctctgttaccttggtggcgaggttcgttactgcttttactttacttttccaccttcaaaatcgtaaccaactctactttatttatttattattattgatgtaattaagtgctcaactccttagttacaatttaggactgttagaaattgatatcgtcttttttgttttttgcagtggaggcaagatgttgcttttgcgggttttgaggttcca

SEQ ID NO: 31660 - DNA, 498 bp, Glycine max
  Clone ID: PAT_MRT3847_128594C.1
tacgctgcgagaagacgacagaagggcgctagaggaaagtctcatggtatagctccataggaagtctagataagcacacccatacaatgattttctttgttgttttaatgctctccaaaaaagctggtctccatcgctaaacaacaacgtcatgatcggccaccatccatgacccctcaaacaaagcatgtctataatctttctccgatgtgaattgcaccagatagtaataatctggcatgtctacaattcgaattttaccatattgggcccaaccttgttgtaatttatactccaacatcttaaaccccactgtctttctaagaacatgtaccacaagagaacccttccatggtgcacaccagacaacacattcagaatccagaatattcacaataggacaagagataaaatccttctcctcttcacttttgtccctggacattttatcaccatctcgctgatccttctccatacttaaatatgggaacgtcacta

SEQ ID NO: 31661 - DNA, 262 bp, Glycine max
  Clone ID: PAT_MRT3847_128595C.1
ttacaattatgtgtaacattttaaaattattaattcggaccccggagtgaggagccttaatcccgggcagtcaaatgaatccttcccaaattttacctatccatagtgataaaataccaaagcggtttttgggacaatactgcatctaggaaaaatattaaacaaaataagagtcccccacaacattaaaaccctcttgaaaatcagaacagcctatcatcgccatctaaaaaacaatactaataacactgactcagcacta

SEQ ID NO: 31662 - DNA, 218 bp, Glycine max
  Clone ID: PAT_MRT3847_128596C.1
cccacacttgctctaaatcattgctatttctcatgaagcctgctttgaatatcctgagagggttgctccaaaatttttgggtattgaaattgccaccttgaaaaaaatggcgccccttctaatgaatccattcttacttctcttgcactcacaatcttaatggacacaaaagataccttaattgaaaccaccagccgaagctttacaaagattatacc

SEQ ID NO: 31663 - DNA, 215 bp, Glycine max
  Clone ID: PAT_MRT3847_128597C.1
tgggtcgtcaagatagtccgtgctcagagttctgtgggttcgtccatccggtgatagtgtagttatgagagccacgacttgacccgatggatgtgatagagtccggatacgtgttggtgattctagtctcagcgacctatataggaacctcttctgagcagtgcatagctagacagtacaatatccatgcccttacgaaaaaggagacagtgggt

SEQ ID NO: 31664 - DNA, 521 bp, Glycine max
  Clone ID: PAT_MRT3847_128598C.1
gctcgggaattcgggctcgagtgcatttgtgggatctgatgacatgctttctttatggaagaggaagagtagtgattcttcgcctgttaaaagttctagggatgagaataatgctattgtggtaagatccagaaactcttctccaactacagtctcgaattatgggtatactgatggagagcttgtcaaactagaaaaggatgaaaaggttagcattgtaagggaagatgatataggtgcatcactggaggatgaagaggcagctgctgtgcaagagcaggtaatgcaaataaaggctcaagaggaggaatttgaaaccttcaatctaaagattgtgcacaggaaaaacagaactggctttgaggaggacaagaatttccatgttgttttaaattctgtactagctgggcgctatcatgtcaccgagtatctgggatcagctgcatttagcaaagctatacaagctcacgacctgcacacaggcatggatgtttgtgttaaaattataaagaacaacaaag

SEQ ID NO: 31665 - DNA, 264 bp, Glycine max
  unsure (1)..(264): unsure at all n locations
  Clone ID: PAT_MRT3847_128599C.1
gtgactcccgggggaagacagcccacatttagcgggggatctccggcgccgacacaccgagaaaacgcggccaaaaaacggcgcagcaaaaaagcgaccccgcaaacggaacacggcnaccggccaagaccacccagagggggcaccaaggaaaggacgaggncagggacaaccacaccacaccacagaaggaaaagaaggcagaaagcaagaggacagccaccgaaaaagaagcagcgccaaacacaaacagacggggaacac

SEQ ID NO: 31666 - DNA, 352 bp, Glycine max
  unsure (1)..(352): unsure at all n locations
  Clone ID: PAT_MRT3847_12859C.1
cttaacgcccaacgcgtggattatcgcgtcgtggaatcctcaggcttgaggctatcccctaagggtcaccacgctgcctggggggcagcctactgtgncgaacacggccacctctttccgattctgactaaggctatatatccacccgacttccccctgctttaccaccgataccatgcaatacgtcttcactaggaaactagcacctgcatataggaaaactaacctgctacacgtaacactactcctatggggtgaacaatccacatgggaatttgttaatatggaagaccacatcaagacaaaaacacgtcttacctgctgacaccgttctgggacttttacccttact

SEQ ID NO: 31667 - DNA, 414 bp, Glycine max
  unsure (1)..(414): unsure at all n locations
  Clone ID: PAT_MRT3847_1285C.1
gacaaaaccgagtacttaccattagagagaatgcgagactacaaggatttcctgattgctataaactttgtgggcctgtcaaagagagggatggtgagctgggttcanaatccacaagttaatttgttctactttatcagggaaatcattcaatactctttatctctcttttactatcaccttccttaccccaagttataatttcaagtcctatactaaattattttccctttttagccctcaatggttctattcttctatctataatacaggtacatacaagttggaaatgctgttgctgttcctgttgctctagcattgggatacacgtttggtttggcctgccagggactgtctgacgataagcctttgacaaccctccccttcaagtatccaagttgtctttgcctttca

SEQ ID NO: 31668 - DNA, 1185 bp, Glycine max
  Clone ID: PAT_MRT3847_128600C.1
tccacgcgtacgcccacgcgtccgtcctcattacaacaatatcgttcgatatccccaaagacactgcttcgaaaccctaattcagaaaccaatggaaccagaaaccaattgcatagagctgaaactaatttcctgcaaggacataagcgccttcaacttcttccaaaaactcaccctttacgcgctcgtcttcatcgagagcgaggatcccaaaacggatctaacggcggaacagaggcagatgcagagaacgttaacggaccgagaccccgacggcgacggcagcaacccagagtggaaccaccacgcgcgtttcgatttgtggtggctttcgcactcttcgcgcgattccgatggatcagatctctttctccgcttcgagttccgccatgacggcgtcgttttaggcgacaagctcgtcggagaatgccgcgtgccgctcgccgatctgatccgcgacgccgccgacggtgcggcgaggttcgtgagctacgaggtgaggtccggggaaggtaggcccaacgggatcttccatttctcgtacagcgtgaaggggattggggcccacaggtcgcagattctcgaggggagaatctccgggtacccggttctgcctccggaggattgcgctcccaatcaggtgcaacaatatccatatcctacatgtcaaattgagaacacgtgttgttacccgacggttgcgttgccggtgggttctcccgtctattccgccgcagttccgccacctgtttttactccgtcggatggagagtatcattgttattacccgcctccgcctccgccgccgccggtggtgtatccataccctcctccgcctcctccggtgttgcatgcttactcgccttatgggccggaggcccatccctatccaccaggcccgtattgtaaacgcaggtggtaatgtactttaacaaagagtacgaagcccagcccatattttctgaagagtatatttcctcaacgagacaacgacagtgttcacgtagctgtacagtattttttttaaaatttctcttctaattttatgtacggaaattttgttgtaaacaattttttggtaatgctcggagttttttttttggtattattgtttttgtcttaagtatgtttttcttaaatttgtttttcatcccttcaatatattatcttttcagtttactgtct

SEQ ID NO: 31669 - DNA, 268 bp, Glycine max
  Clone ID: PAT_MRT3847_128601C.1
cttcttcttcttcttcttcttcttcttcttcttcttcttcttgttcttcttcttctatatatatatatatatataccatgtatagcccgattagcagataaacaccaccaatggagtctcacgtggacaccattctctctgcaatttcagttctactcctttcttcgttaacccatgtcagcatcagcgcaaatgcaacaagaacaccccaagaaaacagcctccatctccaagtagcatactccacatgcgagggaacactctactc

SEQ ID NO: 31670 - DNA, 202 bp, Glycine max
  unsure (1)..(202): unsure at all n locations
  Clone ID: PAT_MRT3847_128602C.1
agactacaacctgcgggagagtactttcaaaatgcagacagacttaacacttcgctgcccccaacggtgtgccagntgcacccacaaagagtgtctaccatatgaccatctttgccaccaacatcgaagcgctgcgtgcctcacctcgttactctgcgattaaggatgcaacgcgggagaccgacactttaactgttgacta

SEQ ID NO: 31671 - DNA, 445 bp, Glycine max
  unsure (1)..(445): unsure at all n locations
  Clone ID: PAT_MRT3847_128603C.1
ggattcatcaatattttcttctcatcgcttaatttggaagtgttttccttcattaatttctcatccaaatatatattcacttcattctcttcttggctaccttggcagtttaacttcacgtggctttgcatgatgcagattccaccaagaatggccacttcattttctgccaactctcccaatattgcagcaaacaaggtactactatatcaattaattaataagagaataatattcataaataatttctaccatcatgcacgttacctgtcttactcttgcaaagagtaatatacctttcaaacattttagaaaggtaaattgaacagcgttcttttaatatttaacacatctaaatttacaaggngtctaacgtgtcaaataattaatcataactactatacttatcctccatctttttccttcaaaatttgaataaacatgg

SEQ ID NO: 31672 - DNA, 435 bp, Glycine max
  Clone ID: PAT_MRT3847_128604C.1
aaagaaccgaaacaccaattcaagggaaagaaagataggaaagaaaaccctaacccaaagtgtaaataatggaacagaaaattccacacaaagcaacgaaaaaaaaataaaaacaaacctaccctttacaaaaccaaaaaaaataccgtgtgtaatactgggccccacccagaccccgtaaaaaaaaatcgcccttttattcccccgggccttaaattggggggccgaacaaggcccaaaaaagctaagggaaatgactttaaagatgtttttttttaaaatcccaaaagaaaaaaaaggccacacaaggctcggtgtttatgaaagtttggttggcacgcccaaggcgcaccgtgcttggggaaaattttttataagaccggcgggactgggggccccaaagcgctgtgaaaaaaaatttggtaggaaagggaa

SEQ ID NO: 31673 - DNA, 171 bp, Glycine max
  Clone ID: PAT_MRT3847_128605C.1
tttttagggatataaaatcaaattctaatgttatagatgaagcttataaatttattggctggggagatttcttagactttctcataacacaaatcccagattcaaacccaataatatgtgcttaaagaagaatctaaacaagtatatcatatattcaaagtgagttcgtat

SEQ ID NO: 31674 - DNA, 142 bp, Glycine max
  unsure (1)..(142): unsure at all n locations
  Clone ID: PAT_MRT3847_128606C.1
tgcgagaggacgcagagtngggaatgttgtggtatggttgagtgtcaaatggcggcgagtagaagcacttttgctctgatgagatacttgagagtgcgcgtggacgctcttccccacgacagtcccttaagcctcggtccca

SEQ ID NO: 31675 - DNA, 745 bp, Glycine max
  Clone ID: PAT_MRT3847_128607C.1
aagggaatcgcgtccccaatcacaagcgaccccatcaaatgaaagaagtctctcagcaccccccgaactcgctttgcctgttggatctacactcacacagtatcgctttccagaaatcatcctcagaatcacgttcagattcatttctccaaaccactgcttcatctccaccaacaaatcaccagaggacacgcctcttttctccgcccacgctctctgtagttctctcaacgagctctttacctcggaatctctaatacctcgaagcatttcagcctggcgagtggagagtagctctgaaaccgtaatcttgtgcatatcgcgccagaaatctccgtatggggcgaacgcgaaactagcatagttgtatgtcaagatttttgcggcggtgaatttgggacgagaggagacagtgacgtcaagagtggtgaaacactcttttgctaactcccaagagctcaccacaacggcagggtgaacaccaattcggatgctgaatattgggccatacatgtctgctaacgttcctagggtttcgtaaagaggctgaccggagccacccaagaggtgaagatgaccgatcaaaggccagccaccggatgctgccggtggcttgcgagcagaacctgctgtagcccgtttgattaagaacgccatgtaagaaattaataggaagacacaaactccaacacccgttgctgcgtccatgacaagttgcgagcgctgtaacgacttgtggatcaac

SEQ ID NO: 31676 - DNA, 431 bp, Glycine max
  unsure (1)..(431): unsure at all n locations
  Clone ID: PAT_MRT3847_128608C.1
agataaattgtcaaattatttttcttggcatctgcatagttataaatggccttgaggtctagctcagatccttatttagttctacaattttcttgtgtcaactgaacttatcaccaggaactattcaatatttaagttacccaaaatgtcctgtgagattatattcacgtcggagtttctctcattttttcactagttgctcataattaattttaagtttctgacaatattttaagattagagactgagcaaaaacttttggagttaaaaagcttatacttgattgggaccctcttggtgtataatcaaatgggtaatgatatatattgaacttacttctagaagatgcatgctaagaacactctagtttttgagaaacgagaggttgangagatgcaatagctgaagagtctgaacattcctagttctgc

SEQ ID NO: 31677 - DNA, 460 bp, Glycine max
  Clone ID: PAT_MRT3847_128609C.1
gttggatgttatatgttttgtagcttatgttctttttattattatttatttttagattttgtggatatggaaaatttgttgatcacaggatgataggggtgttcagagtgttcgaagagggggcccccaatatcataaggatattctactatatgagagagcaggtggaaagggtttggagcacaggaggactagaacaaccaaggaaataagagaaaaaaaagggacaaaaacctggccagaaagtactggatgaagaacgtggaactgggggaggagacatgtacatggcagaaaattttgaagaagaagatgttggcattgaccgctacataaacataatttctgttgccattgaacgcgccattggactcagatgctgcgcagaatttgagtgtgccgattgcactaaccgaacaagggctgtgaaaacataagatgtaatgtaggggcgggacac

SEQ ID NO: 31678 - DNA, 497 bp, Glycine max
  Clone ID: PAT_MRT3847_12860C.1
ggaaacaaaacggggatttggcaaaaaacctaaaaaaaggcttgggcaaatttaacatgggaaaggccagggcccaaaatttaccccccccaccaacccggggggctttcacccaaatctggaataaaaaaccccccaaaaacggggacccttaaaaaaaaaaaaaaaatttggctttcttaaatccaaccatacccaaaaaagggggggcaaattgggaaaaaaacccaaaggaagctttcccccaggctggccaaagaagcatgggcccaaaaaagccccaaaccccggggaaaaaccccacccccaaccccagggaaaaggcttaaaaaaaaacggaaggggcacctcccccaaaaaggggggggtctgggggcttaacgggggttcaacccccggggcaactttgggggggtgggccaccaaaaaaaccaaaatttccttaaaaacaaaaggcaaaaaagggtggcaacggcctcccccaggggattctccca

SEQ ID NO: 31679 - DNA, 181 bp, Glycine max
  Clone ID: PAT_MRT3847_128610C.1
gctagaacacaacacatatgccagatgataaccaattcatctttgcagctcagggatttctttgtagggacgcgtaatctattcaagttttagatggattcatcttaaattcacaagttatgactgattcactgcgtgctaatacaactcaattctccataccatgagtcatttcacccat

SEQ ID NO: 31680 - DNA, 138 bp, Glycine max
  Clone ID: PAT_MRT3847_128611C.1
ggttaaatccaaataacgcaatattgttttttgttgcccttgaaaacaaaattcttccagggcctggattgggaagaagaggaagaaccgattttcttcagagtctcacttggccttgacttcaacgccagatttgcc

SEQ ID NO: 31681 - DNA, 520 bp, Glycine max
  Clone ID: PAT_MRT3847_128612C.1
gagaagacaaaggtcaacatctttctgtctaacttttgttagctctctttgtaagtcttaacaatactttacttttagctcaggtaacaaatcatgttgtctctggcctacacatgtaaaatggtgcagtatactattttaggcattgggataaaaagaaaattgtactaagaggcattagtcctagtcaattaataaataaagctaaagttgattgaaatatatctttagaaagtgtatgccaattctctcactatatctttcagctttggcctacacacatgtaatcatgcagtatacgatacaagtaccaagaggcacagtacactattgatcaaccttaaatgatgcagtatactattatccaagaattaagaggcattagtacacaattggccaacctattacaaaggattaaggtattgataaagattaaggttcctgatcaattaataattaaaatttattgaaatcaatctttacttagaaagtgtgtgccaatactcactatttcttttgt

SEQ ID NO: 31682 - DNA, 158 bp, Glycine max
  Clone ID: PAT_MRT3847_128613C.1
gtaatttctgccagcctcaaaaaagcacttgctctgactctgaccatgtctgagtacgactaccgtgacatgcgccactcagtatccactgttggagctgtccacggagctccactgagcttgcacaggtctggagacggaccttcagttcgcagttc

SEQ ID NO: 31683 - DNA, 770 bp, Glycine max
  Clone ID: PAT_MRT3847_128614C.1
gtctatcccttactgttctttaaaagtgcaaggggcttagccattttacagttgctaaagctggtgcactggtctcttacaaactgggcactggtttggttgttgctcgaagatcagatggatcatggtctgcaccgtcagcaatattctccctgggtttaggatggggtgctcagattggtggtgaacttatggattttatagttgttcttcgtgatatgaaagctgtaaagacattctgcagtcatatgcatttttctcttggtgctggttgtagtgctgcagcagggcctgttgggagagtgcttgaagcagatattcgtgctggtgacagaggctctggcatgtgttacacttacagttgcagtaaaggtgcatttgtgggagtttctttggaaggaaatatagttgcaaccaggatggatgccaatttgcgcttctatggtgatccttacctcaccacatctgatattctactgggaatggtggacagaccaaaggctgctcaacccatgtatgccagtcttcaagaactatattcctgtttacgattctaagctggtttcaattgcagaattgcaagtgatgtgataaatagtgcctgatgtatatacagttctagttcgtgcatggatttgtgaaatgtaattccagaagtcctctatatttggttcatatggatgagggatctcctcataattcggttatacatcatatacttatatttattaaaaatgatgcaaatatccaatacacgaatttataatgtg

SEQ ID NO: 31684 - DNA, 543 bp, Glycine max
  Clone ID: PAT_MRT3847_128615C.1
ggtttctattagatagttttcaatgagattccaactatacatatagccttctatcactctcacactgagcatcccatactacttgatgtgggacttagacaccccataatacccaagtccctatcatattcatatgtccctggtaaatatatccaagaccagatttgcctcgtgggtttcttacactagtagttatcccatcatacacgtcttgtattagaatacatgtaggaactacttgttcggattttctcttctcaaatgctactgtgttgaattgagaaatatattataaatatgaacttttattataaggatggcaagagttatggactgaattcaatctgaatagaaggataaaatttctaaatggtgcatttagtgtggtaatatggagttctatactcttaggtatagtatagtttgtagaagggactttttctttcaaagaatctgaaatgtaaatgcacacaacagaatgttaatttaacctttacatgtggagaaacttacacaaccagtctcctaggatgcataatttac

SEQ ID NO: 31685 - DNA, 2270 bp, Glycine max
  Clone ID: PAT_MRT3847_128616C.1
gttaccccagtacaatcctttccgttcaatttaaatttcccataaactttctttgaggtctaatccttcctttaaattctcttttcttcttctgcccccttttccacttcaattaggtatatcgccgattcgattaccaatttgcttaaactcaatcaagcttcgcagcgtcaatcattctattagaggtgatcataatccatgttatgattgttcttcatcactaagttgtattttagtctgaaccgtaattgtaattctcccacgggtttagtcctggttttttctttgcgcgattaacttatcggattgcaaatcgatgcttagttcatgtttttcaaaaaattcatgtctttccctggtcatatgtatttttccttgggcgccgtcaataaagcttctgcacttggaattttgagttggagtttaggaatgttatatttgagggtttgtagtgttgttgcatgtgtaacaggtatcctcgcattaaaggtgcatttagtctgcgttatttaagaaggaaatatagtatgcccccaggatggatgctcaatttgcgcttcatatggtgatcctttacctcaccacatctgatattctactgggaatggtggacagaccaaaggctgctcaacccatgtatgccagtcttcaagaactatattcctgtttacgattttaagctggtttcaattgcagaattgcaagtgatgtgataaatagtgcctgatgtatatacagttctagttcgtgcatggatttgtgaaatgtaattccagaagtcctctatatttggttcatatggatgagggatctcctcataattcggttattcaaatgagacatttattgactctggaaagaatggggatgtttttccttgactcttcggtgtacacgccaagtgctccgccactttgtctgccaaatggaattgattatagttcttacaaagaggtcttggaagctgaaccccctgagtggctccctgatagttctactactgtttgtatgcaatgtagtgctccttttactgcgattacccgtggtagacatcattgcaggttttgtggggggattttctgtcgaacatgtacaaaggggcggtgtttaatgcctgttgggttcagggaaagaaatccccaaagggtttgtgatgcctgctatgatcggcttgatcctttacagggcgttctgatcaacaccataagcaatgccgtacagggggctaagcatgatgtcacggactggacttgtgctagaggatggattaatcttcctattggtttatctatggagcatgagatttataaagcatctaatacattaagaaactactgtcaggtggccaaatccaatcctgagaagtccattcctttaactgttcttaaaagtgccaagggcctagcaattttaacagttgctaaagctggtgcactagtctcttacaaactgggtactggcttggttgttgctcgaagatcagacggatcatggtctgcaccgtcagcaatattctccctgggtttaggatggggtgctcagattggtggtgaacttatggattttatagttgttcttcgtgatatgaaagctgtgaagacattctgcagccgtatgcatttttctctgggtgctggttgtagtgctgcagcagggcctgttgggagagtgcttgaggcagatattcgtgctggtgacagaggctctggcatgtgttacacttacagttgcagtaaaggtgcatttgtgggagtgtctttggaaggaaatatagttgcaaccaggatggatgccaatttgtgcttttatggtgatccttacctcaccacatctgacattctactgggaatggtggacagaccaaaggctgctcaacccttgtatggcagtcttcaagaactatattcctgtctacgattctaagctggtccctggttccagttacagaattgcatcattttttctgtcttctgcaagtggtgtgataaatagtgcctgatgtatatacagttctagttctacatggatttctgaaatgtatggatgagggatctcctcataattcagttatacatcatatgtttactacaaatgatccatatatctaatacacgaatttataatgtgaatatgttagactaattgtacatagacaattggtgaaataagttctattcgtttgctgaattcttgttattcttgctgtgggactttcctcgaactgaaattgtaagttggtaatatttaaaaaagttcaaagcctattc

SEQ ID NO: 31686 - DNA, 414 bp, Glycine max
  Clone ID: PAT_MRT3847_128617C.1
ctgtgaaattgaattcgacaacaaattcaaagaaaaattgtttgcaaatattgaaccctagcatgacgaccccctgcaactacatttcgatagcccaacctaaaaggagtgattgactgctcctatttatacagaacaaggttgaagcaaacaactgaaagatgatgctacatatcaaacctagctgcattggtctggtggcactgactgggccaaccttatatcaactatatctgagtccacctttgttcctccatccaatcatgatcacttctttgtcgaagaacgtaagctctatagaagtgtgcaccttcttcagggacaagagaaaccactctttaagatatctgctgtaaaacgcctgccacactgcatgaatccggaagccattagagaaaatatattgctctcaaa

SEQ ID NO: 31687 - DNA, 1079 bp, Glycine max
  Clone ID: PAT_MRT3847_128618C.1
gaagagatcgggaagagatcacccgttatgcttagttgcagatgatagtgtgtttttacctcttcttgtggcacagctttcagaagcatcacatgtaatgtcattacttccggggcttaaggaaagaggcctacaatatttgcaagcggctgcccatgcaaatggtttgtcacgtaattgcatagaagttcttgaaaaagttaagaaacagttaaccatgcatgatatacaccagaaaaaggttgatctgttgatagcagaacctttctatgtagggcatgatggcatgcttccatggcagaacctgcggttttggaaggatcgtacaacacttaatgatatcctctctgaagatgctctgataattcctagtaaaggaatattgagagcatgtgccatctctcttcctgatctttggaaaagtcgttgttgcttgagtaatgttgaaggttttgaccattcagttgtaaatgctacactgggggcctgcagtaatctacctgaactagaagagggtccttgcctgcctttttttgtctggcagtgtggagaatttgatgtgcttagtgagacatttgatgtgatggagtttgatttttcaaaacaaatatgcctatgtcaaggaaaatcccaggttaagttcaccaagaccggggtatgtcatggatttgtgctgtggattgactgggtgatggatttgcaaaattctgttgtgatatcaactggtccagataggagatattggaagcagggagtaaagcttcttggaacacctagaacagtaggacctcaaagatcaagaaatgtccaagcatgttctgcagttctggaagcttgtttcaatccattacagggggaactcaaaattatacttgatttcttatgaaactttttcactctagctattatgttaaaataccctggcttgatagactttttcacaatcagtggcagacaaaatcggctgtcagccaaatgttggtttgagatttttttttttgtttagtttatgatttgcatgcatggtgaactttgttctttgttcttttcaatgaaactaatttcactgactttatatc

SEQ ID NO: 31688 - DNA, 355 bp, Glycine max
  Clone ID: PAT_MRT3847_128619C.1
attcttggctggttctggtgacttcaagactgacttgagtccagcattgttgattgactcttgttcgcgagtcaaaaaatttgaatgtcgtagattttttcctattgtggggaaaaatgcttccatccaacttttagagctttctgccgcaattatattcaagtggaagttcattcaatagaaacgcttgatagggaaatatattgaggagatcatcctggacacgtggaaatatgtcttatgggctgttgacactctgattgcacagaatatgggcgctgatgaaactctaattgttttggtaaattcgtatattaatatgtttgtgctgaatatgcggtctactgatacagtg

SEQ ID NO: 31689 - DNA, 484 bp, Glycine max
  Clone ID: PAT_MRT3847_12861C.1
ctcgccatggacgaagcggatcggcggctcctgcggcagtgccggctgcggctggtggaagagctgcaggtggaccagctctgggacgtcctgctgagccgcgagctgttcaggccccatatgatcgaggacatccagcgggcaggctctggatctcggcgggatcaggccaggcagctgatcatagatctggagactcgagggagtcaggctcttcctttgttcatctcctgcttagaggacacaagccaggacatgctggcttcgtttctgcgaactaacaggcaagcagcaaagttgtcgaagccaaccctagaaaaccttaccccagtggtgctcagaccagagattcgcaaaccagaggttctcagaccggaaacacccagaccagtggacattggttctggaggattcggtgatgtcggcgcctctgagagtttgaggggaaatgcatatttggcttacatcctgagcatggagccct

SEQ ID NO: 31690 - DNA, 2270 bp, Glycine max
  Clone ID: PAT_MRT3847_128620C.1
cacgcgtccggttggaccgtaattgaccaaccttaacctggtttcacttcacccagtctccgttcatggccatcgctaccttaaaattcgcttgcaaacccaatttccttcttcgccccgctcccttccaatgcatccgcaagcttgtaccaaaatctctccctacggttgaggtagaggaatgtaggggctctaatcctgaacagggcaaggggactagcgaaaaactcatattagaaaataataatagcaaggtccgggcgtggaagaaactgaattccaaagagcttggacttcgaaattccatgatagctgttccaaccaaaaaggttctgaacgtgctaaagaaaaaggggcatgatgtataccttgtaggaggttgtgttcgggatcttatactaaagcaaacaccaaaagacttcgatattataacttctgcagatcttaaagaggtgaggaaaacattttcattgtgtgagatagttggtaaaaggttcccaatatgtcatgttcatatggatggtaccattgttgatgtttcaagttttaatactgctagatgcaagtcaagtatgcactctcatttatgatgatattgaggcacctaatgactgtgataaagaggactatcttcgttggaggaattgtttgagacgagactttacaattaatgggttttgcaccagctcttgtcactttcaaaatagaattctattcctttttttttcctcttcatctggatgtagatgtgttttctatgacatgacatctccactttatatacaatgcagctatttatgctgttaaccaaatccttgctgttccaggaagatgtttgatccatatgcaagaattgtgtatgattacgtgggaggaatggaagatatcgtaagagctaaagtgcgaacggtggttcctgcggccacttcttttcgtgaggattgtgctcggattctacgtgcaattagaattgctgctcgcttggggtttagtatttcaagggaaacagctcaatctgttaaaaatctttcatattcagtgttaagactagataggagtagcttctgatggaaataaattatatgctagcttatggatctggtgaagcttctctgaggctactatggagatttggacttctagatatacttctcccatttcaggctgcttattttgtttgtggtggatttcgaagacgggacaaaagaaccaatttgcttttggcaaccatattgcaatcgtctttcttctctaatgtggataaacttttggcaccgaaccgtccatgtcatagcagcttatgggttgttatccttgcattacataaagcattgagcgataaacctagggattcctcggtggttgctgcatttagccttgcactccataatggtggaaatttgtcagaagcaataagcatagctaggaggatcaacaaaacacatgatgccagatttcctgaattattagatccttcaggtctggatgaagaggatttggaagctgagattctggatcttgcagagtctgttaaagggtcattattgcagatgaaagataggcatttcgtatctggggctatggctgactatcctcaagctcctcattcagatcttgtgctcatcccaataccaatgtacctaagagctctcaacttttttgactgtgtgagagtaagtgctagtaagaattttttgtcaaagcaaggtagacaaattgattatgagtccttagctcgtggagacttgctagaagtacggcacgtgtttgcaaggattgtatttgataccgtatatccactacacccaggcaaagatcagttaaaaaagagcactggattttcaagaggctagtttgaagttttattagaagttgtgagaaaattgatgctggagtaggcattctatcaagggtaatagtcgttgaaaattggaataatgtgtggtgaaggtctggtgccagcatttgacatttgaggggtacttgcaggaattatcattaactttgtcatcagcccgtgacaggctaaataggcagcggataaaaaagggataaactgtttccacccgcaaaaaatatttttgccattttctttttgttatcagtgttttttattttttactttaataattcttttaatttatcaatcaatcttacatattgttctcgtggtgtcatgtatatatggcaattttggacggccaaatcattaaattgccaaaaagttagaaatgttgaatttattcacgaatgaaaaaaatctattcatt

SEQ ID NO: 31691 - DNA, 345 bp, Glycine max
  unsure (1)..(345): unsure at all n locations
  Clone ID: PAT_MRT3847_128621C.1
cggaagatttgtgttgacccacgcgggactacnaagacanaaaaagggaaggaaaaagggggttttgataaaagcaaagccgggggatccagcgcaaaggatgactgaaaatgggcagcagacaaaggttagaaacacaagggggaagaaagaaagagcgaatagaaaaaaaaggaagcccctaacggaagcgaacacaacataacacaaaaagggacagtgaaagatgggaagaaagacgatcagagaaggaaaatgccaaaaggaaccaaaccgtcgggaccaaaagagaaaaggcaagaggcggagaaaaagaagaggaggaagagcaaagggatattgaag

SEQ ID NO: 31692 - DNA, 351 bp, Glycine max
  Clone ID: PAT_MRT3847_128622C.1
aggcctttaaagaaaaaggtgaaagagaataatagaaagggggcccatttttatggaaattgttccccaagatgccaaagtttggttcttgatagccataacccagttccgaagtcccaccggtattgaatccggggttgacaactaaatttagatgtcatccaatatggaacccgaatctgtttagtccccgtttttctggggtttgatcttccttgtatggtttgtgcactaggaaaatttgatggacattcatttcgtatttattatggaatattaacataattgacttaattatatatccccatgaactaaaaaaaaaaaaaaaaaaaaaaaaaaaaaaaaggggcg

SEQ ID NO: 31693 - DNA, 308 bp, Glycine max
  Clone ID: PAT_MRT3847_128623C.1
gcaaagtaatatcctttgaaatgccttgtttaacacttgaactcctctcaactatatttatcttggcttttgaaattttggatttttttattcttccatctatgcgctttagcattgccttctagattttgtttaatttgtccgcaatcaaggttttaactcgttagctatcattttaagttttggatttcaagcgtttcacttctctcttacatttacttgctgcttgttgccttttcatttgtattggtatctcaaataaaaaataaaaaagaaaatgtgtgttgatctcaaggtcttcctcctgt

SEQ ID NO: 31694 - DNA, 2568 bp, Glycine max
  unsure (1)..(2568): unsure at all n locations
  Clone ID: PAT_MRT3847_128624C.1
aagaaaagttatttttatagatactaaaatttaaattttctttccaagtcccagctgtttgcttttccattcaaggtgtggacttttctttcttttcttgtttttccatccatccaaccaaatatatcataaaactactaagggtatgtgagtgttggtgtgttgaattaaaaaaaaaaggaagactaaaactaaaactaaaaccccactcagtcttccagtgaaaaaagaaaggcagcgatggaagaagacttcgacatccccggcggcgaggaaatggatctcggcgaagacaaggtcggcgaggagcgggagatcggctcccgcggcctcaagaagaagctcctcaaagaaggtcaaggctgggaaacccccgaagtcggcgacgaagtccaagttcattacacggggactttgctcgacggaactaagtttgattcgagccgcgacagggattctcccttcagcttcacgctcggacaagggcaagtaattaaaggatgggatgaaggtattaaaaccatgaagaaaggtgaaaatgctattttcaccatccctcccgagctagcttatggtgaatctggttcccctccaactattcctcctaatgctacactccaatttgatgttgagctgctgtcatggactagtgtaaaggacatatgcaaggatggcggtatatttaagaagatagttactgagggggacaaatgggagaaccctaaggatcctgatgaagtattggttaagtatgaagttcatctagaaaatggaaagcttgtagcaaagtctgatggggtggagttcacagtcagagagggtcattattgtcctgcattgtcaaaagctgttaaaaccatgaagaagggagagaaagtgcttttgacagttaagccacaatatggatttggtgagaaggggaagccagaacaaggtgatgaaggtgcagttccaccaaatgcaacattgcagattactcttgaattagtttcatggaaaactgtttctgaagtaactgatgacaagaaggtcataaagaagatcctgaaggacaggggaaggatatgagcgtccaaatgagggggccattgttaaagtgaaactaattggtaagctacaagatggtgctgcctttttgaaaaagggccatgatgaagaagagaagctgtttgaattcaaaacagatgaggaacaagttgttgatggacttgatagagctgtattgactatgaagaagggtgaggttgcactgttgaccattgcacctgaatatgcttttggttcatcagagtcccagcaggagttggctgtagttcctcctaactcaactgtttattttgaagttgagctagtttcatttgagaaagagaaggagtcctgggatttgaacactgaagagaaacttgaagctgctggtaagaagaaagaagaaggaaatgtgttgtttaaagctggtaagcatgcaagagcttccaaaagatatgaaaaggctgtaaagtacatagaatatgattcctcattcggtgaggaggagaaaaagcaggccaagaccttgaaggttgcctgcaatcttaacaatgctgcttgcaagttgaagttaaaagactacaaggaagcagaaaaattgtgtaccaaggtgttagacctcgagagtacaaatgttaaagccctctatagaagggcccaagcatatatgcagttaactgacttggatttggctgaacttgacattaagaaagctcttgagattgaccctaacaacagggatgtcaaattggagtacaggactttgaaggaaaaggtgaaagcgaataatagaaaggaggcgcaattttatggaaatatgatcaacaagatgacaaagattggttcctgatagcaataaaccagctaccaagtaccaacggtattgaatccgtgggtactggcaacaaaatcaaaacgtcatccaatatggaacgagtagaagtttagtccctgttttcctggggtttgatctttcttgtatggtttgtgcactaggaaaatttgatggatattcatttcgtatttattatgggattttaacataattgacttaattatacgtatccccatgaactgaaatgatttgtttgagagcttaagctactataagaaatggaactgaatagatcaaggtttgctgggacaactggacaagtgtgttttgattagataaaaagaacgtccaaaaataaaaattcattgtgttatgtataatcgcctttttaaaaatgatcagaagtcatttttatttttgcacattaattaatgattatatcatgatattttgtttgaacggtataaaaagttgctcttatgtcgaaaatgcagaagtagtattttgtttttggtttatcaaaatattgtattacaaggatttgaaggtatgaatatgtattttaagctaaggctactgtggaccagtttgtaagtggttcatggggaacaattaattttaaccgttagaataaacttgttattataggttaaatcacacctgatttcctcaccacttctccttcgnacactatatatattgccgac

SEQ ID NO: 31695 - DNA, 314 bp, Glycine max
  Clone ID: PAT_MRT3847_128625C.1
agggggcgtccatccaacatcatcacgttcgcatgatgacgttattacggttttacacatgatgacctgcgacatcgactggccttcttcttatgcgcatttctgcgtcatctccatcctgcactccttcatatcagtcacatgtagtgggctgattatgtcccacatcaacgatgtccacatcttcggccacggactccagggcgccagcaagctctagggatgcatgcctcactaccagcttctcagctcgacctccgcttccatctccggcttgctccttgtcgcaatttcgtgcctcctcttcatggtca

SEQ ID NO: 31696 - DNA, 701 bp, Glycine max
  Clone ID: PAT_MRT3847_128626C.1
tgatcgatcactcgtcagcacatacagttgctgtcaaggtcccggagtcaattcacaacaccaaatcgccatcatgattgaggaagtcttgaagaagacctcggagatgttcccgctgcccacggcaacggcctcatctctgccttcggttgctcccgttcccactgtcatccccggcagcgagcccgtctacgaggttgctggcgatgctggacagaagacgctttgggtcgtctttgtccttatgctgatcgcctctgctggatttactgtcatgtcatggaaggtcccattgaacaagcgtctctaccatgtcatcaccaccatcatcaccctcaccgcagccctctcctacttcgccatggccactggacacggtgtttccctgaacaagattgtcgagcgcgagcaacatgaccacgttcccgacacctacaccaccacctaccgccaggtctactgggcccgttacgtcgactggagcatcaccacccctctcctgctcctcgatctcggtctccttgctggcatgtctggaggacacatgatcatgatgatcgttgccgacttgatcatggttcttactggtctgtttgctgctttcggcactgaggacactccccagaagtggggctggtacacaattgcctgcattgccttcatcttcatctactggcaccttggccttaacggtggcgcca

SEQ ID NO: 31697 - DNA, 307 bp, Glycine max
  Clone ID: PAT_MRT3847_128627C.1
gcaagtgtgtcaacaaataataatcacagaatacagaatggtgtcgctggaaagaatagaaacggagagatagaatcatctaggcaaagagatgcattggatagtgggatcaagcattcaaacattgattcaaaaataaaggctaaaaagttcaatttggagctgaatagaacagcagaaattgtggaagtatccagaaaggaatcaaagaaacaaccagggggtgataaggatcaatcagagaaaagtgccgaacagaggagtgaatattttgatcgggagtggagaatggcgattcgtacagtcc

SEQ ID NO: 31698 - DNA, 282 bp, Glycine max
  Clone ID: PAT_MRT3847_128628C.1
tgcactttaatttaaagaagaaaaatatatataattgaaaatgatcagtgattagttaatataattcaagaaagtatttcttaagttttataacatcaaaaagtttttttaaaatttttcttcacaaaaaatctaaaacacagcatacttttggaattataatgtcacctccatcaatgtataatgtaatgatatgtcttatttctttatgtttaaaataataaataaaagaacaaaaaaagaactaaaaatatagctttaattcaatatacatgtcaatat

SEQ ID NO: 31699 - DNA, 365 bp, Glycine max
  Clone ID: PAT_MRT3847_128629C.1
tcggttggggggattctgctgagaagtacaactgtgaaagccggtgttgggagcccctcccaagaatgaacaagaagagaaagttttgctcaggttgtttcatggacaacaaattctatgtccttggagggcaagatgagcatggaaaggacctcacttgtggggaattctttgatggaaaggcaaatagttggaacttgattcctgacatgtggaaggatattgtttcacagtctccacctcttcttgctgttgtgaacaatgagttgtacacactggatgcttcttccaatgagctgaaagtgtatgtgaaaggaaccaacacatggaagactttgggagtggttccttgtatagcttattca

SEQ ID NO: 31700 - DNA, 404 bp, Glycine max
  unsure (1)..(404): unsure at all n locations
  Clone ID: PAT_MRT3847_12862C.1
aaggggggaatttagccccataggaaaacagggaaacctgggggcataaaagcatattatggaggaacaaaaataagctaagatagcaaaagctcgactattcattggttttgatttggcggcggtgcgtagntcccttttccttcgcctaaacttaagtcgttcactcccgggggcgcagggggaaatatgaggggagcaccacctggaataggggggggggaaccctgctctccatagccaaggttggaggggattttcagcttacgctgctcaccaagacacattcccaataagcccggggcccaacctttgatcactggaccaggaccaagctcaaattcaatgggattatgtctttcaaagctagaatcgaaaacaggtccatcagggaggttgcccct

SEQ ID NO: 31701 - DNA, 234 bp, Glycine max
  Clone ID: PAT_MRT3847_128630C.1
caaacagcaacctcaaggataaaaacccatatgacctttcaaattattttatctgttacagaaccccattggaaaaagaagagcatgggattcacatccccggggaattcttcggcaaatatatctcactcaaagacaatgctgaatcattgagtaacaagccgcggagattgattagaaatattctgcgcgaattcttggcgtcaacaactggcaaaaagccgagggccaacc

SEQ ID NO: 31702 - DNA, 348 bp, Glycine max
  unsure (1)..(348): unsure at all n locations
  Clone ID: PAT_MRT3847_128631C.1
gnccccctttttttttttttttgaattttttngttttttggaaaataaaaaatggaccggggtgggtttgccttaacttatgctcaacactcaacaatactatgagtgccgtgggcttcctgaccccttatttattggataatttcgggaggactttgttaccggctctttttgggccatgactgtaagttaatacaccttggcatatatcccccaaagattatcttgacccccctacatttgcccgtcccagaattcccaacccatcaaaaatttgcttgcttctttggccttccaacccatgctcaaaaataccgtttctccccccaatttctccatggccctcct

SEQ ID NO: 31703 - DNA, 569 bp, Glycine max
  Clone ID: PAT_MRT3847_128632C.1
tcggctcgagaagcaatcgcataatctagggtttgttcgttggttcgcaacaatggcgatgaggagattctacaacgagatcaaggggaagagggtgagcgaggttccggagcacgtgaagccgatgctgtcgctgaactacatcaagaaggcgattcagagaggcttcgataattaccatgccaagtacattgaaaccagctcccccgatcccatcttccatgtctgctacggcggcatgatcttctcctacctcgttgctctcccccacgagcgccgccacctccagcacgcccagcagcaccactgatccatccccttcagctggatcctggttgaattggaggtggttggcttgcttgatctttgttttaaaatctgaaaaatcaaggcagaaagatactgacagcttctttgtatttcatcatttgggtgataaaataagttgtatttgatacgattctcaattttcttgcacttaaatattaattgaatctgtgaaaagtaaacatactttttgatttggttctctgtctatttaggcccctcttaatgtgatgttattttac

SEQ ID NO: 31704 - DNA, 449 bp, Glycine max
  Clone ID: PAT_MRT3847_128633C.1
ggtttatctaatcccagactactatcaacaacatcatgtaagggtaaaacaattaaaccaaagttttagattcaccaataaaaagcttatatttattcgaaaaaaacgtcatataggttaataaaaagactcaatatataattttcccatttaaaataaaatatttttcttattttaatataaccataaattttaattatacatgattaaaagagaatccataaatttttcttggtgaggaaaaaaataattcataatatttttgagaaaaaaatatcacaagcttttacataatttacataatgtcatgagaaaaaaatttcaaaatacttatatttttataaattataattactctttacacattttcttattttttaaatgtcgaatattttttcattgttaatattattaaaaattagaaagataaaatgataaaattttaattt

SEQ ID NO: 31705 - DNA, 302 bp, Glycine max
  unsure (1)..(302): unsure at all n locations
  Clone ID: PAT_MRT3847_128634C.1
ctctcntgttgtacanttntnccnttnggtttgcnnaaaggaacatngaagctgtgtgtgcttnntctgttggcacacttcncatcccaacagcacatgnaacatcaaantccttaggaantccntattcttgagcaaccaagtggctcaccagtttcattggnttntctcangngcagttcaaaatccaagnttataactgctngtnancccntcnattgacagaatccagtnaccaacctgaggctgagccagaatttgaaagtcngcagananatttgantggtactctcagtggtacc

SEQ ID NO: 31706 - DNA, 276 bp, Glycine max
  Clone ID: PAT_MRT3847_128635C.1
ggatcaaaatttttaacgttggggtacccattgaattgaagggaaactttgaaatggaacaaggcaaaggggtatcccgacacaacaaaaataggacggaatggaccaatctgttcattctgaatacaagtaatatccggacacatgaactcgctggccaacaaatttaacaaaaaggccaatgatgtcaacaaacaattatattgggttcgctagcacaccagcaagggtatttgtgcggaaactgcacggttgaactgtaaccaacaagataaa

SEQ ID NO: 31707 - DNA, 1668 bp, Glycine max
  Clone ID: PAT_MRT3847_128636C.1
gcacataactaccatgaccatcagtcttggtccgtcggctcatttgatttgagagttgggagttgaatcctctctgattcgatgacgacccgaatcgcgcccggtgtgggagccaatttgttgggtcaacatgccgccgagaggaatcaagatgccactgcttatgtcggaaatctcgaccctcagatatgtgaggagttactatgggagttgtttgttcaggctggtcctgtcgttaatgtctatgttcccaaggatagagtcaccaaccaacaccagggttatggtttcgttgaattccgcagtgaagaagatgctgactatgccatcaaggtgcttaacatgattaagctttatggcaaacccatccgtgtcaataaggcatcccaagataaaaagagcctggatgttggtgcaaatcttttcattggcaatcttgatcctgatgtagacgagaagctcttgtatgatactttcagtgcatttggagttattgttactaatccaaagatcatgagagatcctgagacaggaaattcccgtggttttggcttcattagctatgattcatttgaggcatctgattcagccattgaggcaatgaatggacaatatctttgcaatcgtcaaattacagtgtcatatgcttataagaaagacactaagggtgaacggcatggtaccccagcagaaagagttttggctgcaagtaatccaactacacagaagagcaggcctcatactttatttgccagtggacctccaacacttcccagtgctcctcaggctaatggggttgctccagtgcctccccgaccctttgttaatggggttgctcctgctgcaattcctaccctccgtccaccaccccctcaggctgctgcattccagcctatgccggtgcctggacaaccagcgtggcatcagcaacagccaggtcaaacaatgttatcacccgcgatgccaccacctcaaatccagcagttcaggccacctcaccctggtatgcagcagatgccaccacctccacaagctccacccaggcctcttcctccaccatcagtaatggcaagtcagccaccacctgtttggcgaccaccaccccctcagcagcagggtggacggcctttgccataccctcagtctgcaatgctgcctccaccacctccccagtaaccctgttatgccaccgcctttgaattggtggaatgcaaatcgtatggaatgtttctgatctgaatatcgggatttttgcccatttattgttaatttgtattgcgttatatttgtgaactagtgtagattgtaatatgaacatcctagagagtcaacaatcataaaattatccctgcctagaaaagagagacttttgagttttggctttaccgcatgatatcctcattttatcatgttttcttgtacgtcggcctctagattggtaggttgccctctgagatgcacaagataattgatgtgttcaggacgaaacaaccaaatgcctataatggagattattgagttgcagactttaagttcttgtcatagacagggcattgatacgggaaacattaaattaatgtgcatggctaattttggcaatgtcagtatgtaataagcatgcatgaatagttttaagaaaaaaaaaaaaatttattactttttacatgg

SEQ ID NO: 31708 - DNA, 822 bp, Glycine max
  Clone ID: PAT_MRT3847_128637C.1
ggctcgagcttgcggcagcgcaggtgtccctattacctgacttcttaattctcccgcttcccacttcttcttcttcttcttccgtccagtgcttattctcttctcaagatttatagaatagaagggttgtaagggttgttcgattcgatgacgactcgaattgcgcccggtgtgggagccaatttgctgggtcaacacgcggccgagagaaatcaagacgctactgtttatgtcggcaatctcgatccgcagataagtgaggagttattatgggaattgtttgttcaggctggtccagttgttaatgtctatgttccaaaggatagagtcaccaacgaacatcagggttatggatttgttgaattccgcagtgaagaagatgctgactgtgccatcaaggtgcttaacatgattaagctttatggaaaacccatccgtgtcaataaggcatcccaagataaaaacagcttggatgttggggcaaatcttttcattggcaatctagatcctgatgtagatgagaagctcttgtatgacactttcagtgcatttggagttattgttactaatccaaagatcatgagagatcctgacacaggaaattcccgtggttttggcttcattagctatgattcatttgaggcatctgattcagcttgaggcaatgaatgcacaatatctttgcaatcgtcaaattacagtgtcatatgcttacagaagacactgagggaacggcatggtaccccggctgaatttgctgcgtatccacaaccaaattcaggacttatacatgagtgtcaccaaattatacccggagtcgtc

SEQ ID NO: 31709 - DNA, 1930 bp, Glycine max
  Clone ID: PAT_MRT3847_128638C.1
gttgtgaatgttgtgctgagtcagggatcggcgagttggactcggggactgaggagactcgtgctgagtcgcgccaccgggttggggcatgtgggcttggagatgctgattcgggcgtgtcccatgttggagggcgtggatgtgtcccattgttgggggtatggcgacagagaggctgcggcgctatcgtgcgccgcgaggttgagggaactcaacatggataagggtttgggagttactgatattgggttggccaagattgctgtcgggtgtgggaaattggagaggctgagtttgaagtggtgcttggagatttctgatctggggattgatcttctttgcaaaaagtgcttggatttgaaatttctcgacgtgtcatatctcaaggtagcaagtgaatctttgagatcaatagcttctctattaaagcttgaggttttcattatggtgggctgctctttagtggatgatgttggattacggtttcttgaaaaagggtgtccactacttaaggcaattgatgtaccaaggtgtgattgtgttagctcatccggtttaatatctgtaattagtggacatggaggtcttgagcagttggatgcaggatattgcctctctgagctttctgcacctcttgttaaatgcttggagaatttaaagcagctgagaataattagaattgatggtgttcgagtttctgactttatcctccagacaattggcaccaattgcaagtctttagtggaacttggtttaagcaaatgcgttggggtgaccaacaagggaattatgcagctagtatctggctgtggcaatttgaagatacttgatttgacttgttgtcagttcatctctgatacagccatctctactatagcagactcttgtccagaccttgtctgtctgaagctagaatcttgtgatatggtgactgagaattgtctttatcaacttgggttaaattgctcacttctcaaagagcttgatcttactgattgctctggcatcgatgacatagctctaagatatctatcaagatgttcagaactcgtaagattgaagttaggattatgcacaaacatatcagacataggattggcacacattgcttgtaactgcccaaaaatgactgaacttgatctctatcgatgtgtacgtattggagatgatgggctagcggcgctaacaagtggatgcaaggggttgacaaagctcaacttgtcatattgcaatagaattacagacagagggatggaatatatcagccatcttggtgaactatctgatctggagttgcgtgggctttcaaatatcacaagcattggtataaaagcagttgcaataagttgtaagagattggcagatttagatttgaaacattgcgaaaaaattgatgattcaggtttctgggcccttgctttttattcgcaaaacctgcggcagataaatatgagctactgtatcgtgtcagatatggtgttgtgcatgcttatgggtaacctgaaacgcctgcaagatgccaaactggtttgtctttctaaagtgagtgtaaaaggattggaagttgcccttagagcttgctgtggtcggattaaaaaggttaaactgcagaggtccctcaggttctcgctttcctctgaaatgctcgagacaatgcatgcacgagggtgcaagatcagatgggattagccaattgtcacgctattaatctgttatactttcttttcttggaagggtgctgcttcattaagatcttttttattcaaaattttatatttctctagcattttcttttctttaaactctgttaccagatttctacggaaggtatttttttcaccttcttaagttacatcatctccaataaagcatgaggttacttatcttcgaattaaaaaaaaaaaaaaaaaaaaaaaaaaaaaaaaaaaaa

SEQ ID NO: 31710 - DNA, 744 bp, Glycine max
  Clone ID: PAT_MRT3847_128639C.1
catattgcaatagaattacagacagagggatggaatatatcagccatcttggtgaactatctgatctggagttgcgtgggctttcaaatatcacaagcattggtataaaagaagttgcaataagttgtaagagattggcagatttagatttgaaacattgcgaaaaaattgatgattcaggtttctgggcccttgctttttattcacaaaacctgcggcagataaatatgagctattgtattgtgtcagatatggtgttgtgcatgcttatgggtaacttgaaacgcctgcaagatgccaaactggtgtatctttgtaaagtgagtgttaaaggattggaagttgcccttagagcttgctgtggtcggattaaaaaggttaaactgcagaggtccctcctgttctcgctttcctcagaaatgctcgagaccatgcatgcacgagggtgcaagatcagatgggattagccaatagccacgctattaatcagttatactttcttttcttggaagctgatgctgcttcattaagatcttttttattcaaaattttataattctcttgcattttcttttccttaaactctgttaccctagtgagatgcatacgagttcaattaggtgacattgacagatttctagagaaggtatttttttcaccttctaaagttaacattctctccaataaagcataaggttacttatcttcgaattaaaaaaaaaaaaaaaaaaaaattaacaaaaa

SEQ ID NO: 31711 - DNA, 1108 bp, Glycine max
  Clone ID: PAT_MRT3847_12863C.1
gacctcgcgtccgagaaagctcagaagcattgatcttccaaaaggaaaaactaaagtctctttaatggctcctctcattgtgtcaactttatagagaaatcttcagagatcatcacctaaaaagagatacatttacacattctcacacaggtagatacaactttgtgtcccttatctgcatcagaaggtaccaaccagaaaatctcatttatagttaattacgtacagagaggaagtggtattactactacccttgccatcagtccggttgctaagttccatttccagaaccaagaagttcttccaaaagactataaagaacttcaagtctttcttctccccaggttattaccaaaggcttcccaaagcttctccacacagtcatttctcttattctgcggctgctgcatcaagtgccatggatatgaccagcaacacaagctatcaagacatggagaagttgtacaccgatttctctgaccaatgggagtcagaaaatgagaaagcaaggaggagaatgaagaagaaagctgcatctgcattgccatcaaagcaagaaagtgaggtctatagtggaagctacattagcttgtcaaatgcaagccatgctcagaagaagaacaaggtggagaaaaaagaggaaggtggtggcaacaacaacaagaggagcttaactattcaaaagggaaggaagaaagagtcatcgtcatcatcatcatcattcatgtctatgtgtatgaaagaacacagatactgcatggtggaacagaagctgagggagttggagatgttggacatgaacaatgtggaatatgtattggacattgaagaggttcttcattactattctagactcacttgccctgcatatcttgaaattgtggataagttcttcttggaaatgtactcagagttgtttggtccatctatgcggcatgcttcacctcgcagtgttaactctaggctcaagatgagatatcagtgagaggtgttaggttatctgttttgctttgtctttgtttcttaacttcttaataatatcctctaaagattatttgacgctttcttgggttgattctatgtgtttattgaccttgaagtttcatgg

SEQ ID NO: 31712 - DNA, 453 bp, Glycine max
  Clone ID: PAT_MRT3847_128640C.1
attaggccggagttttcagattgtacagtgatcacagtagctcacaggataccaactgtgatggattgcactaaggttcttgccatcagtgatgggaaacttgtggagtatgatgagccgatgaacttgataaagagagaaggatcactgtttgggaagcttgttaaggaatactggtctcattttcagtctgcagaatctcattgaggctgaacatggctctcatatctttttctctggattaataagaagccaagaaagtgtacatagtaggatgtaaagtgtattatatttggaaaaccctgaggcttgagaagtgagaagtgggaagtaagaagaaaatggtgcaatggtattctaatgtaccattttctagaatgactttgatctgttttacagtggaaagctccattattatcaatcgttgcttataatttcacattttttagcacc

SEQ ID NO: 31713 - DNA, 270 bp, Glycine max
  Clone ID: PAT_MRT3847_128641C.1
caggtacccctgcacgaaccgcagccgaaaaacaggcgcccaccaacgcgcccggaaattttgcgcctatgtttccgccaacacatccgaatcaagaaaaaacgggggggaccatttgaagccaccaacggacccatacaagcaacctcacagagagacgaacgagacacctaaatacaaatcaccgcccggcattgaaacaccaaaacacagggaaaaaaccccaaaaaaaaaagaaaactggcccaagggctaaaaaaaacagtaacc

SEQ ID NO: 31714 - DNA, 374 bp, Glycine max
  Clone ID: PAT_MRT3847_128642C.1
gtcatgctgacgaacggaaatcacaggaagccggaccacagaacgggaaacctaaacacccgttacaggagcaaaagaaactcgcaatcaagaactactcaattgcgtactacttcttaggggacagaaaatcactgtataggcaggcaacatacttgctgaatacagacttcgtgcactattagcttattcactgtacactcatctattggacactcgactatttgatataggacaacttgtcagtttaaacctcagctgtctgttcaatagcaagctgaagcaggtgaaattaagctgagggcatccaggatacatctggcactggactatgtggggtgacacttcgagggcagacctttctattactctcc

SEQ ID NO: 31715 - DNA, 553 bp, Glycine max
  Clone ID: PAT_MRT3847_128643C.1
aattcgacgagctaactgctcggtggtcgcccttcgtttttttttttttgattggcaaccttctcatttttcttacagatagtaaaaattaaattgtaatcttacatggatgaaggccaaagaatatttagtgatatctaaaaacaagctcaaatactatttgaatgagtgattcaaaatttaatagggcagtattatacaaatgctgtatatatgcctgctctagttttggtccttactgcggtccatgttttccatgcgctctttcttgagagcagtgaacttggcagcaatgtgatcatagtctggcaacttaggatgaacatgaataggatgtggacaaggacatgaatatgtccttaacatcttatatttgctgtctctgtgcctctcttggggcattgtcatggaccttgaataggtagctactgcttatactattgttgaggaaccaccagtccttggattggaaactttgggagaagcagagattatttgtttcgccatattgtttccattaccagctaggcaatcctgtagttgaatacatgat

SEQ ID NO: 31716 - DNA, 903 bp, Glycine max
  Clone ID: PAT_MRT3847_128644C.1
ccacgcgtccgaattaatcaaaccaaccaccaacaagatgatttctgagtccctcttgttagtattcctcattgtcttcatttctgcttcccttctcaaactcttgtttgtgagagaaaacaaaccaaaggcccacttgaagaacccaccaagcccacctgcaatacccataataggtcatctccacctccttaaacccctcatccatcactcattccgagacctctctctccgatatgggcccctcctaagccttcgaattggttccgttaagttcatagttgcaagcaccccatcactcgcccaagagtttctcaagaccaacgagctcacatactcttcccgcaaaatgaacatggccatcaacatggtcacttaccacaacgccacgtttgcgtttgcaccttacgacacttactggaagttcatgaaaaaactaagcaccactgagctcttgggaaacaaaaccctcggacacttcctacctattcggacgagggaagttcatgacatcattcaatttttgttccataaatcaaaggcccaagagagcgtgaacctcaccgaagcgcttttgagtctttccaacaacgtaatatcgcagatgatgttgagcattaagagctccggtacagacagccaggcagagcaggcacggactttggttcgtgaagtgacgcagattttcggggagtttaacgtgtcggatttcttaggtttctgcaaaaacttggacttgcaaggtttcaggaagagggcattggacatacataagaggtacgatgctctgctagagaagatcatctctgatcgtgaggagttgagaaggaaatcataggtagatggctgccaagatggagatgatgagaaagcgaaggatttccctgcaattcccgccggatg

SEQ ID NO: 31717 - DNA, 371 bp, Glycine max
  unsure (1)..(371): unsure at all n locations
  Clone ID: PAT_MRT3847_128645C.1
gatgcgcatgagagagagtagatcggggtaactagaaactgagcattgtgattgcaaggatcaggacacatgtgtgcttcaattgaaagagcatggtgatgccatagcacatgcttaggaaactatcgggttgatcactgagattagtgccaatactccagagctcaagagcacaaattaggggattgctactactgctcatacaatatcatctgtttgatacatatgcatcatggagagcgtngctcatcacgaaggaatacgtccatgagaaacaatgtatatagaactgctaaacgagtaacttactggctatcacttatggacaaaacatgaaaaggcatacgaaggacacattggtgctcattgat

SEQ ID NO: 31718 - DNA, 298 bp, Glycine max
  unsure (1)..(298): unsure at all n locations
  Clone ID: PAT_MRT3847_128646C.1
ggctcgagggttgtatctcctctaatttgatacatttatctccccctcaaccctaataacttcgccgattttctaacaacagcgcacctcataattaataacacactcccactccaccaccaaaccagaataattcccacacacacatatctactaaaactttcaacattacaacatcctcttctaagataacgaaaacccataacaaaccgaatacaactaaaaccacnacnaacatactcgcaaaatggaaagaatataatgcccccattgattccaccatccaaccgcataaccc

SEQ ID NO: 31719 - DNA, 715 bp, Glycine max
  unsure (1)..(715): unsure at all n locations
  Clone ID: PAT_MRT3847_128647C.1
aattcggctcgagctcttctctcactttgagtttgcgactctggaattccgctacaatggtcgttgcacagaaagttaaggaagctgaaatcaccgagcaggattcacttcttctcacgaggaacctgctccgaattgccatattcaacatcagttatatcagaggactatttcctgagaagtattttaatgataagtctgttcccgcgttagagatgaagataaaaaaacttatgccagtggatgctgagtctcgcagattgattgattggatggagaaaggtgtatacgatgctttacagaagaaatacctgaagacgcttctgttctgtgtgtgcgaagcagtagacggaccgatgattgaggaatatgcattttcatttagctattccaattctgacaaccaagaggtgtccatgaatatcaaccgcactggaagcaaaaagaaccgggggaccttcaagtacaactcgactacagaaattactccccagcagatgaggagttctgcgtgtaagatgatccgaactctggttcagttgacgagaactctggagaaaatgccagaagagcgcactattctgatgaagctgctctactatgatgatgtgacgccagctgattatgagcctnctttcttcaaggatgcactgatgaagaagcttatcatncatgggaagagaatccattgaaaatggaggttgggaatgtaaac

SEQ ID NO: 31720 - DNA, 203 bp, Glycine max
  Clone ID: PAT_MRT3847_128648C.1
gtagatgctgtagccaccaaaattttcctctcaaagtaggtcatcactcagaagccaataacaataactaatggcaacaccagcagggaacgttcgttgtaaagcgactcgacctgctcgagaattacgagttacaccgagtccaccagaacaaccgtcatcagctacacggccaattcgacgtgaaccggatccgagaaagt

SEQ ID NO: 31721 - DNA, 2295 bp, Glycine max
  Clone ID: PAT_MRT3847_128649C.1
tataaatagtgctcttctaagcacaaatccaagttttcctgacactaaccattctagaggccaatctctagatcttgggacagaaaatactgctacaagttctgccagaaactcggacattgatcatgccttaagtcgagtctctagttgcaaaagctttatttcagatactgaatcttggatgtatgatcaaaattctagcaaggaagtgcaactagaaactacacttccatcacctaataggcaggcaaaatttaaccttgagctggaaaagttgagaattgaactaagacatgcccaaggactgcatgcagtagctcaaagtgagaaaattgaagcatcccgaaagctaaatgagctaagcaagagacgatcagaagaaaccatgaaaactaaagagattattgctaaggaggagaaggcaaaagatctagcaaaactagaaagagagaaatatcaagatgcatcaagagaagctgcatatttgaaagaatgtgctgaaagagaagctgcagaaaggaaagaaatggagttgaaagccattcttgctgcaaaagagaaagaaaagctggaggatgctctcagtggttccacaccccagtaccggaagtttacatgggatgaaataatcttagctacttcatctttctctgaagatctgaaaattggaatgggagcatatggaatagtatacaagtgcaatttgtatcacacaactgttgctgtgaaagttctcactctcaacactaatgtaaacagcaaaaggaaacaatttcagcaggagttagagattttgagcagaattcgtcatccaaacttgcttcttcttcttggtgcatgtccagatcacggatgccttgtgtatgaatatatggagaatggtaacttggaggacagactactaagaaaaaacaacacttccccaatcccatggtttgagaggtttcgaatagcctgggaagttgcatcagctctcgcctttcttcatagctcaaagccagaacctatcattcatcgtgatttgaaaccggcaaacatcttgcttgatcgtaaccttgtcagcaagatcggtgacattggcctttctacagtgcttcattcagataatttgtctaccatgtacaaggacactgcacctgttgggacactcagctacatagatcctgagtatcaaaggaccgggttaatatctccaaaatctgacatttatgcttttggaatggtgatcttacagttattgacagcaaaaccagcaatagcacttgctcataaggttgaaacagctattgatagcgggaatttaacagacatactggatccagaggctggagcttggccatatcaagagacactagacttggctttgctaggattgagctgtgcagaacttcggcgaagagaccggcctgatttacaagatcacgtccttccaacactagagagattgaaagaagttgttgatagggcccaatgctctgcttcaattgttactattaaatccaaacctcctaatcactttatctgtccaatacttcaggatgtgatggatgacccttgtgttgctgctgatggatacacatatgatcgcaaagcaattgaaaagtggcttgaagagaaccacaaatcaccaatgacgaacatggctttacctcataagcatttaattcctaattacacacttctctcagcaattttggagtggaagtccagagaatcgtgatatcagtattatctttctccatgttaatattgagaccattgatttctctgatgtagagagtggctagaaagtttggtgggtatgacctttagcagtgtcttggatgcattatgtattttatttttttgtagttgtaccataccaagcatgctttctggttaatttaggtagagtgattttcaagtgtagataaatttgattctattggctgattctgtgtatacatgcatatgtcaaatcttgttcttacatgtaataaaatgagaaccatatttacattctgtagagagtggctaaaaagtttggtgggtatgacctttagcagtgtcttggatgcagattttttttgtagttgtaccattccaagcatgctgtctggttaatttaggtagagcgatttcaagtgtagataaatttgattctattgtctgattctgtgtatacatacatatgtcaaatcttgttcttactataaataaaataagaaccatgtatacattcaaggctagctaatgtataaacattcatgtgtactctttttttttaaaaaaaaaaaaaaaaaaaaaaaaaaacac

SEQ ID NO: 31722 - DNA, 2266 bp, Glycine max
  Clone ID: PAT_MRT3847_12864C.1
aattcggctcgagtgaaatagagattcgggtttggaattgaatttcgtttcaggtttcggatatactttggattcatggattccttgagaagattgtgatttggtgttgggttagaattgtgcaaagattcttctgatttcgatgtactcaaaggaggagagaatagggggcattatataagctatgccgacatttactgcaatagcatttgatagattgatagagcctggagcttcaaaacctgcttataaatctgctccggtgccaatgcctgtcccaaagaagattgagaggcgaactagtgaaccaaccactgtaaggaagaagccccgtcctcgtcctcaattaaagccagcactctatgccactcctgaggtgacaccgcttccggatgcaccctcttcgttccctccttctccgtacatcatcaatcacaaacgccgtggcccacgcctgctgaagagttattctgaggccaatgtgcaggccaagcaggagaaccttgacaatgaaaatgctaatgttaagagcaatgatggtgtgattaccagtttagatggtgatcttcaagtgaattccacgaacactgaacctgttaaggaggagcaggtgaatggcatacatgataccaaccttagtagcagtggcaacaatggtggtgaccttggggagggacatagggaaagtgaaagtagtggcattcttaatggatcatcacacttggataaagtagtggcattgaatttggaaagagagggtgagagtgaagacttttttgatccacatgattcaatgagtttaaaaagttgcacagatggtgaggataatactggcacagaccaagcattgaaattcagtgctgctggtggggaattttttgatgcttgggaagagctctcttctgacggtgggactcaaaattcacatcgtgatattgaagctgagttgcgtgaaataaggttgagtctattgatggagatagagaagcggaagcaagttgaagaatcccttaacagcatgcaaagccactgggagagacttgggcaacggttatctcatattggaattgttttgccttcagatcttactgctgagggtgggcagctgagttctgatcctatggaagatgtatgtcagcaactttacattactaggttcatatcaaacactattgggagaggaattgccagggcagaagcggagattgagatggaagctcaattagagtcaaagaactttgagattgctcgactattggaacgtcttcactgttatgagaccatgaatagggagatgtctcagaggaaccaggaagctgtagagatggcacggcgtgagagacaaagaaggagtaggaggcagagatggatttggggatctattactactgccattgcagttggtactgcagcaatagcatggtcctatctccctgtgggtagaggatcaacatctgctgttcatgatcaggttcctgaacatgatgatgcagccaactaatatacaattaatactaacttcattgccgagttatggtagaggaggagaataaaagttatatgtgccattatgtggctaacatgttacatatctcttacttgatcattacaattttccggcatcttgagtatgtgcataatttctctaacgtgccattcactggaactctagctagtacattagtggaagggttcagtcttgagttaatgaaataataatacaccatgatttcctatggattctgggtgcaaagtaattgcttcacctgatacatttcgcagatcatatttgtaatagattctttatgcttgcttctccaagcattttaacaccactgaatatatttgatacttggtgttgctgaatcgtaataaaggaaatctggtcaagccatgatgcgtgcatgacctattagaattctttccaacttggtgtttctgtgccagtttcagttggttgtgttccacggcaagggattcgtttgaccatccgatccatcgggcacgatgctttagcattctcatacagcaagagagaattggattgacatcatctgatcaggaaaatctggttgcactagtaggttacagatgcattacgttagcgattttgataaagtactgttttattatgttagtcaaaagatgtatttgcacccattcatatttttaaccgtaggtgagattttttttaattatttatcatttgttgaataccctttcattgttgttgttttgcataaccaggtcttagtgaactgtggat

SEQ ID NO: 31723 - DNA, 314 bp, Glycine max
  Clone ID: PAT_MRT3847_128650C.1
tcttcctaatctatcataattctgtctctctcattatattaatataggggaggctttttcaaaatcaaatatcccttcttgatactttcaccattatcttttcattacactccaattttttatcttttttattttctattttttgtttagtatattaaaatttgattcatatttaaaccatttgttatttcattatacttcctttttcgcttaagttttgaaaatgatctatcttattgttatattattcaatttaattttacaataattttcttgtctatttattaaacatcttatactcttttttttatata

SEQ ID NO: 31724 - DNA, 329 bp, Glycine max
  Clone ID: PAT_MRT3847_128651C.1
gtaattgtgattaaccgcgatcacaggttgacgtaccttataaccggtagcaaacgaaatcgtaacttgattacaagaattttttaagctgttcctactcctttgtgtacgatttcttaagggatagaaaatcactctctgagctgtccacagacttagagaataattttcttttccactcttagtttattggctgaacactatcctattggatataggactgcgcgagagattgaaacttcttatgagtatttctcagctctttgtttaattacaagttcaagctggggaaatcttggattagtactcccactctcctatctggtata

SEQ ID NO: 31725 - DNA, 227 bp, Glycine max
  Clone ID: PAT_MRT3847_128652C.1
ctagggagctccaaaccaggtattctttctttttatgcaaaggtgtactacgcttattatgtctttcatttactcatgattattatcttggatatcttataaggttcatcctaatcattattatcattatcaccattagttgcatactgtgcagtagatgcatgcatatatggcccaggcaatactatgtattcaggctttgaattagttaatgacgaagatattat

SEQ ID NO: 31726 - DNA, 268 bp, Glycine max
  Clone ID: PAT_MRT3847_128653C.1
taagtggtttccgacagaaaaggtaagtagccactcaaccaggttaatgactgtgataggatttcagttggctctctaatattgttcatctctatgccatgaggtttgaaaaatcaagttgaaattaattagtccttccatacaacctctagagaaacaaagttcagtattggtacccatgctgcaatagtttagtgtctctcgctctctaatttccaaaacttagtccttccgataactctagaagtgcaacctaagggaaaatgca

SEQ ID NO: 31727 - DNA, 207 bp, Glycine max
  Clone ID: PAT_MRT3847_128654C.1
tactcatgggggggcttatcacaacacatggttgggtatctactataatcaacttaatgtatttgttactcaaagatctaatcctgcatcttataactgtttgatcagaaactaactattatagcacatattctcacgataccatttttacttatgctactacaagactgaccataatgcttgtccttgaatcaattactttactat

SEQ ID NO: 31728 - DNA, 431 bp, Glycine max
  Clone ID: PAT_MRT3847_128655C.1
gacgtcgtttaagccgcaccggcgcgggaacagaaccaagacgcggaagcccaagtttgtcagcctgcggcttcagttatccgatcctaagaaaaagatgaaaacaacccagcccaagcccaagcccaagcccaagcccaagcctaaggcccaacaacaagaacagcagcagcaacagccgcagctgaatctcttccctctccatccggaccaccatgacatgcacgaggagcagaacgtggcgcttctctttagctccgatggtggggccacactcaacggcctactggaggaggagacgactacgacggaggaagggtcgatgtcggtgctgacgtgtccggcggaggacaccgggaactggctggtacggaaggcgatgcggcggatggagagcgaggaggggagtgaaaagcggtgggtgtgctact

SEQ ID NO: 31729 - DNA, 858 bp, Glycine max
  Clone ID: PAT_MRT3847_128656C.1
tacggctgcgagaagacgacagaagggggaaggaagaagagaaggagaatgacggaaagttgcatccgatccgtcgtagaagccattcactcctctcctttccaagccgttctccatctcgccggtggagcttctcaggtggtgggttcgttgctatcagttcccggtgcttcgaatactgtgctcgaagttgtggttccttactctaagatgtctctcattcagttactcggaaagattccatcccaattttgtggccaacagactgctgaagatatggctttattggcgtataatcgcgctcttaagctctccaagccaggatccccggctgttggagtgggtttcactggttctttggccagcagtcgtccaaaactcggggaacacagattttatatgtcaacaaggacagccgaccaactttggatatcaagtgtgaccttgactaaggggcttcgtactcgagaagaagaggatagagtttctagtcatcttttgatcaaggcaattggaaatgcatgcaaagttcccggagcatctgttttgttgttgagtgagtcagatgtatctgatgaatgtgaaacacaattcaatgaagatcaacagttagaacaacttataaatggacaaatatgctttaaaatttacccatttgaaaatgagatatcagccgaaaggaaaataataatgcctggttctttcaatccattacatgatgggcatctgaagcttatggatgttgctactcgcatttgtggtgatgggcatccttgctttgaaatatcggcagtcaatgcagacaaacctccattatcagtgtctcagatcaaagatcgcatcaagcaacttgaaaaa

SEQ ID NO: 31730 - DNA, 240 bp, Glycine max
  Clone ID: PAT_MRT3847_128657C.1
aacaataggccccccagttaaaattaatttacattatgttacaaaaagaaagagaaaaacagctttcaaaataaagctttacaagcctgatctttattactggaaggcagagccgttaggaaaattaaagagttgaaagaaagcccttttttgggttgccgtttttttaacgcacttttaacgcattagtttccagggagatttttttgtaaacgtgatttttagccatgaaaacggtta

SEQ ID NO: 31731 - DNA, 1896 bp, Glycine max
  Clone ID: PAT_MRT3847_128658C.1
agataacaaagatatagaattttgatatgatatcttgatcatatgaaactagtctaaacataatatgtgccattaaacaaagatatatagataacaaagtaacctaatgtccaatatatagaaatactaaccaagaattacacacctaaattaagctctaaccgcaggccaaaacttcataagtcaaccccaatgcatttactaagaaataactagggggtgggggtaactaaaactgcactctagtgtgacacgcatatgttttactattattatatttcaacaagccatttcaatttaatagaagaaaataacaaccttggtttataaagtatatgatattcgcaaattctagcaagcaaaattgagtgacgattttcactagatatgccatagtatttcacctttagctcgagtcaggagaaccatctttataagatacagggcctttctttccatctaggcttccagatgaggaccttctgctcgcttttggtggagactgtgattctgcccgggatcgtgatgaactcctgctttgggacgatgacctgctcctctccacatgaggtctatatgtatcaacaggtgaacgactgcagaccaggctacgacttcggctatattgtcgagctcagtaacgtgggctgcgtgatataaagggtgtcctgctcctcctacttcggaacctcggtggagttcttctgcatggcagtgggctcctgttacgcctaggggatctccttacgtaacttgaatacctgtcccgaagccaacgtccactatagccactatagcggtatgatctcatagggggagactgagagggagtcctataccttctagcataagagtatcgttcattgaaacctcttccccttctgatacgtttcggagaaacatcaggtgacacacttctagacaagctcctaccacgaggagtccttgccctacaaacagggctacgactcctagaataactgcggcgattgactctgcttggtgctctaactgaacttcggctaatgcttctcaaagggactctaccagagcttctgctcaagcttctggcagatgatctaactggattcctgcttatactctttcttgacactcttacagggcttctgctaattgatcttcctgatggtgctcttggtgaactcctacgatgactcagataaagggatcttacagggcttgcactgccatttctattaccatgagatcccataggacttctactgacacttttatcactgcaagttctcacagggcttctgcttattgatctacatgatggttctctgggtgaactcctctggcagctacgagaaagggatcttacaggacttgcactgacaattctatgatcacaagatctcacaggacttctactgacacttctatgattctgagttctcacagggcttctgctgattgatctttgtgatgatgctctgggtgaacttcggtggctacgagaaagggatcctacagggctagcactgacacttctatgaccacgtgatctcacagggcttctactgagaattctatgaccatgtgatttcacgggacttctgctgattgatcttcgcgaaggtgctctgggtaaactccttcgacggccctgagaaagggattttacagagcttgcactgccacttctatgatcacgagatctcacagggcttctactgatacttccatgattgtgagtgctcacggggcttctactaacacttcttcccttcctacctctcactgggcttcttttaatgcttcttctgtttggactcctgctcaaactcctccataatggagcatgagggcttctactaccacctggacttctgctcaacctcctttttggatcaatgcttgggctttttt

SEQ ID NO: 31732 - DNA, 361 bp, Glycine max
  unsure (1)..(361): unsure at all n locations
  Clone ID: PAT_MRT3847_128659C.1
tttntttttttttttntttttttttttttttttttttttttttttttttttttttttttttttgaaacatcgaggaaaaaaaatatcccatgggtttcagttcccgtttttggaaaaacggaaacttttaccccaccccctattactcaaggggggggggggatttccaaagggaaccaaaaccaaatttggcccccttaaaaatataaaaaaaaagaaaaaaaaaaggccaccccgaaaattttgagccattgggaagaaaaaatcccccactggggaagcaaccaccccttggccacacgtatcccattcacgggtaaaaaaatcccctttttcttttgaaaccctttgttcggggaag

SEQ ID NO: 31733 - DNA, 122 bp, Glycine max
  Clone ID: PAT_MRT3847_12865C.1
tccgcacacgcgtccgtacagcagtcaatacagcagagagaggggtacacaagtgaatttgttgatctacatacatatgaccagtatcatgcaattcatagacattatcttcttcgatgaaa

SEQ ID NO: 31734 - DNA, 410 bp, Glycine max
  Clone ID: PAT_MRT3847_128660C.1
acgagacgacagaagggggagggatggttgtgatgttttgatctcgtcggaggatggatcgaattgttggattttgataatgatggtacgcattacgtgaaaaccttgtggtaattttgaattcttcaatggcgtcctctagctccagcaagaagatccatgctgatactactgacaaagaactcaccgaacaagaagaagaagtaaccatatattttcatcgcacaaaattactgaatctaaattggttttggttcctcaatttgaataggatttgagatgtgctgatttgtttccgtgttaatgatttcatagctcgagcactttgatgatttcactctcgcttcttcgtgggaacggtttatttctaaaatagaggcagttttacgggtttggatgtctgatgggcc

SEQ ID NO: 31735 - DNA, 559 bp, Glycine max
  Clone ID: PAT_MRT3847_128661C.1
ttgccgtctacatgtgtagtagtgccgccttcttgggggggggggggggggaaaagcggaaggttgttgtttttaaaaaagagacagacctagggacgggccgatagttgacgcggcggttaagggcagactgataatgataaccacctagagcaggcgaaaactgaaaatcccaacgattaaaagattaaggcgttcgggagagtgcattagcataacccaaataaatacaatacaataattgccgaggggggtaagttgaaaattaaataaaatacaataaaaagatgcataatataagagatataaaaggaatacaaatataaacacctgactaataggagggtagggccatacgaaggggtaccataggtaaaagaatagcaagcacagaacggtaactcgtcgtccgccggggccgagtactactcatacctatcgtcgtactccaactggtcccaatcgtcgtcctccgccggggaccaacactagtcgtcgtccccgtatcggcttccgtccaaggcgtcagccactatcgttggccgaaacacccgggcac

SEQ ID NO: 31736 - DNA, 422 bp, Glycine max
  unsure (1)..(422): unsure at all n locations
  Clone ID: PAT_MRT3847_128662C.1
gcataacattgttttggccactatttttggtttgtcatattctttatttagttaaaaacaaatttatactatttttatgaatttcccttacctaagtgacaagctttgtacgtatttttctttttcttaagaaacacacagaacaaacatattaagaaatttttttctctcatcctccgtttattctttttacagttggaccacatgtcaaagcacacaaagggcttttgtgaataattgttaattaggaccgtgttgttcaagggagggcttgtcgaaaggacaagattactgctatctatttcaacattagcaatcaatgattttttggacaaatatcaagcaaattgagaacaaaattgttcaataaaagaggactnntaatcctttttagtcttcattatttgtggcactatgcgttg

SEQ ID NO: 31737 - DNA, 166 bp, Glycine max
  Clone ID: PAT_MRT3847_128663C.1
tttttggaatagaatgtgagtttaccactagacattggggtacagggtttgatcgaatgctaagacctgaggtggagcgaagacacgtcaccctcagaattaatgcctctgaagaggcttctctcatggagctactgaatttttttttaagggaggggttgaccac

SEQ ID NO: 31738 - DNA, 783 bp, Glycine max
  Clone ID: PAT_MRT3847_128664C.1
ctcgatagcagtgtttgaagttataggaataaatttacagagaaaaaaagtatatgaaataaaatagtaaaaataagtgtagcttacaaggattaaaattgtactttgcactacgtattttcatctgaaggtcactaaactctagcgtaatattatcatcttcaaatgaaaaaggagtgtttatgcgcaaagaatcctcttaatgggaagctgttagcttgaaatttagccttctgagccaaagtgagtgaagaatcatatgtatcaaatcaaatggctttgctggcctgttgatcacaaaatgccttcgaaccctcctcacatttgaatacaactccaggtacttatcttttgaaacactttgtaaaatagtcttaatttccggcattctttcaactgcaatttccatggagaattttctccaattaagcacatcaatgaaaggcaaagaataattgtcacaaattattactgggacacaccctgcatagattgcttccaccaccctaggacttgctacttcatgtccactagggcacaagcagaacttgcttaggcccatcaactttgtgtagtcttgaccctttggaaggtactcgtgaacttgcacttctttatctttgtttttccaacgcttgagtagctttttccgaatcttaccatgggctccaccagcaaaaaaggctaatattgtgcggttattagggtgttgacccatattaggtgggcctaactttccagaaggcaaataaacttctggaatggacacatctctgttgggct

SEQ ID NO: 31739 - DNA, 218 bp, Glycine max
  Clone ID: PAT_MRT3847_128665C.1
gagcgtttctgatttcagtatagaaacacattcgcgaaactaagactactggaaactaagttggtatcacttttcttcctctgtgacaaacaaagggctaggcctgccaaagggcattaggatgattctctcgtccatgaacaaaaagaactctaaactggaaacatctgtcccaaagagaaggaggagaaaccctgcccggctaatagggtgaaccc

SEQ ID NO: 31740 - DNA, 213 bp, Glycine max
  Clone ID: PAT_MRT3847_128666C.1
tgcataaatgactcgctgggctatatggaaaccatggcgggagcgggtgtagatgactaaccggcagccatatggatctacgcagaatgctgggatcacgcaagctctatcctgaccgcttaaggcgatgactatgccatgaacatcgtaccggacgaagagctgactgcaatgcataggttactgtcaactgacgagcataacctatattga

SEQ ID NO: 31741 - DNA, 563 bp, Glycine max
  Clone ID: PAT_MRT3847_128667C.1
tgtgcatgatcttactccaggtcttgataagttgaaagctcgtgctatcaagtgcatctttcttgattattcatgtactcaaaaaggttattggtgctactctcttgccaaccaccgcttttacatgtctgttgatgtcaccttctttgaagatacacccttttttaactcatccatctcctctaaatctgtctctcagttattacctattccttctgtcatccctcatcggactgtttcttctcctccctcagcacctctttttcttatttatcaccgttgtcctcgaccccaacctgtggaaccaccccttactgaagaaaccggtacatcatctcttgccccaatcatccatcctgttgcggtcgactctgacttgtccatcaccatccacaaagtattgtgaagaaataaagcaatcaggagtccaagctactaaacaaatttttatggcacttattaattcatatgcagcttctggaaaaatggagaaggcaaaacaggtagttttagatccaatcataccaaacaagagcttagatgaaatcaagagtgtacttgtc

SEQ ID NO: 31742 - DNA, 1151 bp, Glycine max
  Clone ID: PAT_MRT3847_128668C.1
ggagccatgaggggcaggctactcgagtggctctggaagacaatcagccttctgtttcagctgatgataggtcatattcttctggacattatgcaaagaataagttaaaaaatgagactatggtaagggaaagtaatgcttctaatccaggaagtcacacaactcttgcccagagtgctgctattgattctcaggcacagccacagcctgttagtaatagccttggaggcactgtgatgggggttataaggggctcaggaagaggggttgttaaagcagatacttattcaggttctacatctgttgcatcatctatgccaagtttatctacagcaaatgttgatgcacagacagttgctactccctttagaacagatgtatctgccctgggttcatatacacaatctgtgattgttggaagtggtcgaagaaggttttcagaaatgcctcattctgcttcaactcacaaggagaacctcaaacaacttaccgggaccgtgcagctgagaggaggagtttatatggctcatcatcttcagttggaaatgatttagctgacgttgaaattggggattcaaatcgagattttgcatcaaggaagggtgatcccatgccattccctcctggggttggtggaggacgcatagttggagatgccaaccttgatacttttgaggtgattacggccgaaaaagcaattgatgaaaacaatgttggtaatcggatgcttcgcaacatgggctggcaggaaggattgggactaggaaaggatgggagtggaatgatagagcctgtcctggcacaagccacagaaaatagggcaggacttgggagtcaacagaagaagttggatcctagccttgaggtgcaagcaggggacagttacaagatgcttattcataaaaaagcacttgccaggtttcgggggatgtcagagagttaagatttcagcacagcatataggatttgatttagcttcgataattattatttagatgttatataaatattcttattgtaaacactagtttgccagaacaattttgaaatttagtcaacatgtcaaattctgcccaaattaagcacgatctctgctttggttgaactctgacgagtgttttggaatgccattcaacttttttttgcctttt

SEQ ID NO: 31743 - DNA, 3736 bp, Glycine max
  Clone ID: PAT_MRT3847_128669C.1
cgacatagttatgattctgattatgaaagaggtagtagaagagatagtaattggaggcaacgcgaatcacgtgatcgggaaagagataagagaggtcatagtcgggaaagagatctgagtccacataggagacgtgagcgttctcgttcccattctcgttctcgatcccggtctcattcccattctcattcccgatctcaatctcgtggacatgatgaccatccaagatctaggtcccctcgaggtcgaagccatggtcgaagttataaggcagatagctattctgacagtcgatatgacaaaagcgaaagacgtagggatcgtgatgataaacgtcagcgagagcattattctgtggccccatctgcaactgttgttgtgaaaggtctttcacagaagacaactgaagaagatctataccaaatccttgctgaatggggtcccctccgtcatgttcgtgttataaaggagagaaattctggcgtctctcgtggatttgcattcattgattttccttctatgggagctgcccaaggaatgatggacaaactaggagatgatggtcttgttgtggatggcagaaaacttttctttgaatatagtagtaagccaacaggaggtcctggtccagatggagctatgaaatcaggtcataattataagagcatgatggttccatccgattggatgtgcactatatgtggctacataaattttgcacgccggacttcctgctatcagtgtaatgagccacgaactgatgatgcccctgcagcagatatttcattgtctaattcagcagctataggaaagaaatgttgcatcgcacgatgccaagtttatctacagcaaatgttgatgcacaaaaagttgctactccctttagaacagatgtatctgtcctgggttcatatacacaatctgtgactgttggaagtggtcgaagaaggtcttgagaaatgcgtcattctatttgaactcacttggaacgacgtcaaagaacttaacgctcctgtggcgccgagaggaactattcatgaaaagaatgggcttaatttaagagtggcgtatgcgaaaagtatcttgggccctggatcaggaacatcaggaacttcccaatcaagcagtcttgcagctgctgctatcgaggctgcgacatttgcccaacagtatgattctgtgggatgggctccaaaagaatacaacccagatgccaaacaatctactggtccagagcaaactggtgcagaagttggtgctccacaatcaggctttgtttgggatgaagcatcgggttattactatgatgctgcttctgggttttactatgatggaaatactggtctttactatgatggtaataatgggatttggtattcatatgaccaccaaactcagcagtacataccttgcactgatcaaaatcagaataaagcatctaatgagtctgaaccttctaaggtatctgatggttctggaagtaaaaaggtcatttctgcaccagctactgctgttgcaccggttgagaagccagcttcattggcagatgctgtccaggctgcagcaactgctgctttagctgcagagaagaaagagaaagaaaaatcaaaggaaataaaacttgcctcaaaaagcagtatactggcaaacaagaaaaaaatgaacaatgtgttgacaatgtggaaacaaaggagccatgaggggcaggctactcgagtggctctggaagacaatcagccttctgtttcagctgatgataggtcatattcttctgggcattctgcaaagaataagttaaaaaatgagactatggtaagggaaagtaatgcttctaatccgggaagtcacacaactcttgcccagggtgctgctattgattctcgggcacagccacggcctgttagtaatagccttggaggcactgtgatgggggttataaggggctcaggaagaggggttgttaaatcagatacttattcaggttctacatctgttgcatcatctatgccaagtttaccttcagcgaatgctgatgcacagacatttgctactccctttagaacagatgtatctgccctgggttcatatacaccatctgcgactgttggaagtggtcgaagaaggttttcggaaatgcctcaatctgcttcaactcacaaggaacaacctcaaacaacttacagggaccgtgcagctgagaggaggagtttgtatggctcatcatcttcagttggaaatgatttagctgaccttgaaattggggattcaagtaagactacttaatttatattgggtttcattgcttgagttaaagtacttttggaaaaccgctgaggtgaaggaaagtgtttgcttgacagtaattaattactaatttcaaaacactgtctgtatctgatgaaaaaggctctttgagtagaggaagctttagttttttgttaggtgtaaggcattggtgtattacatgttattgtatttgatgactgaaggtgtagggaatctctttttttttaataaggggaatggaagaaattttcctggtcaggaaatccaaattgtgtgcgtgaattcttctatagttttaggtatatatatattttttaaaatataatagaattatgttgtttattttaaaaaaaaatctctctaggctgaaaactatcgtagcaagttcatgtatcaattgttacgataatatttaaaaaatttaaataattaaattgtaagtttgcgaggcagtaggttcactggtaacttagatatgtggattgacgttttgagaaaatatttgtttctaccatatgtatccttgaagatcgagattttgcatcaaggaagggtgatcccatgccattccctcctggggttggtggaggacgcatagttggagatgccaaccttgatacttttgaggtgattacggccgaaaaagcaattgacgaaaacaatgttggtaatcggatgcttcgcaacatgggctggcaggaaggattggtaccgttttgttcctcctcattacatgagtttttacgtattacatttttttgttattcaagttgtttggtagagcttgatatattattccaaatttcctcttttcagggatatgctagtactttgatcctagacctagataatattttcctctagtttagatatatgtgtatataatacacacacacacacgtatatatattattttcttcagtcattttggacctcaagaattggatgggatacccctggaaatttggtattttctcaacatatccgccgaaggattctaacatttcttcattatggttgtttcttgtattatggataatttgattacagggactaggaaaggatgggagtggaatgatagagcctgtcctggcacaagccacagaaaatagggcaggacttgggagtcaacagaagaagttggatcctagccttgaggtgcaggcaggggacagttacaagatgcttattcataaaaaagcacttgccaggtttcgggggatgtcagagagttaaggtttgagcccagtatataggagttagctttgataaatatattatttagatgttttatcaatattcttattgtaaacactagtttgccaggacaatttcgaatttcattttttgaaatttagtcaacatgtcaaattctgcccaaattaagcatgatctctgctttggttgaactctgacgagtgttttggaatgccattcaacttttttttgc

SEQ ID NO: 31744 - DNA, 338 bp, Glycine max
  Clone ID: PAT_MRT3847_128670C.1
gggccaaaaaaacccacggacattatttttgggttgggggggctcaaaaaaatttctcgcccctacggacgaagcaagactggaaaatctgcacaggccccccccccccccatatgcgaaaaaattcccccagtctgaaaaaaaaaaaacgcggccttttaaacgtcaccgggggccacccaaacaaaagaaagtcccaatataatatcaaaaactttcccccccttgggaaagaccctcacgaaactcgagtgccctgaagttagaggcgcccactcagaacttcacattaaaaaacctttattaagaccacacacccctattgggaagacccactt

SEQ ID NO: 31745 - DNA, 367 bp, Glycine max
  Clone ID: PAT_MRT3847_128671C.1
gtttcatctggctgctaaagaatgttattggtgccaagccactaaacccaaacacatagccatagccaccctaatttcactctcactttcacttccacacctaattcctgttcaattttcaatccctactcgtttgttctattggcaacgcgaagaagatggggttgtgattcgtaattggagaactgtggagtggaggagggaggtcactttccacgacgccaatgcgttggcttccggtgagtaccccttcaaactcggagagagaaccgaatagagagaacactactcgtgcttcggtgcatctcaatgtgtatgttcttactccccattacatttacccttacatgcttggccttggtatgtt

SEQ ID NO: 31746 - DNA, 334 bp, Glycine max
  Clone ID: PAT_MRT3847_128672C.1
ggcagctataacattagtcatgggaacttctcattcgaacaccaatggtcccaagcttacaagtggagatgattatgtgcaatataatacagcataaggcttcagttattggtgtcattcccttaattttgcaaatttattgtgttttgatcgccttcatatccaatataggtctagagatttttgttcttacgaatttctttggtacaaagactttcaccattattttacacgcatggggttgtattttttttttaattatgatttaattaaacaaaagtgacaacaataattagaattcccactcatttaccttattcaatgcactgtgata

SEQ ID NO: 31747 - DNA, 267 bp, Glycine max
  Clone ID: PAT_MRT3847_128673C.1
tggccctaaattggattcctttttttattcaccaggatggccaaatttttaacttgtcgtcaaaaattctttaaaaccaaattctttttgatggaaatggctattaggcaggcctcctacgactttttgcccttattatggaccgtaggtcctaagtggactgcttctatctatatattggaaggttatggggaccttctaagttctaactggccctggctgacaggaagctcttgcaatatcgggggacaatttttcaccaaacca

SEQ ID NO: 31748 - DNA, 189 bp, Glycine max
  Clone ID: PAT_MRT3847_128674C.1
tccacgcattcgtccacacctacgttataacttacaataaaatactcatcccacacgcaatggtcttatctctctcctctcatcacttcatatattcacaatttctcttccaccgttaaaccctagacccaactgccaacccctgatccaatccatgtccctcaaccacctcctatccgtgtcccacca

SEQ ID NO: 31749 - DNA, 136 bp, Glycine max
  Clone ID: PAT_MRT3847_128675C.1
gggacaatctcatttacaaacttggcagcaacatatgcggcgtggaatagactggcacggccaatggataactgagaaaagataatcaaaattcattgacgcgatgatgctaaccgtgcaaaactgagtacaaatc

SEQ ID NO: 31750 - DNA, 372 bp, Glycine max
  Clone ID: PAT_MRT3847_128676C.1
gaatcgccgaggttttttttttttttatggcagagcaaaattaacgataaaaacttacaaagaaataaacaaacttgaacaaaactaccaacctcagttattcattaaaggggggttttaacagattgctgtggcggaatccttttcctacttcttaatgattgatgctaatcccttacccttgggcagggattcatggttgccccttgccatgtgaacacattgccatcatagcattatgcccgtggctctgccgtgaattgctgaactcccttatgcctcctgtcttgacctccacaccccctgttttcacctgtcataactacttcccacataatttgataaatcacatttgttcctcaaccactaaca

SEQ ID NO: 31751 - DNA, 378 bp, Glycine max
  Clone ID: PAT_MRT3847_128677C.1
cccacgcgtccgcactctcacggtctcgcaacttcatgcttagaaccctagcaacactgtgacccactctactctcgtgtgatggttcagagtgtgttttcacactctcatgcagcggttcacgctctcactctctctcacggtggttcacactcgcattgtggttcagagtgtgttctcattctctctcacacggtggttcacgctctcactctcacggaggtgctctatcaaggtcgagtttacttctcactttagtcgaaagaaggactcttttgtatctagcagtgtctcgagcctacccaaaggttaataggtagtattaacttcaatggagccatccaaaggaaacatcaaagggagaataaaggtgacagg

SEQ ID NO: 31752 - DNA, 445 bp, Glycine max
  unsure (1)..(445): unsure at all n locations
  Clone ID: PAT_MRT3847_128678C.1
gttccaaggagaggtttcccgatcatcacgtgtatgacgctcctcctgtctttggggggggggggggcgtgaggaacactacccccataaaatgccaaatagcgtaaacatgttagggaatgaccgcaaacctgttttgcgttagtagcgtggccaacgttggccatgtgtagctaatgccatgggcccacaggccgtagtaaccataacgtcgttaggagccctcatgtaatcgtcgtgcgttcaacgtagtttattagcgaaacnttcctaacggcgttagttattaaataaccgaagctttaaccgatttatggaagcgtacattattattagtgcgccggattataaggcgtaccaggcaccaattgtttaaaccagaacattggcggttgcatgttgcaacgtcgtgcgtacgcagagccgagcgtgaccacgtaaaacc

SEQ ID NO: 31753 - DNA, 156 bp, Glycine max
  Clone ID: PAT_MRT3847_128679C.1
ccccaaattaaatatgtagccacatatgcttgtaaatttttaaaaggagacattttatatttttgtttttggatacaaccaatctagctaatcccatacaaacatttaccatgggaaaatatacctgcatatatactgaaacatatactttctgaa

SEQ ID NO: 31754 - DNA, 312 bp, Glycine max
  Clone ID: PAT_MRT3847_12867C.1
accacactacacataaaggtgcaaatttaccggaacatggcaagttccacggaaagtacaacgatacacagagcacgagaagaaaaacaacacagaaagtaacataatagtgcaaaggacgccatcaccagcagcatcatccccatcatgaatagttaccatgctcaacttccttccactcacgtgagaatcattgtcggagtaaaattcatatgggccccactttgaattgttcatttttttctttaaattttcaataaatttaggtttaatttgattaatactataataactttactttctcaaatattt

SEQ ID NO: 31755 - DNA, 562 bp, Glycine max
  Clone ID: PAT_MRT3847_128680C.1
gggtaatgaaaaggttcacatcaacattgtcggccttggacatgtcgactctgggaagtcaactaccactggtcacttgatctacacgcttggaggttttgactagcgtgtgattgataggatcgacaaggaggctgtcgcgatgaacaagaggtcattcagatctgcctgggtgctctacacgctcaaagctgatcgtgaaagaggaattaccattgatattgctttgtggaagtcctacaccaccaagtactactgcacggccattgatgctcctggacgtcctgactttatcgagaacatgattactgggacctcaccagccgactgtgcgtgacttattattgactccaccactgatggtcttgaagctggtatttatattgatggaccgacccgtgagcatgctcatctagctatcatcctatgtgtgatgcacatgatcttgtgcgtggacatgatgggtgccactcccctcatttctctcaaggcttgtatgatcgaatcgtgtaaggaaatgtctttatactatacggagggtaataccaaccaaacaagaatc

SEQ ID NO: 31756 - DNA, 290 bp, Glycine max
  Clone ID: PAT_MRT3847_128681C.1
tcggtcagtcttcatagctaaaaatgttctttctcttccatctcagtatttgttgacatgcgggacatggtattggggggaccgggtccattgtatatatgaaacatccattctaattgtcaagtacttctcgtgaatttgtaccagtttgtcaaaccaatttacgacatgaagcaatcaaatatgtttaagaaggtgcaaaatcaatccaaatctatcatgtttccatgagagcttttaaagaagctgctaacaaggtttgcaccattaaaaatcagagttctggatac

SEQ ID NO: 31757 - DNA, 192 bp, Glycine max
  Clone ID: PAT_MRT3847_128682C.1
tacggctgcgagcgacggcaggaaggggttctaatgttttattggttggtggtgtaactcggtcctcctcctttggtggtccggggttgtggttggtttttcccctaacttgaaatttcttgcttccgttgtaacttttggttccgaactccttcacattcggcaacgggttccgaagcttccagatgttcc

SEQ ID NO: 31758 - DNA, 391 bp, Glycine max
  Clone ID: PAT_MRT3847_128683C.1
gggggcccaaaaaaccaaacatcctttcattaaaacccgggggtgattaaaaattttgcccctgtgtccaattttacctttttccccgtcagggttgcccctttgattcgatttctttttgcccccttttacaaagttttgccttgcatctctgaatttcccccaaaccaaccaataacttttgggggaggaaggggatcttcccccctttcctccaaacaaaggcttttttcaacccttttaaaagaaccaaaagcccaaatgaaaaccagggtttaccagaccttttaggaatcctcgggggttgaaatcaaaggggggtcgggttccccgttccgagcttgggtttcaatttgggggggaacctcctgctggtgcgaaaatagcccgg

SEQ ID NO: 31759 - DNA, 109 bp, Glycine max
  unsure (1)..(109): unsure at all n locations
  Clone ID: PAT_MRT3847_128684C.1
ggtcatagggagttagacttaggnactatgaggnagagtcatttagaggacagaaacttgattcacttatgagagatttctagaaaggtttcacacagcttggtacata

SEQ ID NO: 31760 - DNA, 113 bp, Glycine max
  Clone ID: PAT_MRT3847_128685C.1
cccacgcgtccgggcaacggcatctaccaaggaaacaactgatagtgaatctcctaaagatggactctaaagcttctgcattgaaacttgcaattcttggaggtccatacagg

SEQ ID NO: 31761 - DNA, 564 bp, Glycine max
  Clone ID: PAT_MRT3847_128686C.1
gtcgctatttcatctatgaaatgtggtttattaaagataagtcaggaatcagctattattggggatgtcagctatcacgagttcaaagggattgtgattgatcccgatgaacgtgaatccatcgctcgtaatctgggtccattcaacaaggttctatttttaaggaatcatggagttctgacctgtggtgaatcgattgaggaagctctccatttgatgcagaatgtggttcttgcctgtgaaactcaggttaaaatttcgtccattggactcgacaacatataccaaatgacaaaagaatctgttgatcaagtccgtagtgtggtcaaaagttcagttgctaaaattcatggaaccggcaagatcgacgaaaacgaggcaaacaaagcaaaaacccctgaggatgatggtaaagaaaagcttaggaaatggaaagtctgggatcttgaatttgaagcccaaatgcgaatgcttgacaatgcgggcttccgtacaggatatatttacagacaacctttactgcgcgctgaccaacaacgaccaaaatatgatgtagaaatacct

SEQ ID NO: 31762 - DNA, 202 bp, Glycine max
  Clone ID: PAT_MRT3847_128687C.1
gcgcatcgcacgcgtccgtaatctggtcatgcctttctagcgaaaaatggactgctccatctactggctggcgcttcgaatggcgagaggcataatttcttggtaacgataaccacatggttcaactgtaacgcacacatgtggtcggtactccttgttgagcgtggccctggtcttggtttagagtgtcaccatccaccta

SEQ ID NO: 31763 - DNA, 606 bp, Glycine max
  unsure (1)..(606): unsure at all n locations
  Clone ID: PAT_MRT3847_128688C.1
attaactagaactcgagtgagggagggttcatttctcggataggaagtggaagtgagagtgacgaggagagccaccaagcagaactgcttcaggttgccaactattagctcactttcatagtgaaagaagaaaattggtggattggaactaaacattgtttctgttggaaagacaaatacccactgatctgtctttattcgcttctgagatggaagaagagagccaaataacaaagggaaaatatgctgctgatatttcttccataaaagaagcacatgccagaataaaatcattggttcataaaactccgcttctgtcctccagctctctgaatgctatgtcaggaaggaagctctactttaaatgtgaatgtttacaaaagggggattggagcttttaaatttaggggagcctgcaatgctgtgttttctctcaatgatgaagatgcttctaaagggggttgtaacacaccagcagtggaaaaccatggccgaagcattggcttttggctgcaaaactacggngggatcccctttcgtatatttgttatttccgaaaaaaatgcccncaactttgcaaaaatttaaaaaatgtaaaaggcggta

SEQ ID NO: 31764 - DNA, 425 bp, Glycine max
  Clone ID: PAT_MRT3847_128689C.1
gggcgagctaaactctcaatctatccattcatgatgaacgccacttgtacatggaggaactgatcatggctgctccggtcagatacgacaatgccttgaaatggagtatgatcatactgtatgccaatgataattgtgcacagtgacatctttgcactccatcatggcctaagtgggcctggcgatgagacctattggagctactaaacacttgactccatatttacctttgcaccgtgtcatagatactggtgacttttcatgtcctgactcatctgaaccactcggtaccatcgatgctgcaccatgttgctcatgactcagatagccaacttctgacacttacatagccatgatgggttcataaagactcacacgatgcatctaagatagccattttgaatgcaagctacatgtcgagacca

SEQ ID NO: 31765 - DNA, 125 bp, Glycine max
  Clone ID: PAT_MRT3847_12868C.1
cggctcgagcgtatcacctaccgtcactcaccgcactcttcttgtatttacgtacacaaccatatgccgcattttgctatctcaaaattctcttcattctcactttcatttcctcaaaattaggt

SEQ ID NO: 31766 - DNA, 292 bp, Glycine max
  Clone ID: PAT_MRT3847_128690C.1
tactacaataccacacaatgtttttcctataatatattaacgcttaattgggcggctcttttaacctaacagggacttcttcaactttcacccacatcttcattcaccattactcatcaaaccgaaaattcttttttaaaacaaccaaaaatatttcttatttcccataaaactttcaaattacaataaacctctcaagctttataaccacttaaacaaatccattattctttcatttaacactaccaggtaagccattaaactaacctacactcacaataatatccccttc

SEQ ID NO: 31767 - DNA, 379 bp, Glycine max
  Clone ID: PAT_MRT3847_128691C.1
ccccccgtccggtttttatccaattgaaattttaaaaatgcctgggttaaacttaagaattcaatttttgaaatggaataagtaaccaatttaattggattgggcgaaggggttcaaaaaaaaggggtcctaactcccattttttttttttttttgaattaaccgatcaacttgctttgttttcgaacatttttttttgatttcaaaaattttccggaaaaaatttgaatctttttttttttgcggaataatcctactacttttggtcctggggtttttggccttgaaaaaaaaaatttggggcggttggcccaaataattggtccgcgcctagatgaagcttttcccccaggtaagatgcctaaattttacaaccctt

SEQ ID NO: 31768 - DNA, 348 bp, Glycine max
  unsure (1)..(348): unsure at all n locations
  Clone ID: PAT_MRT3847_128692C.1
cgcctttccgacccgngggngaagaaaaacaaagggggagtttttaaaagngnggcccggaaatacaaacggaaacgaagtaatacacaaattcccggctaaatttacgacggcagatacaaattctggactaaacacgagaaaaatctggctctgacagaagaggaaaagagggaagtgaatagaaacaaaggcaatcccgctgacgatcccgcaaagcgagctcatgaataggaaaaacatgttgctcacgaaagccccaaggatcaaattcctgccggtgacaagcagaattctactaaggggaataagactgcaaaaattaagaaccttagacaaagtggtgtt

SEQ ID NO: 31769 - DNA, 253 bp, Glycine max
  Clone ID: PAT_MRT3847_128693C.1
tttttcacatgaagtggtgaatctagacatatatcatgtattgcaagcaacacacatgattccaagatgtatacattgagggtcatggctttcagcaccaactcaccagacccgagaatgtcatatagtttatgaaatcagcgatgagagagaaaaacgaagtcacgagcagggtttaactctggagccgctaggctccatatatacttcccaggagtgaccctcttaatgccgagtagaacccgtactgagg

SEQ ID NO: 31770 - DNA, 240 bp, Glycine max
  Clone ID: PAT_MRT3847_128694C.1
ctctctttctttccccgttccgttttcgcccagtaactgtttgacgaaatgccccaaccatgcacttcctcgttgcactgtccccttcgctgctctctccccgtttgagcccttcccacttccctccactctacttctcgttcaatgaaacttgattggattcgatggtttcttatacaagttatttcatttatagaagagcagagaacccattgcaaatccttaaatttcgtagcatct

SEQ ID NO: 31771 - DNA, 340 bp, Glycine max
  Clone ID: PAT_MRT3847_128695C.1
tgttaatgtttctagctagtcataatatcaccattactgatggttttgataaaactagtgcaactttgcaatttagaaagttagcagattgtgattttctcaagagaaactttaagcagatgtctaatgttttgtgggtggctcctgaggacaaggcgagtttatggtcacaacttcattatgtttcgtgtaataatttggaaatgcaagaagcttatattgtttattttgttaatgtgttatgagaattgtatttgcctagttcagaggaagtttcgcccctttagaaggattgctctctctcgttatgtatggcttcttaaaagctttttctgccttc

SEQ ID NO: 31772 - DNA, 676 bp, Glycine max
  Clone ID: PAT_MRT3847_128696C.1
ctttgtttttttttttttttttacaaaccaaccattgggctcttggacatttttgccttctattaacttttataagcatggacaaagcttcccactaaaggtcttacatacaatgcaaattacactgcagcaatacataaatacacacgatatccaaatctttttttaattaatataatggctgtaatgaggtttaaacttaaaaactttatgcaacctaatccaaactctcacggctagtaatgagttggatatatccaatttatcgacaagctttacatcttattcatcacatactatacaaaaatcatacaactatttcctctaaaagattatgtaaaaataaaattataatgaaaatgaaaattccaagatgaagttgcaatagctataattattgttccttcaaatactataaatacttcagaattcatacagtgtccctaaagttgccatgacttcttcattttcaatctctgcatcagtaaaagtcagggctttctgcaacttccttggagaaaacacctcaacctcagccatgtattgtggcagtcactggtctgtggtctgaaaacctgagttcagtccttccatatcttagtaatctcattcccatgccataggagagaatacgatcgcaccatgctgttgtgcgcctcccaacctttgggtcctc

SEQ ID NO: 31773 - DNA, 425 bp, Glycine max
  Clone ID: PAT_MRT3847_128697C.1
gccttctattaatttttataagcatgctcaaagcttcccactaaagactgtaattaagtttgaacttagaactttatgcaaactaatccaaaccctcactgctagcccgatcctaatgagttcgatatacccaatttatcgacaagctttacatcttattcatcacatactttacaaaaatcatacaactattttctctaaaagattctgtaaaaataaaattataatgaaaatgaaaattccaatacgaagttgcaatagctatcattgttgttccttcaaatacaataaatacttcagagttcatacagtggccctaaagttgccatgacttcttcattttcaatctctgcatcagtgaaagtcagggctttctgcagtttccttggagagaacacctcaacctcagccatgtatgtggcagt

SEQ ID NO: 31774 - DNA, 739 bp, Glycine max
  Clone ID: PAT_MRT3847_128698C.1
aaagccggagaatgtttactatctttgaacaattctgtatataatcttcatcaaaagaagttgtttccgtataatcctaaagtgcttctgaaacgtctaagaagatttcaagagttatgctgtcaggaaaagggattccatggactgaagactgagtaataattaccaaaactgcatgtctgattctgaaagcttggctatcttatgctattaatggctatagaactacatttttgggtattggtggcacggatggacaggaaatagagaaattttgtgctggttcatagttgtatgggtaagatggctactacactggcttagatcagacttagtgcccacagctgtcaacattgtgctactggtgtccatctagtgacagtcttggttcacttcaaatccgtcgattattctatgggtttggggttacatgtcatctctggagaatctggtgagccatatcatggatccagggtgcatgaatggttcctaccagtcttcaatcttgaatttgtaaaggtactaatccattccctcaacttttagccagcggcatgatcttccctttgcgataccttttgtactatatcctccaggtaatccaagcaattatcgcattgaaggatgtctttcttgcggatacctgcctttctcttggtacttggagcttgcattcatgctcctacaaaaaagcatgtaatgagtagaagaccaaaagtgtaaaacttcgttggtttgg

SEQ ID NO: 31775 - DNA, 578 bp, Glycine max
  Clone ID: PAT_MRT3847_128699C.1
gctaccgattccgttccaaggaaggtttcccgtcatcactgtatgacgtcctccttctttgggggggggggggggggggggggggggggggaaaaaccaaacaagaaaccgcgtgatgcctggagaaagaaccgtaaaagatgggataaaatcctttcacaataacccattacaccaccaaccgcatataccaagtgagtatgaaagaagcggtagacaatatcggttgttatgggttaaacccaaatacccacgaccgattgtaaagttaaagaccatagcgataacataggcgttaaatgaccgtgtggggttacgaaacgaccaaaccatgatacctggatgatgaccagaatgggccgtgtgcgccgggccgtgccatatttgagtttacgaggaccaaaacctaaccagatggtaccgatagcttaggagaccagtgagatgtaggggagcctgggagagagtgagtatatgagggcgattgatcatccgtcgggacgcagttattgggcgagtgcacgcgtgacaactacaagcacacggggctaatgggggggcattggactacactaatg

SEQ ID NO: 31776 - DNA, 333 bp, Glycine max
  Clone ID: PAT_MRT3847_12869C.1
ataaattaaatttgctaaaaatatttagatacaccgcggaaaaggaaagataaaaagagaaaaacaaaccagaacagcaacacaaacatagagtaaaataacgatgcaagttataccatcggcacacatacacaactactacttccctcatggctgagcaaacatccacgaccatataccagctcacaggccaagctccgagtgacgctcataaaaccgtagactgctcatatcaactgatgcacatctatacgtgacgcgaaaagatcggggctcgctcatgcccaattgaagctacactcgaactgcctgacaggggactgaagattgtct

SEQ ID NO: 31777 - DNA, 484 bp, Glycine max
  Clone ID: PAT_MRT3847_1286C.1
cattctctcgcattttattagaatgacgatttgagagcagtctgacaaagcgcttgcataaactacaactactacatctgaagctgggggaatgcccgggtgcttcttctctctgttgttcgtggttttatgagttgtgagggagcgtactgtcaatccagattaaatgaacaaccctgtaagggacttaactaatatgatgcactgaataataatgtgatgccctgacacatggctactcaggtagcttttgatggtatgcaacctgtgattttatattatgctgctatagctgaaccacacggacaagcagttatccactactgactactaggggggaaaaatgatgtattaaaaactgatgatgctcataatggacttgctacgcaatctattcatgagcatggttagactaccttagcgggtatactcctgtgagaacctacgggcgtatgatctgatggctggatgagaacagatcctg

SEQ ID NO: 31778 - DNA, 582 bp, Glycine max
  Clone ID: PAT_MRT3847_128700C.1
agggttgattagtgatcatcacatgttccaatgaaacagaacaagcaattctggctggctcaaaggtctaaagcaattcttctaggttctcttctttatcttcatctttttcacccaattcaactaggtcatacgagttgcaattgttcaacaagagtaccagggcagagcaagaaaattcaatcaacagtgccatctctcattgtaaaaagtcacaactacagggtagttcaaacaacgtttgttcacaatctctggtttgtggaaataaagaaacaactaggttgacccactgagagggggagtgagagagttgagaagagcttggtcaaaaagaataagtttctcatttgaaacgaattgaaatattgtatgtcaaagaggcaatgtagtgacagcattggtcatttgtgacaaattgccaaagggtaaatgcaacatattgttggggatcagtgagaaaatttagtgataatattgcaagtgattagcaaaaggatagtattggtcattgatgaggaaagtgaccaaaatcaagtaacgaattcacaacaaagattggttcggttattagcgaaaaat

SEQ ID NO: 31779 - DNA, 395 bp, Glycine max
  Clone ID: PAT_MRT3847_128701C.1
gagagaaagattataagattggaatggagaaggcaagcctgtgcgacaggaacactcctctcccacttcttaatcgcccttccaattttcttcaattcaagcaccaaaactccttcctcaagttcccgaacccaaacctccatcgactgcgcaggctcaattgctcagtatcagacggcaccgtttcgtgtaagcctcgtattgcatttctttcccctccggtttctgaattcaaattttgtgcagttagttagttaatgaatgttgttgttgttgcgtttgcatttttattattattcagcttcgcttggtgccacggactcgtctcttgcggtgaaggtgagacagattaagattgttgatagatagaatcatgcgtgtttgatttcacaatg

SEQ ID NO: 31780 - DNA, 325 bp, Glycine max
  Clone ID: PAT_MRT3847_128702C.1
cctcggaattcggcatcgtgcagttatactctatctatctcctcctattatgttttacttaaattacacctgggagatgggggatgggtctaattccgaaaggcatctattatctcactggtaacttctgtgcctaccatcaggactctaaaggagaatgctcgtcttttgcttccgtcatgcaaactttaagagccaattgaggtcggtaaagttgacctgctgctttggtttaacatcgtagcggtaattttgaatgcattaagtcttactgcagcttgatcttgcgaaagctctcatgaacttccatccttggaggctcctt

SEQ ID NO: 31781 - DNA, 582 bp, Glycine max
  Clone ID: PAT_MRT3847_128703C.1
ctatactatggtaacaagatacatcctatggttagaaataatggtctactgggaaccacttaatatgtggttcaccgtagccttcgcctatagatcacataagtttgtaaaaccgtcagcgttcatataattttttttgaaaagcagtggccatttaattgatgttgactttgatcacaacgcgttaaaaaaacattatgtaatgcaataaatattttaataaaaggtcttgtcattaatgagaaatatatttcattcatgccatattaatgatatttaataaatttagattccatatgtacttttcttttatttctttgtttttatgtatttattatttttttctagaaaaagatatttcagaagctgtttctcaagagctgatggttttttatttatttaaattaaattagtttcacttttgtaaccttttatgcaaacctttagttaagacagttagttagggggttattaagttgaataaataggaggatgaagctggaaaggagggattcagatcaatctgtatctttagtaaattgagtggtatctcttatctctttgctaaaggttcttttgtga

SEQ ID NO: 31782 - DNA, 385 bp, Glycine max
  unsure (1)..(385): unsure at all n locations
  Clone ID: PAT_MRT3847_128704C.1
ctgggattcatgaccacttcatcttatgcgcactgcagatcgtgtccttatcacatctggggacctcggctatcctcgtatttcctaagttatctccttgtgttgataggcggaatcccgcactcggatgttgtgtgtgcactgctgtagctagaagaacattgnatagtgactatcatgcactaccttcttggagctttcaagcctgcatgtaatgtcttcttctcattttttgatgggcagaaccggacgcatgttccgttttaacacgaacttggtcaatagttcccagtgccacttttgcacagttgagaacacattggcgagaagattaccctttaatcaaagcacgggaagaagactgatcacaatggtgttaaacttg

SEQ ID NO: 31783 - DNA, 375 bp, Glycine max
  Clone ID: PAT_MRT3847_128705C.1
atggggcgaaaacacggaaaggacgaattatcctttccgtaacaactcccggggataaaacaccttcataggctggaattacggaccggcgcctgctaggcaaccaacacctcttgtattgagcaggattaaagcgtggaataccttggatcctattgccagcagagggaaattaggtccacttgctatttcattaaaggtacggagcaccaacttaccaccgaggggtctgaacagcccaatgctggatggaactgacatcaaatgtatggcgcttgctataagttatccagtgcacaaaccttgctggcgatgggagctaaaccttcgaccaaagcgcgtggacacgcgattttttataaatggacgctggtg

SEQ ID NO: 31784 - DNA, 314 bp, Glycine max
  Clone ID: PAT_MRT3847_128706C.1
ggatattggatcaattttgttaatgaaaattgtgaaaaagaagtgatcagaagttcaagtaataattgttctttagcaaaatttatttcggagataaaagaagtgttgaaattgggaaaacccgttcctaattcaaaatttgctgccaagtttaaaccaacaattacccctgtaaattcttcttctgcttctggttacgattattcttctaagtaaattgtaaaaaattttttgattattttattttgtttgtaaattaactgcgacaactttgtaaatataataaacgactttacatttaaaaaaaaaaaaaa

SEQ ID NO: 31785 - DNA, 208 bp, Glycine max
  unsure (1)..(208): unsure at all n locations
  Clone ID: PAT_MRT3847_128707C.1
cgcacgcgtccgcttactgttacngtttggatgagtatccgaaggtgtacgaggagtgtaggttgaagtgccagaattgtccgatggggtttcatgcgatggttgtacgttctccgccaaaagatggttcttttggctcgttttgcagatggggttattttacctgtgggtttttcttgggattttaaggacattaactagtcttttt

SEQ ID NO: 31786 - DNA, 309 bp, Glycine max
  Clone ID: PAT_MRT3847_128708C.1
attcccagtcagacccacgcgtcaacgttcacatacgaagttctgaaaaatgagtaccaaagtgtttcttattctacttatgttcatggccactaaagttttgatctcctcagaggttgcacccgatgatccatagtagactttatgacagaatagacgataagcgtggtgcatatggggtacatcattgcagatattggcgtggtggctatggcgactatggtagttagcatggtggtggttggcgtgctgtctatagacggaggcgtcttgcctatggttgtggacgtaatggctatatgaggctgg

SEQ ID NO: 31787 - DNA, 267 bp, Glycine max
  Clone ID: PAT_MRT3847_128709C.1
tacggctgcgagaagacgacagaagggccaccttttaccattcaacaacaatgccatctagtggcatagattcatcaaccaaatctacaccaagatgtttctttaaacatttgatgcattataaaatgttggtttaaccctgtaatctaccttgcaactgcctttcttgtttgatgcactacaaagtcagttgttacaatctaattgtgcttatgttttatgcttgctttttaagtttccaatactgaaaaagcagcaaaataaatc

SEQ ID NO: 31788 - DNA, 419 bp, Glycine max
  Clone ID: PAT_MRT3847_12870C.1
gaagatggttcttgacaagccattgcgtaatttaaatccagacgttccttttggtcctgggctctcttcgacagttggagacgtatcatttcgatctggtttaaagccttggcaaaagcttaagccttctatagaaatcttatgcaataatcaggtaaatgaaagtacattgtcttgtctgtgtggaagaataacggtttatcctttttgctaggcgattaggcactcaaaagagttgtagtactgagttgtactttaggtttcttatttaactcaagttgaactgtaattactgttttggttcattttccatttttttacctcactttacacccttgagaagaaaacacaactttttattgaaatgatgaaaagagattaatttgtgaaaaataaataaactaatccatagacaaaca

SEQ ID NO: 31789 - DNA, 451 bp, Glycine max
  unsure (1)..(451): unsure at all n locations
  Clone ID: PAT_MRT3847_128710C.1
ctcgagccggtcttatcgatgatgtttatgcattctttgttatcaatataatatttatttctagatgttataactaacaaaagttcaatcatgagtattttatgcattaaatatttgagtttgattagctcttaactctccagtgaacagatcctttctttggactgtaaactgggttttagttttacttataatcaagggcaaaataatttcatattttaagataaataatttattttgtaaaatctttgcagtgttaggttgtgtggtttagattttgaaaaattgatttatatatatatataatctcaatttgataaccttgcaatattcctgataatttggtcctattttgtatttattaatttttagcttgctacagngaaaattttttaaatattggtctttatcttttgaacaccctgtttcctcctgttttgagctgtgacct

SEQ ID NO: 31790 - DNA, 279 bp, Glycine max
  Clone ID: PAT_MRT3847_128711C.1
ccacgcgtccgcggacgcgtggggaaactcgtatcaaattaatttcagattaagtacatagtttacaaataggagttttcctttggaattaaatatgatttcttttgtttgcctgagtcgatattgagttgaaagctatatgaaataatttatatagcagcagcaaatagagattagaaaatatccagtgtcttagtcttcttaattctcatccgcataaaccgtacaccatgtagaggcctcaatgattttcggatatcagagttcatctttatactc

SEQ ID NO: 31791 - DNA, 265 bp, Glycine max
  Clone ID: PAT_MRT3847_128712C.1
gaaatttaccaagccaaggccttttacctccaccaatgaattttttaaaccttttggttttctaaaaccgtgtcctcgtacctcacaatcttagggggctgcgaattcacactttttctacaaaccctaaaaaaacattttaaaatctatcttttttaaaaatttctcactcatatagggtccccttttatggcccctatattcccatttataattgatttttttctcaggccccattcccctctcatgcccaacattgtttttc

SEQ ID NO: 31792 - DNA, 340 bp, Glycine max
  Clone ID: PAT_MRT3847_128713C.1
acccgaaagggggaatccagggaaggaaaaaaaaaggggggggggaaaccactccctccggtaaaaggatacaccacccaaaaaggaaatttctggggggggtggcccacaagaggttctgaaaccgaggataacagtttacacaaaactaagaaactgggcaagggaccaaaaaaaggtaaaaaaaaaatcctggattttccacaaacaaaaaaaagcggggaaaagcctgcgcggggggacgccgctcagcaaaaaaagatatgtgtttcttcccaaaaaaaaaaaatgggagaaaaaaccccggccgtaagaggagaggcacaacaaaaaaagcacc

SEQ ID NO: 31793 - DNA, 340 bp, Glycine max
  Clone ID: PAT_MRT3847_128714C.1
ggaaccccctctgatgcaaacaccgttgtgaattgcatttgctcaactactactgaaccagaacgagggatatagttattgtaacaatgacgataatgtgaataaaaagaactaacacgttgaacttgaccctgacggaaaaattgacgaggatcataataaagtggaagctagcctggtgcggacggacctgattgttactgtgttatggatcaaccaggacgtctcgctgagcttacaggattccggagcgtctatatagataccgtagtggtgccaccaattgtggcactgtccatgtacgactgctcggagtgcgaccagggcaaaattgacagct

SEQ ID NO: 31794 - DNA, 152 bp, Glycine max
  Clone ID: PAT_MRT3847_128715C.1
tctacatccaacaaaaccatgtgacaaatattgttgggggctcaattggctggagaagatatcttgatcatcttatcagttcactatgtcatgataaagatatatctagcatggaacttcttctcttacagctgcttgacagttcatgttca

SEQ ID NO: 31795 - DNA, 487 bp, Glycine max
  Clone ID: PAT_MRT3847_128716C.1
cgcctccacccccgcaaatcctcgatgatgctatttacgccgattgacaccacactcctcaaaaagcaccttggacctcctcatcaaagaagtggagaagaaagtccatcaaaggtcggagattagagaggacacaacgaagatggtgaagaaggctccacggttgccgttgatgaagtaaagggatagcacggagagagaaatggaggaaatagagaagcatgaaaaaaggatggtggcagcgatgcgttactaggatcgacagacaaagacaaatgatgggaaaaagaagcctaccacatacgacaattgaaaatcgccacaatactttttttgggtctctttccctcgatttcttctctctgtttatattgttatgctggttttggatcgaatgggaaaccgccgcagcgacactttgcggaggtttccaacaactcatgatttttttttggtctttttcccacaatttcttttctatttatat

SEQ ID NO: 31796 - DNA, 481 bp, Glycine max
  Clone ID: PAT_MRT3847_128717C.1
gtttgtaaaatatcatgagcggccgctagggagcccctactatcagagaggaacgcgacaacaacaaaaaaacgaaagaagcaacattttgagtggcttctaccctgaattcttgaaagaagcagttcggtgttatcatagcacatagtgataaacactacctagtgagaacgatatagaggatacattatccatggctactacgaaaccgagtttaagagtaacaactccagtcttgatgaagccacaacaggaagaagatgatggtgactgagaatagcagacaccgtgcgtggagacatacaaaaggtgccaactccaaagctgaacgaacataactggtcttgatgaaaccatttgctcaattatacttatacacaacattacttagaattcatcaactgacatttacaacactaaagctggtagtattacaaccgccaccaaccttgaattcccaagcttctggactctgaaactt

SEQ ID NO: 31797 - DNA, 294 bp, Glycine max
  Clone ID: PAT_MRT3847_128718C.1
aaaaaaaaaaaaggtattatggttaaatggggcaaggaaaaaaaaccgggcgtttttaattttttaaacgggaaattaaagggggggggcataattccattccaaacaatggggaaccttgaacctttcaattttggaccgtttttttggggggggaccccccatttagggccttattttttttacgggtttaaaagaaccttttaccttttttaaaacctccccccaccccacttgggaaaaattttctttttacaagagactttttttttaacctttgaacctgaaaagggg

SEQ ID NO: 31798 - DNA, 263 bp, Glycine max
  Clone ID: PAT_MRT3847_128719C.1
gatgcatcatacaggcaaaaacttgtgcgtcttcacttcttccattctcctgcaccgacaactcaattaccatcacagatggtggcataagcgacatggggaagcttgatctactggtgccaatcagtgcaaatggacgtgtccctgactctcccaggctcacctctcctcagccctctctgtcacatccaattcgttggaatcagggacacgccaatcgtctccgtagtatacgacgccgattcagcactcttcgatgtcgt

SEQ ID NO: 31799 - DNA, 659 bp, Glycine max
  unsure (1)..(659): unsure at all n locations
  Clone ID: PAT_MRT3847_12871C.1
cccacgcgtccgcccacgcgtccgccactctctcacacactccacacaagacacaaccatggaggagccaacgttgttgttccccgacaccgacctcgatctcagcttcaccagcaccaccactgaccgcaccaccaccaccaccaccaccagtgcaagaacaagcctcgcccgcactagcagcctcaccctcagcttcaacgaccgtttgtccacattctccgcctcggaaaccaccaccgcctcccttatcagccgccgtccccaccggagcggcgatcccaactggtccgccattcaggccgccgtcaacctctcctccgacggccgcctccacctccgccaccttaagctcctccgccacctcggctccggcaacctcggccgcgtcttcctctgccgcctccgtgactacgacggcgcccacttcgccctcaaggtcgtcgacaaagacctcctcaccccgaagaaactctcccacgcgcagaccgaagcggagatcctacacgcgctggaccaccccttcctccccactctctacgcgcgtatcgacgtttcgcattacacgtgccttctcatggacttctgccccggcggcgacctncactcccttctncggaaacagtcccagtttcgtctcccctcgcggcggggcgttt

SEQ ID NO: 31800 - DNA, 741 bp, Glycine max
  Clone ID: PAT_MRT3847_128720C.1
ctcgcgtccgctctctctttccacactgacccaactccaccacaagttagagaagccgcaaatctagccaaagaagtttgtagatctaccattcaaagttgcagatttgtcgtcccctcccacctccatggtcatcgtcattggagttcagcgctaacttttggaacatcgcgccagagtgttactcacattttctttggatccaatttcgttaccgttaccaaatgcaaagaggttgaacgggaattcttcaaggtttcttgacaaggcagctctacaattgaaagaaggtagttttccaattgactgatactaatgaactgtcgcttttggagtgtacagtgtcccttcttactggatactaaattgctaaaccttttgttgattgggaggtacgtgctgatttacttgttttagtatctgggatattgctgggaaaatgtaagtgtatagatgttatttaacatttggtgatattttgtagtgttaatttgtgtcttgctagtatgtttctggacctattttgagatgaataagccattcatatgagatcttaatgtactttcttatatggatttcccctcggtattggtgggtgatattggtttgggtattactgctaatatgtattcgacttctaacatttaggaatcaagtgatgagaatagataggaaattgggtattttttttgaatttataatagaaaaatccccttactgccgctattagggtagatcaat

SEQ ID NO: 31801 - DNA, 422 bp, Glycine max
  unsure (1)..(422): unsure at all n locations
  Clone ID: PAT_MRT3847_128721C.1
cctcacttgactttgttgttttaacaattcccctcgtttcgcaagtccagggagaatggaagcttttgtgggtgcgtttgnngncctttnattttgtatacttacatattgttctgagacctcaattatttcctcactgttttctctcacctttgtaccatatcttgagtttccctattgtaatatttcatctttcttccattcgtatttctatttatcaacttttgctaattttttttttgtcaatatttattccattggaatttttcgttcataatctttctcctcacaattttctgtggaattgttttttatatagttattatccatccttttttctttttctcccccattattgttttccaaaatttttcccccccatcttttttttgactgttctcttttcctaatctttttttttt

SEQ ID NO: 31802 - DNA, 541 bp, Glycine max
  unsure (1)..(541): unsure at all n locations
  Clone ID: PAT_MRT3847_128722C.1
gatgatatctgtaaattcggctctgtcttaaaaaaaaattaagaatttatcagaaaactaaaattcgaacattttaacaatttaaaagatcaaataattcacactgtaagacttatttgatcttttaaattgttaaaatgttcgaattttagtcttacagctgtgaattatcgattccaatattgaaatttttggatatatacgaaaaaatacggaccatctcatcatctacgttttgccaattgagaaatcctaatcctattattcgatttgaacccatcaccaatagaatacctagattatagatatgaaagaatatttttggtaaaagtaattattgataattcgtaataaaagactcgactcttactacaaatccattttcgaaacttatcttatatatctcctcacaaaaatttaattttttagaaacttagtattaaaagaaacaaaatttgttgtaatataagagaatctattctctttctttgtcngtctttaattatcttggagattttataatgcttactctaaaactatt

SEQ ID NO: 31803 - DNA, 1380 bp, Glycine max
  Clone ID: PAT_MRT3847_128723C.1
aataaacactattatttatattggttgttcgtcaattccagttcaaaaatttctatagaaaaatttgttgctagtatttttatatgcgtatctacatatctatctatatctatctagatatagataggataagactcaatttattgatcattacgtacaattctattaagatattgtatagaagtgtgatttattcgatttttttatttcagaataaaaaaagattttgaactagataagttcaaatcaaagaaggattttggagggttttatcttattttattcatttttttttagttttattcataaattaatattaatttcttttcctttttattgtattttatatatatataaaataccataaaaaatgaaaattctaattaaaaaaaaaacaaaaataatttatattttcttaaagaacaaaatgtttgttatgcttaatatctttaatttggtctgtatttgtattcactccgtcctttattcaagtagttttttctcggcgaaattgcccgaagcctacgctttcttgaatccaattgtggatattatgccagtaatacccttactcttttttcttttagcttttgtttggcaagctgctgtaagttttcgatgatatctgtaatttgagtaatgtcttaaaaaaaaattaagaatttatcagaaaactaaaattcgaacattttaacaatttaaaagatcaaataagtcttacagtgtgaattatcgattccaatattgaaatttttggatatatacgaaaaaatacggaccatctcatcatctacgttttgccaattgagaaatcctaatcctattattcgatttgaacccatcaccaatagaatacctagattatagatatgaaagaatatttttggtaaaagtaattattgataatttgtaataaaagactcgactcttactacaaatccattttccgaaacttatcttatatatctccctcacaaaaatttaatttttttagaaacttagtattaaaagaaacaaaatttgttgtaatataagagaatctattctctttctttgtcgttttttaattatcttggagattttataatgcttactctaaaactatttgtttacacggtagtgatattcttcgtttctcttttcatcttcggattcctatctaacgatccaggacgtaatccagggcgtgaagaataagaaaaaggtggattctgtgtttttcttgcttgtgctggattttaaaatatttttaggattttctttattttaacatctttaactagtaaataaaaaaaaatcaaacaaacaaggaaaacaaagaagttcaacaaaaaatatcaaattatcaacggaaagagagggattcgaaccctcggtgcc

SEQ ID NO: 31804 - DNA, 317 bp, Glycine max
  Clone ID: PAT_MRT3847_128724C.1
tcctactatttctctctccttctcctccttcttacctgcaagtttttcacaaaccttggtcccacactaccaaccttttcaataaaaaaataattctcactactgttcccactacctcttccccgacaagaacttctcctatctctatcaattccaattcctccccctccaaagcttccacaaaaactccaatctcattcttctcatcttattcaaattctttcactcaacccctcttaattcctaacctcttaaacaatatttattccacaaaattttcattcatctaccacattttccattacttattttttaca

SEQ ID NO: 31805 - DNA, 235 bp, Glycine max
  Clone ID: PAT_MRT3847_128725C.1
gaaatccggttcaaaattaattggaacttttgggaacttggttcaagaatatgctaaaaccggcaaataagctgaaaaggttgtggttaatccttccggtctgcaattggtgaaactttttacaggatcaaaggccttggttcacaatcaacagctgggacaaaagtgtctaaatggttagccacagcaacaagggataacatatgcaattgcggatctgcttgatgcaaggttg

SEQ ID NO: 31806 - DNA, 644 bp, Glycine max
  unsure (1)..(644): unsure at all n locations
  Clone ID: PAT_MRT3847_128726C.1
gcgaagttcggccgcacgaaggcggagcggtcggcggaggagacgcgcgcggacagggcgaaggagcacctggacaagcatcagatcgatcgcgaggagcagccatgaagtcgcccgtcgtgaaacgatcgatcgtcgtcgccggtcacaagaccagcgtcagcctggaagaggcgttctggaacggcatgaaggagatttcgggcctgcgcaacatgacgctgtccgagctcgtcggcgagatcgacggcaaccgccagcagggcaatctgtcctcggcgatccgcctgttcgtgctggactacttcaagagccgcgccatggccgtccagccggacaaggtcccggcccaatagccggcaaggcgtcttttcggcgcgtcggggcgttcgcactttaaaatcactctaaggtgcagcttccggcgagcaagcgcgcttgacctcaatgccctgcgttgaaaatacagggcatgaccgacaccaatgatacgcgccctcacatgccgctgggtttgggcctgcgcggctacaccggcgtcatccagcacctgtccgncagggacaccggntcggcgctctcggacatcgagctcgagagccggctgatcgaactcggcttcgtcgagggggcccccggagacg

SEQ ID NO: 31807 - DNA, 346 bp, Glycine max
  Clone ID: PAT_MRT3847_128727C.1
gggggcccccccctttaaaattttaacaggggtttttttttccaggcttgtcccaaaggccaacagggtctaaaaaaaaaaaaagggcctcctgaatttagtaaaggtctcgatctttaaaaaggggggggcttttttttccctacctattgggggggggttatcgggtgggatgagccggggcaaaaaaccctaccattggatcccattgaacttttccaagggggagttcttttccatggggggggggagttcctcataaaacttggggtcaaacggaactttttcctccaaatgcctccgtttttttggaggataacccatgccatgggcatgcaacagtttt

SEQ ID NO: 31808 - DNA, 662 bp, Glycine max
  unsure (1)..(662): unsure at all n locations
  Clone ID: PAT_MRT3847_128728C.1
cctcatagttatcacttatgtgctttactatctccaccaaatgtattttgtgtgaaaaacaatgatagtgcttctaaagctaacaagttttattctctctcaaagcttcttgggagttgctaggtgcacccagcattattactggtgcacccaacaaattttaaaaaaccaaaaactgcccctgcatgtttacaaaagcttttttacatttttaaaaacaatggcacaatggagtgtttgcgcagtgcttctctccttcctcattctctcagtcggtttctctcttcggtgcatagtgcttcatcgttgttctttgtttccttgcacttgattaggttcggtgaaggtgaaggtatcgatgttcagcgttgtggtggtcgtcggcggcatacgaagtatgcatttgtgttgggtgtgcattttggtgtaccgcaggtcgtgtagatcaagttgatccgcaatataattatagatctacttgattcgcatgttaattttaaagatacggatcaacttgagtattgcggatcaagttgatccgcaagtatcaatttgatccacaggcaaacaatctacatgcagatcaacttgatccgcaacttacttgcngatcaacttgatccataacaggttatatttttaaattttaaagcttcattttg

SEQ ID NO: 31809 - DNA, 321 bp, Glycine max
  unsure (1)..(321): unsure at all n locations
  Clone ID: PAT_MRT3847_128729C.1
ccatatcaaantatttaagcttcattttaaattcaaatatacaccatacaatcacttcaatcatctatttcaaatcacaatctcaccatcattcttacactctattcctctataattatatcaacacttatttcttattcattcataaacatctccaataaatccatttctcatacttatccattctattattcattctcattctctatctttaacataactattcaattcatctacttatcattattattataaactttatttttattcaaatccttattcatattatattattacctctcccaatttcacccaaatatt

SEQ ID NO: 31810 - DNA, 491 bp, Glycine max
  Clone ID: PAT_MRT3847_12872C.1
gggaaaaaggcccggcttaaaatggaatggggggggaaaaccccccaatgggaagcttttccaaccaaaattcaaatctggcaaaaaaaaaaagggaaaggggtttttttttttcccttttttttctccttcgggcttttagggaagggttaaccccaaaattaaaatcctcggggccattttttttttaaaacccagggaaaaaaacccccaaaggaaaaaaaaaaagccggttcccccttttttttacccaacttttaatccccagtttaccaaaaaacagggggcccaaactcggccaatttggggtccttgaaaccaaaaaacatttagaaaaagggggggttttcacggggggaaagggtaaacaaatgcttccaaaacccttaaacaccagggaggggggaaaccccttgagagaaaaatggccatgggtcctttctttaaaaacccgggaacccaccctttgaaattgttccccaggggggggg

SEQ ID NO: 31811 - DNA, 151 bp, Glycine max
  Clone ID: PAT_MRT3847_128730C.1
gataaattgttccgccattgtatttgatggagacacatgacctagtcatcttaattctgtccccaccatgttctcatgatgatgacacaacccattgttttagatcattaattggaactagattaataattcttcattttactaatcatct

SEQ ID NO: 31812 - DNA, 780 bp, Glycine max
  Clone ID: PAT_MRT3847_128731C.1
tttttgtttaaaatagtgagtcaactcgataaatttaatcccatcccatgataaggtcattttttgaatactaaggtgaaattaagtttaaatcccagtatctgatccgatctgatgattattgagtaaaaaggaagcagagtaaccgaatagggagagaacaaagtttagggttgtgttgttgggatccaacacgaacacgacacaaacaaagaacaaaggatgaggatgaagagggttttcgttgtttacagtgttttgttgctgctggtccagttttggcttggtgaggctgagacattctcggtggatggaaaggttttggttttggacgaatccaacttcgattccgccatagcctccttcgatcacatcttggttgacttttacgctccctggtgtggccactgcaagcgtctctctcccgagttagatgcagccgcccctgtacttgcaaccttgaaggaacccataatcatagcaaaagtagatgcagacaagcatacccgccttgcgaaaaaatatgatgttgatgcatatccgaccattttgctgtttaatcatggcgtccccacagaataccgtggaccaaggaaggcagatttacttgttcgttatctgaagaaattttctgcttctgatgtttccattctggattcagattctgctgtgaatatgttcgttgaagaagcaggcactttttttcccgatttatataggttttggtttgaacagttcggttctagaaaagtctggcataaagtacaagaaaaatgcatg

SEQ ID NO: 31813 - DNA, 364 bp, Glycine max
  Clone ID: PAT_MRT3847_128732C.1
cgaacacgttcaccggagcttcactctccgaacgctttctccgtctcaagctgaatcagagattgaggtatagctcaatttcaagctatgggagaaggaatgtttcttttagctcacagccacggtcaattcgccttacagtttcctgtgctgctaaaccagagacagtagagaaggtgtgcaaaattgtaaagaaccaacttgctctatcggatgactctaaagtcaatggcgagtcaacattcacagctcttggagctgattcacttgatacggttgagattgtgatggggcttgaggaggaatttggtatcaccgtagaagaagatagtgcacagagcatcttaacagttcatgaagctgc

SEQ ID NO: 31814 - DNA, 352 bp, Glycine max
  Clone ID: PAT_MRT3847_128733C.1
ctacaccttttttctccctcctccatcaaccatgggtgtgaagcacaccaccaccaccaccggggcaatttttttcacttcaatgctagcttaatcctttccatcatatgcattgccaacgatccatgcgcttgtcagcaggacgactacgagtgctacatcaccatgattaccatctacggccgttgctcgccattgaagacctacttaatgctcatgggagaacatgatcattatcacggacttcaaggacccagaaagagtcctgtacttgtgtagcctcaacgccttactgaggagaaagcccatttgggcagacccaatcgtttcgggcccaaggctttggggattt

SEQ ID NO: 31815 - DNA, 693 bp, Glycine max
  Clone ID: PAT_MRT3847_128734C.1
ttccggactattcaagctcttctcaccctccgccgccttctcaattctctttgcatctttgcacaaacctccatggcgacgaacacgttcaccggagcttcactctccgaacgctttctccgtctcaagctgaatcagagattggcatttaattcaattgctggccaaaggtatagctcaatttcaagctatgggagaaggaatgtttcttttagctcacagccacggtcaattcgccttacagtttcctgtgctgctaaaccagagacagtagagaaggtgtgcaaaattgtaaagaaccaacttgctctatcggatgactctaaagtcaatggcgagtcaacattcacagctcttggagctgattcacttgatacggttgagattgtgatggggcttgaggaggaatttggtatcaccgtagaagaagatagtgcacagagcatctcaacagttcaggaagctgcagatcttatcgaggagatcatcaataagcagagtccttagagtaaacatgtaccagataaaaaattatttctgctagacatgcatagttttatatattttagtattgcggggtagtttagtctgaagtgttttatatatttactgcaagtctgtaaccaaagaaataaagtagattttgctccttttcccaatatattttgtgcccgtggtgttcgatttcgaatt

SEQ ID NO: 31816 - DNA, 789 bp, Glycine max
  Clone ID: PAT_MRT3847_128735C.1
gagggtgggcttcaagcagagagcacagaccgaaacgccccagcaaaccgttagtttcacagccggcaacacacgaaacgaaaggaaccaaccacccacaggccaaagcacaaaccccacacttctcctaagtcctaacccccgagagagagagagaaatggatactgatgcagtgggaagcgaagggtactctccgctgaaggaattaagactggaaattgaagtaaaggagggaactttctctctctgcttttggctttatttgacgagttccactacattccctgttaccattatccaacaggttttctctgatatctccgaaagtgctcctttttcttgttattgatgataataagagaatccatatgttaccagttcttctcttacatgaagaagctcctgaaactggcaatataaattcctggacagaagttccacatgcaactgttgattttgagtttcttttggaaaaatgggttcatgttggatgtgaggtttgtccagatcatatccagcttcagattaatggagagattgtaggagaaaagtctttgtgttccttattaaataaggaatcgggttcaagtcatttgaagaaattaactttggcaaatgttggtggagatggaaaaagtgtgcagggttatgtgcacaattttgaaatatttcctattattacttctattaaagattgtcatttaaagtgccctcctctgaagttatcaattgatgaatcgtctgtctctgagattgaagaagaaagtgatggtgtttggggcattgtt

SEQ ID NO: 31817 - DNA, 297 bp, Glycine max
  Clone ID: PAT_MRT3847_128736C.1
tgtaggaaaagggtaccacatttattttattcaaattcatgtaatctaagatggaaagtacatgaatccccattattttagtcctaggacacacattcttaagagtgacactaaccagaaacaaatcgaatactagtgcctatctatttctaatacgttccagtaatctcaaaatgcttttttttttctttctaatcaagctggacattggtgcccatatgttgctccggcctttcaatgactaaaaatagcattcttggactgcacccaataaagccctgtcctgccaatcacttg

SEQ ID NO: 31818 - DNA, 1331 bp, Glycine max
  Clone ID: PAT_MRT3847_128737C.1
gcgtccgattcactctacgctcagacctctggttgaagttcttttccatgtaggtcttcctctccgttgttatcgttgctgttgccttaactctcctctgccttctcctcaaatccgttccaactttcgctttcgctctctaactctcccggttgtgattcttctcccgaattccgctgtaaatacctgaatctagcttctctcaatatctaagctcccgtggcattgtagggactagggattgtttcacagaacacctctgaaattcaaatcccttttttttgtttgatattaatctatggtaggatatagaatctgaagctgaaaaaaggggttaattgttttgcagaatcagtataattgtagagagcgagatggatcactatggttcttctggaggaagctggacaatgatcccaacccacaattcccaatcccaatcgaaccaggaccctaacctctttctgcaacaacaacaacagtttctccagtcacaaccttttcagcaagcactagcgcctcaatctccatttcaacagcagcagcagcagcgtcttctacagcaacagcaacaacaacaacagccgcagaaccttcaccagtcactggcctctcactaccatctcttacacttggtggagaatttggctgaggttatcgaacatggaaccccggatcagccgtctgatgcattgatcaatgaatcgagcaaccactttgagaagtgcctgcagctgctaaactcaatctctggctccattagcaccaaggctatgacagttgagggacagaagaagaagctagaggaaagtgagcaattgctaaatcagcgaagagacttgattggcaattacagaaaatctgtggaggatcttgttaggtctgagccagtagagaatgttgtgctttagatagatctcactgtagacaagtgctttgaatttctccattcccagaacatcttgggattatttatgtaaaactaccttggagtatgccatgaatttataattcaatagatattctgcaagttacttatcatgttttggctcctatcaaggtttctatatccatgaaacaagttcaaagtaggtttaaatcaatgacacatctttactgttagcttctgttgcctgtattagagaggcagggcattcaattaagagaaaactctggcaatttggagaaatgtaaagttactgatagatgatgtaaaaatggttgccccccctgcattgtatttgggtcatttatctataatgttggattaccagctgtggattgagtattttcgttgatattgaatgcataataatgtcattcattacact

SEQ ID NO: 31819 - DNA, 359 bp, Glycine max
  Clone ID: PAT_MRT3847_128738C.1
ggcccaaatttttttaattgaaccacgggggtaacaagttgacagcttaacaaaaatttgaatgaaaacaggcaaacatggggggggttgattggttttgagttcttaaaagcaagcaagcctttgcgaattaaggaaaaaaaaacatggtttgtagccttataatatcaagggttaacttggcgaatttttacaaaagacttttcatacttttttaaatgaactttctgtacgggcgaccattattttaattttgcatatggaattcacgggcgatgcccttgtaaaccaggacgggaatagcgatgcccaaaatgccaacaagaacaagggtgcggcgagtccaacggaaattgaac

SEQ ID NO: 31820 - DNA, 356 bp, Glycine max
  Clone ID: PAT_MRT3847_128739C.1
ggctaaataattgttcctgccatttaaaatatttagaccgaataattcctacggacaaggggggaaacaatgggtaccctcacgtaatgaaatgccgcaattggcttaatgcgcaaagccacgttcatttttcacgggcaaaaccatttgtatcccatccaacaaaaatcttaaaaggtaaaaccctattaaaaagcttcacataagggttaaaccgacaaaggggtgaaaggaacccccccttgagtgcgcttccttaatcttggggccctgaccagttccaccagaaggggcagcataattatgctggggtgccccaagcccagcaccacccctggcaagacccgccccacctt

SEQ ID NO: 31821 - DNA, 460 bp, Glycine max
  Clone ID: PAT_MRT3847_12873C.1
aaaaaattactttcccacttttctattttttaagcagcaaaaggccatacatacacttgatttcttaacattttactcatactttgctttgcttcctttcctttcaatttaactttgccttaattggttgcacaaaactaatatttcatgattttatcttcctaatggggaatctatatatatatatatattgaaaataaagcaaataattgccccacactgcaatgaatagtggggaaaaaaatattttttgcaataaataaattactgtaggcagtgagaaggcaagaagaatctctgcctcttacttctagcgggacaactagaagccatggatgatgaagcaattttggtgacagcagatttgagggactgtttgagagtggcaaggcaaacactgtcttctctatccttagaacaaagcaccaatatgctttttgattctgccaccaacactggc

SEQ ID NO: 31822 - DNA, 499 bp, Glycine max
  Clone ID: PAT_MRT3847_128740C.1
tttctttgctaaacaacaaaaggggggttttcttaaccccattataatggaaactcccattggccttattaaaacaggcctttcttaacctccttctactggatggacaaaccttaatttgcccactccctccacaatttatttcaaaaaacatgaatgccccaaatcttagagccaccttgaataccattaaacacccttttgcctttgaaaacattacaaaggggaggtcctaccactaaataaaaatctgggatgttttaatcttggtcccccgcacctttgggagcggctctttgtaattcatttcaaccaacattctacattttataagtccccatggactggtttcccccaaaaatatggctgctccaagcagctttcctctgatagagtctttgccgactcccccattttaggaatatttttttaaaaaagcatcttttcatggttacaaccccctccagggaatttagaactcttttttaaaacaccttaa

SEQ ID NO: 31823 - DNA, 201 bp, Glycine max
  Clone ID: PAT_MRT3847_128741C.1
tgtgaggggtcgtttttttttttttttttgggaagacaaaacgcgtaacaaattatccatttctgtgaaaaatggggaacttcactaactgggtcatgttccaccctactaacaggtgtgcttacacaggctgacatgctcactgtatccacatgctacttcacctaataaacagtgaaattgattaatttaaatgtcttg

SEQ ID NO: 31824 - DNA, 387 bp, Glycine max
  Clone ID: PAT_MRT3847_128742C.1
gggtttattttttttttttttttttagtacaagtcaatttttattgctacattacggaaaaaataatacattttatttataaacttccaacaaagaatgctttcttacaaacgacaatagggactttctttttctttcttgacaaattaattcttttacgggtgtatcatcacaacaatcactggttgagattgaacattttcccgaagggatgaatatttctgacttctgagaaagaggcaatattatatggttcaaactcacactaacatgaggcttttgctacgacttggaagaccccacagacattggtaaactgctgactgacaccttgactacaccaaccacattaagcctgctcttgtcaagactcaaacaatggctatg

SEQ ID NO: 31825 - DNA, 325 bp, Glycine max
  Clone ID: PAT_MRT3847_128743C.1
gccccgccaccacaaccatcattagtattttttaataaaaaaaacccctccccctccttccttcatattaaaaaaacccctcaaaaaacccctcattccacaaaaccaactcttccacccctatattcccccacacaccccccacaccaaaccgccttaccacttaaccaacaactcaaaacctgtcataataacatccattcccttattcactactaaacaaaaactcccttataaaaacccacaacaccccaacacccaaacaaacaacacaacctccttttgccccaccttttacccaaattacaccataattttcacatcc

SEQ ID NO: 31826 - DNA, 242 bp, Glycine max
  Clone ID: PAT_MRT3847_128744C.1
gttcttaacccaacaacaaagccccccacaaaaaaaaacaaaaccgcaaaaacgacatttgcaaagggccctaaaccagaaacccctttttttagggggggggggaatatactttttccccatgggagggggggataaccattcacgagggagaaggtttctgcctatttgctgcccccaccaccgggactatccccccctccgggctggcccactttccccgccggttcctccgggaaggc

SEQ ID NO: 31827 - DNA, 289 bp, Glycine max
  unsure (1)..(289): unsure at all n locations
  Clone ID: PAT_MRT3847_128745C.1
aatttatttnctttatgttattcatttaattatttgttcctagtctttatcttataataattntngcattgcttgcccggtaattcaagatcaanttggaaaatttgcaagatntgggatgaaatctggtcggatcttgctttgtgggatggggattttggtgggtcttatttcaatacaaagctcttcctcttcctctncnaaaaatcccatctctttctctttttttcatcataacacaaaacacaaaacataaacctttcttccaacnaacncttttttnnaattg

SEQ ID NO: 31828 - DNA, 529 bp, Glycine max
  Clone ID: PAT_MRT3847_128746C.1
cgcactacaacaaccaacaacatttttatggactaaacctccgacaaaataaaaaaccaaactatgttgtccctctccaccatcacagccaccattctcatcttctatctccaccatacgacgtcgttgccaccccatgcaacactctctagctgccacgtaacctccttcaactgcggcagcatcaccattctttcctaccctttcaccggtggcgaccgcccctccttctgcgggccaccacagttccttttgaactgccgaaacggtgtcgtcgccgagttgaacatctcatcggtgagttaccgagtcattgatatcgactcggaggatcacactctcactttagcaagactagacctttggaacgagacatgcaccgatgtgtacgttaactcaacttttgatggccccgtcttcagctacggttcggggaaccagaacctcactttgttttatgagtgcaaacccacttcacggatcatcgaaacgccagaaaatttgtttaactgttggagtaatggcgata

SEQ ID NO: 31829 - DNA, 454 bp, Glycine max
  Clone ID: PAT_MRT3847_128747C.1
ccccggcaaaaccaacccctcataaataaaccctgggaaatcccaaaaaccccctccaactttacaagctaaacacataactcatgcccccaacgggaaacaaaaaaatcccctccgggaggtctcagggacaaaagtttcaacaaaaccccataggccccctaaaaaaaaatcgggttctatggagggatatagggaaaaatatccccaaaaagcaccccccccaaaaacatggaaaaggagggttcaaggcagggggggacaaggaacacaagggccccctggggtttttgagggactaccccttatgggcggggaacccaaaacaccccgttacagttaaaagctgaaattgccctctcagccagggcaaactcaaaaaaggcaattcgggtggaaggaggggaacccccaaaaagccccaagggaggaacccctccgaaaaaaaattcaa

SEQ ID NO: 31830 - DNA, 343 bp, Glycine max
  Clone ID: PAT_MRT3847_128748C.1
ggacaaatgaaagtgttttatcccggttgaaattgaatgtttacaaattacaacaacgattttaaatagcatcaccctacccgcatttaatgtggaaattagagttgtttcaacaataattccctccaccttcacaccttgaaagaatctaacaaattttttttaaaaaacaaaaaggttcttgatctatgttgtagcttgttggaaaggtcgatccaatcaaaagctcctgcacaacattgcatctatgactccatgttacttgtaactaggaaatttgggcaaggaaagaaaccatggcaaaaaaatttttggccccaatcctctttaaaaatttgctagt

SEQ ID NO: 31831 - DNA, 293 bp, Glycine max
  Clone ID: PAT_MRT3847_128749C.1
tttggggtggtttttttggagattccctttacaacctcccctcggaactttaaaaaaaaaaaaagttaaaatcggccctggcgcaacgggcaagggacaaacaaacccaccaccgggacgaacgggagcgctagcagagacacacctgcggagcaaacgagacaaacgggccaaaaaaaaaaacaaaaccacccccgggcaaaacagaggagagcgacaaccctgtaggggtgaaaagcaaggatgcaccccgaccaggaaaccagacaggccaatgcgaaaggaaccagccc

SEQ ID NO: 31832 - DNA, 894 bp, Glycine max
  Clone ID: PAT_MRT3847_12874C.1
acattacaaagcagcagcactattatgagtactctatattataatgaaacagcatccatccttccttggtttcgctaactttgtctttttgatcatcaaaatacaaacatcgccttgctcccactattaccaaagttacaaaaataatcccataaagcggatcatacaaccgcaaatatttttttgaacccagggtatctcttggtctgagagccaatgactaacttttaaatccatttaagagatcgatatcttcccataaatgtttttcatgcgtggaccaacacatgtttaaaaaataaaattacttgaaacgaacctcgtgttaataagttaatgttgttgttttttacagcaaccttccagagagactacggtggcgtcggtggctgttgtggttgtgtgtcgtccggcacggggtcgtggaggacaatagttggaggacgaggtcggtgaaagcgcgaaggatgaacttgtgagtgtgtgtagggttgagagcgaggtagcaaaggagaagttcgtggagatattcggagtctttagtgatgtccaagacttggcgagaacggatcatttcctgcattgagcggaggaaatctacgtaggggttgagggagtacttggggactctgacgccgccaccggtggggatcatgaaggtgcgcgtgtcgggggactcgacgatggagttggaggtgcccggggaggagaagaagaagcgctgcgaggcgaagatggaggcgaagtctggctcagtggaggagccgcaggaggtggtggtggtggtgtcggtgaaggggaagattgtggagttgtcgcaagaagagggtggtggggtgtgatcgctgtggtgaggttggcagagaatggtggggtatttgagcttcaagaaac

SEQ ID NO: 31833 - DNA, 477 bp, Glycine max
  Clone ID: PAT_MRT3847_128750C.1
tacggctgcgagaagacgacagaaggggaaagtgcgactatgctagatagctatatgaaattttttatatttacatttgtcatacaaatgagctgtgcatgggtaaccattttttgagatcgatgattttgaacactgttactcattggcaagtacacccgtttgtccgagtaataaagtaaaacggaagtctgagtgtcgagtccacagagactttgtttgtattcggagttgtgtctatccaattttcaagcaattaatgaattgatttaaagagttgtgatatggagcattaaaagtaaatcgacataaaattaaactaattatctagcacgtgcaaggcgagaaaaacaaacacttggagtgatgaagcgacggtagatgcagaatacagatatgttggggcttagccttccgaaactactcttgatgaaatattaatggtttttctctatttaatattattccaattaccac

SEQ ID NO: 31834 - DNA, 201 bp, Glycine max
  Clone ID: PAT_MRT3847_128751C.1
ttatgatcatagcagtttcaaggtactaagccacgaccttatttagttcctttctacacaaactgggggatggcaaaacaacctactcttccatctttgattcacaaaaacacagtagctatctgagcaggacttttacctcaaaaccacgaaatggaggttcccaaggtaactccacataaacttggatctgtatccata

SEQ ID NO: 31835 - DNA, 283 bp, Glycine max
  Clone ID: PAT_MRT3847_128752C.1
agggggaaggtataattaaggcttcgtttggtctaccgggataatcatacttacgtgaccagggaaaacccgatctgacggttgcccactgacttaaaacacacatcgtattactatgtgttgccatacatgcatggtagggcgaggacattgcaaaacatatggtgcctctatacctgcataatccttatgccgaagaagggaccatcccttggcaaatgccactgcttctgcaaaaccagtgttatccgaaggcagtttgtataggcatttgactaactat

SEQ ID NO: 31836 - DNA, 364 bp, Glycine max
  Clone ID: PAT_MRT3847_128753C.1
ttcaacaatctttctttaacaattgatgcttaaaggcacacacctaccttcgctaatatgttcaagaaacactctagatgtcctgatctcacttaatcaaaatttcgaaatgccacagttctgcctggcatggatgttaaaattttgaatctccccacatataccacaagatgtttacagccttataccccttgtaccactctttctacgagggctatccgaaggaatgggagtcacattctctatacgaccaatttttattcctgcacgatctatgtctcgaaaagctgattgagcacccagacccggagtttttgtcttgttcccacccgcggctctgaggttgcttttaaaagcttaaggg

SEQ ID NO: 31837 - DNA, 614 bp, Glycine max
  Clone ID: PAT_MRT3847_128754C.1
catgatcagtggaggtgccctttgggagcttgtccggatttcaagggattgtatgcgagaggacataaggaatcttggtcgtcgaactctcacttctatcccgccattcaaatctgaattccggcgattacatatagacgtatagtatatatagactgttgatgacaggtctttcctgggattgttcatattttgttcttgttccactgatggtgaaactgatctactgatgctacaaaaaccttctgaatgaagaagcatttggtgagtagttgtataccttgcaagttttgggtaagagaagcagggtttggttggtacttctcgtggtttcttgtcatcactgacctagaatgtcgtatatgtaaatagagggagagagatgttgaagatatgttatgatcagtcatacatggtgtaatcaaactctgattgcccgaaatgacatggagctaccaatattgtaattgacttgtgcaagtaattaaagtccttattatttttttggtaatcgccaaaaagtgttgtctcatgggaaaagtttattttcaaagagctagatttttttttctcattaaatttgtgatattttgataagtgggagtaaaatgaac

SEQ ID NO: 31838 - DNA, 357 bp, Glycine max
  Clone ID: PAT_MRT3847_128755C.1
ttttaaatttttttgcataatttttacaagttattgacattgttgcctttcttaaaaaatttaaaccaacgaagtttttttttttcccaaggaaaaaaaaaggaaaagaaattacctgtttaagttttgccttcctaaaaagaaaacaactttttagcactccagagaccatatttcatgatcgatgtttttccccaaactaagcgtaaccttaaggtaaaccccttattttggggaaacgggtgaccaaaagcgttacatgggttgaaagttgtttgcccttaggtttcctccctaaaagatttagattattgggaggggtaaaattttcgtgaatagcttgtccaaacaggggat

SEQ ID NO: 31839 - DNA, 1568 bp, Glycine max
  Clone ID: PAT_MRT3847_128756C.1
atgaacaagcagaactgaaacgtcttgaagataatcatgatgctaacaatgaaagtcgtattcattcagcaacaaatgaactgagcgtagaaaatggtacagtggccaacttagaaacgaaaatcagaaacaacaaacaacaaattgattacgaatcaaaacgtcgtcaagcattgctatctgagtatcatgatttcaaagaaaaagaagaagaagttagagcaagacaatttcaacctagtactgataatgtttgctcttgttgtggccaagcattaccacctgaacaagttgaagaagtaaataaaaaagcattggccaaatttaataaacaacaatctgaagatttagagaacctaaaacaaaagactgaaaagatactttctgatggcaaagaaatcaagccactaatcgaaagattagaaagtgaaaacaatgacttacaaattaaagtcaatgaagctaatgaaagagtgcaacgtattgaaaatcgaattaataaattgaaagcaggaaatgttgatattactcaaacagatgagtacaaatcaattctaaatgacatcaatgtaatcaatcagaaacgtaaagatattaaaactactattagcgataaagtagccaagattgatgaacaaattaatgaactcactcaagaaaaagttgcatttgaaaatgctaaagcgattgaaagttcaaatgaacatttggataaagtcattaaggatttacgcagcgaagaaaatcaactacttgataagaaagaggattatgaacatcaactttatatcttgaaagaatttacaactaccaaagtcaaaatgctgactgaaaatattaataagaaattcaaaatggctaactttaagctattcaatcatcaagttaacggtgaaatcaaagaaacatgtgtctgcacagttgaaggcgttgaatataacggtggccttaacaacgcagcaagaatcaatgttggattagatgttattaacacattatccacacactatggaatcactgcaccaatcttcatagataacgcggaaagatattcagcagagaacgcattaaaagaagcatggttggtaattagtcaaaatagcaaattagcaaattgcactaaagaaagtatggcacaagcgctattaggaatggttacgcaaggtttaaatccagctaagaatcaatgttacttcattccttatggtaacaaaatgcaaattcaacgaagttatcacggaaatatcatgatgctaaaacgtgatgcaggtgcaaaagatgtagttgctcaaatcatttataaaggtgactcattcaaacaagagttagatggcactggtcgtattaaggatattaaacatgaacaagatttctttaatatcgacaaagacaacattgtgggtgcttattgcacaatcgtttttgacgatgatcgagataactacatcgagattatgacaatcgaccaaatcaaacaagcttggatgcagtcatcaatgattagagatgaacaagcacttggaaaatcaaaaacacataatatttcaaagaagaaatggctaaaatga

SEQ ID NO: 31840 - DNA, 611 bp, Glycine max
  Clone ID: PAT_MRT3847_128757C.1
agttctcagatgtgcttggcgacgttgtttgcggtggctttgcgatgccaatccgcgaaaacaaggcgcaggagatctacatcgtgatgtctggtgaaatgatggcaatgtatgccgcaaacaatatttccaaggggatcctgaaatacgcgaactcaggtggggtgcggttgggcggcctgatctgcaacgagcggcagaccgacaaggaattggaactggcggaagcgttggccaagaagcttggcactcaactgatctacttcgtgccgcgtgacaatgtggtgcagcatgcagagctgcgtcgcatgacggtgcttgaatatgcacccgattccaagcaggctgatcactatcggaaactagcggccaaggttcacaataatggcggcaagggcatcatcccgaccccgatctcaatggatgagctcgaggacatgctgatggagcatggcattataaaggccgtggatgaatcaatcatcggcaaaaccgccgccgaactcgcagcctcgtaaaggccgcgagtcgccgccttgcgaaggcgagcgacagatgccggtctccctcaccccccttcccgggggggccggcatactgacgaagtaagc

SEQ ID NO: 31841 - DNA, 155 bp, Glycine max
  unsure (1)..(155): unsure at all n locations
  Clone ID: PAT_MRT3847_128758C.1
ggatagtttaggggnnaccaccaaaatttataanccaccaaacatctatcatattaccactctataaaataaaactccaanttctcatnatcaaanaaaacttaaaacacactccaaccaaatcaacacaaattaaccccctcaaccatttcaca

SEQ ID NO: 31842 - DNA, 301 bp, Glycine max
  Clone ID: PAT_MRT3847_128759C.1
tcggctcgaggtcgataacactcatctaccttgaccttgtttccttgaattcattccaggcgccactatcatagtcaccactcggaatttttcaaggaggataccgacgttattggcgaccatcccgaggcgcaaaggaaatccctagactagctcaatacgcttgttcaagaaacgctctacaaccatgagctaactgctcccaaaccagaacccgctaagaagaaaacggaactcaaagcactggataagaaggaggaagaagtctctgaacagaaaaaggaggttgcagtgactgaag

SEQ ID NO: 31843 - DNA, 545 bp, Glycine max
  Clone ID: PAT_MRT3847_12875C.1
ccgggggggttaaaaaaaaaaattaggcttttccccatattttttttttacaaaaagggaagcccctaagggacagttttaacttttaccccttaaaaaaaagggggggccttcccaacctcaggaaaaattaaaaaaaaaaatggttaaaactccaatgcccccttaaaacattccccctttttttaattaaaatttggaaaattttccccccctttaaaaaaaaggtttaaaggtttttaaaaccttttaaaaaatgggccttttgaaacccactcccttcaaaaaaactttttaaggggctccccttttcctttttgaaaattaaggtttttttcccccattaaaaaaaggaccccccctgccattttttgtaaacccaaaaaaaaacctttaaaattttcccaataaatggcaaaaaaaacaaatttttggtagaatttaaacataaaaacccccaactaaatgtttcggttttgtaaaccgcccttttacaaaacggggtaataaaaagttaaaaaatttttttttttccctcccaaaaa

SEQ ID NO: 31844 - DNA, 1079 bp, Glycine max
  Clone ID: PAT_MRT3847_128760C.1
tgtgggtccaaccaagcctaataaaccgctagggcttggtggtgttgaattgttgcagactgggcctgatgctgctcctaaagcagcggctgaaagtggtgcaggaactccacttgagaatttgttggtgaagaaaactgagatgaggggtcctgagatgtatatctcggaggagattagtgccgagtttagagaatcgttgcttaccagggtgggattgatgggtgttgtttacctcagaactttgccacccaaaactgctgtgataaggaaactgaattttcgttccgaattgagggaacagaagctgttaaaagatttgttatacaaagttcgcgtgttagtagccttggtaatgggatgtttcatgtgaggactgcagcctctgaggagccgatacccattatgaagtatagtttgggtcctagtctgacgcctttgcctttgagggttcgacttacaaaacgacatactgggagtttgctttctgtgatgatacaatatgcttcaaaccctgatttgctagttcccctgcatgatattacattcactctgaaactgcctgttgaccctacactgttgaaggtttctccaaaagctgtgttaaataggactgaaagagaaattaaatgggttgtgccagagattccattgaagggctctcctggcaggttgagagtacggatgccggtagattctaacgaagatgatgaagaaattgaggtggttggttatgtgaaattttctgagcgagtaactcagtcattgtctggagtttctatacgacctgcttcagatggtaagacagacttctacgaggttagtcacagacttgagagtggggtatacatgtgcgattgattttgtaatcatagttgattaataggggttgtactttttcattttttggtcatgagatttatggtttggttgtgtttatagcattcttggatatggatcatgtaccttgaactctggaattatctgaaaatctttgtttctctgttgttatggctgtgaatttacatcaatggattgtatttggtcttcacaaatcacaatacattacttgaaagtaa

SEQ ID NO: 31845 - DNA, 343 bp, Glycine max
  Clone ID: PAT_MRT3847_128761C.1
caacagtagattgtattttattaatacaaaattatccaacaagtaactagcatagaggtggtgctaggaaaaaaggctgaacaatgctcaagattatgatgtccgctaatgccatagtcaataactgtgattgtgcctaataggatcaagtgtgtttaacaaacagcaacacctcatatcactctgaagacccacattaagacaaacatgataaccacatagatcaggacaaatctgaccaatagaggtatgtcgtactcataatgcgagccaaatgggtctttataaactgtcacatcaaaatccatgctaataaacttctcatatactcgaccctatacat

SEQ ID NO: 31846 - DNA, 271 bp, Glycine max
  Clone ID: PAT_MRT3847_128762C.1
gtggctctcttcaaagaggccatggaaaagtcgcccggcaaacatctggacatagttgtcgcgaacgccgggattggagagtctgaccctgagatgttccttcctcaggccgatcttaagcttcgcaagcccaacgttaagaccatcgacatcgacctgaccggtgtcatctataccgcccatcttgcttactgggcgttcgcgcagccggctcctaaaggcgactcgctatcttcgggctctccccgacaccattcccttctcctgatcg

SEQ ID NO: 31847 - DNA, 313 bp, Glycine max
  Clone ID: PAT_MRT3847_128764C.1
tttttagaatgttgcaatagtaatatgaacaaatgggatcggcgcgagattacattatttttctcctccaattaggtgtactctcactttcctaattccattgggggaaaaaaattattacggtataatattttttcgaattgtgccccgctctttgcccatcctgtgaagtcaaggactctgtgattactaccttggatatttatgagtgacggatatgaatatgtgtacatgattacaggtatccaaaatcagatatactgttaatctgcatacaaaaacgctttattgattcagcgggcatttaatattt

SEQ ID NO: 31848 - DNA, 419 bp, Glycine max
  Clone ID: PAT_MRT3847_128765C.1
gccgtctcggatactagctgccctctatgtaagaatgaggtggaagatgcacgccatttgttttttcactgcagaaaagttacccccttatggtgggaatcaatgtcatgggtgagtcaatttcatgttttcccgaaagacccaaagatgcattttctacaacatgctctaactacgaccagggggtcttcggcccaaaaaatgaaggtgtggggggttagttgtaacatgaaccttttggaaccggagaaatacgatatttttctccaactaggactttgacagcaacaaagtcatggatgactcacttttttgctttggacatggatgaggaatctacagaaggattttcctatgcattttaaccaatggtctagtaacatttctgcagggttcatgtaacagtttgtatctaatct

SEQ ID NO: 31849 - DNA, 372 bp, Glycine max
  Clone ID: PAT_MRT3847_128766C.1
gggggggggagccactacaaaagaaggctaggtaagcaccactctccttctataagaggtaatatactgtggtggtgtagaccatgcttagggcacatcggaggctatggcataatagtgatttcaggatagctgtactaaaagagatggtaggtgctggctctaaattgtatgatgcatagtaaaatgtgttggaagaagaaagaccgaaaatacattaaagacggaagagcttacatggatacatgcagccctgtacatctatgcctgagcaagctatccttcacaactcctggcatggagagtgttgcaatatcattctaactacctaacttggaacgtaaggactgggagcggacgatccgacaaata

SEQ ID NO: 31850 - DNA, 857 bp, Glycine max
  unsure (1)..(857): unsure at all n locations
  Clone ID: PAT_MRT3847_128767C.1
attataaatatatagcaaattatagnnnaaaatggtcagaaaaaggtacttggtaattccccttcgtggttggctgagtttgactcagtgaattcaaccatggcctcatccatcaccagtgctcctttccctctgtggcaataagccaccaccaaataaaccaagaaattgacgtcattgatagccgtcaaaatctaataaaaacagtccaatctactgttattaaaatcgttcctgagccaccctttgtgttgtccaccactcgcaccttcaattatctttaccaacgcagtgctcaaccagcttccaatcccaatctcacacagaaacattaggaaaaactcctcgtcccatccgtggtttcgtcgtagaagaactccaactgccccacgtaggtgaaaacctcagcagcacccattaggaaaaactgagggagcaaccagaacacactcatctttaatgacttgtggtcccgtcttttcctttccaccaacgctgccgaggccatggcgaagatcaagacgaataaacctacgcccattcgctgcaacgacgtgatgcctcggtggtggccggtgatgttgcggagggaggggacaatgaatttctcgtagatgggtacgaggatgagtgtgatggcgctgaacacggggacagaacctgcggggattttgaagtgggtaccgagtgttctgtccatgatgttggcttggcttaggaagaacgttgagagctgagcgtaggacacggagagagcaatggtggaagcccacacaggaaggactcgaatgaaggatttgaactcttctacttgcgtcaccgtacatatgcgccatcgattgctcgtcttctctcgt

SEQ ID NO: 31851 - DNA, 284 bp, Glycine max
  unsure (1)..(284): unsure at all n locations
  Clone ID: PAT_MRT3847_128768C.1
gtgtcgtcctttttttttttttttttttttttttttttttggactttgggtaaattaaatagaaaggaagtttcagcctggcaacgaatggttatacaaatacctgggaaaagaccagcaagaaggggggggaggacctaacttaaaaatgacaatagcatggctcgcataaagggaaatatgccttcnaccggatggggacaccaaaaaaaacacatttccaacaacgctgcgtttgccgatgcaaaaaaaagcaaataaaaaaaaccgcaagcggggggcaa

SEQ ID NO: 31852 - DNA, 269 bp, Glycine max
  Clone ID: PAT_MRT3847_128769C.1
ggggaaaagaaattcgaaaaacccaagatcaattcatgggacaggggaggggttccttccaattttttttttgcccctaataaaacgggttcaatttcaccaaaccaggatttgatcgggggcgggccccttttttttttttttttttgaaaatttacccggggtccctttggaaagaaaactttaccccccctttttttttaatggcgaaaaataaaaaattttttccctggggccccgggaacttgcaaaattttccaaatactgaa

SEQ ID NO: 31853 - DNA, 1863 bp, Glycine max
  unsure (1)..(1863): unsure at all n locations
  Clone ID: PAT_MRT3847_12876C.1
ccacgcgtccaaaaaaaattgcaagtacatggagaccaaaatacatgaaaatggaagcaactgagatcatattccttttgttttttggtcaaaagagaagatatatggaatagcattagcttcttcaaatgaagaaaacaccagcccccagtttgcataaatctaaccaaagaaaaaagaatgttggattccaagatagaggtgcagccaatggtacacagagtcaccatgttgagagccattctgctctgacatatttcaagtcttccttcaagaaattttttacattgtttctctctgggaagcgaaaaacagactcagaagctgctgaaagtgatgacagaaagaatacacacaaagttagaggggtatcatcttccacagatgtatcatctgatagttccaagagttcatcaaaaagggtgttttctcattgctctgcatcatctggcactgcaagtagtaagcttggaatgggaaacttcacctttgaggagatttacaaggcaacagcaaagttctctctagagaataagattggggaaggcgcgtttggaacagtgtataagggaaagcttaatgatggaacccttgtggctgtaaagcgtgccaagaaggatttactaaacaagaacttagctgagttcaagaatgaaataaacaccttgtcgaaaattgagcacattaaccttgtaaggtggtatggatatttggagcatggacatgaaaagattattgttgttgaatatattagtaatggaactcttcgggaacatttagatggtattcggggagatggactagaaattggtgagcgtctagacatagcaattgacatagctcatgcaattacttaccttcatatgtacacagatcatccaattattcatagagacgtcaaagcatcaaatatcttaatcaccgataaactaagggccaaagtggcagactttggttttgctcggttgggaccagaagacccaggtgcaacccatatttcaactcaaattaaaggaacagctggttacatggatcctgattacatgcgaacgcgacatctctccgaaaagagcgatgtttattccttcggcgtgctgcttgttgaaatgatgacaggaagatatccagttgaaccacagagacctcccaatgagagagttacaattaaatgggcaatgcagttgttgagacaaaaagaagttgtgattgccatggatccaagattgaggagaaatccagcctcaaacaaggcagtacaaaaggttctcaagctagctttccaatgccttgcaccggtgagacgatcacgaccatctatgaagagttgtgcagaggttctatgggagattcgtaaagattttaaagaaaaagcattttctcatcctcctcaccattctgcagatttccctcaaagagatgctaggaagaatagacataagacatatggtattgaagacagtaaaggctataaatttgtatttgcataaaaaatttcacatttgaagtttgttcattgattgttcttattgtcaaaacatgtccaatttagtctactatagatattgtttgtgtattatgttcattacttgaagctgttaatttcttgaggtttttccctcttccattttgaaattctcaaggttttaaaatgttgagactggaaagaatggtttgtttgtggcccaaatggatgagattacaaaaaataaaagggaaaatcagcagcttgaatttcagtgtattctagttntgtcttttgttcagcatttgtcgatagcatcctatatatggtagcttggggtgttttgtaaagtctattgtaaacactcagcagttagaatttaattttttgaatgtatttac

SEQ ID NO: 31854 - DNA, 364 bp, Glycine max
  Clone ID: PAT_MRT3847_128770C.1
ctgtaaaccggtttaaaaggtgatggctgcttatgccccagaacaaaggcgtgattggctctaattgagagcaagtgttaataacaaacagctactgtgcagacgcatttcgatgcgatgaagaaggacaaaatctgaaccacatacactgggaattgaattaaccaatagaggacgtgtggtcctaacagtggaacacgaaatgtggaggtatgaggagtcaaagtaaactttatgcgtacttgagtttctttattagacaatccgaaacagtctacagtcaaggacatgatatcgggaattagcgatgacactgtaatagctggtattactcttatgccagctacttctgtatcacaggcta

SEQ ID NO: 31855 - DNA, 1206 bp, Glycine max
  Clone ID: PAT_MRT3847_128771C.1
acaagacaccaatttttgtggagctattgacttgcatataattaataactattcatccatatctcaaaatactaaactaaaaatgtttacatgtatatatatacatggatgatggatgtatatcaggtccatttcacatattctttatagcaaagtaagcttcaacgtgaacatcgtagcattcaccatcccatgataagtcatgccccattgcttgcattatttttcgtttccactggcacgggtcagtcctaatttcatcaatggcaaggctaataaacatgtttaccaagctagagttgattaactctgagtacttagtggcctcgtggtcttggtttatgaagctcctatcaaaaggtatcgacctgtttgagctagcatcaggggcaagtgctattggagctgctccataccttaaagcaatgagtgggatttcatcagtaggatcaagaaaagattggcacaagatgatgtcggatccagcaaagactaaatgcaacagagcttcatcataagtaggcacaaatttaagattatcatccttgaattccgtctgaagtgattcaggcgcctgattcatgatcaatctttcactggtccccataaatataaactggacatcatactgcttagcattcaagataacttccttcaccctttttctgtcaaggtctcgtccttctgaaaaaatgcatccaacaagaatagtagaagaatgttcagataatcccagcttctgtagcaatgcagctttgcaaaaagcttttccattcatattttcagcattgaaattttctggaagaaaatagtcagttgaaggatcccaagttgatttgtctaatccgtaaggagcaatgaccaacttgtccctgcaaccaaatgtaattttccaaagacaaaataatccatcatcaaacgttaaacaagatcgaaagtatgttatgacagcatacttacctatggacatttaaagtgggctccagttcatgactcaaattatgaacaattacgtgcttcgaatagagttgtaataatggaaaatctccactcgaaacaaaatttgcttagactgccttgtttaatactacattgcaaaataaataaggattgccagcatctatagactataccattatcaatttccacagtggcaatacttagtgtttcatgaagaccacacagtcttatagaaactttaatttc

SEQ ID NO: 31856 - DNA, 1494 bp, Glycine max
  Clone ID: PAT_MRT3847_128772C.1
ccacgcgtccgccctcaacgcgaccacttttctttttttcctacacttttcatttggcttcctctgcctcgcttttgaaaacgcgcgtttcaggcgaagatggttggcgacaacacgaagaagttgaaagtcgccgagaatttggaggatagcatcgacggcgaactcgtcctctccatcgagaagctgcaagaagtccaagacgagctcgataagatcaatgaagaggcgagtgataaggtcctcgaagtagagcagaagtacaatgagataaggaagccagtttacgataagcgaaatgatgtcgtcaaatctattcctgatttctggttcactgcttttatgagtcatcctgccctttgtgaacttctgaacgtagaggatcaaaagatatttaagtatttgggttctcttgatgttgaagataataaagatgtcaaatcaggctactcaatcacctttaatttcaatcccaatccctattttgagaatacaaagcttacaaagacttttaccttccttgaagaaggaacaacaaagataactgctacccccataaaatggaaagagggcaagggattacccaatggacttgatcatgacaagaatgggaacaagcgggctcgtattgatatcagtttctttagttggtttagtgactgtgagcagaaagatgatgtggatgaaattcatgacgaggttgcagaattaatcaaggatgatttatggccaaatccactcacttatttcaacaatgagcttgatgaagaggatgttgattctgaagctgatgatgaggaaaacgatgaggatgactctgaagatgatgaccaagaggagaatgacgctgggagtgaggatggcaatcacagttgaaaaatgcattatggtgctgttccctgtttatttgtctggttgagtatgtaaggcttttaggcgtggtgagcgtttccattttttcgaggtgttaactcaaggtggagctatatagaaagtggttctttgaccatataatttattaattaccctgtgaagttgtttcgctggtttcagccttcatgcactttttttgtgatactagtaacatactagctctctatcggttcttttttgtggaattacatattaaaattacagtatttattgtatatttggatttcttggcataaggattacccttcaaggcattttaccgatatagaaccatttcaaatgctatgttgatctgttttccttcgacctgatggaatgatcctttcatcccttttctaccgatacagaaccattttataacacagtttgctgtcacaactggacataaactgcatgtttcatttgaatttatgttaaacatagatacagtcacacatgcagtcgtggccagttatgactttttctatgcaactagcatcaatacatgttaacgtgtggagccgtcaaattgtgacatgtaattacttaatgttgatgcaataatgagtgtttgcactacgg

SEQ ID NO: 31857 - DNA, 261 bp, Glycine max
  Clone ID: PAT_MRT3847_128773C.1
gtctgtcccgaaagcttgcgataggtggaatggatagaaaccataagcttgtaagtttgagtctaggcctcacgggaagatgcactgctgttgctgcaggtgaggtacgcctctgctgggggcgagcatgcgcttggttgtttcatctattaaaaaagctatgggaagttggtatcgacatttaatcaagatatttctcttgatcaaagtacacttgtacggctttaattactacgggatcggttaacagtgacgatgatc

SEQ ID NO: 31858 - DNA, 481 bp, Glycine max
  Clone ID: PAT_MRT3847_128774C.1
ctcataagcagtgaaaagcctcaaattggcaggattccagatgatctaggcttgatttctgaccttcaaatacttaacctgcactctaaccagcttgaaggcccaataccagcaagcatttttgttccagggaagctagaagttctggttctcacccagaataattttagtggtgcacttcctaaagaaattgggaattgcaaagccctttccagcattcgaattggaaacaaccatctagtaggtaccattccaaagaccattggaaatcttagtagcctaacctaccttgaagccgataataataatctttctggtgaggttgtgtctgaatttgctcagtgttctaatctgacactcctgaatttggcttcaaatgggtttactggaacaattccacaagactttggacaacttatgaaccttcaagaattaattctttcttgaaatagcctattcggtgatattccaacatcgattc

SEQ ID NO: 31859 - DNA, 1328 bp, Glycine max
  Clone ID: PAT_MRT3847_128775C.1
gaatgctataaatccaaacctgacttcatcaaggcctgggaaaaatggaggtcacaaattacaaaactggattgcagtcgattctggattcaatgtgataatcaacaaactcgtgagggcttgagaaacttgctacaaattatgctgggtaacactgagagtctctgcatggctacatgttattggattgaattatatatttctcatttcctgtacataaggccatttacaatgggaatagaaagcatgtataatttggcccagaaatgcatccagttgaaaccacgatctagtacccataggttgtcagtacttatgattggaattcttgaagaaaataccgaggttgttttagctgagtgttccagagaatttggcccttggttggtggcacatgccatagaactgttgactgcagggagtgagcaagcagagattcttctgcatgaggagcgttataacttggggggaatcagcatagtggaactacatcggcttgtatatgctcaaattctatcggcacatgcattgacctggcaaattgctcctatatatttaacatcatgcatgaagcaaggaatgggcttgttagagaatttattgtacaggcaatctgctcaacataatgatgtgttgcttaagaacattgagatatgccgtttgtatgagcttgatcatattagttcaaatatcatgaagattgctggagtacatcactggaagcatggccataagggtgctggagtattctggcttcaacaagcccaagacgcaagttgtcttgataagattgcccaacagttatttgattctgttggaaagtctatatctgatgaaagcttcaagcaatgggaaggcatgattgaactattgggttctgaatctaagcctgctgggggacttgaatttttgcacaagtatagggatttcaagaaatcccttcagaaggtatctagtggaaaatcaactgatgcagcaaggcaagctgtaggctccctcatactgcttatgaaaaatccatctactcctcagcgcttttggttgcctcttctgtatgactcgttgaagttacttaattggcaggattgccctcttctaagtgtctctgagaccaatcttctgctgaacaaacttcatgagttatctctggcgaagctgcgaccgcaccatactgagcctagcttacctcctgatgcactaagctctattaggttggctctagctacaaatcttggtcaagccatacttgatgaataggattaccacaatatatatatatatatatatatatatatatatatatatatatatattagtgatggatgaat

SEQ ID NO: 31860 - DNA, 531 bp, Glycine max
  Clone ID: PAT_MRT3847_128776C.1
aaaacaaaggaactcgaggccacatttttcttcaatggctttagctactgttatttattacacatgggattgagactgcacttctaattcaaggcattaatgaaatacacgcctgtttataatcgcttcatatggctacagcaccttggaaacatatgtatacattattattgcgcatatcacggttcaaaactcgaggtttttttgtctcacaatagtagcttttctggaattatgaactattctgttgttcatagacttcggttaaactggaaccgtgctagctgacgctgctctctctatcttctaagctccatcgtagtcattcgcccctttctactattgcagggattgaacctttaattctggctctaacaacgtgaataccatttcaaagaagttgatcgctccaaacccaatgggggatttttcaaccctggtgccaggtgcggaacaatgatcgatgatatcgcagcttgaactgtgcgctgcatacaagaacccacctgcaccaacaatagctcgtgcctt

SEQ ID NO: 31861 - DNA, 234 bp, Glycine max
  Clone ID: PAT_MRT3847_128777C.1
ggagggggaggaatttttttattttttttgagggatggaaaagggagaaagaaacacaaattttaggatttaataaagtaaaatgcacacattcccccaacaaaacaagccctatccaacccaaattggcttcatatcccagaaccccacaggatgcccccttcctccttactggacccacccactcgaccaaaagttccacagaaacaaaaatggctacaattcttccggccc

SEQ ID NO: 31862 - DNA, 1070 bp, Glycine max
  Clone ID: PAT_MRT3847_128778C.1
ctctaaatacttggcccagcgtgctagggttcatcaggtgttgtagagagacatctattgacactgtaatggtgccaaattaagtgctcatttcttcttgtagtgattattagaggatttgatcgttaacaatttctcttcttatttgtttaatgtttttggtttcttaggtgaattactcaagaggacccgacaatcccacaaagcagaaagagaggttgttatgttatggcgggcaaaggtgttggttcggtggctaaggcggtagcagaatatcagtatccttggcgtgagaagttggggaaatataaggatgagtttgctaagggtgtgtggggatactgggagctgggggcatggaagccgctgagcatcggtgctcggcatcgcgctagaattcgcaaggaagtcctccttgctggggaagattggccgtatgatcctgaaaggaaggagatgaagaccaggaggaaaggacacaaatgtgataggatatccgctgagaagcgcgcaaacactgccaagttgatggagaagatgccccagatgttgctggaattacaagaagagaaggtggcagaagaagatgaagggaggaagacaagggaaaactttgattttgctcctcctctagttttgccaggtttagcattaaactgtgcctttgagaaatgtagtatttaatcatgacatgttacacctgttttgggggcctaatggattattaactttggtggaggtttttcaatccttaataacccctttcaagagtatggccttgtgagtatcggggaaaagggctttactacaatggaaatgatatgtactttttgtttatgtatatgcttggttgagtgcgtacagacctgggataggatttcttcctaaaggtctttgaacccaggtatgctgataccaccttgttacttattagtgcatgtatgattaagtttgtttttgaagaaataataacccccccccaaacattttagactgtttgcttttttaatactatttgttcctccagatttaagttcaactcaacctaactattgaaatttaggcttacc

SEQ ID NO: 31863 - DNA, 495 bp, Glycine max
  Clone ID: PAT_MRT3847_128779C.1
gttggagaaggcgaaaggcaaagaaggagatttcaaaactcgtgaaaaaccagagagagggcttttcatcgttctctctctctttgctcgtttgttcccactgaaaccccagcgccgtttatttcatgccgttgttcttgtctcgcacgcaatcgtgccggcgacactgaacttccggcgccgggaatgggctttgagccgccgccggataacactgtgttgaatttagctaagctagggtttcggttggatttcggattcgcaggtctctctcaactaattaattaaccgattattttttttcttaaaaagaagaagaagaaaacgacgtgacataaccgtccggcgtaaccgggaaccgttaccgttaccggctggcggatctctattttttgtcgtttgaattgcaaggatggcggcaaggggagggcagtgcttcgagaagcttcggaggttcgctcggacggtattcttcgaggcggcattgagggcgtc

SEQ ID NO: 31864 - DNA, 311 bp, Glycine max
  Clone ID: PAT_MRT3847_12877C.1
cccgctgcggctagacgacgacaggagactgcactgagagcacgaaccattactactgtggttcatgctgtcgcataacagtcatataactagaactacatgtatcatgattacgcacagccgttcaattcctggattacagcagtggacgctcatgcaccagtggcattgtggatgcctacacagacccatgcatatgcaggtagaatcatgccctaagatcacttcaacaccatgtcaaaaaccatgttgagtcattgtctcacgctaacaagctttctccttctgctgtgatatccacaacactcaaa

SEQ ID NO: 31865 - DNA, 419 bp, Glycine max
  Clone ID: PAT_MRT3847_128780C.1
ggccctccaagggaaagggaaatttattggataattggcaaaaataaataaatttttttttaacataaattttttaaaaaacaatattcccaaagttttaacttcactgaattgggccatttttcgcaaattttagattttacctacaaaaaaaaatcaaagttttcctttgtttctctccaacattttaaaccaaaaattgctgctttatgtgacaaaaattatgggcactaactttaaagcatgggtaaattttttgcaaaaaaaactgatgccctgataccaaaaaaaattttcaccaaaacagttttttaatgcaaaaatttacatcacactttaaaatttgttttaccgccctaatgccaaaccaacgaaaatgtgggttgcttttttgattaaaaaggggtgataaccatacc

SEQ ID NO: 31866 - DNA, 2601 bp, Glycine max
  Clone ID: PAT_MRT3847_128781C.1
ccacgcgtccgctgcggcgcaccgtttttgcgtttcagaaactggagaaaaccctagaaagcaaaccctctctcgcaccgccatctgcctccataacgataacactgtgcttgctacagtcatggcggacgtcatggtaatgaaggagatcgaggacacggcgctgcgtctcggcgtcgatctctccactctcgatctcgacgccattcgcctccctcccggcgaagattgcggcatcgtcagtgatgacgaggtggtttaccaggaggagaatctcgagtttgagtctggatttggtaacatcattgtcgtggataacctccccgtggttccgagggagaagttcgagaagcttgaaggagtggttcgaaaaatttatagtcaaattggtgttatcaaggaggatggcctctggatgccggttgatcctgaaaccgagaaaaccctaggttactgcttcattgagtacaatacccctcaggaagctgagcttgctaaagagaagactcatgggtacaaattggaccgggcacacatatttgccgtgagcatgtttgatgactttgacagattcatgaaggtgcctaatgagtgggctcctcctgaaactaagccatatgctccaggggaaaatcttcaacactggctcactgatgcaaaggccagggaccagtttgtgattcgtgctggttcggatactgaggttttgtggaacgatgccaggcatttaaagcctgatcctgtttataagcgtgcattttggacagagagttttgtgcaatggtctcctttggggacatacttggccactgttcacagacagggggcagcagtctggggaggtgctgcaagctttaatagacttatgcgatatgcacatcctcaggtaaaacttattgatttttcgcctggtgagaagtatttggtaacatatagcagccatgaaccaagcaatccccgagatgccaatagagttgtgataaatatatttgatgtgaggactggtaaagtgatgagggacttcaaagggagtgctgatgattttgcagttggaggtgctgggggtgtcactggagtttcatggcctgttttcaaatggagtggtggaagagatgataaatactttgcaaggatggggaaaaatatactctccgtttatgaggcagagaccttttctcttgttgacaagaaatctttaaaggttgaaaatataatggatttctgctggtctccaactgatccaattattgctctttttgttcctgagatgggaggcggtaaccagcctgccagggttagtctgattcaaatccccagcaaagaggaactcaggcagaagaaccttttcagtgtcagtgactgcaagatgtactggcaaagcaatggagactaccttgctgttaatgtagagaggtacacgaaaacgaaaaaaagcacatacacaggctttgagcttttccgtataaaggaacgggatataccaattgaagttttggagcttgagaataagaatgataagatcattgcatttgcttgggagccaaagggccacaggtttgcagttattcatggtgataaccctaagcctgatgttagcatttactccatgcgtactggtcagaacagccgagtttcaaaactcactactctgaagggcaagcaagcaaatgctctgttttggtcacctgctggtcgctacattgtactggctgggttgaaaggcttcaatggacagttggaattttacaacgttgatgaacttgaaaccatggctactgctgaacattttatggcaacagatattgaatgggatccaactggaagatatgttgcaactgcagtgacttcagttcatgaaatggagaatggtttcaatatatggtctttcaatggcaagcatctatatcggattctgaaggatcatttctttcagttcttatggagaccaaggccaccatctttcttgactcccgagaaagaggaagagattgccaagaacttgaagaagtacagtaagaaatacgaggcagaagatcaagatgtttcgttgctgctgagtgaacaagagcgggagaagcgcaggatgttgaaagaagagtgggacacagtgggttaatgaatggaagcagatccacgagtgaagagagtttacagaggcaaaagctcagggatggagaggctagcgatgaagaggaggaatacgaggcaaaggacatcgaggtggaggaagtgatcgatcttacagaagaggtccttcaccttgagtatggtcaagagtgagttttttagctgggaggacttggattcgaacattttattcacttgtcgaggtatagttgttgggcagcttacttcgatttcatctttgtaaaacccaattttgtaatctttcattaattttttttttttatgtggaaggaattccttttactcacaaatttaacgtgaaagacatttttgctgccttctttgggcgaaagtgttcactcatattcctcgcttccttggcactaacaacatgcctgaagaaatgtggagttagattattattattattattaaaaaaaaaaaaaaaaaaaaaaaaaaaaaaaaaaaaaaaaa

SEQ ID NO: 31867 - DNA, 158 bp, Glycine max
  Clone ID: PAT_MRT3847_128782C.1
atgcccaaagcaatgcgaagccacatacgaaaaaaaagggacaccgagggggcggccctctggggggacccaggcttacgtcccgtctgggaaaacccaaaagttttcttaaggggcccccaaagtaaaacacccggcccgcgctttaacacggtata

SEQ ID NO: 31868 - DNA, 521 bp, Glycine max
  Clone ID: PAT_MRT3847_128783C.1
tgatcattaatggttggggcatgcaaaaagatcttcatttgtggaatgatgccacatgctttaaacctgagaggtttgatgtggaaggagaggagaaaaagttggtagcatttggaatgggaagaagggcttgcccaggagaacccatggctatgcaaagtgtcagctttactttgggattattgattcaatgttttgactggaaacgagtaagtgaggaaaagcttgatatgaccgagaataattggattaccttgtcaaggttaattccattggaagccatgtgcaaggctcgtccactcgccactaaaattggagtttaattattaatagtatttttatttggtaaagttgggtcaacatctaatacttataatttcagtgtgcatgtggtggttatacatgttaaacataatagtatttgtttgtatgtttacaaggccagttgtagaattggtgtgcattaggatatattaatattgtatgcatccccaacttctcaaataaattttttacttttt

SEQ ID NO: 31869 - DNA, 1043 bp, Glycine max
  Clone ID: PAT_MRT3847_128784C.1
ccttgatggaaatacaatccaaagatctcagattttggcttggcaacattggtgtcttatgagggacaatcccacaattacagtccagagatctcagattttgacttggcgaaatgggggccttctgagggagaatcacatgtaactaccagggtcatgggcacggttggttatgcagctccagaatacgtagcaacaggccacttgtatgtgaagagtgatgtctatggatttggtgtagtgctgcttgaaatacttacaggcatgcgggcacttgacacaaatcggccaacagggcagcagaacctagttgaatggaccaagcctcttctctcttccaagaaaaagttgaaaacaataatggatgctaagatagtgggtcaatattcacttcaggcagcatggcaagcagcacaacttactatgaaatgcctacaatctatccctgaagaacgtccttctatgaaagatgtagttgaggcattggaagccattgaagctatccaaaattagggatggaaatgagtcaagtcgcttgtcaagggcctatggctcggcctatttaaggctcggctcggcttggcttgtttactataaatgtcaagctcaagctttttaaaaagtttttttagataaaaaggccaaagccaaactataaaaaaagcttgttaagtttctttttttagttagtattttactaggttttaaaataattaattggttaaagaggtttttaagcagacttttaaataggcttgtaggccaagccagacttttatgtaagccaagccgagcctttaaaaaaagcttatgacaggtaatgagccaagctcaagctttgcgtattcaactcaagccaagctcaagcctagtaaaacttggcatggcttgactcatttctacccctatccaaacccacaattcgcagtgtacatctcatccaccccctcgacagggtcgtaagagtatacacaaatttatatgaaaaaaaaaactagaaatcgagattgattatatatagtaatgtgctccattgaatgggt

SEQ ID NO: 31870 - DNA, 468 bp, Glycine max
  Clone ID: PAT_MRT3847_128785C.1
cctggagagcggacgaccgccgcccttttgtttgattaatttttacatttttggcagcagggaaaccacgaaggcaccggcaagagaaccaaaagaccaaaggccgcctaataatcgcgacagaaacagagggcccagggacagaatacaaaccgatcccgcagggcaacagataaaggctcagattcctgcttaaaccacccaccgcccagtgaaaacttggaggggggcgccaaaaggagcacacaagccccaacgaagaaacaaaaccggacaaaggacccgcagatacacagaaaggagcgcgcaatcaaacattgcgcacaaaaaaggggagggggaccatgggcggcacccaaccaccgcgccgagcgatgagcaacggacctgacaaaaaccacagctgaaaaacaccagatcgaacgcccgacggctttcccccggtcacaaaaaaccgggggcccgggg

SEQ ID NO: 31871 - DNA, 422 bp, Glycine max
  Clone ID: PAT_MRT3847_128786C.1
taactcggaatgaggctcgagctcgagccgcgacagaaggggtcctacaattgcagcggcctcaaaaagatgctcaaaaacctcaacccactcgaccagagagccctcgacgactgtctcaaactgttcgaagacaccaacgttgagctcaaagccaccatcgacgatctctccaagagcaccatagggtcgaagcggcaccatgacctgcagactatgttaagcggagcaatgaccaacttgtacacgtgcctcgatggatttgcttacagcaaaggacgcgtgagggacagaatcgagaagaagctgcttgagatatcgcaccacgtgagcaactcgatggccatgctgaacaaagtgcctggagtgaagaaattaacaacttcggaatctgtggttttccccgaatatggaaacatgaa

SEQ ID NO: 31872 - DNA, 269 bp, Glycine max
  Clone ID: PAT_MRT3847_128787C.1
gttgatgctgaatccaataaagaattggaacagtggaatgaaatgcttaaaagtgatgccatcaaactatgccaggagaacaatttcaacccaggattttttgagggtcagacttgagcatattctcgagagaattgcattgatatcagacgctgcaagtactgagaaaccttcagcagtgacaagtagtctgttcattggtggagcactggctgcaagatctgtatacacactgcaatacttgggaatcacaaatattttgtgtttgt

SEQ ID NO: 31873 - DNA, 412 bp, Glycine max
  Clone ID: PAT_MRT3847_128788C.1
tcgcccacgcgtgcgtccacgcgttcgtcggttgcatttgacgacagaagagttatgtgttaatgtgacttaacaattgtagctaacgggatgtttttatgtaaaatatgcaattggtttacatttgagttctttttttccttagaattaatcaccgttggatttcaataattcatttgttttggtgtcttgtgttggacacaacctgtgcctaattcggctaattttgttttgttcataaaaataatgtgttaataagatcaaattttattggaaacatgtgagttagtgtccataaacaaaattcttgtttttttaagcaaaagacttgaaaaaaaaatgaaagcacgagacaaagtgggtgaaaaaatcccaactaaatttacaccttaacaatcacccgcaataaaaa

SEQ ID NO: 31874 - DNA, 185 bp, Glycine max
  Clone ID: PAT_MRT3847_128789C.1
cgcaaatccccggacgaacccgcacccccgcttgctgaagaagctgcgctcgcagcatgcggcgatccgagctggtgtgggaagtcacgcacacctgacactggcaagctgctatggtgagctgtggttgcggtatctcttgcaagtgcgactgatgatgaagaggctgcatgatgtgaccagac

SEQ ID NO: 31875 - DNA, 508 bp, Glycine max
  Clone ID: PAT_MRT3847_12878C.1
cttcttggggggggggggggggttagggtggggggtattttgtgcaaccgcgagtagacgtagagaagtagctcccaggcagagcggcgcccgtgtgttgaaacccgcgcgtggcgggttgctaatttggttgaggtcccttgcttattggttagcggcagccgcgtggcgtatattgtgagatatacagcttttgtggcaaaagttctgctgtggttggtggaaaggcctcataaaggtggcttgccgtagcgctggtagtgtggtaacggttggtgtagaacgctggaaacccaaagggagctgtcacttcaaggttcactggatcgatctcgctagctcatcgtagactgtggtgagacgcgtattgaaaggtaaggtatgccttcgtcagggataatcgtcgcatgcccaaaatttgcctcggatttaatggaagtcttggctactatagtttttgggtcttactgcctcgaagactcaacacctttctattcagtctgtgggt

SEQ ID NO: 31876 - DNA, 309 bp, Glycine max
  Clone ID: PAT_MRT3847_128790C.1
ttgggctaggactctctaaagagaagggtcccaatctacattaagataaaaaacctattcacaaatttaaatagaaaaggaaagccaacgacgacccagtttaatgaaaaaaagaacatagctggattcgatttgaacacaagggagggccaaaaataagatacaactgaaagtgtggtgcaagtgcaagtggaaatatatataggtccctttgacaaaagggtggccaacaagttaacacctaattatctgctgaatttatgtatgggagaaacttaaaaggtccttcctattggggagacaaacaag

SEQ ID NO: 31877 - DNA, 357 bp, Glycine max
  Clone ID: PAT_MRT3847_128791C.1
aaaacggccacaaacaccaggaggtaatggagtagcttgaaaatacatgccagccacttggtcataaacaaatttgtaatacaaaatagtataaaagaaggcgggcctaaaattcttaaaatttatacaatatttatggaagctcccatcaaaagggggcccctgatgtatgggaaaaaaaaaacaccctaattggattttgaaacaaaaaacaaacaaggggaagtttaatatacattatgaaggaaggcatatcttacacattctttggggaagaatgatcaaaaagtctgacaaggggccctctgatttgaccttcttgctctggagggatccccaatttggaggattttttac

SEQ ID NO: 31878 - DNA, 604 bp, Glycine max
  Clone ID: PAT_MRT3847_128792C.1
tctatcactgttttctttatgataagagatggaactaaaaatacagtgattgcttacataaaggagagaatagaaagttttaaggaggacatgatttgttttctctcctttatgtaagaaatcactgtatttttagttctatcactgttttctttatgataagagatggaaaagagctaagttcaagataagaggattagatctcctccaaaagcctaggttacaagaaaaacacatgactaattagtaagcattttgaagaatataatgtgttgcttgtgcttttgctctgaatactttctgcttacatgaaactgagtttcttgttgcagagcttgctttgtgatccaaacccaaactctccagcaaattcagaagctgctcggatatttagtgaaaacaaacgtgaatacaacagaagagtacgagacattgttgagcagagttggactgctgattaattatcttggagcctctattgctgttaaaaggttgtcaaaggatctgattgaataacaatataagtacttaaaagaacaattgtgttttgtaacccttgacaatgtgtttgttcaaacttatatgaatggacattcccccctat

SEQ ID NO: 31879 - DNA, 341 bp, Glycine max
  Clone ID: PAT_MRT3847_128793C.1
ggctcgagggagctaagacagtacttcacgccaacatcaatgaatcaactgtatgaaatgatacagtttaagcggctaacgacactgggggggggagaaactgctgccatactgctcaaagatgggaaacattacccgatcgcgattgacattctacttaagactgcagcaaggactgtgcacactatgctgtgtgaagggtgctacctctagccatggagcaatgacctctgaaaggagccaccatgctacttctgtattgacaggatggctgataacatgcttgacaaatagatcacagacctcgactctgtgctggtggctgaggatgccgatggtga

SEQ ID NO: 31880 - DNA, 243 bp, Glycine max
  Clone ID: PAT_MRT3847_128794C.1
ggggaggactgaagaagtgagggcaagaactttgcaggataccagcatgagcctgaagcttttccagcttttttccctacttccattcttcctttacctctacacaatttaaaccggcggtggcccattggaactggcacacccctgggcccctttctcagggggatcccccgggaaacctgtctttaaagggccaggggcccggttttttccccggcggcattcagggcgtttaaggtttgg

SEQ ID NO: 31881 - DNA, 783 bp, Glycine max
  Clone ID: PAT_MRT3847_128795C.1
cgctcttttatggagatgatgacacaaatggtcatattgataacatgtgctgttttgtgaggcctggtgtggttatgctgtcttggattgatgatgaaactgatcctcagtatgaaagatctgtagaagcatattctttgctttcaaatgaaacagatgctaatggtagaaagtttgaaatcattaaactccatgttcccagtccactctatatgacagaggacgaggctgctggggtttctctggataatgaggctaagccaagacttccaggtactaggcttgctgcttcctatgtaaacttttacattgcaaataaagctatcattgcaccacaatttggagataaaaagtgggatgatgaagctgtccgagtcctatctaaggccttccctcatcatgaagttgtgggaattgaaggtgccagggagattgttttggccggtggaaatatacattgcattactcagcaacaaccagccatttgagcggcggcactctcgatattcgttgataggtgttgtattgttgcttatgggtttccagaataaattgatttggttaaattgcttggttagttagttggtttgctccaattgggcatgtatgctaatttttggagattagcaaaatccaataattgcagcctggatgaaagtgtatgcaaatagatggaaaaccgttgaaaatataaaacctaatttatatttaaattgggaaattgtggttactcttaaatgattgaatcggaatttttagtggaaccagctattgatttaactc

SEQ ID NO: 31882 - DNA, 643 bp, Glycine max
  Clone ID: PAT_MRT3847_128796C.1
acaaaaatggccttgtaatcattgcatagcattttattatgtttgcacaactccttttgtcacaagcatatcgtagactctatcaaccttgcttggctctaccttaaacagtgcatgtgcatcggatttcttggtcacactgccctttgaaatctctaatgacaaggtctgcagcatgttgagatagtgtgagggtagtattctgatctcatcacaaagctttttctcagattcagatagtaattcagcccctgcaaatccactaatatcccactcttctagcgaccttgtgaagacttgtatggcaggaggtgaatccttggcaccagcaaataaagctgcagtccccttttgaagaccctgcgggctactatcaacttctcctttgagagaatttggcctctgtaatgtcttagcacttgttccaatctgaccactttctttacaggcacttggttcagcttcctttgtcctcttttgttcaataaatcgataagcatcagcagcagttacacagcccgcaattcgagcttcctgtaaatcttgtattcttttgacaagcctgtgttcttcaataatattttttagcaaatcttgatgctctttttttgagtgaaaccgcatgaagaccttgtaacgctga

SEQ ID NO: 31883 - DNA, 202 bp, Glycine max
  Clone ID: PAT_MRT3847_128797C.1
ctaaagatccgtgctatgactcttggcaagttcagcttttgaaggggttagcgttaccctaccacataagccattaattagtccatgtttttctaaatctctctctaaagttcaaagtttgcgttgtcttccccccggtctatctctctctagtggtggacttgagctatgctggggtcagaggtatctgagacatgttcta

SEQ ID NO: 31884 - DNA, 306 bp, Glycine max
  Clone ID: PAT_MRT3847_128798C.1
cacacttccttccttccttccttcggattctaaactcaactccaacacactcaaatccagacaccaaacagaaccaaattctctgttctcttctttctcaagatttcaatgctcaattaatccctcaaatctttcttccttttttctctttcgaacgcccactcctttctctcttaattattattattattatcattctttctttcatttttcattccaaacaaacaatttgtttttttttttcaattcgatttgcttcagcgtcgaggagccatagtcgatttgtgtcacttctgtctgatcttc

SEQ ID NO: 31885 - DNA, 732 bp, Glycine max
  Clone ID: PAT_MRT3847_128799C.1
tcggcataacacgaaaaatcttttatattagatatacccaaccaaaagttcatggccgcatatactataatactaacgataacaaagtgggaaatcttataatacaactttaaaaaaaaataaaacaaataatgatataagtaattgtttgcaaagggggtgagacaatgcaacttgttaagtggggaggattgaggaaaacagaatcttttaactctcttttgttccttttcgcttttgccttatgaattcaactgtgtcccatggtgtactattttcccatatgatatcctcatcaaggtcctcttttgaattgaagtttgtaataaagggaaggataaagaaagaggcaaaaagaaaaaagaaaaagacgttgtgaagataataaaaaataataggaaagcaaaagaggtcccaaaagcaaaccatttagaattaatgctgaaaattgatcagcggctgtgccatgcggtgccactgattttaacaagcttaaattaatttatttaccttctccccccgcaatcctcgaattgaaagcaaggaaaataatgagtatagctactcctgctaataatccaacaattattgcaaatgtcttctcacctttattgcccgattttccatgggcccttgttgtaattggtaaagcattgtgccacccatttggtgggaagaaattctaagccgttaaacaacttttcccccaaaaaaaaacaacatattccccca

SEQ ID NO: 31886 - DNA, 468 bp, Glycine max
  Clone ID: PAT_MRT3847_12879C.1
cttctccaaggacaaaactaaaacccctcaagttcggtgtttcgctagggactccaccaaaggtatgttgcgtcttctttttttttttttcctattgtgcactctaataattaatttgctcttcaattttcgttctgggtggctatggttagttcccaacaacatgcgacgttgatgtttttatctgatggttgaggttgtttgtctaatctgtggtttggtcggtaacgggtggcctttcacgattggggaaacaaataagcatcgctttttcaacttcaggtctttcaagaagtgggaaatatgggttagcaataggagtgggaataccaggagtcttgtgtctaattgggatttgttgctgtatcggcggcaagctgaggatgctaaggcatggtggacgcagcacagatgttccggtgagaagcgtccctttggaaatggggcttgacggagccacaattgaaa

SEQ ID NO: 31887 - DNA, 2022 bp, Glycine max
  Clone ID: PAT_MRT3847_1287C.1
tgcctttctagctagttttctgtcacacccaccaaaagatcatcatgtccatgcttagtttccttttcattctcatgcttttaccctcatttgaagccattccttcagatgaagaagtgtttattaatccctcagaagtccaaacccaagacatgcaagccttgattgcacaagcctgcatggacattgaaaaccaaaactcatgcctcacaaacatccacaacgagctcaccaaaataggccctccaagccccacttcagtggtgagtgcagcactcaagcacacgctcaacgaagcaagagtggccatcgacaacataacaaagatcacaacattctccgtcagttaccgggagcaacaagccatagaagattgcagggagctcttggatttctcggtttctgagcttgcatggtcgatgggggagatgaggagaatccgttcaggtgataccaatgcgcaatacgagggcaaccttgaagcatggctaagtgcagctctgagtaaccaagatacgtgccttgaagggtttgaaggcacagatagacgccttgagagttacatcagtggaagcttgacacaagtcacacaacttataagcaatgtcttgtctttgtacactcagttgcatagcttacccttcaagcctccgaggaacactactactcctctaacaagtcatgaaacccttgagtttcctgaatggatgagtgagggtgatcaagagttgctcaaagccaagccacacggtgtgcgtgcggatgcggttgtggctttggatgggagtggtcattatcgctctatcactgatgctgttaatgcggctcccagttatagtcaaaggaggtatgttatttacgtgaaaaaggggctttacaaggagaatgtggacatgaagaggaagatgaccaacatcatgcttgtgggtgatggtattggccaaacaattatcactagcaaccggaatttcatgcaaggatggaccacttttcgaactgccacacttgctgtatccggaaagggtttcattgcaaaggacatgtcattccggaacacggcagggccagtgaaccatcaagccgtggcactgcgtgtggattcagaccaatcagccttctacaggtgcagtgtggaagggcaccaagacaccctctacgcccactccctgcgacagttctaccgagaatgcgaaatctacggcaccatagacttcatctttggcaacggtgccgcagtgttgcaaaattgcaaaatatacaccagggtcccacttcccttacagaaggttaccatcacggcccagggaagaaaaagcccacaccagagcactggctttaccatccaagatagctatattctggccacccagcccacgtatttgggccggccctggaagcaatactctagaactgtttacatcaacacttacatgagtgggctagtccagcccagagggtggcttgagtggtttggaaacttcgccttgaacactttgtggtacggtgagtacagaaattatgggcctggtgcagcactggctgctagggtcaggtggcccggttatcatgtaattaaggatgcttccaccgctagttacttcacagttcagcgcttcattaatgggggcacgtggttgccaagtacaggtgtcaagtttacagcaggcttgaccaattaattcactttatttcttacctctcttattagtctttctgtatccaaacaaataagcttaccatcctccatttttttatttttttattttaagattaaaataattgtaccgtttactttgattgatggaggatgaatagattctttttttcagtgggtggatatctttggatctatatttttgttttgtttatatttgcctgtttgttttgttagaacttagaagccccattctccgctattatccgtgtaagaaacagtagtggctttccccagtttctgcttactccattttcttcctcattgtagggtttggacgtttccaataaatccattactttccattt

SEQ ID NO: 31888 - DNA, 169 bp, Glycine max
  Clone ID: PAT_MRT3847_128800C.1
tcatactaccactctttctccaacttcaccatttctcttcatctatcctactatattactatcctacgttactatataaaaatacgagttcactataataatatttcataaacccattatccttccataattcatttcactaatcattctcatcaacttatattactac

SEQ ID NO: 31889 - DNA, 520 bp, Glycine max
  Clone ID: PAT_MRT3847_128801C.1
gaaatatcctgctatactttttaagcaacaactaactgcttgtgtagagaagatttttggtcttttacgtgacaatttgaaaaaggacctttctccacttctgggatcatgtattcaggctcccaaaacaggacgaggagtgcatgggggaaaatcatctagatttcctggtgggattccccaacaatcatcaagtggtcagtggagtaacattgtcaaatttttggattcactcatgagcaaacttcggcaaaatcatgaggcacaacactactggctttaggggtgaaaaactgaagaccataccatatcatgagtcacatgattcttagtatctcgggtccatcacaccatatgacagcaaatagagaatatgtaaaccatagggttcaagtaggttgctgtatgtagaattgtagattatagattaaatttctacttcttagtaaagtgagttaggggagtgggaagttgggagcacattgtgatcaattaatatactacatattgacagagtaaa

SEQ ID NO: 31890 - DNA, 435 bp, Glycine max
  Clone ID: PAT_MRT3847_128802C.1
taatcggacaatggctagtccttaattaaatttaaaaaagctgaaaaggacgacacctcaatttacactggcccgggcaagctttgcataaaaacaaggccgctgagcccaaaagcaacttggcccccaccctcccaatttttaaacaataaccccaagttagataattttaacaattaaaaagaaaaggaataggggtattggaaccaagttctacttaaaggtcaaatttaattacccacattaggttgcgaaaaaatttaacgagaagacttaaaagaccggtggtcctaaagtgactttgactcggaaaaaaaatttgatttattttctttcacaaaaaaaccaaacctgagaaggttactcaagggggaacttaatttggcataaattgaatccgcctaccggaccggacccaaggatatttaagccaaa

SEQ ID NO: 31891 - DNA, 343 bp, Glycine max
  Clone ID: PAT_MRT3847_128803C.1
ccagctccttcaaaatatcttgattaacaaccaagacaatgttacatccctcatgatctaaaaaagcaaaaatttgtaactctaagtcttaaatatgtccatgtttccaagtgatcttccctccaacctatagtgtaactatatttacaacctcaacattttcatctaattcatcaccacctatatctacttctacataactattcttcttcatatatccatgcacaccttattgtactactaactgcaacacattgttgtcatattcctctacatacccactcttaaactttagatactgatattcaactctatcatattgagttcctaccctcagatccac

SEQ ID NO: 31892 - DNA, 1066 bp, Glycine max
  Clone ID: PAT_MRT3847_128804C.1
caagattgtttcctatttcccatgggcagtggttggcagctgtgaactgctttggggatatatatgtatttaacttggagatactaagccagcactggttcattttaagattggatggcgcctctgttacagctggtggttttccttcccagaacgacaatgtactgatagttcaacttcctcaaatcaagtgtatgcatttgacatagaggccaagcagttgggagaatggtccacatgacacacacatgctcttcctaggagataccttgaatttcctggtgaagttattgggctctcattccctccatcagaaacttcatcttctccatcggcaacttcatcttcggttgttgtttacagctccagggctatgtgcttgattgactttggattgcccgtggagcaagatgaaagtgatatgctaaatactaaagattcaagggcaaggaatttacaaaattttaatgttaagaagaggattgaagttatgaaggaacataataggaggaattttgaagttatacctttcgagaatcctgttttatttttaggtcatactgcaaaaaattccatctttatggttgacaaaccgtggttgcaagtggttaagagtttagaaggccgaccagtccacagacatatatatgggacatgaggcattaagcaaacctagagaattgttctcagcttgaggggatacattatggggataaaagtcccttgtttttctttttgtctcttcagggctggggacctagaatcgtgtattgtgttatcataatcaattttgttccattagtaatagcttcacttcacaatttattctattttttatttacacatgttctgtacttttacttttgatagcacaaatttcaaaccttgatagcacaaatttcaatcacttgccggtttttgctgcttgtagtagaatcttttgacacttctaaccctatgattaagatgtaattaaaatttcgtataaacaaagtgtaattttgtgctgtataatcaatttgtaggaaggaataaccaatgtttggtttgctatggactacttcat

SEQ ID NO: 31893 - DNA, 299 bp, Glycine max
  Clone ID: PAT_MRT3847_128805C.1
ggggggcatttaaaactcccatcacataacataacacccaacaaaaaccattgaatccaaaacacttagaatataaaaaaccatttaaactaatcccgttcagaaagattaaatcaagaaccaaaaataacaaccgttctttaaatcctttaaaaataaaaataccctaaaaaatcaaacggtgagaacgacggctccaccggccttctttatttttttttcaacgatctttaaaataatcttgtcctttaccacaaaagcctttttcttaggcaaaacccttttacccaaaaccttaa

SEQ ID NO: 31894 - DNA, 2908 bp, Glycine max
  Clone ID: PAT_MRT3847_128806C.1
gttactggctcctcccccagtttctctcccctgctagtctctacttcttcaaaatcaaaattttcactcgcaccgcactgcacaatttcggagtgtggctggctccatcaggctgaactctacaggctcagctccgtcgagtggagcccttctccggtcatcgctttagccaccagcttcgacggctcccgagtcgccgccgcccgcaaagacggctccctcgaaatctggctcgtctctcccggctccatcggctggcactgtcagctgactatacacggaaaccctaacggaagagtgacgtcgcttatttggtgccccggtggccccgacggaagccgcttgttttcgtccaacatagatggctccgttactaagtgggatcttttccacttgacgcagaagacggtgctgccatcggacggtgtcacaatctggcaaatggcagggactttccctaagggtgacgagatcgatgataaaaggaagggtgaaagaatggggaatgggtttcatggttttgatgaacatgagagcagtgaaagtgatgacgattctgattcacctggttctcccgagctttcagttggtgagtatccacgcgtggcgattgctctcgacaatggatgtgtgaaaatttatgatatctccgacacagatgaatttattcatgtaaaatctatgccccgggtcaaagggcgagttttaagtgtgacttggagtacagattctaattacgtatattcaggaagtagtgatgggttgatacgatgctggaatgctacattgggcaatgaaatctataggattacagctggacttggagggttgggcagtggacatgaactttgcatatggtcattgctgtctttaaggtctggtacacttgttagtgcggacagcagtggtagtgtccagttttgggacagtcaacatggaactctcttgcaagcacatactttacacaagggacatgtacacgctctggcagcatctcctagtcataatagggtgttctctgctggttctgatggccaggtaattctttacaagctatctagtagtcagtcaacatcatccaatgatatcaatcctccatcaacaatgaagagatggatctatgttcactatgtaagggctcatacacatgacatcaggcgcctctgttacagctggtggctttcctccccagaacgacaatgtactgatagttacaacttcctcaaatcaagtgtatgcatttgacatagaggccaagcagttgggagaatggtccacaagacacacacatgctcttcctaggagataccttgaatttcctggtgaagttattgggctctcattccctccatcagaaacttcatcttctccatcggcaacttcatcttcggttgttgtttacagctccagggctatgtgcttgattgactttggattgcccgtggagcaagatgaaagtgatatgctaaatactaaagattcaagggcaaggaatttacaaaattttaatgttaagaagaggattgaagttatgaaggaacataataggaggaattttgaagttatacctttcgagaatcctgttttatttttaggtcatactgcaaaaaattccatctttatggttgacaaaccgtggttgcaagtggttaagagtttagaaggctgaccagtccacagacatatatatgggacatgaggctgtccattctatgattttcactcatgactcctccaagttgaatcattatgggtcacgataaaaggatatatgttgtgaatgttgggggggcagatgaagttaagtcagaattactgcatacttttacaccccttcgcgaatcacaagatcaagaattacctccgactgagccacccataacaagattgtttactagttctgatgggcagtggttggcagctgtgaactgctttggggatatatatgtatttaacttggagatactaagccagcactggttcatttcaagattagatggcgcctctgttacagctggtggatttcctccccagaacgacaatgtactgatagttacaacttcctcaaatcaagtgtatgcttttgacatagaggccaagcagttgggagaatggtccaaacggcacacatatgctcttcctaggagatacctggaatttcctggtgaagttattgggctctcattccctccatcagaaacttcatcttctccatcggcaacttcatcttcagttgttgtttacagctccagggctatgtgcttgattgactttgggttgcctgtggagcaagacgaaagtgatatgctaaatactaaagattcaagggcaatgaattcacaaaattttaatgttaagaagaggattgaagttaagaagatgattgaagttaagaaggaacataataggaggaactttgaagttatacctttcgagaatcctgttttatgtttaggtcatacttcaaaaaattccatctttatggtagacaaaccatggttgcaagttgtcaagagtttagaaggccgaccagtccacagacatatatatgggacatgaggcattaagcaacctagagaattgttctcagcttgagggggatacatgacggggataaaagttccttgttgtttttctttttgtctcttcatggctgggatctggaatcatgtattgtgttatcataatcaattttgttccattagtaatcgcttcacttcacaatttattttattttttatttacacatgttctgtacttttactctttaatcaatccctagctggtttttgatgtttgatgcagtagaatcttttgacacttctaacacaatgattaagatgtaattaaaatttcatataagaaatgtaatttgtgtggtataaataagggtatcaattactaggaa

SEQ ID NO: 31895 - DNA, 168 bp, Glycine max
  unsure (1)..(168): unsure at all n locations
  Clone ID: PAT_MRT3847_128807C.1
tcaaaagntgagacacaacaaaacgntaccanagtggattaattanggacatgagaacaangagatgagcgtgttaatctggagtagtctcaaggatgtgtttccganngcgaagggttncaagnaaaaaaaccagnnttttgacatnganatgnatanncatangna

SEQ ID NO: 31896 - DNA, 565 bp, Glycine max
  Clone ID: PAT_MRT3847_128808C.1
gtctcttgtccccttctcgcgtgcctttctgcttgcccggcaacagcaaacatagacacccacatgggggactatcaggaattcgcagaatttactagacacaggatccagcagcctgacaaagaactatgcgcatttgaagttcaaatggaggatgcaagaaacgaagggctcttctttaagaacctcagaaagacgacacctgttgacaaagcgaaagctaaggaagaggcagaaaaaatcaaagatgtagccagagaaaaagctggtagcagaacaagaaaaggcatttacctcctctttattggcttactgacctttgcaatagttgattctgttgcctcatcatcaactgattggagaaaaatagcagttctgggagctattctagtggctttagtttctcagttcatctacgaacagacaatgtcaatagaaactggaaaaataagaaagatcgataccgaagaggaaaataactgaagtttaattgttactgagattcaatgcaagtttctgtggaagacaaaattataatggatgttgcgtgatgcaataatcccaa

SEQ ID NO: 31897 - DNA, 2579 bp, Glycine max
  Clone ID: PAT_MRT3847_128809C.1
ccctcgcgtccgtgcaaatgcaagttccggtgggagggcgagtccccacatggttctctcggcgaagactcctcgaagagaagctctgcgacctccacaagtgcaccaatttggactctgtgaaccaaatccacgcccaagtcctcaaagccaatctccaccaagacctcttcgtcgctcccaaactcatcgccgccttctccctctgccgccacctcgcctccgctgtcaacgtcttcaaccacgtcccccaccccaacgtccacctctacaactccatcatcagagcccacgcccacaacagttcccaccgttctctccccttcaacgctttcttccaaatgcagaaaaacggactctttcctgataatttcacgtacccttttctccttaaggcttgttctggcccctcctcgcttcctttggtccgaatgatccatgcccatgttgaaaaaattggtttttatggggatatctttgtgcccaattcgcttattgactcctactccaggtgcgggaatgccgggcttgatggggccatgagcttgtttttggccatggaggagagggatgtggtcacttggaactccatgattggtgggttggtcagatgtggtgagttgcagggtgcgtgtaagctgtttgatgaaatgcctgacagggatatggttagttggaacaccatgttggatgggtacgccaaggcgggggagatggacacggcgtttgagctgtttgagagaatgccttggaggaatatcgtctcgtggtcgacgatggtttgcgggtatagtaagggtggtgacatggatatggcgaggatgttgtttgacaggtgtccggtgaagaatgtggtgctttggacaacaataatagcgggatatgctgaaaaggggcttgcgagggaggcaacggagttgtatgggaaaatggaggaggctgggatgaggcccgatgatgggtttttgcttagcattctggcggcgtgtgctgagtctggaatgctcggattggggaagagaattcatgcgtctatgaggaggtggaggtttagatgtggcgctaaggtgttgaatgcgtttattgatatgtatgccaagtgtggttgtttggatgctgcctttgatgtctttagtggaatgatggcaaagaaagatgtggtgtcttggaattccatgatccaggggtttgccatgcatggacatggcgagaaagcacttgagctcttttcttggatggtacaggaaggttttgagccagatacgtatacatttgttggccttttgtgtgcttgcactcatgctggccttgttaatgaagggcgtaaatacttttattcaatggagaaagtatatgggattgttcctcaagttgagcattatggttgtatgatggaccttcttggacgcgggggacacctaaaagaagctttcatgcttctgcgcagcatgcctatggaaccaaatgccattatattgggtactcttctgaatgcttgtcggatgcataatgatgtagatcttgcaagagctgtgtgtgaacagctgtttaagttggagccatcggaccctgggaattactcccttctgtcaaatatttatgctcaagcaggagattggatgaatgttgccaatgtgaggttacaaatgaagaatacaggaggtgaaaagctttctggcgctagttccatagaggtagaagaagaagtgcatgaatttactgtatttgatcagtcgcaccctaaatcagatgatatatatcagatgattgacagattagtacaggacctcaggcaggttggatatgttccaatgatacatcagtagagatgaatgaaaatcaaattggttgcattattatgtaagcacagctgaaatgatgcttcaaggaatgaatatgatttttttagttgagcacagtgcattgctggtttactaaaaacaagtaaacaaatcattgtattcatcactaccactggtttagcaacaaagttgtatgcatggctcatggctgaacctatgcttctggtgcaagcatcacagtacggatcccaaaagctctgcttgcagcatggcgtgatatctcttgcatgattttgcctaacacagtaattgcttggttgttacagaatgaatctctttgttggtttggtgatcccaactttgtcagaatttacatgtcatcagttggttgttcgattttgtgttaggaagtttttttacggttttaccttttaaatatgttggggagattgaaagaaagactataatattgatgagcaggcaaagaacaaggttgtatgcatggctgaacctatgcatctgttgcaagcatcatctgcattcctactaacgctggcaggagctctgttgtaaagtcaaagaaagggaaaattgtgtagagaaaatgctctagttcttcctgtctaccacttattgtaaaaagaagctacacttaacatatgtatactgggtgacaattcgactcttgactctaccaatatttctgtgtactggtttttggcatggtaccaatccggccctttttattaaacttgaaacatctacttttgcaagttt

SEQ ID NO: 31898 - DNA, 198 bp, Glycine max
  Clone ID: PAT_MRT3847_12880C.1
gccaagcttggtttttatgctggtatgcgcgtgcgtgtgtgcaagagagggagcaatttcataaacacacagcggagctcgccatggcgtgagttagacactgggactgtaccgttggtgtgagaaagctcacacaaacacaggtgcttggacttaacaagaagatgacagtccaacatcgtatatttgatctggcgc

SEQ ID NO: 31899 - DNA, 241 bp, Glycine max
  Clone ID: PAT_MRT3847_128810C.1
agccgttctcaaaggtcttaggagctccaaagggagattgattatcattgctaacaactgcccccctttgaggaagtcagagattgaatactatgctgtgtgggcaaaggttggggttcatcattacaatgggaacgatgtggatgtgggcactgcaggtggcagatattacagagggtgctgccttagcgttatgggtcctggtgattcggatatcatcaagacgctgcctggcgaacag

SEQ ID NO: 31900 - DNA, 1862 bp, Glycine max
  Clone ID: PAT_MRT3847_128811C.1
cggtacgcgtgggcggacgcgtgggccaagtgtggttgtttagatgcggcctttgatgtctttagtggaatgatggcgaagaaagatgtggtgtcttggaattcgatgattcaggggtttgccatgcatggacatggcgagaaagcgcttgagcttttttctaggatggtacccgaaggttttgagccagatacatatacatttgttggccttttgtgtgcttgcactcatgctggccttgttaatgaagggcgtaagtacttttattcgatggagaaagtgtatgggattgttcctcaagttgagcattatggttgtatgatggaccttctcggccgcggcggacacctgaaagaagctttcacgcttttgcgcagcatgcctatggaacccaatgccattatattgggtactcttttgaatgcttgtcggatgcataatgatgtagattttgcaagagctgtgtgtgaacagctgtttaaggtggagccaacagatccagggaattactcccttctgtcaaatatttatgctcaagcaggagattggatgaatgttgccaatgtaaggttacaaatgatgaatacaggaggtcaaaagccttctggggccagttccatagaggtagaagaagaagtgcatgaatttactgtatttgatcagtcgcaccctaaatcagatgatatatataagatgattgacagattggtacaggacctaaggcaggttggatatgttccgatgatacatcagtagagataaatgaatatcatttgattgcattagtatgcacagcacagcgcagctggaatgatgcttcaaggaatgaatatgattttttagttgagcacagtgcattgctggtttactaaaaacaggtaaacaaatcattgtattcatcactaccactggtttaacaacaaagttgtatgcatggctcatggctgaacctatgcttctggtgcaagcatcacagtatggatcccaaaactctgctttcagcatggcgtgatatctcttgcatgattttgcctatcacagtaattgcttggttgatactgaatgaatctcattgttggtttagtgatcccaacttggtcagaattttgcatgtagtcagctggttgctcaattttgtgtttggaagttcttttatggttttaccttttaaatctgttggggagattgaaggaaagaacggaagaaagactataatattgatgagcaatcacgaaacaaagttgtgtgcatggctgagcctatgcttctggtgcaagcatcatctgccttcctactaccgttggccggagctcttttgtaaagtcaaagaaagggaaaattgtgaagagaaaatgctctgattcttcctgtctactacttattgtaaaaataagctacacttaacatatgtatactgggtggcaattccactcttgactgtaccaatatttctgtgtgctggttgttgccatggtgccaattcagccctttttattaaactcgaaacatttacttgagcgagattattttcagagctacttgctacctctaatctacacgtcgctctacatttgtcattttttgtttttctcagtgttaacttctctcagccatgcttctttagttttatctctgttcatttctcatgatgaccaaaagatctcatgatgactaattatgccaaagtgaattgtgcaggccttcattttggatgatggaatgcaaatggatactatgtttgtttttgttgacgttgataatacttttctgcccttcatcttgttactctagacagtaagtacttggaaacctctttctttttctgcaataaatcttattctatacattgattctttttcttc

SEQ ID NO: 31901 - DNA, 166 bp, Glycine max
  unsure (1)..(166): unsure at all n locations
  Clone ID: PAT_MRT3847_128812C.1
ctcnagccggggagccgattagttttgagcttatttttcttttgggcccccaaaccccggggcgcttaaacccccatttatattaaacactttggaacaagcatatcttggaaaaaggggccatagaatttctgcccccacttgcaaaattgggattttgggacca

SEQ ID NO: 31902 - DNA, 206 bp, Glycine max
  Clone ID: PAT_MRT3847_128813C.1
gttggaattgtgttaagatgaatggtctctaatttcaacaattcatcacaagtttcataacatccaaattagagaccattcatcttagcacaattccaacagaacattagacgaatggtctctaatttggatgttatgaaacttgtgatgaattgttgaaattgaaacctctatttgatgaaaaaaaacaaaccaactttacatat

SEQ ID NO: 31903 - DNA, 306 bp, Glycine max
  Clone ID: PAT_MRT3847_128814C.1
ggcgcatgaatctgaatggggcactacacataatgtcatgtgcgttaccagttcaaggtcactcgatcccaatgagtgatatcgctagagcatacaatggaagagcagtgaggacaaccatagtgaccactcaactcatcgtagctactattcttgcaacattactaatagagacagagacagatatacaaatgatgactgtgaaattgcctagtgcagatgctgattcacctgaggtatgcgaaaatacacagtgaattgccttgactgactagggaccgactgtcttaaaggcaatcatgatgt

SEQ ID NO: 31904 - DNA, 360 bp, Glycine max
  Clone ID: PAT_MRT3847_128815C.1
ccgacgtctaccttagaaaaccctccccagaacctctgtcacacaaaccctatcacaaacaacaacgattgccggtgggcaaactagatcgcacatgggaacatcattttgcctactctactatagcagtattacccatctggagctttacttgttctgcccaacaaatatctttccgcaacagccaagtggacctagccaccactttccgacactgggccctttattagcacaagtcaaatgctatcgcttaccgctacggatgagtactgtgctttctttgaaacgcaaatatagccgtttactaatactagtattagattcatgcctagggtcatacttccttttcctggctcacta

SEQ ID NO: 31905 - DNA, 437 bp, Glycine max
  Clone ID: PAT_MRT3847_128816C.1
caaagatggcaaccaacgcggccagtgctactcgcactccacgctcccaacaacgccccacccaaagcccaaggacaccctggcgaaggcccacgctcacgcccacctctttctccaacaatccctccaccttctacagcggctccaccggttaccgactgtcctttgacacctgcatctcaagcttttcctccatcacctccctccgtgacacgctcccggaaaacccccacatctactacttctccgaaatctgcgccgacaccaacaacttactctccaaacgccactcctacttcaccccttgctggcgctgcacactccgtggcgccgacgtcattgacttacagcgcacgtttgacggtaaactacaaaccaaccagctgcaggaactcctctgcgtcggctgtcgcagccaccacgttagcatcattaaa

SEQ ID NO: 31906 - DNA, 433 bp, Glycine max
  unsure (1)..(433): unsure at all n locations
  Clone ID: PAT_MRT3847_128817C.1
atgagactggtgcanatatagcanggatcagtaaaactataattgtatctttagcaaagaaagacaataattttgcatctggtcntaaaacaagctgagagaggaggancaanancanactttcttcttaaggtaaatcacgtgttaagctttatccaactacagaaattaagaacacttatatataggagcaggagccaaaaattcctacaaccaataatacgtattgattgcttgtttgtccgtttggcccaatggaggataggattcttgaatggagtccttagaaacgttctggcacattttacaggaaggaagacttttcacctctggtttgtccagaaaaattatctttatatttcaccagcttttcattactggagcttcacttttcaattatggaattggcaacttaaacttttgaacttttggg

SEQ ID NO: 31907 - DNA, 613 bp, Glycine max
  Clone ID: PAT_MRT3847_128818C.1
cgtcggcatgtcctggaccgacgatcaaactcttctctgcgtcgtccaggacggcaccggttaccgctacgacgtccacgcgaacctaatcgaaccaaacctctccctcgggaaagagtgcttcgaagacaacgttgcggattgcgcgttttgggggcacggtttggtctgcatcaccgaggcgaatcagttgttctgtattgctgatttcaggaaccctagcgcggtgaagctcgcggatcccgggatcgacgagatgccgcattgtatggccgtgattgagccgcagtacacggtttcggggaatgtcgaggttctgctcggcgtggatgatgctgtggtgctcgctgtggaggaggatggcgtgcagaggcttggagagggattgctgcgggggccgctgcagaagatggtggtttcgcgcgacggcaagtggctcgcgtcgtttacccatgatgggaggctcttggtgacgacttcggacttgactggagttatcatcgagagggagtgtgagtcagctcttcctccgcagcagattgcttggtgtggaatggatgctgtgctgctgtactgggatgatatgctttgaatgatgagtcctgagggagag

SEQ ID NO: 31908 - DNA, 336 bp, Glycine max
  unsure (1)..(336): unsure at all n locations
  Clone ID: PAT_MRT3847_128819C.1
ccaatcacagcccatgaccannnatgcctacagtagacttgctgccatgtatcaacaactgcaccaacctcctcctgcttctggttccaagaactgagatagctagatgctgggcagtagccccaggttgtgatagtgttgagctacaaacaagaatgtccatacttactctttgtgagaaatgcgtatattattagctccaaagcaagtgatgagaaacaataccagaatatatatactcatttgttattggagttagtaacttcttaagattaggtggctttcttggttactttaccttcatataaaatgttcattgactttgcaacttgcata

SEQ ID NO: 31909 - DNA, 237 bp, Glycine max
  Clone ID: PAT_MRT3847_12881C.1
tcctctagcgcttccgcttttttttttttttttttttttttttttttattttggaaacaccaacaccacgggcgggtggttttaactatcctataaaatcaaatacactcccaatgtataacaatcctaacttcaaagttgactaagaacatttcgtcataatctattaaattaacttccaaattaaaacaaattcttccctaataacctattagcttctacaaatataaaaattat

SEQ ID NO: 31910 - DNA, 535 bp, Glycine max
  Clone ID: PAT_MRT3847_128820C.1
gtataaaagcacaatttgttagtggaaaaacgttgaattgtgatataattggtgctggttcacattcttcagaagattttcctgaaaaggaagatcaagaaacacccaaaaagattgatgccagattgagacaaagaatagatcctcaatacaatgaggttcaggctcaaatggaaacaaatttgtttaaacagtctcttgatgatgttgaaactcctaaagggtccatgtgggatcttaaaatttctcaatctaaaatggcactagccaagaacacactttgggaagccgatctgcggcaaggaatgctggtataatgaatatgccaaatgcatgtttttcaatgtggagatatttcgttggacatctcgtctttgaagtattataagatgacttctccctacattaaatgtaccgtatttttctttatagcatgtgcaaatttggctgatgacaccattaagtgggaggcttttccccacaagctgagcgcattttgggtgagaattaggaataaagtggtttggaatttttc

SEQ ID NO: 31911 - DNA, 490 bp, Glycine max
  unsure (1)..(490): unsure at all n locations
  Clone ID: PAT_MRT3847_128821C.1
tttattttttttttttaanaaattttttttttttggatcactaactatcgatacatgattcgctgattataacgtgctatatacagacaaccgacgcgccgcactgacctaactcgtcctgttcttcttgagcaacttgccatgggctagcaggaggtacagcctgaaacacaacttggcaaagtcattctcatacaggtccttggggtaatccgctccaagcttgtacgccgcggccgttccggagatgacggcgacttcgtgggcgttgacgagggtccaagcggcggcatatgtcgtatgcttgctgttcctgttcaaagcccagacgaatggcacaacgaaagcgtagtgcgtccaggaatgcatcaactgatgccaccagtcttcccggatgatcttgtccttcttgatctcatccttttgccaagtgtccttgtgcttgttgttaaggaagatggtctggaagatgtggtcctcgagtggcttg

SEQ ID NO: 31912 - DNA, 359 bp, Glycine max
  Clone ID: PAT_MRT3847_128822C.1
ggggggaatttttttatttttttgggttttttccccccccccccaaaaaatgaaaaagttttccaaaaccccaaatgggtttaaacaacttaatttaaaacaaacaaattccaaattggaaaaaaaaattttatgaaacgcggaaaatttttttatttagcccccaaaagggttaaaaccagaccaaccagtgggggggcccccattggctttttcaacccaggaaagcccccccggggggggttcttttttaaatatccaaccccaggaagggggctcccacctcttttactacgggaaccactgcaaaggccagtccccccccccccatagcggggaccactggcaaagcccttttt

SEQ ID NO: 31913 - DNA, 444 bp, Glycine max
  Clone ID: PAT_MRT3847_128823C.1
gtgtgccatagcattttaaagcattttcattccctctttttttgttttgcgaggaaattaatcaagttcaacaataaaatcctattttatgcataatttgcaaattgaaattatgctccatgggttcatagtgctgtcattcttgcatttcatttcagtaatactagaaattacataaagctcagtgagtttggaatatatgattagattaaacacagccgtagtcgtatatttagaggcgttaaacttttgcatgccttttaacttcatgtatacattgttttctggttttcgcattaaatatttaaatgagaaggtaggaacatagagataaagaagccatctccatatatgcttagcatgaaaattttgggagttttcttcacagttttactgcctcttctattcccaaggaacatgattccttcatgacaagattgttgc

SEQ ID NO: 31914 - DNA, 427 bp, Glycine max
  unsure (1)..(427): unsure at all n locations
  Clone ID: PAT_MRT3847_128824C.1
cacaaacaaaccctaattgcattttcttatcccaatctctctgctcccgcttcgcttcatcactcttctcaagattcaggatgtgcttttgtcttgatagaatgaatgcaggagtgggctcaatgattcttgcttctgagttctatgaaactaatagacgcacgggaagctatggtagtaatacgggaagctggggtagtcatagatagtcgtttatgtttgatgatgatcttattcttagatatgctcgttactctccgaatcaatttgttcagtctaatattttcgaagttaaactatttatttggtctatatagttgtctatcaaactaagtttagtccatacactagaagactataagttttatatatgttaagtcttggttcctattgccaacncnnnaaaaaaaaaaaaaaaaaaaaaaaa

SEQ ID NO: 31915 - DNA, 550 bp, Glycine max
  Clone ID: PAT_MRT3847_128825C.1
gtgcttatcaaataagcacttatgtatatgttataagccttattgaatgaaagaggaaatagggctaacttgttttcttataagttgtaagttattattaaaagctatattgaataacctattgaaataagctttcaagtttttttaaaaaaagttcatgaacatgtcaagctatttttataagctctttcaaatatttatgcaagtgctcaggtcataaaaataactttaaacaagctctttcaagtactctaaagttactgctttcaccacttgcaacttgtgaaagctgttaatgtctttttctgtagaattacatgcttattagttgtttaccttaatgtagagcattaagaagtctgaatgtcccaaagagcttgaaccagcagataggaggactgctgtccatgtcaacctcacaaggcgggatgaagactaccctgtattcccttttttattttctagtctgctttggtttttttttttctttatctatcacccctatctaaggttttttaccttttctttttccttttgctaatatgtatgc

SEQ ID NO: 31916 - DNA, 641 bp, Glycine max
  Clone ID: PAT_MRT3847_128826C.1
ttggaatttcggcttcgggggacttagagaagatgttaacaaatacttttttttaattatcgctgtatgtgtcacagcttgacatatgcatatgttgaaactgaagtgtctatctgtccaacataactaaaagcctaaaaccgcacaaaaagatcttagattgcttgtagaacgttgctgatctggctgcaagctcagcttcaccttgctacgtaatcttgcaggttcgaatttgattgattggttataggaatcaatgcatgccacgtgttttgctgaaggtggaggaagaaaccatgttttgtgaatgcggggatttcggctttcatataccagagtcaatgagtgtgcgctgtgggaaattttgagaacataaacgagccaacaaatgcaactgactactcaaaggagacaccatgcttccttatgtttgtagatgaagaaacagaattagaccataaaaattaacttttacattgtttttttgggagctcatacacaaagcaggggcaatgcacttcacaattatttaaatgttctatctgctgtgaagaaagagacttgtacattgttttttacagagctcatacacaaagcagaggcaatgtagttcacaattatttaaatgttctatctgcagt

SEQ ID NO: 31917 - DNA, 694 bp, Glycine max
  Clone ID: PAT_MRT3847_128827C.1
gatacaaatgttgtcatgatacactcggtcctgttatgtgctgtcatttactcactcgggttgaactccatcataaagtgtgtcctaagatgttcaatcatagtcatcaataacaatgacccttcttcttcaagtgtgagcaacaacaagccttcaccgagattggccaacacaggaatcaagaagaaagtcctcaagacttttcctactgtgagctactcaacagagatgaaacttcccggtttggacatatagtgtgtgatttgcctctcggagtttgccaatggtgataaagtgcgcattttgccaaagtgcaaccatggtttccacgttcgctgcattgacaagtggctaagttcacactcatcatgccccaagtgcagacagtgcctcattgagacatgtaagaaaattgttggatcccaaatacaaccagtgccacctgtgccagaaagtaccattataaggattcaaccactagaacctgaaggtttggagcgtaactatagggaagtatgttagctaattaattactttaattagtactagaatgtaagacaaaccaatcaaccatcaacaatgcggtggttattgggggattttcacttgctttttgttttgacctcagatgtaagataaactagttcaatttttgtaactgcaatattattcttttcagtaatattctaaagtt

SEQ ID NO: 31918 - DNA, 260 bp, Glycine max
  Clone ID: PAT_MRT3847_128828C.1
atatcacaccgcgtatttattcacacatgtcaatctttattcgctcaattgcgagtgattattgttcatgatcagggagatcgaagcacgctgcagcaacaaggaccacaacacaccgacacatgtgttaggtaccccattgtcccccaccaccggtcaagtagctcgcatctctcactgtagcattgaccagcgtcgcctgcaatgcatccataatttctatcccaaggaaaccctccacatgaaagaccggcatcagc

SEQ ID NO: 31919 - DNA, 416 bp, Glycine max
  Clone ID: PAT_MRT3847_128829C.1
ggtctaatggggataatggcataattctcataggcaattaaaattgctttatttcaagggacttgaataactgaacctaataaatatggaactttccgattaaccgggggtagccacaccatataatttgatcttccgaaataaagtgggccgattctgtctaagtttttcgctaaaataaccctaattatcaacaaaaagtggggcaaatgggctagctgacctaaccttgaaggaaaatgaattcctgcaaagcctatccaagttttccttcatggagttctctaatgtaaaatcatcttgctcgcattcattttgtgcatagtcaaaactcagctccccataatcattctcatcatgactgtcatcatcatggatctacatcatcttcatcttcatcctcatcctcatcctct

SEQ ID NO: 31920 - DNA, 378 bp, Glycine max
  Clone ID: PAT_MRT3847_12882C.1
cctggatggggcaagcatagcaaagtagtcggcaatggcactttaagaaaggctgtcgaggcactcctaaatggcattggtgcaccctttcagatttctgagtgtaatttggggaggcttatatcagaaggacctgaagtagctgcttggttgagacaacctagcacattgaatgtgctgcttctccatgattgcattgtttattctcaaccagttgagagacaccaaacattcaatataccatctcttggtgcattgtagagaaattgagattcaaattatgaattggaaagccaatttttgaatcgtgaatcataatttgtattaaattgtaaggttgagataatgaaaaataacttcaaatatatcatataaaaa

SEQ ID NO: 31921 - DNA, 441 bp, Glycine max
  Clone ID: PAT_MRT3847_128830C.1
attatattatctttttttttttttattactttggtttgggaacattttttttatctttttcaaagggggaaccatgtaaatcactgagtagattcaccgccgaatgaacccaacttgaaaaccctaaacaacagcggcaaccaatgcgtaacagacacaaacaccaacatcttatcccagggagccttctaaccctctgtaagcccggataccgcaaagggcctgatctgaacggagatgctcctaaaaaagaaacccaccaacacagactgcgaacagggccaaaaaaggagggggaaccccggaatggggaaaaaaacatcttaagagcttgccaccgttgaaagcaaggcacgaagcctgcaaaatttcccctaaaccggaagcgcccactggcattacaggacccaaaaacctcaaaaactgaagccccaagggggg

SEQ ID NO: 31922 - DNA, 153 bp, Glycine max
  Clone ID: PAT_MRT3847_128831C.1
aacgaactcgaactatatgaaaacatgcttacaagattggtagaacttaaaactcattatctttcacaactgaggcaccaatggctacattaactgctcctttaacaacccacttccccttaacttcccacagaattccatcggacgcctggg

SEQ ID NO: 31923 - DNA, 262 bp, Glycine max
  Clone ID: PAT_MRT3847_128832C.1
ataataatgttgatgaggttcaaatcacttcatatataaattactcaaactcttttattacgtggactcaattattatcatttttttaacccaagatatccctagaccaaaaatatcaaatattgatccttttgagatactgaagttcatttaaaaatttgtcaactatatcttaccgtgctaatagaccttattaaacttcaatcaaagtggatcttactcttaaacagagaaatcttaatcaacctaaacgaaatgattt

SEQ ID NO: 31924 - DNA, 405 bp, Glycine max
  Clone ID: PAT_MRT3847_128833C.1
gcatgggccacgccgttcacgtgcttagagttccctctgccgagatcgtatactggaatcactcagcagaaactctgtatggatggaaggaccgtgtggaacttggcgttcgtggttgcggcagggaccgtgctggttttgagcgcgagcgaggtgcctggcatgcctcgtcagtgcaagacaggattgggagcagcagtgggaatttgagtgtgtcttcgagagagggttctgcttctgcctctgcctctgcgcagtatgtgtcgttgggccaactcgatgacgagagtactagtaccctacttgtcacagtttgagttggcccacgatgatatgtcacatgtgaagaaaaattctggtactacgactctagccttggcagaacagcaccattgtttccaactg

SEQ ID NO: 31925 - DNA, 437 bp, Glycine max
  Clone ID: PAT_MRT3847_128834C.1
ccacgcgtccggaggagtgttacgggagggcgatactggcgagccccggggacggtgaggtgctggcgatgtatggggggcttgtgtgggaggcttaccgcgacagcgagagagccggcggttatttccagcgagcggtggagtcttcgccggatgacagctatgtgctagggtcgtatgcgaaatttctgtgggatgccgaggaggacgaggaggttgggagctcagtgtcatcgtcgccaccgctggtaaagtccttttgatggacattctggtaactgctgaactgactgtgtatagaggcaatctctaagttcgatctataacaacttgtagagcactgagggtgttgttgacgaggactgaaggtgttgttgacgagggcgaaggtggaggcttttgtgccaacaactttgatatgctatggatggtcagtt

SEQ ID NO: 31926 - DNA, 1942 bp, Glycine max
  Clone ID: PAT_MRT3847_128835C.1
gcacgggccacgccgttcacgtgcttagagttccctctgccgagatcgtatactggaatcactcagcagaaactcctacatggatgggccaacccttcgcttctcttcttcgcaactaggttctgaacccactcgccgaatcggcttctttcaatctcaacacgtaacaacatggccaccacaaggtcatcgtccgaggacatcgtcgattccacgccgcttctcgccaattccgccggctcctccgacgacctcacctccggccgtcgattcgcgcggcgtcagcggctccggcaggcggctcagttcctcaggcaagcgagcgggcgccggatgatgcgcgaaccgtcgatgctggtccgggaggccgcggcggagcaactggaggagcggcagagcgattgggcgtactcgaagccggtggtggttcttgacatcgtgtggaacttggcgttcgtggttgtggcggggaccgtgctggttttgagcgcgagcgaggcgcctggcatgcctctgaggttgtggattgtagggtacgctatgcaatgcgtccttcacatggttttcgtttgcgtcgaatataggaggcggaggaggcagcaacccgctgccgcctcgtcagtgcaagacagggttgggagcagcagtgggaatttgagtgtgtcttcaagagagggttctgcttctgcctctgcctctgcgcagaatgtgttgttgggccaactcgatgacgagagtactagtgttgcaaagcatttggaatcagccaatacaatgttttcatttgtttggtggattattggattctactgggtatcagctgggggtcaagcattagcccaagactctcctcagctttactggctatgtataatcttcctgggttttgatgttttctttgtcgttttctgtgttgcactggcatgtatcattggaattgctgtttgctgttgccttccctgtatcattgcacttctttatgcagttacagaccaggaaggggcatcaaaggaagacattgagcagttgtcaaaatttaaattccgaagaattgaaagcaatgagaaacttaccggtactatacaaggacctgttggaggaataatgaccgaatgccaggctgattcacctattgaacatgctcttgctgaggaggatgcggaatgttgcatctgcctttcttcttatgatgatggggttgagctaagagaacttccttgcggtcaccattttcactgtgtctgtgtggataaatggctgtatattaatgctacatgccccctctgcaagtataacatcttaaaaagtagcaacctcagtcaagaggaagtgtagaagatcgatgtcaggaaagtttttggcgcccatgttgaggaatctgcacactttcgattcacagccatgttaatatactttgatacaggcctatacagttgctcctgctgccgtttgctgttatcatgtaatgatagcttttttgattgtttgtagttattgtggcttcttactggttgtgtatatcagtgttgttcagtgcataccggctataattatctcaagaggcaatttggttgtattttttttttgggttttattgtcgtcatcattgttgttgtatatggacccataatgtcttgcttaagccactgtggaatggtttatcatgtctcggtatatgttaccaaaatatttagcccaactgcctccatgcgtttcacttggcaacttacttataccccctattgtgtttatttgagtgtaaacagaaagaaaatgaaattgagagataggagtttcctaagtgagactgcattagttatttggttctgtttttttatttattattctgatctataaaaaaaatcgagataggatgtaaatatcaaatttttactatttctgctataaatacagaaagaactcaaaggagttactctttttc

SEQ ID NO: 31927 - DNA, 240 bp, Glycine max
  Clone ID: PAT_MRT3847_128836C.1
gtatggtagtgtggggcaactcggagtatgaaatgctatgctcatcattatccagcttttgttttcgggtataattgggaaaaggccaaaataaccttttcaaaaagggttttggctggggtcttgaattttccttttcattggaacctatatttgggaaaacctttttttggaaggctttaattccacccctttttacaagtgaacttgaacctaattttaaagggccggtaatggtcc

SEQ ID NO: 31928 - DNA, 248 bp, Glycine max
  Clone ID: PAT_MRT3847_128837C.1
cttctcctcccatggcgtcctctccttctcaccctcggctacagctgctcgacgcccactactgcttctccctcacgcagcagctgccggcacccctttttcttcgttcctggtctccacggtagcaagctgggagctctctccttctcccatggcgcagagcaatatcaccatggcacacctcatccactttctcaagccagcgcgttcctcactactccgtgatggcgagcagcagctccatggcc

SEQ ID NO: 31929 - DNA, 487 bp, Glycine max
  Clone ID: PAT_MRT3847_128838C.1
tacggctgcgagaaacgacagaagggggatcgagagagagataaaaaaaagaagaaaaaaaaaggaagagagagaggcaaaggcgaagcttggaagatggaaacccagtgagtgaggttcgagatttgtgagcaattcgtgaactttgcgaaggtgcaactaagattggatgaagacacggccaatgaactgagagtatgtatccaaggctattcctcgtggaacagagggatattggggtgctgggtcatattgggagatgggtcaactatgtatgatgatctggttggttcagattgttggggggttgttgtggggtttaatatgggaaggttttagatgtattgctgcaggcttgcaggtcttagttattactgagatagtggttttgtgatgactcctatcttggcatgataactaaagtccttgctctaatatatgagttattttttgccgtttcaaaaaaaaaaggtttggtgtttctcgg

SEQ ID NO: 31930 - DNA, 2838 bp, Glycine max
  Clone ID: PAT_MRT3847_128839C.1
cacactcacttcatttcttctttagtactactcactctctcaagctctctgtctgcgacaacacaaaacgacatcactctgattgtctcattaacgtcgtcaaaaatgctgcaaacccgtcccggcggctccggtggccgcacggtgctggtgggggtgaagatggactcccccagcaaggaattgctcacatgggctttggtcaaagttgcacaccctggtgataccgtggttgctctgcatgttcttgggaacaatgaaaccgtgaatggagacgggaaatcgtcgctgctttcgcttgtcaaggcgtttgactctgttcttgctgcttataaaggattctgcaatttgaaacaggtggatctcaagctcaaaatttgccgtggttcgtcagtgaagaaaactttggttcgagaagcgaatggttattccgcaactcatgttgtggttggaactactcatggcctgcataaaatccggtcatctaccgttgtagctaagcactgcgctaaaaagttatccaaggattgttgtgttcttgctgtcaacaatgggaaagttgtgttcaagcgtgacagctcgccgccgagtgttgcagagttacaaggggttgatcgtcataacagaaatggtttgctaggttcaatacattggacactcggtaagaacagaaaagttctaagtgatgacagttcagggatggatgccgatgagaagaaaactggcccgatttcggatcacagtttagcgaagtttttttctggaatctaaagaaactgttagaaatccgagctgttcaatttgtggcacaaccctggcattgccagacccttctttctaccaatctgcagaaggagtttctggtgatgagggtagagagaattctttggctatggtgcctgtgcaacccactgttgcagcaaaaacggaattgaaaccaggttggccactactagacggaagaattttatcggacaggcaatctgctggtagatcattgtttcacctgcagatctctgtggtccagtgggcaatgaggttgccttctagaaacctttcatatgctgtagatcgtgatgaaaaatctaaaatttgtgatcaaggtcaagatcagcctgcggctttagatagtgaaagtggcgctcttgttctggtagatgctgaattagggactgcttcttcgcctgaaaacaattcaggaaacattcctaaagaattggagggccttcatgagaaatactcgtcaacttgccgattgtttgagtaccaagaacttgtatcggccacatcgaatttcttgcatgaaaacttgatcgggaaaggaggaagcagtcaggtttatagaggctgccttcctgatggcaaggaacttgccgtcaagatcctaaatccttctgatgatgtgttgtcggaatttcttctggaaatagaaattatcaccaccttgcatcacaaaaacattatttccctcctggggttctgctttgagaatggcaaacttcttctcgtttatgatttcttatcaagaggaagccttgaagagaaccttcatgaataggtaataagaaaaattcacttgtgtttggttggtccgagagatataaggtagcagtaggtgttgctgaggctttagattatctgcattctaaagatgatcaacctgtgatccatcgggatgtgaagtcatcaaatgtattattatctgagaattttgaaccccagctctctgattttggactggcaaaatgggcatcaaccttgtcatcacatataacatgcacagatgttgctggaacctttggttacttggctcctgaatacttcatgtacggcaaagtaaatgataagattgatgtctatgcattcggtgtcgtgctccttgagcttctttcagggagaaagcccataagccgtgattatccaaaaggccaagagagtcttgttatgtgggcaagtccgattctaaatagtggaaaggtgttgcaattgttagatcctagtttaggtgataattatgatcatgaggagatggaaaagatcgtattggcagccactctctgtataaaacgtgctccaagggctaggcctcaaatgaaccttatctcaaagctccttcaaggtgacgccgaggcaatcaagtgggcaaggttacaagttaatgctttggacccaccagaaatgcttgacgatgaagcgtgtccacctagtaatctacagtcacatataaatcttgcactgcttgatgtggaggatgacttgctctccatgtgcagtgttgagcagggtctcactttggaggactacttgagaggccggtggagccgtgcatcaagctttgactgagcaaactgctagcaaatcgctagaagaagctcaaccctttgaccttaatctcttttgtagatacagttttcttgtgcctcttccattaacaatggcatcttctatgggtttaaaatggatttagggtgacaggatgtttgtgtgtgccctcctcctttccttaataatgaggaaactaggccttataagttgttaggctagttaccccttttcattctatacttgaaatggtttctatttttgtccatgatctcaattcgatcgagttttgtaatttgtattgataaaaagatgaagaagttgtatttagagcataaggatcatagctttgcattttaacaaggctatagcaatttcgtccctgggtttcttttatttcactgaatgtctgttgccttttaagttcttcacgcagaatccttctttctgcagcagtatttgtatcgagttattcaaaataggcataccagtgataaattggatattaacctctta

SEQ ID NO: 31931 - DNA, 642 bp, Glycine max
  Clone ID: PAT_MRT3847_12883C.1
aataatgaaatcatttttctcttaaatgctagagaaaaatattaatattcagagaaggattgaaaattacacctttaaatattcggagaactatgccttcaggaaatcggtagacatgtgtatatacttcatcaaaatttcagcaccttggtagagtcctcattgagaatatggtgtaaaccgttaatagcttggactctctttgctacatacaaagtgaaatcatttggttcgtgctaataagtttcaaggccatcttgcacgttttgtagtttatgtactacattgcttatcacgtaaaatccttttcgccctaaaattggagacacctagagacatactagcatcaaacaagtgatttcgtgaagtcaagcaaccagccagcccaggctatacaatttgtagggagaaatgttttcaaaattcaaattcatgttaaagcaaatgtgatggttcaatttgaatatgatatattgaacatagaactctgatcaaaatgttcctaagcatttaccacagctataactacaacgcaagagcttagaataataaaagaagttttgtgccaaatattaaccaagcatcatactagcaccagttatagatgttcaccccagcagaactcaagccaaatgacttgac

SEQ ID NO: 31932 - DNA, 792 bp, Glycine max
  Clone ID: PAT_MRT3847_128840C.1
caaagttgtggctgcatagtatatcatcatattcatatcacaaattcaaaacacaacaacaacagaacacactcacttaattcttatttagtattactcactcactcgcggtctctgtctgcgacaacacaaaacgacatcactctgattgtctcattaacgtaaaaaatgctgcaaacggatcccgccggggaacccgcccgaggcggcggctctggtggccgcacggtggtggtgggggtgaagatggactccccctgcaaagaattgctcacgtgggctttggtcaaagttgcacaccctcgtgataccgtggttgctctgcatgttcttggaagccatgaaactgtgaatggagtcgggaaatcgtcgctgctttcgcttgtcaaggcatttgactctgttcttgctgtttataaaggattctgcaatttgaaacaggtagatctcaagctcaaaatttgccgtggttcatcagtgaagaaaagtttggttcgagaagcgaatggttattctgcaactcacattgtggttggaactactcatggcctgcataaaatccggtcatctaccgttgtagctaagtactgtgctaaaaagttatccaaggattgttgtgttcttgctgtcaacaatgggaaagttgtgttcaagcgtgacagctcgccgccgagtgttgcagagttacaaggggattgatcgtcataacagaaatggtttgatcggttcaattcagtggacactcggtaagagcacaaaagttctgagtgatgacatttcagggatggaagc

SEQ ID NO: 31933 - DNA, 280 bp, Glycine max
  Clone ID: PAT_MRT3847_128841C.1
gatacggattcgggtcgagtcatgaagggcattttctttgagaattagggatttaacagttttatgtaggtgttattataaatgttttgattatgtagaaatcactcaatcatgtttttgtcattttgagaacatccatttttctctaatttttattttttcttttatttcttccttctagattgtaattagatgcaatttagttatttggatgtcactactaatgataatccgattagaactagtgagaatccaagtacaatagaaaagttcattggag

SEQ ID NO: 31934 - DNA, 408 bp, Glycine max
  Clone ID: PAT_MRT3847_128842C.1
ttaggttcgagggcgctcattctctggccactggtgagctcgcgagccttagggagcaaccacttgaggattgcgatcacttttgtgatccataacaatatggtgcgtgagacgtcaagctgctacgccggcttgattaacaacgcattttcatgcatacttcatgctggggcagtacacaaagatactgactatccatacaccgggagagatggctcctgcaaatgctgccagaaccaaaggagcggatcctggctctaagaacagagggagatccctcctttattgacgtgttgctagacacctaccttagaacgtacctaatgcatgcgctatgcacgcagctttattgagacatactgtggaggcgattcatgcacatacatatgtggccatcacttggatcat

SEQ ID NO: 31935 - DNA, 314 bp, Glycine max
  Clone ID: PAT_MRT3847_128843C.1
cgaggcaatttaatgacaaactatattgtgcatcctttggcaatattgacatagtgaatttattttgagactacttgattctttactctttgaacagtctgctttcattgcatgtacatttcatgtcagcttgaagttgtgggtcatctgggtccattgtgcaaaattgtgattgtcgtgttgagttttagagttggtgctgaacttatataaaattcaccgacttggatctaccgtatatggactcaaagaccaagtttcgactagatatcctatgaatatctcaacgtgtattatactctgtattgtcgtga

SEQ ID NO: 31936 - DNA, 295 bp, Glycine max
  Clone ID: PAT_MRT3847_128844C.1
cgcaggacctacctcgtgcactccttagtttttgccttcctctactggctctatgactcgtgatacttaattctaccaagggcacttccctgtgatattatatggccttatatcataccaacaataacaatattcctaattatgatttatattagacagactccaatcatccctcttcacacgacactttataagcttccgacctatcaacctatactttctagtatagcgctcactgtcgtgtaattgtcaatccatatatcgtatgtgacggcatcatctagagaaccattac

SEQ ID NO: 31937 - DNA, 311 bp, Glycine max
  Clone ID: PAT_MRT3847_128845C.1
gcaagtcttactttattgctcagaaatagtatccctttttttttttttactttaaaaaacataaattgttacatttccatccccttagtatccaaattaactgcataaagaatgagatttaaaagcgatccatcgtacatggaaaaattgtaatgcacacacatgccaatacattagcatatttgcataatatattcgttatgactagttgcgagacatgcgcattcaaagagggataccctgtgggaattcgcttaaggtcttcgcattttatcataacacttataacccttgtgcacccatcttaactt

SEQ ID NO: 31938 - DNA, 411 bp, Glycine max
  Clone ID: PAT_MRT3847_128846C.1
ggaccttaaaaaaattaaaattttgaacaaccttttttgaggcgaaaaagctttttttaaacacctttgactgaaaacctaactactactacaaggggcccaattttcatacctcccaataaaagggaaaaaaaaaaagagagcaaccttagaatttaaattcaaaaactttgggaacagggaatccctttttaaaagtcatgggcagcagcagcacccttggaggagcccccaccctttttggaaaaaaaaaggttgggaatgttaggcataacaccgccgttagcaaggggaacatctcctaaaagctggctaaacttttgggggttcctcaccgccaattgggggggggggggaacaattcgagtctttttgttatttttcggagggtttccagccaattccaaaacc

SEQ ID NO: 31939 - DNA, 417 bp, Glycine max
  Clone ID: PAT_MRT3847_128847C.1
gaaaaaaaggaaattttttgaaatttttctgactaccgttttgcgtttcctttggataaattaaggcgggtttttgtgccaagaccccttaaaaaaaagggaaaaaacctttcccaaatttttaaataagtttttttttctcaaaaaagggcttcaagggccatagttgcctccctgctccgggtaaaccgacaaagggggaaggccacctcccccagaactttttggtggggggtgttctggggagttcctgcatttttttttttttttcacaaaaataaaacctctccccatgaaggggggaaacaggttcccgcaacttttttagctttagccccattacataaactgggccttttttaacaacattaaaccaatccttgggtggaacacccgttttccaattaaaatccacag

SEQ ID NO: 31940 - DNA, 666 bp, Glycine max
  unsure (1)..(666): unsure at all n locations
  Clone ID: PAT_MRT3847_128848C.1
gcttggctaagccatttatcttcaactgatgtaaaatatcaatcactaataagaaaatcaatgattgatattaatatatatgcataacaaatcaagcatttgtcggaatatcaacacaagtatatcaaaatgaacaccatccttagtggtacgggcattatctgaacaaagctcgatacttggataagaaataatggagataaagttccttggaaagagaggttagccctttgtcatgacacaaatcaaaagaaaatacaggaaaaaaacaagggacattctataaaagtacaaactcaatattccattcccaaccctcccgattattccttccttctcccaaacccttccctcccattccattttattttttaagccctaatcaattcaccagtttcacttatccttgccacgtatgcaaggttgttataaccttttataacacaaaaaggttttgcttcatgttttgatcctccaactggagaatacaactttcatattcttgtcaggaatcgtcctatgggcagcaattagtggaagaggattctccaaatgggcggcatggccacagctaggaacctcacaacctcgtgtatgtcataccctttttcatgcttactncgtaagctagagcacaatgctttcatcattgcttgagcaattttc

SEQ ID NO: 31941 - DNA, 293 bp, Glycine max
  unsure (1)..(293): unsure at all n locations
  Clone ID: PAT_MRT3847_128849C.1
ccaaggctggcatggagaagaccaaggccactgtccaagagaaggcagaaagaatgacagcacgtgatccggtgcaanaggattggcaacccaaagaaagangaaagttaaccaggcggantggacagcaggnngcgctnanccataacacggcggcaaacattcgcacacgctgggacatggacatggcacaaacacggaccggntgaacgcacnattcacacgggatngtagccnngggccacannnngcatgctgcatgacggcaccaggcatnacgagatgtggccatc

SEQ ID NO: 31942 - DNA, 130 bp, Glycine max
  Clone ID: PAT_MRT3847_12884C.1
atagggtctttatataaatttttgcacccatgtttttactggggaatttaatacctttacgggcttttgtgccggctttttatatggggagacctattatagcttggcccaagtttggacttaggtggcc

SEQ ID NO: 31943 - DNA, 261 bp, Glycine max
  Clone ID: PAT_MRT3847_128850C.1
cacaacaagactagttgttcacaatgaaaagtcgaatgagacaagcacatggtttggtgaacttatagaagttcatgcaacaactcgaggtggtcaccataggggtaaagtagattagatctacagttgctcctgatgtacacctccaatggatgctgaggagtatgctgagtgtgaggcatgggtacaggactttcctgcccttcgtgaagccatgaagaagagagggattgtggatatggatctcgtgatggtagatct

SEQ ID NO: 31944 - DNA, 271 bp, Glycine max
  Clone ID: PAT_MRT3847_128851C.1
cgtcttcgtccgcggtaccggcggcgaaatcggaacggggagttcactggccccgaagatcgttccgctcggtctgtcccccaagatgatcgtggaagacattgccaaagaaaccgtcaatgactggaagggcctccgcttctccgtcaagctcaccgttcacaattgtgaggcgaaggtcacggtggtccgctccgccgccgccctcgttatcgaggccctcaacgagcccgagcgctagcgctaaaataccaagatcatgaagcgcgcc

SEQ ID NO: 31945 - DNA, 559 bp, Glycine max
  Clone ID: PAT_MRT3847_128852C.1
gaaaaactcttcatatcgtcagatgcagttgatgaagctgcataaaggttttctgcaagtgaaatacggctgcgagaagacgacagaaggggaaaaagaacttcaggctctaattgatacagcaatgtcagagattgactgtgatggattaaaggatggacaactaacaaatggaagtcttgatggtagattgtaatatatctttcggaggttcagattgtgtcattgatgcttaaaatgtgtttagcacagaataccctaatgttatatggagaagaaaaaaaggctggataattattctcttttattattccactccagtctctactaaataacattaatagagttttgtttatacttttaagttgttggtaaacttggtcattgtaacttcctttgttataaattttcactagagaaaaccagctgacttcttgaactccactcgattgaattgcatgacctgatgcttcttatccaaaaagcttggcttttggcatgaaaaactgctagttggtatagcacttgctacttgccaaatgtttattgccatctgtgc

SEQ ID NO: 31946 - DNA, 195 bp, Glycine max
  Clone ID: PAT_MRT3847_128853C.1
ttacatcaactcccacacttatcttaacatctctctcttactttcccaattcttctctacacatcattgtgcctgttccaattactcgccgggaagatccacaatccagtcattttccttgatcgtccatcctccacttcttaacgtagttttaacatctatccattcaacctttacctcatctccaacctcacc

SEQ ID NO: 31947 - DNA, 266 bp, Glycine max
  Clone ID: PAT_MRT3847_128854C.1
gctcgagcctgaatacaccccagcccccaaggttcacttataccaaataaaacctttgtggatggttatcaaactaaatcggttgatgtattaggcaaatcagaatgagtggacccaccctaatcaattgaccaatcaactgccacaagagagataccttgagaccctgagccatacaaattgctatagaccttgtgaagcaatcctttcggagaaagatgtagaaaatctgcgctcgagtgatggaaagctgcatgtctaatctg

SEQ ID NO: 31948 - DNA, 176 bp, Glycine max
  Clone ID: PAT_MRT3847_128855C.1
agtaacacccgcgcgaagacaacagaagggggggcacaaggggacacgaacccccggacacccgccggcgaaggacaagccacgggagcgcgcaagccaaaagaaagccaccgggcaaaacggaacagcaacagcacggggaggaccgggacgaggccccgcgagaaagacaggga

SEQ ID NO: 31949 - DNA, 296 bp, Glycine max
  Clone ID: PAT_MRT3847_128856C.1
tttaacaataaaaaaacttcttttggtttaactttaatcactagtaattacaaaggggccatacacttaaaatggacacaagtgacaaacaagcaatcctgtggggtgtgggccatagtgcacccaatttcatactatctctgaaagcccaaaatgatgaaaccccaaataccttgatgtgccattgaatggtaactcaaatattaaacaagtcaagccttggcacagaaattttttatactatgttttggaggaagcacttataactaagaaagcattagcctcatatagcatta

SEQ ID NO: 31950 - DNA, 725 bp, Glycine max
  Clone ID: PAT_MRT3847_128857C.1
cggacgcttgggcttttagtcctctagtcttctttatttatttattttcatccgtggaaattgcagacattataggggacttacaatacttactgctcaatcaactaagttagatctagagataagtacatgcatcaaaataaaattgtgtgaactaacaataattttttaaattagattttcaaataacaacacttagaatgtaattagatgcagtagttccttatgtacattttctgttgattttctattaggattgaaattttatctttaaaatcttatgttgacctttaatgtatttttttcttttgtatagatcactgatgcgtgactttaattttttattagagaacaattctggaaacacttaaagagactgtatctatgctttgtctcatgtcaaatgcatcttaacttgaactttggttctagtgatagtcttgagttttgaatccccttcgaagatgagggacttgattagatttctcgatacaatttttatctttgataagcattctctaattttaaaaaaaaatcaaataaaacaataaagttacataaatttttaacatgttaatgggtaattatgtctgaacaccataatatcaaatacactccacactaacacctacccccttcttttatcatattatattacttatcatatcttcactttgctcttttctttctctgggtgttatctagcatgtcatgtccatgtataa

SEQ ID NO: 31951 - DNA, 224 bp, Glycine max
  unsure (1)..(224): unsure at all n locations
  Clone ID: PAT_MRT3847_128858C.1
gagcggaaaaacccccacaattttccaagataatcttttttgcccacattttagggaanttcaaatagatgtgtgccctccagaaccatgattctcctaaaatacacgaatatataaactcatacattttactctttaattaacatgtgcatactttaccattttacttatactcacatcacatttctttcaccatatgttatatgcttttattaataactatt

SEQ ID NO: 31952 - DNA, 257 bp, Glycine max
  Clone ID: PAT_MRT3847_128859C.1
cccacgcgtccgggcactccgttttagatcaagagagcaatacgatttcagcgcaacaaatgggcaaatacccacgagaggatcaaaagcacccaaaagatgaaaacaagatcaaagccacacacaccttgaactagcaagcagccgaaaccgatatccccgttttgcctgccgaacccgacgaaaaatacgagcccgcgtatcaaacacaagacaacccactacatgagacaaacgcaaaagaatcctacaccaac

SEQ ID NO: 31953 - DNA, 374 bp, Glycine max
  Clone ID: PAT_MRT3847_12885C.1
tcggcctccctttttttgtttttgtaactgccctgttagagttactatctgacatcctcttgcaaaagcatttggtggagttttggctctacatgatgaattgggggaagcctttggtgtataatcagcaagggcattatgtcgagcagaatgctctcctggttcggcacaattgcgcacgttatcatgatatccctcattactctgtttgtgggtcctggggaatattcacggaaaatacccatgatacattagacatgacactgctctttatattcaaatgctaactgttgaggaagacacaaagtatctctgtgtccatggaaactgaaggagatctcaaaagtgattttgtgctattttcaatttgcact

SEQ ID NO: 31954 - DNA, 540 bp, Glycine max
  unsure (1)..(540): unsure at all n locations
  Clone ID: PAT_MRT3847_128860C.1
ggccccctcctgcccccgccttcctccctcaagactctggttcccaagctgaattcgatgacccttttggtcttagtgcccctggggatgccgctttgagtcgccaaagcgtttggtattcaggttgtgtaccttagaagttgttcatttaaccgatgaaataacctggaccatgtggtttctttcctcttgaagaatatagtagtggccgacccctaccctgatgttctgtgcaatacaagaattaagtttggtgcattcttggatgcgattggtggcatgggttttgactatgttgcctctgggcattatgcaaatgttatccacccatgtttctgatcggagggatgaacctttctgttctggaactatcacaagacatggtanaggatcaaacatactttctttcacacctctcacaatcccagctgaagcaacttcttttttcgcttgggntgtattcccaagnatggaagtccgcaagcttgccacanaattttgatctaccaaataangatagaaagggattcccaaggaata

SEQ ID NO: 31955 - DNA, 672 bp, Glycine max
  Clone ID: PAT_MRT3847_128861C.1
acgaggcttgatgcttgtggtttctctacaattattgggttaagagtccttaaagacaaggccctcataattgaagccaagggctctggaatctcaattgtatcaatgcatgacttgatacaagaaatgggctgggagattgttcgagaagaatgcatcgaagaccctggaaaacgaactaggttatgggatcctaatgacattcatctagtgttgaaaaataacacgggaactaaagccatcaaaagcataacttttaacgtctcaaaatttgatgaggtgtgtttaagtcctcaaatctttgaaaggatgcaacagttaaaatttcttaattttacccaacattatggcgatgagcaaatcctgtatcttcccaaaggccttgaatctttgcctaatgacctaagactttttcattgggttagttatcctttgaaatccttgcctctatcattttgtgctgaaaatctcgttgagctcaaattgccttggagccgagtggaaaaactttgggatggaatccagaatcttgaacatttaaagaaaattgacctgagttattccaaaaatctgctagagctcccagatttttcaaaggcctcaaatcttgaagaggtggaactctatagttgcaaaaactagcgtaatgttcatccatctattttatctctc

SEQ ID NO: 31956 - DNA, 804 bp, Glycine max
  Clone ID: PAT_MRT3847_128862C.1
aattcggctcgagctcgagccgaatcggctcgagtacggctgcgagaagacgacagaagggaccagggtttagctcaagttgtttcctcttcaagaaattctgatgttatatactttaatcttaaaattgccaacgtctgcatataataacataaatattattatggtatgcccttttcctaatattaataccaatcttggtatattttaaaatttattattactttaattaattagtagagtgtaacatcaccttcatcagtagctaaaagatagtacaataaatcccagatcgtgaaaatggtgaaaatactggcgtatccctccaccaagaaaggacaggaaggttctggggtcaccataatttccacatatatttatataagttttatttgtataaaatttaattgtctaaaatgtaatttatatatattattttcttaaatctgtattttcagtttttttatttttaattaaaatatttaattttttatttttaaaaaaatatgattttagtctctcattttttaattgagacatttcgtcttttatttttaaaaaatttataattttactttataagattaatttcaaacgttaatttatgtattttataaacattatctaacatatatttatttattatttatatgacaaatgtttttttgtttttttttaaatacaaaagtgcaaaacaattcattaacttaaaaaaaaaaaatgagatgtccacaagccgtgaacactccatcaccacagaacataccaaggtgctgatatcatgcagcaacccctccggagtcc

SEQ ID NO: 31957 - DNA, 170 bp, Glycine max
  Clone ID: PAT_MRT3847_128863C.1
cgatccacccagccaaatttatgatttttcgcgaaagggccaccagaaatacaatggactgggttttcgattgacacgaacctcctattctttcgatagcgatggaggagctgcttagaaggtgctaaggctcactacggttcatcgaacgctccatacgctattcaaaa

SEQ ID NO: 31958 - DNA, 164 bp, Glycine max
  Clone ID: PAT_MRT3847_128864C.1
aaaataacacacactggacacgtgattacgacgatgaaaagaggcgtggaaattttcaaataggctcagctttctcaacaggcgggttacgcctaatctcctttatggaattaatcaaactgccattctatagaaaacactaattccttatcatgcgtaggatt

SEQ ID NO: 31959 - DNA, 431 bp, Glycine max
  Clone ID: PAT_MRT3847_128865C.1
gatgggggctactgatctccctatttactggtgaaacttgatagtttagcatctctcattttttgctttcaaggtgactatcttagggttaaagagtttgacgtggtggcaccaagcatcagtcttctagtctgttactactttccaatgattgcggtttttttcaatgaaagttttccgagtcatgtattttgtttgttctttctttttggattgtttgatcattcttgtgagagccaagatggccaaatgatcatgcttgtatcttttcgaggcattggcttggttgcagccgtatagtttattttctctaattattatttgtttccatagctgtgaagtcataaatgttattactctgattaggacttaaaattcttgttctttcctggtatataaactttcatataatatttaaaaaaaaaaaaaaa

SEQ ID NO: 31960 - DNA, 373 bp, Glycine max
  Clone ID: PAT_MRT3847_128866C.1
taatgaataaaaattaaatttaaataaagaaatacaaccatcattccattcaactgttagaaaagaatttgactgcaaaaccgtatcctttgtaatttttaccgttattgactccttttgtaatttttacacgaataactatgtttttacaaatacatgcggcggtaaaaaaaatgtaaatactaatcacccctaaaattttgtgaaattacacaaacagataaagttcaaatacccctaacattttcagtgaacgcatgcgccattcaacgaccaggcatataaatttgattgcaaaactgtattaaaagaagttccggacctacttaaaagaagaaaaaaatcacggacctaatttaaactttttttttta

SEQ ID NO: 31961 - DNA, 945 bp, Glycine max
  Clone ID: PAT_MRT3847_128867C.1
gctcgatgagaactagtttcactaattatactttctcaagaaaaatttattactattgctaacacacaacatggtttacatatgatagttatatacaagaattaacggggatcgaaggcaggcatgtcattgcaacttgtttactacattggtatcatttgtttaatctgctgctggcgattttgaatattgcaattgaagcgtgagcatgaccatactttgtcctctggtaaaggtactacagggatgttgtcacagttgcagatttcaatcatcatgccatctgggtcgtgaaagaatagctgatcaacgaagattccactttcctctactctgttcttcacgtactctattttcatttgctgcagtcttttttccaccgctgctatgctttcacattggaaagaaatgtggttgtccttaggattaattggaacaggcttgggcatgccttctgggtcttctgattgaagaaggtgtattccaatgccataattgaataaccatgccccattgaagtctaatgaactaggtctcttaataggagaaaacccaagaacattcacgtaaaaatcaacggatttctccactgatgcacacacaattgagatatgattcaatgacttgagttgcaggggattggccattccgtttttcccttttaataacttcaatgtcaatgacagaacagtgaagaagaaaacaaaacgagaagcggtgctaaaaggttgtatggcggtacaaaaagagttaagcgaatcaaagaaatgaaagaatattctggatgggatctgatagagaaagagagaccaatgccgactacacttgcgcagagtaggcgttttctaccccagtcccttagcatactaatgtaaccgacatcaaaatttccttgtaaaagacttgcctagtaaagtttatttaaattatatgaggtttaatttt

SEQ ID NO: 31962 - DNA, 734 bp, Glycine max
  Clone ID: PAT_MRT3847_128868C.1
ccacgcgtccgcggacgcgtggggctgatcaacgaagattccactttccctctactctgttcttcacgtactctatcttcatttgctgcagtcttttttccaccgctgctatgctttcacactacaacagtgcacaattcgttcagtaagtatgcagttacacacatatatgactatacgtttaagtttaaatgattataggaagatagagaaaaaaatacttggaaagaaatgtggttgtccttaggattaattggaacaagcttgggcatgccttctgggtcttctgattgaagaaggtgtattccaatgccataattgaataacctaccaggatcattatcaaataaaaggcgataattttaatatgaaaaaataatgggatctttctgtttttacatggcatgttgaattaactaaaaattggtcagattggtttttcaacggaagaaacaatatgtcttcttaagtctatgaaattgtgcaacgatgtataatattacatactaatactaatattaatacaaaggattaaacataccatgccccattgaagtctaatgaactaggtctcttaataggagaaaacccaagaacattcacgtaaaaatcaacggatttctccactgatgcacacacaattgagatatgattcaatgacttgagttgcaggggattggccattccgtttttcccttttaataacttctgtcaatgacagaacagtgaagaag

SEQ ID NO: 31963 - DNA, 857 bp, Glycine max
  Clone ID: PAT_MRT3847_128869C.1
aacgcctgaagagacaacagcagaaaaaacttcaaacttggatctcatacgccaacacctctttggtgaaaacatcatctcagactcctcctcctttgtctccaatctccatcatcatcctgtgaaacttgaacccccctcatcaccagaatttgagtgcacctcatatatcttagataacaacacaagcagcaacttcttcacattccttgaaggctatgatttggtggcagacatgaagtttgtaattgattcagacaacaccaccaccatggtgatcccttcaaaggaggttataaagaaatgcaatattaattctcctgaagaacaaccaatggtgtcatcatcatcagaagagaagccaacaatgaaaaagtcagaacattatgatgaggcaaagcgttataggggagttaggagaaggccatgggggaaatttgctgctgaaatccgtgaccctacaaggaaagggacaagggtttggcttggaacatttgacagtgaaattgatgctgctaaggcctacgattgtgctgctttcaagatgaggggtcagaaggccattctgaacttccctcttgaggctggagagtctgatcctaaacctaataacagttgtggcaggaaaaggagaagagatcagaaccatgatcatgaattcgagcttccataagttcaagttcatcatggtgtttcatgagaaagtgagaagaatattagagttagcttaattagttgtgtggctagcattaagtttgttacttacctaggaaaataattaatatgcctgtgaaagtctgtacatagaaacaatgctaatgtgaaatgtctatatgaatctatgcaaagtatgttat

SEQ ID NO: 31964 - DNA, 707 bp, Glycine max
  unsure (1)..(707): unsure at all n locations
  Clone ID: PAT_MRT3847_12886C.1
tgcaaatatgatttgtaaatatgaactcatgcaagctatccaagttcctcaccactagttcaatcctagtggtttaacttctaatcttttaaaacatcttgtaggtccgagcccttcaaatcctggtgacacactttatgtaaccggtctatcttcaagggtcactgaaagagacctagaggagcatttctccaaggaaggaaaggtttcttcatgttttcttgtggtggaaccccgtacaacggatttctcgtggttttgcttttgttacaatggaatctgctgaggatgcggagcgctgtatcaagtatctcaatcaatcagttttaagagggtcgttacatcacaattgagcggaatgcattgcatcagctatgttggcagcgatcaaagatgatcagtacatccatgtgaactttagtgaaacagctaatcagatgcgtctgatcaactaaacatagcaactatattgcccaacaactttacaacctcagcattcaccaacaactttctaatcaggctttatggtatctcacaccaggcattaatcatgtgtgtggatataaatatttaaccatcttctccgaagctaggttatcgggatggaattttcttattaaagattctcttaatatagtctaaaattntactctgtagaatttataaaagcaagaaagatgtcacttccttcaagtttattagtggat

SEQ ID NO: 31965 - DNA, 196 bp, Glycine max
  Clone ID: PAT_MRT3847_128870C.1
aattcgagcgggcgctctatttattgggatattttattattataagggcacgaattgacaaatttatggacaactataccatattgggtaatattaacccccacatgtctttattttttgagtatacataaaccaaagatttaaaggatactgcccctcatgctcacgcttatttaacagaaaaagaatgggaaaa

SEQ ID NO: 31966 - DNA, 288 bp, Glycine max
  unsure (1)..(288): unsure at all n locations
  Clone ID: PAT_MRT3847_128871C.1
tgatttgtcccatgttctcaagagcatnctattagctaatgttttgggaatttcagttataagactctcaggtggtggtgcatcgctgagttgtgtgagagtgagaaagagagagtgtgtgtgtgtgcagaagatgtggccattcagcagaaaagggcttctggtttttcatcatcatccacggcagagcaagtcactgagactacacgtgtcctttcattgcgtggtgtccatgtgattatgggtgtgagaaatatncttgctgctaaagatgtcaaagaaacatta

SEQ ID NO: 31967 - DNA, 823 bp, Glycine max
  Clone ID: PAT_MRT3847_128872C.1
acttagtttcctagattaatttttgtaatctgattaattgatcgcatgtcttagaatttagattggagcataatccaacatcaaaaattagcagagggaataagaattgtctctcacaaattttttgttaatatactagttaacgtggcatctccaacatgctatcctctgattatttatttattgatttttgctattttccctttacagcaatcaatgctaaccaataatgtatcattgctgtctgcattgacctaccacaatttccttgatgcatatgcttattattttaaaaatggctctttatcagtacttgggtagactacatccataaactaattgaactaatctgattcgattatcacatatcttagtatctagatttatgcataactcaaaattaaaaactaacttgttcagtagacattgtctataactaatttcctttgtatatactagttaatgcttaccctccatcgtcatcatacatgtggattatttatttcttcatttttgcaattttctcttcacagcaatccatagaaagtaattgatgccttagaatggccgtcttggttgaacaaaatagcattgatttttttgctggagtttatgttagtgataaaaatgtgatgaatgttccctacgattctcctcatcggatgttaaatgatgaagaaaagagcacacaagggcattttatgcacccttgagtacgcaacatgtgcgtgcaaagattagtttaatgttgtaaatgtgtttttgtaaaatcagttgaaggaaattgaactcttatccaaaaataactgctaatccttttttg

SEQ ID NO: 31968 - DNA, 1365 bp, Glycine max
  Clone ID: PAT_MRT3847_128873C.1
cccacgcgtccgtacggctgcgagaagacgacagaaggggattcctttttggtgaaatataagttttcctctttagttgttgacttcttgtttatttttctgattaatgagaaaaatccactttggttgttcacttgtatatgtatctcagtctcaggtggtggtgcatcgctgagttgtgtgagagtgagaaagagagagtgtgtgtgtgtgcagaagatgtggccattcagcagaaaaggggcttctggtttttcatcatcatccacggcagagcaagtcactgaaggaattgatggaactggtctcactgccattgtcacaggagcatccagtggtattggcactgagactacacgtgtcctttcattgcgtggtgtccatgtgattatgggtgtgagaaatatgcttgctgctaaagatgtcaaagaaacattacttaaggagattccctccgctaaagttgatgccatggagttagatctcagttcattggagtctgtcaagaaatttgcatcagagtttaagtcctctggtcttccattgaatatgttgataaacaatgcaggaattatggcatgtcctttcaagctctctaaagacaaaattgaactacagtttgccacaaatcacttaggtcattttctcttgaccaatcttttgttggacactatgaagaaaacttcacgtgaaactaagaaagaaggaagaattgttaatgtctcctctgaggctcaccgatttacatattctgaaggaatccgttttgacaaaattaacgatgaatcaagttacagcaactggcgtgcatatgggcagtcaaagcttgccaacattttacatgcaaatgaacttacaagacgtctcaaggaagatggggtaggtatttctgcaaattctcttcatccaggagtaattgccaccaatctttcccgtcatatcagtccagtgaacggtctaactaaagctattgcaagactcgtgcttaaaaatgtccagcagggagcagcaacaacatgctatgtagcattgcacccacaagtgaagggaactagtggcaagtatttttcagccagtaatgtggccaaaacaacctcacaggggactgatgctgatttggcaaaaaaacctatgggatttcagcatggatttgaccaagtaaaaaacccaattgttatttgtcagcagagatagcatcatgcactcttattaaatgaaaaacatcagttatatgacttcctctgtaatatatttatagtgagattctgattcctacattgcatatacatgaatttcaggcttacaatctatatatatagtcctttaataaaactgggataacatgtagtacaatttacattgatc

SEQ ID NO: 31969 - DNA, 1444 bp, Glycine max
  Clone ID: PAT_MRT3847_128874C.1
aatactctcaattagaaaacatccttgatataatagtataattattaaaaaaaataacaatctttctcctgtttgtgattggataagcaatatatggaatacatgcaagtactattatttatatccacgttggtcggtaacttgtttttcaatttcaggtggtcgtgtggtgcaacgcagtcctttttctatttgtatgtttgtatgagactgagaaagatagagagatagtgtgtgcagaagatgtggctattcggcagaaaaggggcttctgggttttcatcatcatccactgcagagcaagtcactgaaggaattgatggaactggtttcactgccattgtcacaggggcatccagtggtattggcactgagactacgcgtgttcttgctttgcgtggtgtccatgtgattatgggtgtgagaaatatgcttgctgctaaagatgtcaaagaaacaatactcaaggagattccctccgctaaagttgatgccatggagttagatctcagttcgatgaagtctgtcaggaaatttgcatcagagtttaagtcctctggtcttccattgaacatcttaataaacaatgcaggaattatggcttgccctttcagtctctctaaagacaaaattgaactacagtttgccacaaatcacataggtcattttctcttgacaaatcttttgttggacactattaaaaaaacttcacgtgaatcaaagaaagaaggaagaattgttaatgtttcctctgaggctcaccgatttgcatattctgaaggaatctgttttgacaaaattaatgatgaatcaagttacaacaactggcgtgcatatgggcagtcaaagcttgccaacattttacatgcaaatgaacttacaagacgtctcaaggaagatggggtggatatttctgcaaattctcttcatccaggaacaatcaccaccaatcttttccggcataacagtgcagtgaatggtctaattaatgtgattgggagactggtgcttaaaaatgtccagcagggagcagcaacaacatgctatgtagcattgcacccacaagtaaagggaatcagtggcaagtatttttcagacagtaatttggcaaaaacaaccgcacaggggactgactctgatttggccaagaaactatgggatttcagcatgaatttgaccaagtaaaaaacccaagtgttatttgtcaatggagataatgaaaagcatacttattaaatgaaaagcatcagttatatgacttcctgtaatatgtttatagcgagattctgattcctgcattgcgtagacatgaatttcaggcttacaacctatatatacagtcctttaactagactcaagactgggataactagtatacaatttataagagagagtgcgttcaaatgggggtgtatcatttctccttaaagttagtaacttgatg

SEQ ID NO: 31970 - DNA, 435 bp, Glycine max
  Clone ID: PAT_MRT3847_128875C.1
tccagctcgagccgattcggctcgagtattttttgatataccttaccaaaacatagcttgctattagtatataaccattttctaaaaaaaaactgctagaaaaatattatatccctagaagtcgtttcttgttaaaaatggttatatactaatagcaagctatgttttggtaaggtattttttgatatacaaacttattttagaaacttattttctacaaattacttcaagtaatttattttcaaaagctacttgaagtaacttatagaaaataagctactttataaattattagcttttttttcttcatcacaattttatttttattattttatttgaaattttgtttaccattttattcaataaaattctcttatcttttttttgcttgaaaaaactcttatatctaattttacattattatacacgcaaaaa

SEQ ID NO: 31971 - DNA, 1194 bp, Glycine max
  unsure (1)..(1194): unsure at all n locations
  Clone ID: PAT_MRT3847_128876C.1
gttctgcttacttttttatttttattgagtcaatgggatgccgttttggtaagcgcatatatatcccgctaccagatttcaaggctcgccaacacatgttcaaggtgcatctaggagatactccccataacttgactgaaagcgattttgaatacttggctagcaggacagaggggttttctggttcagacatatctgtctgtgtaaaggatgtgttatttgaacctgttcgcaaaacccaagatgcaatgttcttcttgaagaatcctgagggtatgtggatcccgtgtggaccaaagcaacagggtgcagtacaaacctcaatgcaagagcttgctgcaaaaggacttgcttctaagatccttccgccccctattacgaggacagattttgagaaggtactcgctagacaaaggcctacagtaagcaaagccgaccttgatgttcacgagagattcacaaaggaatttggagaggaaggttaaatactgatggaattttcactttgaaggtccacactggtttcaaatatattgttataatttgtaatttatttagctgttggatcaaatgaaatgcatctatttcattttgttttggggatgtaaagtccccttttgtatcgaggtggatttataaaggtcgatactcatttttcttcttctaaattgtgtataacagaatctgaaatgatttgaaaaaataacttgtgtgatgctggatttttacttttgtctgctatggatttaggatgccatanaaaaaaaaaaaaaaaaaaaaaaaaaaaaaaaaaaaaaaaaaaaaaaaaaaaaaaaaaaaaaaaaaaaaaaaaaaaaaaaaaaaaaaaaaaaaacacaaaaacaaaaaattcaaaaaaaaaaaaaaaaaaaaaaaaaaaataaaaactaaannggggggggccgtcttaaaggtcccagatttatgatcctgctgctggcaaattatttttttttttttggggcccctaaataaaaatcactggcccggtttttaaacacctgggatgggaaaaaccttggggtaccccaaattaaaccttttggaaaaaaacccctttttaccaggtggggaaaaaaaaaaaaggccccccccaaatcccttttcaaaaaattggccccccttaaggggaaatgggccccccccttttacgggccctttaaaccgcgggggggg

SEQ ID NO: 31972 - DNA, 2453 bp, Glycine max
  Clone ID: PAT_MRT3847_128877C.1
tagagaaagaactattggaggaggaagagagaaaacagagggaggaggtttcaaggttagtggaggagcgtaggaaactgagagatgaaaaagtggaagctgaaaaagatcacagcagatcatcaaatctcagtaaggagaaggaccgtcagaaggaagctgaaaagaagcgtcaggaaaaaagaaaagagaaagataaggggtctagtaagagcaactctgatgttgaagaattggaaagaagagctggcaaggaaagtgaacggaagcgggatttcgacaaaaagagtgaaatggatcgtagggagcatcagaaatctgggttagagagtggcaagggacagaataccaacaatgcacaaaataaaaatgtcactgcaaacaattataaccgaggaggtactggaacaaggtatcttgaccgcatgcggggcacaattttgtcctcttcaaaagcatttggttttggtaggggtattaatgttcctagcactgtggtgaaagaaaacaagtttaatagttctgtagatcatgttcatagcaggagagaaatatgtcctcctgagcgtccagctgcaaaatccaatgtaaatggagatgataggaatatcaatcaccctgtactccctgaaccacaaccatggacagcagcacctaaaaagtcatggcagcaattatttactcgatcttcacctgctcctcaatcttcaaattcaaatgtaatatgcaggccaaattccaaaattcaagcagaagtcaaaagccctcagttgtctgcccagtcaccagttacacagtcatttactaatcctattcagtttggtcttccatcaccatttaatatttccacccatgcaagtggaccaaccagtagtagtctaggtttttctcctgctattgaaccattttttcctccagttggaaatacatcacatgactttagacaagatgagcaagagctttttgaagatccctgttatgttccagatccagtatccttgcttgggcctgtttctgagtcacttgataattttcagttggacttgggaattggctttggaacagacaatgaaatgacaaaacctcactctttgaaaagcatatctgctggttctgatgttaataagccatctctgattgaatccccatcatcccgagaaaagcatagctgttctaattggtttccaagtaccccgaatggccaagacaagcatggttttcctctggatgatgcagctgcaaatgagaagggaacatggcagatgtggagtacttctccacttgggcaagaaggtttaggtttagttggtggcgcaggaagctggctgttatccgcacaaaggaacataccaaacaaggatgattttgtgctttcttcatctcagaagactatggcttctctttttaacaaagaagataacataatttccagtacccattctccacaaaatgtttttcttcctaatggccaaagtggtgagaacttcagccctgttacaggttcaagtggttatgatccttggttacaaagtgctctcttcccaccattgtcaggtggcccttcagctcaggagggagccactcaaaatgaaactatatatggtagcccaagtggatctgctagtagccatgggcttgatggttctccagctaactgttggtccaaaaaggaatggcctgtacatggttctgtggaaagcattggaaagtctgctgtttcaaggccttatagtggaggtctacacccaacctccgatgtacagtcgttttggtcttttgattaaaaaagatgatagtgacagacaggttatgatgaggaacttgatctaaaaacaaacaactgttctcttgaggcaaatagcctcctttgggggaagagtttagaatactgaatccacccattgtatcttcttcctttcttcttttgtgaaggaagatttgatgtttacttaacgttagcgtcacaataggaatacatgttgttggatgcattctgagcaaggcaacaacaaacaaagagaggtgcccccattttgtcctttggagaatggtgcttcacattcccacttgtgtcatgatgatgtcttaatgagaaatgaactgatactaacttacatgacccgctgccaatggaatatagtcgtgtttctgtaacgtctcattattatgaatccagctgcatctttaatcacgtgcacaaagttgtcaaagtgttgacgaattaacagaaaaaaaatgttgaaaaagggtcaaaagttattttgtatgcatcagattttctagcttaaatggcttagttgcgcagatgtagcttgggtttggtttgcgttgggggcaccccgtaatagtttcccaaggatttcaattactcggaatttataattaatatagtattgacaattgaaacattaacaacaataaactttatttgagtgaggttggttatgtggatc

SEQ ID NO: 31973 - DNA, 545 bp, Glycine max
  Clone ID: PAT_MRT3847_128878C.1
agctcggcattcttattaaaatgaaattcaaatcatttcttttataaatttaaaaaaaattctttaattaaatattcaatgaaattaaatatttaaattaataaaattagtcctgtcttattccattgcttgaattggtttctttttacagcagctaatgctagtcaccgcacttagtcaatgagctagaatgggttctaaagatatccatagacatatatagatatatttatctatacatatctttagaaaaacaaaaggagggatatctcctaggacgtatcatcctatgcatagcagtggggaattatgggacaaacaataaatccgctggggttcagactaggctcaactcagagccatgacactattgggttagctcagccaacacattattccgagactatacacgaggatatagaagtacgacattgtatcaaaaatcatctacaaaaaaatataagactatcctctggcgttgagggaattggccagctgctgattcagagacgaattgatcctattcaaggtataatatatatggg

SEQ ID NO: 31974 - DNA, 210 bp, Glycine max
  unsure (1)..(210): unsure at all n locations
  Clone ID: PAT_MRT3847_128879C.1
cttcaacccaaacacaaaaagaaggaaagagatgaagatgcatgaaaatcgaaaaattccccaaactttacaccgtacaaaaccctatcccaattttactctttctcaaattcaatttcttgaaatccctcccctataatcatcgattatgcttcgngcaatctctcttcgatcccaatggactacatggaagacgacgcaaggtaccct

SEQ ID NO: 31975 - DNA, 292 bp, Glycine max
  unsure (1)..(292): unsure at all n locations
  Clone ID: PAT_MRT3847_12887C.1
gcagaatctggggttgttcctgctttggtctggtctctcagctctgatanattgggcaccggattcngggtgtnagccaaaaaagctttcttttgnntcntctgttnttcttttcggcanagtagaagatatnngtgattttcttctgtgaattnaattcgantcgtngcttctggcttcggtgcttgctgttttgttggcanaagttattggtccaattgaaatgaaanantttnagtganaagganacttagactgngtggtctggccatggagaattttatanggcana

SEQ ID NO: 31976 - DNA, 492 bp, Glycine max
  Clone ID: PAT_MRT3847_128880C.1
catccaacattagatgcttcaccaagtggatgaaacacacggcttgtattacatgtctctacaacttcttttagctgtcttccatttatgactcattggccattgtttactggcataaatagaacctcacacacaacaagtgtcttcaaaattgcaatagcgagacagactcgtgcaggaaccaaacatgccacgctcgttgcaacctacttaaggcggagaaagaagagtgtgaagaatgcgaaattccacgaccacgaccacgaccacaacattcggagagggaacctcagcaacccggtgagaaggaggaagactaagatgagcaaccacgtacaatcccattcccacgcccacaacctcgtcatgaagaacagcacgagcagatagaggaacaagaatggcctcgcaaggaggaaaaacgcgtacaacatgtgagtgacgaggaagatgaagatgacgatgatgaacaagatgaacgtcaattcccat

SEQ ID NO: 31977 - DNA, 533 bp, Glycine max
  unsure (1)..(533): unsure at all n locations
  Clone ID: PAT_MRT3847_128881C.1
tccaacgccgtccggcccactgcgtctcgtcccactgcgnntcctgcaatgggctattggatagggtgaataccgtcganntatctcacagagggcctatgtcgaagcggtgggatttggcttgggaaactccgagccgattgtcnttactatcggcaaaaccgaatagcgttaaagcgtcgccaacccttcttcgccactcgtcactgctgcgtccctttcgacccagttanaatccttcaactcccactcccctttcaccgaatctccttcaatttctcaatcgcttccctcacatttgtcatacaggttgaagctcccaagggttaccctatggaggcgtgccgattggcttatgggctatttgcaatggtcttctaacgcgtattggcagagagaactgccatcgatcnttggcgacgaccaatttcacttctcttctacgacaccaatatnccctcgccaggctggtctttcgggttctaagcggatcgtgtgtgctgcgttgaactgggttgtggatttctacaacg

SEQ ID NO: 31978 - DNA, 275 bp, Glycine max
  Clone ID: PAT_MRT3847_128882C.1
gacatcgatatctgcgttctttttccagcttatgcgtgacggcacacacacattttacactcttttcatcggctcgctgttgcttcgctgtagtctcatggatgaatcagtcgaattcagcgttctggattcaatgggaatcacgttcatcggggtgaattatcaaggcggtgtcgctaacgcgtgagattctctgaacatgcattgagtgtatattcgcaaccgaacatcggacaagatcagtcatctcaatgagaatatatatatgtatcgct

SEQ ID NO: 31979 - DNA, 299 bp, Glycine max
  Clone ID: PAT_MRT3847_128883C.1
tactcaacaccaaaaaccaacgggtctggacactcgaattttgctcttgaaattccacaaacgtgatccaaaagtatttagaagtttgtagaaaatcacaaggttatttcacaatccaaaaaatccatagaacataatgctattttcaaagatttaacaaatggtacttaaaagcaatgatgccttcactgccctttttagtacaaaagtggccctcccatctatatgaacaagccatgggcgaaatttacttcataacttcttgttttagaaactaaattcaaagctagcgaaattta

SEQ ID NO: 31980 - DNA, 601 bp, Glycine max
  Clone ID: PAT_MRT3847_128884C.1
gcttatcacatttttttttgtgttttgttgaaccgactgagcactactctttggattacaccatgcagtggacctgaaacataacaatctctggataccggatgactttaaattattactgaaaaaggatcattcaggcaaagttctacaaagacaaatgtatatggacatagtacagaccgggcactccccctgcctaaaaaaagaccattcaagatcacattttggagactacttattgacattaatgtaatattatgaaccctggcttctgtatcagcgagactggaattgcttagactatatgcgagctgcatcatggaactccttataacatggcatggcttcaaaagatacatccgatgggcttagaacttctcctacctccaattaggcataataagtaatgctgcgaattatcttcaaagctgtttttatggcaagaacttcttgggggggagaaagggaagctccaatcgtcattgatctgtcgcccaagctcataacccagatgccacaaattatccagagaacttacaaaacggcgtggagaattcatggttttccagattaaacaatcctttgaaggagcgaataaggc

SEQ ID NO: 31981 - DNA, 939 bp, Glycine max
  Clone ID: PAT_MRT3847_128885C.1
gtaaacaatgtttgtcatggcttgatcaacaaccaagtagaagcgtggtgtacctgtgttttggaagccgtggatcgttctcagtgtcacaactgagagaaatagcaaatgggttggagaagagtggccacagtttcttatgggttgtgaagaggccaacacaagacgaaaaaacaaagcagattcacgacacaacaacaacaacaacaacaatggatttcgatttgagttcggtgttgccaagtgggttcatcgagagaaccaaggacaggggcctggtggtgagctcgtgggccccacaagtggaggtgctgagccgcggctcggtggctgcgttcgtgagtcactgcgggtggaactcggtgctggaaggggtggttgccggggtgccaatggttgcatggccgctgtacgcggagcagcacgtgaacatgcacgtgatggtgggtgagatgaaggtggctgttgcggtggagcaaagggaagaagatgggttcgtgagtggggaggaagtggagaagagagtgagggaggtgatggagtcagaggagattagggagaggagtttgaagctgaaagagatggctttggctgcagttggggaatttggatcctctaaaacagcacttgcaaatttggttcaatcatggactactcatgtgtaacatttttttttatcattaaaaattgaaagaccaaaaaaacaaaacaaaaggcatgatatttacaataattcacgcatatgtcttgatattctgatatatcctagtgttgtaaaactgctttgtgttctcaagtgggtttaaactatgattacttggattgtagtttgtatgttagtggcattaataatgttgaagtggttaatatcatctttctaaatatgtatatcaaatttgatataatttagatattcattattatattatttctatttaa

SEQ ID NO: 31982 - DNA, 517 bp, Glycine max
  unsure (1)..(517): unsure at all n locations
  Clone ID: PAT_MRT3847_128886C.1
tcgcangcacgcgtacgtaagctcggaattcggctcgaggtgatggagcaccagcagcagcaactgagaaacttgcgagactttctgttggtctacaatcggatgacagaactgtgcttccagcgctgtgtgcccagcctgcaccaccgagctctggacgctgaggaggaggcctgcctgcacagctgtgctgggaagctcatccattctaaccaccgcctcatggccgcttacgtgcacctcatgcccgccctggtccagcgccgcatggcggactacgaggctgcctctgccgtgccaggtgttcctgcagaacagcccagagactcgccatcaggcagctagctagctgtccctgaccgcaggagagaaggtggttttgctgtgggcacattggtcttcaatactatcctcctgtctcagcctcccaggtactggaattacagacatgggctacaactggttgctagataattctttaggaatataaaaattgctgaccagaagcttccctaca

SEQ ID NO: 31983 - DNA, 514 bp, Glycine max
  Clone ID: PAT_MRT3847_128887C.1
caacgaattatgcctaaataaatattttgattacatttgatcatgcatggtataaagagaggtctttgaacgaattacactgttaacaggagaacactccgcttaaggtcccaaaaacaaggtggccttagggaacaaaattcctcagaacggattctgactcaaaacttcatgcggacagaacatagagtaacctccgaacctttcattacatgtttaatacgactcgaaaaccaggccgactagccagctctgctggctaacccgggattctgcgtcattgtccatccagagatgacaaactctgtctgaccctctattccttctgatccagatgctgttatgttacgaacccactgcaacggtcttgtacccactctcagtgccgacgccttgaggaaacgaacacgtaatccacatgctgagaacatgggaacctgaatctccattggaatcggcggtgtagctcaagattacctttctgggcttgtggaaacaagatcagctcatgcac

SEQ ID NO: 31984 - DNA, 2036 bp, Glycine max
  Clone ID: PAT_MRT3847_128888C.1
cggacgcgtgggcacatgaaagaagaggtaaagaagagagaagtggaaacacaaaacacaaacacaaacatgttcgatggagtaccagaccagttccaccaattcataactccaaggacctctctacctcttcacttacctttccctctccatacttcaggaggaacccccaatacgactaccttcccctccaattttgatccctataaccatccccatcaattgccactccaacccaacaatctcttgcacccattacaccacaaagatgaagacaaggaagaaaacaccaccgtcccgatgaacttggaaatccaaagggatcaaaggcaacaacttcccgagctgattgatccctggaataacgatgaagtgcttgcgctcttgaggatcagatctagcatggaaagttggttcccagaactcacttgggaacatgtctcaaggaagctagcagagcttggatataagaggagtgcagagaagtgcaaggagaagtttgaagaagagagtagatatttcaacaacattaattacggcaagaataataataataataataatagtagcaattatcggtttcttagtgagcttgaacagctttatcaccaagggggtagtggtgatcatcatcttgaaaatacgactcagccaccactgcagaaacaagacaagatgggccaccatgcattggagttggaagtagaaggggattctagaaacgttgttgacgcattggtgacaaaacaaaacgagcaaagcgacgaggcactagcagtggaaaagatcacaaaggaccgcaagaggaagaggcctgataggtttgagatgttcaagtgtttttgtgagagcattgtgcacaagataatggctcagcaagaagagatgcacaacaagctccttgaggacatgatgaagagagatgacgagaagttcactagagaggaagcttggaagaagcaagagattgagaagatgaacaaggagcttgagatgatggcacgtgagcaagctattgcaggtgatagacaagccaacattatccaaatccttaacaaattctcagccacttcgtcccctgcaagccacaccctcaagaaggtaaacaatgattcaaacctaaacatccacattacacaaaaccctaatccttcacaaacagaaaaccctaccttaagtgttgcacaagacacattacaagtgattccttctacttcttctacttcaactccagctcttccccagaaccctagttcttattctctaaatatccagaataataataataatattccagtagagacaaattcggttttgaataaagggaatgagaaagacgatgttgggagaaggtggccaaaggatgaagtgttgacactgataaacctgaggtgcaccagtgtgaacaacaacaacaatgaggagaaggaagggaacaacaaggtccctctttgggagagaatctcacaagggatgttggagttgggatacaagaggagtgcaaagaggtgcaaagagaagtgggagaacataaacaagtacttcaggaaaaccaaggatgttaacaagaagaggtcccttgactcgaggacttgtccctactttcaccaattgagcagtctctataatcaaggaaaacccgttctgcaatctgaaagccacttgaatagtccacctaatcagaatcccgagcaagtgacaccagatcaaacaacacaagctcacgagtcttcttctcaggtggggtctggtggtggtttcagtgtgcagcagcagcaggttgatcatggaggtgagaaaaccttgatgcaagtaccttctttggatttcgatcagttttaattcattgatttgtccatgttctgtcacataataagaagtgtagcacttttttttgaatttttgttttctggttaatgctggctttctttaatatagcatataaattgattgtgtatatcttgaaaacttagaatttggcgagcaccgacagctatagctagtttgaggaatgagacccattaatatttctattc

SEQ ID NO: 31985 - DNA, 182 bp, Glycine max
  Clone ID: PAT_MRT3847_128889C.1
ggcttatggacccccactgggcgggtttatgtttagattaataaacaggccaatttaattcaatagacaattgggtacaaaatgcattgcatggggggggcattctaaagggaacgtaacaaaaatgaagggggggaggattaaaccaggcccattggctacgaaaacccatttggtggagg

SEQ ID NO: 31986 - DNA, 280 bp, Glycine max
  unsure (1)..(280): unsure at all n locations
  Clone ID: PAT_MRT3847_12888C.1
gtgagtttgttgatcgagataactagaaacagtgtgatgaaaatgnaggnccatgttttcttcgntgctacnattttggnagcntngnaatgncangcgnacganangntccctcnccgnatgnacannnggnanggnggccgnaattcggaagtgaaatgcnncangtggaagnntgcngtgggagcncaccacatcttggcttgagacnatctgaagatggttgaacaacaagggatacatcatggcgaacaatatagatcagatccaaaacagttaa

SEQ ID NO: 31987 - DNA, 364 bp, Glycine max
  Clone ID: PAT_MRT3847_128890C.1
attcccgggtcgtttttcgcgtctgccgcgaccacaggtcgccgcaccttattaccggttacaaaagcaatcgttacttgatctcaagaatttctcaatttcttcctacttctttgtgtacgatttcttaagggaaagaaaatcactctctgtgctggtcacagacttcgtgaatcaaatttttttccactcctggtttatttgctgaacactctcctatttgatttaggacttcgtgtcagatttaaacttctcctgtgtttttatcagctctctgttcaattttaagttcaagctggtgaaatctcggattagctgctcccactcttctatctggtataggactctcggggtagacttttct

SEQ ID NO: 31988 - DNA, 524 bp, Glycine max
  Clone ID: PAT_MRT3847_128891C.1
gggaagcaaaaacctcttcccccaaatagggtaaatttacagggaaaaacaatcccccggggccccaaaaccccaggggcaactactttacaggacaatggacttttttttcaaccccatttaaaagggaaaaaaaaacggaggaatcttattaagcatgaaaaacccccccgggggcggaaacccccgggaatcaaaattcgacagcaggcccttgctaacgggctgaaaaagggaaaggcttgggggacacccctttggacatcttcatcttctatggcggaaaaaattaggagccaagctggggggccccccttgggaaaacccctaaatcagctgggaaaatttccaaaacaaaacccggggataactaatcaaggagcccccaagggagcccaagcaaacttcatgaaaagaagaattcatctaacaaaacatccaggaacatcccccctaggtaaagggctacatacccctcttcctctggaagaataatccaaccttttccttttgccaaatctcga

SEQ ID NO: 31989 - DNA, 428 bp, Glycine max
  Clone ID: PAT_MRT3847_128892C.1
cccatactccttacactattcctcatcacccaactaaaaatattaaacacaaactaccacctacctccctcaccaaagcccataaaaataaaaattataacaaaccctgagaaccaaaatgaacgaaaatctgttcgcttcattcattgcccccacaatcctaggcctacccgccgcagtactgatcattctatttccccctctattgatccccacctccaaatatctcatcaacaaccgactaatcaccacccaacaatgactaatcaaactaacctcaaaacaaatgataaccatacacaacactaaaggacgaacctgatctcttatactagtatccttaatcatttttattgccacaactaacctcctcggactcctgcctcactcatttacaccaaccacccaactatctataaacctagcca

SEQ ID NO: 31990 - DNA, 238 bp, Glycine max
  Clone ID: PAT_MRT3847_128893C.1
cagacggacataatcggcataccgaaacacgaacatgcgcaactcagctctcgtcatcgtcgcactcgtcttcgcccaggcagtggctctcaaccttcccagcatctactactactcttacacgttagtcaacaaggactctaacgcccccttcggccccagaggattcggtgaagaggatggagtgaactctcactacgtataccaagacggaacagactatcaagagtcatggagt

SEQ ID NO: 31991 - DNA, 3702 bp, Glycine max
  Clone ID: PAT_MRT3847_128894C.1
atgggaagcaaagatggatttttccgttatgcagatggctttgacaaattgctattactctttgggactttgggttgcattggaggtggcctacaaacccctatgacaatgcttgttcttggcagtttgatagatgattatgctggtggatctggacatgctgtgtccaaccatgttattgacaagtacgctctaaggctgctgggtgttgctattggggttgctctatcctcctttatagcggtaaagttgtgccttggtgacttgttggtcatgggttcgaatccgaaaacagcctctttgcatatgcaaggaacagcagaaagacaaacttcccgcatgagaactgaatatcttaaatcagtcctaaggcaagaagttggtttcttcgacaagcaaactgactcttcctcaacttttcaagttattgccaccataacttctgatgctcaaacaatacaagataccatggctgataaggtgcccaattgtcttggtcacctctcagcatttttctctagctttgtagtggcactcttcctttcatggagacttgcactagctgcttttccattttcaatcataatgatcatgccagctatcatatttgggaagaccatgaaagagctgggaaataaaatgaaggatgcatatggagttgctggtagcatagctgaacaaacaatctcatcaattcgaactgtttattcatatgtaggtgagaagcagacactagaagcgttcaactcaggtcttcagaaaagtatggagattggcataaaactaggtcaaaccaagggagtgattattggtagctttgggttgctatatgctacttgggcattccaatcttgggttggtagtgttctggtcaggacaaaaggagaaagtggtggccctgtgttttgtgctgaaatatgcatcatttggggaggactgtctctgatgagtgcactcccaaatcttggtttcatattagaggcaacaacagctactacccgaatttttgagatgattgaccgagtgccaaccataaattcttataaagaaaaaggaaagctcttaacacatacaagaggagagatcacatttaacgaggttgagtttagttacccatcaaggccagatgcaccggttctccaaggactcaatctgaaagtacaggcaggtaaaacagtaggcctagttggagggagtggttctggcaaatctactatcatctctttgcttgaaagattttatgatcctgtatatggtgagatattgcttgatggatatgatatacagacactccacattaagtggttaaggtcccagatgggactggtaaatcaggaaccaattctctttgcaacatccataagggagaacattctatttggcaaggaaggagcttcaatggaagctgttataagcgcagcaaaggcagcaaatgcacatgatttcattgttaaacttcctaatggatatgaaactcaagtaggacaattcggagctcaattgtctggagggcaaaaacaaaggattgccattgcaagggctttaataagagagccaaaaattctcctactagatgaagccacaagtgcattggattcacaatccgaaagactagtgcaagatgcccttgataaggcttccagaggcagaacaacaatcatcatagcgcatcggctatccacaattcgtaaagctgattcaatagtagttattcaatctggaagagtggttgaatctggttcccatgatgaactactccaactgaacaatgggcaaggagggacttacagcaaaatgctacaactgcaacaggcaataagtcaagacgaaaatgcattgcatcaaataaacaagagccctttagctatggtaaatcaaacaagtccaatttttagcaggcaaagtagcccaattcatcatgcatttagctcaacgcaaccgtttagtcccatatattcaatcagtattccagggtccagctttgatgactacagcagcgaaaactgggagaaatcttcaaatgcaagcttctctcaatggcgtttacttaaaatgaatgccccagagtggaaacatgcattgcttgggtgtttaggggccattggctctggaatatgtcagccaatttactcctattgcttgggaattgttgcatctgtctactttataaaggacaactctctcatcaaatcagaaatcaggttgtactcgtccatcttctgctgcatagctgttgtcaacttcctttcaggcctcattcaacattacaatttcaccattatggcagaacgcttgctaaaaagggtgcgagaaaacttgctagagaaggtgctgacttttgagatgggatggtttgaccaagaggataacagcagtgcggcaatttgtgctcgtttggcaactgaagccaacttggttagatcccttgttgcagaacgaatgtcattgttagttaacgtttctgttatggctttcttggcttttgtactaagtttaattgtcacatggagggtggctcttgttatgaccgcaatgcagccgttgatcattgtatgcttctactcaaaaaacattctcatgaaaagtatggcaggcaaagcaagaaaggctcaaagagagggtagtcaattagcaatggaagctactaccaatcataggactattgctgcattctcatctgagaaaaggattttaaatttgttcagaatggcgatggaaggccccaagaaagaaagcatcaagcaatcatggatttcaggttccatattgtcagcctcatattttgtaacaacagcatctataactttgactttttggtatggaggccggttattgaatcaagggctggtggaatcaaaacctcttttgcaagctttcctcattttgatgggcactggtagacaaattgcagagacagcaagcacaacttctgacatagctaaaagtggaagagccattagttcagtatttgcgatactggataggaaaagtgagattgaaccagaagatcctagacatagaaagttcaaaaatactatgaagggccatataaaactgagagatgtctttttctcataccccgcaaggccagatcaaatgattctcaagggcctcagtcttgatattgaagctggcaaaacagttgcattagtgggacaaagtggctcgggaaaatccaccatcattggcttaattgaaagattttatgaccccatgaagggatctatatccatagacaattgtgacatcagggaatttaacttgagaagtttgagatcacatattgccttggtgagtcaggagccaaccctttttgcaggaactatacgtgacaatattgtgtatgggaaaaaggatgcatcagaagatgaaataagaaaggcagcacgtctttcaaatgctcatgagtttataagttcaatgaaagatggttatgacacttactgtggagaaagaggagtgcagctctcaggaggacagaagcagaggatagcaattgctcgagcagtgcttaaggacccttcagtccttctgttagatgaagcaacaagtgctctagacagtgtatcagagaatcgggttcaggaggcacttgagaaaatgatggtggtggaacaagggtcacactcagagttattgagcatgggatcaaatgaagcttattactccttgattaggctacaacatggccactcaacttga

SEQ ID NO: 31992 - DNA, 3867 bp, Glycine max
  Clone ID: PAT_MRT3847_128895C.1
atggcacctgtggcttccaccaccgggaaggagatggagacggtggaggggaattgttctaatggcgagaaggaactatggaacaaggtgttcaagaggtcgagaattttgaggcatagaaatcccacctgggatatgggaagcaaagatggatttttccgttatgcagatggctttgacaaattgctattactctttgggactttgggttgcattggaggtggcctacaaacccctatgacaatgcttgttcttggcagtttgatagatgattatgctggtggatctggacatgctgtgtccaaccatgttattgacaagtacgctctaaggctgctgggtgttgctattggggttgctctatcctcctttatagaaggggtatgttggacaagaacagcagaaagacaaacttcccgcatgagaactgaatatcttaaatcagtcctaaggcaagaagttggtttcttcgacaagcaaactgactcttcctcaacttttcaagttattgccaccataacttctgatgctcaaacaatacaagataccatggctgataaggtgcccaattgtcttggtcacctctcagcatttttctctagctttgtagtggcactcttcctttcatggagacttgcactagctgcttttccattttcaatcataatgatcatgccagctatcatatttgggaagaccatgaaagagctgggaaataaaatgaaggatgcatatggagttgctggtagcatagctgaacaaacaatctcatcaattcgaactgtttattcatatgtaggtgagaagcagacactagaagcgttcaactcaggtcttcagaaaagtatggagattggcataaaactaggtcaaaccaagggagtgattattggtagctttgggttgctatatgctacttgggcattccaatcttgggttggtagtgttctggtcaggacaaaaggagaaagtggtggccctgtgttttgtgctgaaatatgcatcatttggggaggactgtctctgatgagtgcactcccaaatcttggtttcatattagaggcaacaacagctactacccgaatttttgagatgattgaccgagtgccaaccataaattcttataaagaaaaaggaaagctcttaacacatacaagaggagagatcacatttaacgaggttgagtttagttacccatcaaggccagatgcaccggttctccaaggactcaatctgaaagtacaggcaggtaaaacagtaggcctagttggagggagtggttctggcaaatctactatcatctctttgcttgaaagattttatgatcctgtatatggtgagatattgcttgatggatatgatatacagacactccacattaagtggttaaggtcccagatgggactggtaaatcaggaaccaattctctttgcaacatccataagggagaacattctatttggcaaggaaggagcttcaatggaagctgttataagcgcagcaaaggcagcaaatgcacatgatttcattgttaaacttcctaatggatatgaaactcaagtaggacaattcggagctcaattgtctggagggcaaaaacaaaggattgccattgcaagggctttaataagagagccaaaaattctcctactagatgaagccacaagtgcattggattcacaatccgaaagactagtgcaagatgcccttgataaggcttccagaggcagaacaacaatcatcatagcgcatcggctatccacaattcgtaaagctgattcaatagtagttattcaatctggaagagtggttgaatctggttcccatgatgaactactccaactgaacaatgggcaaggagggacttacagcaaaatgctacaactgcaacaggcaataagtcaagacgaaaatgcattgcatcaaataaacaagagccctttagctatggtaaatcaaacaagtccaatttttagcaggcaaagtagcccaattcatcatgcatttagctcaacgcaaccgtttagtcccatatattcaatcagtattccagggtccagctttgatgactacagcagcgaaaactgggagaaatcttcaaatgcaagcttctctcaatggcgtttacttaaaatgaatgccccagagtggaaacatgcattgcttgggtgtttaggggccattggctctggaatatgtcagccaatttactcctattgcttgggaattgttgcatctgtctactttataaaggacaactctctcatcaaatcagaaatcaggttgtactcgtccatcttctgctgcatagctgttgtcaacttcctttcaggcctcattcaacattacaatttcaccattatggcagaacgcttgctaaaaagggtgcgagaaaacttgctagagaaggtgctgacttttgagatgggatggtttgaccaagaggataacagcagtgcggcaatttgtgctcgtttggcaactgaagccaacttggttagatcccttgttgcagaacgaatgtcattgttagttaacgtttctgttatggctttcttggcttttgtactaagtttaattgtcacatggagggtggctcttgttatgaccgcaatgcagccgttgatcattgtatgcttctactcaaaaaacattctcatgaaaagtatggcaggcaaagcaagaaaggctcaaagagagggtagtcaattagcaatggaagctactaccaatcataggactattgctgcattctcatctgagaaaaggattttaaatttgttcagaatggcgatggaaggccccaagaaagaaagcatcaagcaatcatggatttcaggttccatattgtcagcctcatattttgtaacaacagcatctataactttgactttttggtatggaggccggttattgaatcaagggctggtggaatcaaaacctcttttgcaagctttcctcattttgatgggcactggtagacaaattgcagagacagcaagcacaacttctgacatagctaaaagtggaagagccattagttcagtatttgcgatactggataggaaaagtgagattgaaccagaagatcctagacatagaaagttcaaaaatactatgaagggccatataaaactgagagatgtctttttctcataccccgcaaggccagatcaaatgattctcaagggcctcagtcttgatattgaagctggcaaaacagttgcattagtgggacaaagtggctcgggaaaatccaccatcattggcttaattgaaagattttatgaccccatgaagggatctatatccatagacaattgtgacatcagggaatttaacttgagaagtttgagatcacatattgccttggtgagtcaggagccaaccctttttgcaggaactatacgtgacaatattgtgtatgggaaaaaggatgcatcagaagatgaaataagaaaggcagcacgtctttcaaatgctcatgagtttataagttcaatgaaagatggttatgacacttactgtggagaaagaggagtgcagctctcaggaggacagaagcagaggatagcaattgctcgagcagtgcttaaggacccttcagtccttctgttagatgaagcaacaagtgctctagacagtgtatcagagaatcgggttcaggaggcacttgagaaaatgatggttggaagaacgtgtatagttatagctcaccgtttgtcaacaatacaaagtgtagattccatagctgtgataaaaaatgggaaggtggtggaacaagggtcacactcagagttattgagcatgggatcaaatgaagcttattactccttgattaggctacaacatggccactcaacttga

SEQ ID NO: 31993 - DNA, 1386 bp, Glycine max
  unsure (1)..(1386): unsure at all n locations
  Clone ID: PAT_MRT3847_128896C.1
gttggctgatctgtacaacaaaattggcaagttcaaggagtctaagtcttactgtgaaaatgcactcagaattttcgggaagatcaagccaggggtcccctcagaagagattgctagtggcttgatagatgttgctgcaatctatcaatccatgaatgatttggagaaaggattgaagttgctcaaaaaggccttgaagatatatggcaatgctcctggtcagcaaagcactgttgcaggaattgaggcccaaatgggggttatgtattacatgcttgggaactattctgactcttacaacatcttcaaaagcgccatcgccaaatttcgcgccagcggagagaagaaaactgctttgtttgggattgctttgaaccaaatgggccttgcctgtgtgcagtgttatgctataaatgaggcagcagatttgtttgaagaggccagaactatattggaaaaagaatatggtccttatcatccagacactttaggggtctatagcaatctagcaggcacctatgaggtgttttgcagagtggatgatgccattgaaattttggaatatgtagttggcatgagagaagagaagctaggaacagcaaatcctgatgtggatgatgagaaacgtaggttggaagagttgttgaaagaatccggcagggcacggaacaggagatcaagaagatcattggaaactcttcttgacacccactctcagcttgtgaaaaacaatggcattaaggtcctataaacctgtggttgtatataaaaacaagattaactatttttcctcactatgatcattgcttgcatatttggccggggaaacaataacaaagtggaagtaggtttccactatccaattgtttgttactaaaggatgttcacaaaagttacttcatatatgtctattttctatagtgaagaggaaattccggttattcatatttttccttgtataattgaatttatataaatggtggaaattcaaatttctatgcataaaaaagtaaaaaaaaaaggggganttgagtttttggttttggttnttttagggggggttaattgggggtttggggtaattatggggataggtgttttttggggggaattggtatggggtaaaatttttggtgaagataagaggggggaaggttaaagggtaaaggttgggggggttaatggggggggttttttagattaattggggtggggttattggggggtttttggttgggaaatttggtgtggtgggtggttttatggatgggggaatggggggggggggggggtttggggtttggggggtttttgggtttgttgtttttttggttggtggggttggggtttggggtgggggggggggtttggggttggttgaagggg

SEQ ID NO: 31994 - DNA, 227 bp, Glycine max
  Clone ID: PAT_MRT3847_128897C.1
gcaaccaaaaatacccaggcttttaacccttggcaaggggctcacagggtacaccttcgggaaaaagaataggccgaaaaagaactcgaccgccaaagagggggggcccttgctttttttaaaaagaaacattttaccccaaaaaaacttggcccaaaaacgacacccttaaggggggccctattatagggtaaggggaaatgaattcccccgatacttccggggat

SEQ ID NO: 31995 - DNA, 148 bp, Glycine max
  Clone ID: PAT_MRT3847_128898C.1
agttagcattggagtactctaggctgggaagatgacctaggatttggtacttattcttcatggatccaagctgtcaggggagcattatttgaacacacaggaattcatcgatgccgaggcagccgaccttagtgcgatgctttctgca

SEQ ID NO: 31996 - DNA, 210 bp, Glycine max
  unsure (1)..(210): unsure at all n locations
  Clone ID: PAT_MRT3847_128899C.1
ataangacgcccataaagccntnccccctttatttaaatannaactgtaactagactaaacagatactcaagctggggccaacacgnncaccccccccatcatttttttaacaaaaattccgntncccccctnaaaataaaatctcccaaacactctctncctcaaatttnncccttgttaacaacttcttccaaaggctcaatgggcac

SEQ ID NO: 31997 - DNA, 327 bp, Glycine max
  unsure (1)..(327): unsure at all n locations
  Clone ID: PAT_MRT3847_12889C.1
ccccccataccgacgctggcccctacggacacactgaactagagacccgagacctacgataccggatgaacgggctcagcccctacctcggtccctgacgaataaccatccacacaaattcctcctcagcccagtccccgttgaatgatcatgcccccctcgcatagcggagttcaagcccgttcctgatgttgatcaccttcaggatttactggcctttcaacatcaaggacctanagcttttggctttttttggaactcggaacttgggattcattgcaccaagaactaattgagattcttagctttgctatggtcacaacctaa

SEQ ID NO: 31998 - DNA, 433 bp, Glycine max
  Clone ID: PAT_MRT3847_1288C.1
cggaatattatatgtcttgcgggttgtggtgcggtgtgtgttagttatctagaacccgcaaacccgcgcgggcatatttctaaccctgcgggttgtacccaaaccgcaccgagtgcacccctagtcaatattgcagctgtccaatcccctgcgtcagtggcgcacctatgtgaaaaacgaagagtcaattctgattgattgagtgagagatcacatggcatctattattagaatgttctacttcgctcgatcggcgcacgcgaggcccggaaatacgcttgaagtattgcagagtttgagcccatttactctccaattatagttcttatacatcacctattctaaatataggtaaacacccactcctttggttcattccagctttctatccatagccgcactgtgaaacaagccagaatttttcgcaaataca

SEQ ID NO: 31999 - DNA, 337 bp, Glycine max
  Clone ID: PAT_MRT3847_128900C.1
ggctcgaggggagggacagggttgagagttttttcggctctagcgtgtctcatgctgggactctactactcgtgattgtggagcttcaggagactagcactgctattccggctggttacactcgataacgacagaagtcttatgcatatcgtgatccacgctaccgacccgtctcctactccatatgcgagcttgacctattccttgactccatctagctcattatcccttgctgttccagccatattagccttgggtgctcatcatgcggattcctttactcgtactttggccagatctgctcatgaactccattacagattgcatacctattgac

SEQ ID NO: 32000 - DNA, 413 bp, Glycine max
  unsure (1)..(413): unsure at all n locations
  Clone ID: PAT_MRT3847_128901C.1
tttcacaccccccgaataaataacccccnncccggacgcacgcacaaaggcccagtctctacgccggaacgcccaattaccaccaggacaatccagaaagaatcaatttcacgctataaaacccagcttgaacgcaaaaacataaaagaaccaacgcgacgccactgcaatgacgatcgaccaaactaatgaaccagaacgagagcactcctttgcggcgcccgaactgaacaagccacactgaccttgatcccccccctcctcactagaaacagacgatgacgcgggccctccggctcttagaacctgacccccccaactggctcgagccaacacaaccaacatggtgaacacacaagaggcccgagctgccaataaaccaagccacaagcccttgaaaacaaagccggcaa

SEQ ID NO: 32001 - DNA, 1298 bp, Glycine max
  Clone ID: PAT_MRT3847_128902C.1
agaaaaataaaaaatatatattaaaagattagctaatattttctttttgaaatttctaaatatctgccaatggtggcatgacctggaaagggagtatatatattccctgtaagatatatccgtagtcctatatcaaaggaaagaaaaattccagaaaggggttccctgcgcaatggttcagttcatgtcaaaaacaaaacagtgtgctatttgtttgtcacatattttacttccaaaagtttcagagcttataaagcgacgttagatatatatttcaccacttatatacgtttttctttcattttctcagtggattgcactttcgccttcaaaattatacaaccaaattaaaataaaaaataataataataataataacaaacgcaaatgacagaaggggattaaaaaaaattatgaagttgccttccttcttatatatattttcacatcataagtcataacatgatcatgatcatcatctgacatcatcacaatcacaaccacgtcatcatcatcgctgctgctgcagctccatcatacgagaaaagtcctcgaagcagacgaacccgtccccatttctgtccacaccctctatcatgcgccggcactcctctaacgtgcaccgctcgtcgccgatggccttgaaaaccctaagcagctcctccgccgagatcctcccgtcgcgatccgtgtcgaacacctcgaacgcctccttgagctcgtccggatccgacccgggtttcagacccgacccgacgtagctcatgagcctttctacggtgatgccgtcgccgtcgacctcgccgagcatgaccgccacgtcgtcggggcacggcgacgcgccgaggcacgtgaggagggcctcgaggtcctggcgcgtgacgacgccgtcgttgtcgcggtcgatgaggcggaaggcctgggcgaggtcccaccgcacgtcgacggcggcgacgtcggaccagtctccggagacgcccgggaggacgctggtcggagtttggttaccggcggaaggcttgtgatttgtggtggagtcgtcggaggaagatccggatccgaatgaaggtgggtcggagcgtgagactaaagatcgttcctttttgcgaaagaagcgtttgggactgagtttgagatttttggggttaatgctgctaatgagcttcattgttttcggagatgaaaagagaagcagagaagagaaggagaaggaagaaagagtgggggttgagggtaacgagagtgccaggtgaggggattaaatgggggcgccatgggaggtccatttctcactcctg

SEQ ID NO: 32002 - DNA, 204 bp, Glycine max
  Clone ID: PAT_MRT3847_128903C.1
atatcattgtcatttactttaaaggagcaatctcctaagacaacaggtcattaaaaacgccatagacaaccatacaaattcgagtccagtcccaacaaaaaacccacctttccgtaaaattaaaccccttaaacttgaacgaattcataggcctacccgtatcctccaggaaaagttttttcccctaaaaatttaacaattttt

SEQ ID NO: 32003 - DNA, 391 bp, Glycine max
  Clone ID: PAT_MRT3847_128904C.1
agaaaaaatattttaaaattttaggaactaaaatgatgttctccaaagttagagactaaaataataattaagtctttttttaaatgctaaccagattatgtacttttgggttacaatttgacgtcaaaatctattagaatttttctattgtatgtgcaaaagttatactttgttcaactgtttgataaactactatcttctcatcctggatgctgacgctttggattggagatgctgtctcttactgctaggcaaaccactatcactgacacttccttccccaagtctgtcatgaacatcagaaaattctgctctccacgaacgcaggggaacaaggtaactgtcatccttgaccttggtgcttctcctccactcctcgtcacggcgtttc

SEQ ID NO: 32004 - DNA, 241 bp, Glycine max
  unsure (1)..(241): unsure at all n locations
  Clone ID: PAT_MRT3847_128905C.1
cttacaacagttgttttcaagcattgttatggcaaatggttaagagcacttacgatgcttcttttagttgttatgggtttttancttttcctttganttttaccagtggtgatatntgtgannttgattttagtgggtaaaatcagcagagcgggccttatggcagtttatcatgatattattgaattttgtaatatgaattatcgggtttcgacaagaattattttattcatggggctgc

SEQ ID NO: 32005 - DNA, 401 bp, Glycine max
  Clone ID: PAT_MRT3847_128906C.1
cctacttccgcctgcccgagcccaagggccgaacctacggtgaactcgacattctcttcgaggaccgcatccccgcccgcaagtttgccacgaccaaggtcgacgagtttgccgcggccgagcgcgacgccgcgcagggcggcggtggcggtctcgtccactagacgatgaaagtgggtggtggaagtagtgtggcgcatcgtaggatttctacctcgctctcgctctctctctcttctgtggcgtctgcccgggtgcatgcgcatttgtatatagtatagctcgcagatatctagcgtcccggtaaggggtcctggtgctgttggcggtctgactgtggtggctctttactttctcttgcttcaacgtcgattagcaatgaaatgcaggagatgcacgat

SEQ ID NO: 32006 - DNA, 297 bp, Glycine max
  Clone ID: PAT_MRT3847_128907C.1
ttcttttttttttttttttttttttttttttttttttttttttttttttttaatgctaaatgaagttcattttaataactaaaaaagattcaaatttgttcataaaacccattcaccggaaaacaaaattcgtaaaacttcagagaaactattgaaaacaaacataaaaattccgtcgctataaaaaaaacttggtttctccttctaaaccggggggggggccaaaagagccccccccgatacctttaaaaccttaaatttgaccccaggaatatctaccaaagcaagaaaaaacaa

SEQ ID NO: 32007 - DNA, 263 bp, Glycine max
  Clone ID: PAT_MRT3847_128908C.1
tagctcttgtattctataactccatcttggtgttttcagaaacctatgtgtcacaactctttaagtatgctggtatctgcaaaagttgtaagtaataaatttataagcaactgaacttggctttgtgaagttacaacatatctgtgtgtctcatatatacctttgttgggtgatatgacatcttattgtgtgtcttgtagctatatatgcacgcaaattactctgattcagctacttatctatatcgaaggtttttcaattat

SEQ ID NO: 32008 - DNA, 445 bp, Glycine max
  Clone ID: PAT_MRT3847_128909C.1
ggcccgaacaaaaaagtttagatttttctcctttaaaccagggggtttaccatatgacgacctgcattatttacttcaaaatttcacaggattaccttactttttcatattatattacccggggggaaacatgttatgcctttggcccttcgggataaggaaaaccgagggaccccttaatatttttaaaacatgacccttagggccttttttggttgccctaaaatgtaaaacactttttcttccatttaaaatggtgtaaaaccggctaaagacaattgggcaacaggggatcccttgtccatttaaccatcccgaaaaactattggcccccacttcaatttgccctttataagggcctcaagggccctgaactgggcaacatgaaaacccaatcctccaattgatcctttttcaacggggataaaaacctcatgggattttg

SEQ ID NO: 32009 - DNA, 236 bp, Glycine max
  Clone ID: PAT_MRT3847_12890C.1
cccacgcgtccggtcatcgttgatatcaaattttataaaatataaaatactataggtataatagggtaaaaaaaataaagcttgtcggcttggttccatataaatttgatgggtgcggcatcgtgatgtttttgcgttctttcatgttggtataatttgctgcatctcgtgctcttctgcaaattgttgtttattgcatgagttttccaaacgctgtgctgataattttgcagttt

SEQ ID NO: 32010 - DNA, 1211 bp, Glycine max
  unsure (1)..(1211): unsure at all n locations
  Clone ID: PAT_MRT3847_128910C.1
ccacgcgtccgcacaaatcacttcaaaatccttctctgtttgttgcattttgagtcacggagtcctttggggttctctctctctcgcgccgagctccgaacgcttcagggaatttcctcactcagatttgagctgaaaattgcgcagtgagttcacttcaaattcagagctgattaattgaagttttttgcaataatagttcaataactgactcctgtctctaattctgaagttattgcttttgcaatttgtgattctcccacttttaaaggttaatggctgcgtcatggcttttgtaattctgtctactgatgtgaaatgatagatttttggaactattactgggatccttttaagaaacttgcttgccacatcttaatttataaaatacaaatatgcttacatggtgggggaaatcatcatcaaaaaaaaccaagaagaaagcaaataaggaaagttttattgatgcatttcaccgaaaatttaaaatcccatccgaaggtaaaccaaacagtagatctggaggatctcgtagacattgcaatgactcaatttcagagaaaggggctcagtctcctcctgaatcaagatctccttctccttccaaagtgggaaggtgtcaaagctttgttgataggcctcatgctcagccactaccacttcctggcttgcacccatcaaatataagccgagcagattctgaaattagtataccatcatctagaagaagacatggaaagggctccaaaccatcgttgtttcttccactaccaaaaccggtgtgcatccgtggtaggttgaaccctgctgagttggatggagatttggtcactgcttcagtctctagtgagagctctgctgatagtgatgaaccagtggactctcacaatcgtagtcctctggcaactgactgtgaaactgggactagaactgctgcaggcagtccctccagcttgatgcagaaggatcaatcatctactgtttcccaaataaactcaagggaagccaaaaaaccggcaaatattctgggtaatcatatgtcttctacttcaccaaaacgtaggcccttaagcaaccatgttacaaatctgcagattcctcctcatggtgccttcttcagtgcgcctgacagttcaagatcaagtccatcaagaagtccattgagagcatttggtaccgaacaaggtgtgaactctgncttttgggccggg

SEQ ID NO: 32011 - DNA, 115 bp, Glycine max
  Clone ID: PAT_MRT3847_128911C.1
gcaggcaaatttcaacgtcaacattcatgggcaaagaaattttaggccaaaatttagggaagcggggaaacccttacccaaactgaaggggtttacctaccctttggcaacagat

SEQ ID NO: 32012 - DNA, 324 bp, Glycine max
  unsure (1)..(324): unsure at all n locations
  Clone ID: PAT_MRT3847_128912C.1
acggctgcgagaagacgacagaaggggttctctttggagtgcttcataatacatttcaaaaatgtttctcttaacaactgtagtcaacaattaaaggcaagaataaataatatatgttaaatttaagccagtaataaattaaatattaattttaaggcaacaataaatttattagttgaaattttaagtatccaattacattaaatactcaaactaaaatatttgtctttcatagtaattctatccaacttagagagattgtcttccccaaagaatgctcacgatttttaccanaaaatagtatatacttttttatccatgata

SEQ ID NO: 32013 - DNA, 334 bp, Glycine max
  Clone ID: PAT_MRT3847_128913C.1
gggtaaacgggaaatgaacattataattcattcatcggctaaaaatcttatacaaataatctatttttaaacctagggaaaggaactttggccaattccaaccacattggcgtttttttttttaaactctttcgggaaaaaaattagggttccaaagaaccaccataattttaattaaaacttagggtaccaaccaaccggggggggtctacttacaccaaatttccaaggggccacactcactgtcaacccagcaaaatttttttttggttatacaaatagttgagacttgggggcgaaccaacaacaaaaaaatttgggcggggctgggttt

SEQ ID NO: 32014 - DNA, 298 bp, Glycine max
  Clone ID: PAT_MRT3847_128914C.1
actcggattagcctcaagcttatggtgaatcagatttctaactttcaaaatgccccattaacaggatagggggtagtctgacttcaataacactgcacaccctaaccccattaagctcgactatgcactacagaagcctccatcagcggcagtgcaagaagggtcaccgcataaccgcaacccgtgcgaggactcaaaaaacgctgtctatcctaccaacgagaaagcataaagaggaccatcgaacatacataactaccagagaccaggcgacgcctcaattctaactccaactcca

SEQ ID NO: 32015 - DNA, 261 bp, Glycine max
  Clone ID: PAT_MRT3847_128915C.1
gcttggccccaaaaaggggtttccaattttataaaattggaatttcctcctgcagtttaaagaatttttggggggaaaatgaaacgccccgacttaaagttccaaaaaacttattaaacaaatttgattaaccctctttactagttccctaaaaatggaaagaaacccaaattttccaaaattttaaaaagactgggggcctgtcctttaaaaaaacaaaatccttgcttaattttttagtctaatgattttcctggggcc

SEQ ID NO: 32016 - DNA, 389 bp, Glycine max
  Clone ID: PAT_MRT3847_128916C.1
aattgacaagaaccatcttttaaaagaaggcccaaacaggagagagagaatttaacattgaaacgtgtttggagtcatacaaaacactatttgccaccatttttatagcgcaaataaggagccattttcacccagtgtcctttcatcgggagtgaataaccacaaaaagtgaacaaggattataagccctttattcacttgatgtactaaggaaggttcaaaacgtataggcggaggttggcccaaaaaacacccgtaatgccttccaaaaaaaagccttcggtgaacttggcccgcccatcaacatatgggagctgatcgggcttatttttgccggcccctaaggtaactgacagggcaatgcttggctcttcttctatgaaagatga

SEQ ID NO: 32017 - DNA, 398 bp, Glycine max
  Clone ID: PAT_MRT3847_128917C.1
cccgctctgcctagcggcgagctggtctaatgattggcccccactagccgtccacagcttgccattcgaccttgaagcgctcagggtctggctgcgctacgctcattatcgtgcacacatataacggtctgtgcgtccaattgctcgaatctgagatccttgttgatggcccttatgacattgatcgctgcgcttacgtgactgacacagtccttgctgcttgctgcaacgcctctgaactagcaccatgtacttctgcatggtacccttctgaactccaacatggagactcctgattacatactctaacatggggaccactgatgggatcgcacagtacagcgaccgcaccctccacaggaccggctatgatactgtgcttgctactgtcttcctct

SEQ ID NO: 32018 - DNA, 1922 bp, Glycine max
  Clone ID: PAT_MRT3847_128918C.1
gagagagagaactagtctcgagtttttttttttttttttttttaaagaaatgtaatcactttctaggagtagttcataagcacaagtaataaaatcatgtacctaccaaataaacagtgaaaagcacactttgtaggaagtaataatacagaattgtagacctagtttatgtaatgtgccaacctaccatcatagaaccaatgcttcagtgaatcacaattccggattcaaccatatggctgcttttggagctgaaaactctagcgcaggcaatttctgaaatcagcctcaaaattggagctttaagtggcattttatcttctcgaccgattggttgcatatgcgagagtgcatattgtgctcgtgcaattagcgagaaatattcagggtcatcacagtaactttccatggcatatcgtcatacttccatttcatacttaacaattcatgtgcgtcaagatcttctgcggcttctgcccaagggaagccatagttcagaggctttactcatgtaggaattttaaggtcaaactattcttcaaagaacaagggttagaaggtccaagaccacttagataatgccatagctttatgaaattcatattttcatctgcttcatccataatgaccatttaactgcttctaaaaatttatcatttcgtcgcagtgcagtgataagattagtgtagcttttcttgtcaggttctattccattttttctcatttccttgatcaaacctacagcttctgcaaccattcctgcaatcccatacgccttgcatcaatgtgttatagctgcacaaatcaggtctgagtccacattctttcaattctgtaagcacattagcaacttcattaatccatccttgttctccatagatattgatcaaagtgttgtatgtgtagtggtcagaggcacaattggaatccttcatcttttgcaatacagatctaaatgtctccatttggccatctttcccataagcatccagcattgaattgtatgcttcgagagaaactgaaaacccatcgaattccattttctggactgttgatgacatgttgttgaagtctttatttttcccatatgcagctatgatagtattgtaagtgatcacatcaaccaggccttgtttcttagccatgcagtacagcctccaaaccttgttgaaaagcttggctttcccgaagacatcaagcatgacattgaaggtaattgtgctaggtgcaaatccatgctgtaccatctcgtcaaaaagcctggaaagctcatctactggaagagcctgagcacagcagtttaggacacaattatatagttcctggtcccaatcctctctactttttgagattttgtagtataaatcagccaatttagtcgccatgttacatctttgataaatacgcagcatatcacataacaaaaacttgtctggaacaatatcaggccgcatgtcaattgcatccaaaactgcacaagcatccttcaaagctccagctttgacatacatccttacaacaatgctaaaagcaatcatatccaaggcaactcccgaagacttcaacttcagatacaacacttcggcatccttgaagaggcccatgacactgtaaatgtcaatcatggtgcacgcaatgtgcatgttcggattgtcgtcacttttgggcattcgactgtatatcttcacagcatcctccagcaaacctgcctctttgcacgagcaaatcagaagatgatacaggttatcctcatatctaggatcttgccacttcttgtcattcaacactttcaaggcatcctccaccagccgatgcttcacataagccatgacgagagtggagcaagaactttggtttactaacacatgctgataaaacgaacctttgagcaaacgcggcaccttatgaaccttcgcagccct

SEQ ID NO: 32019 - DNA, 366 bp, Glycine max
  Clone ID: PAT_MRT3847_128919C.1
tggtgactggacgtagggacaagggtgtagccgaaccagtataaaactgagtttacattttctcttcccttaatctcctttatttattattgctttatattcatattcaaattgttttatttgaattaatatttaagaagattttcattaagggaattcataacttaaataaaaagtgaaatagatttttaattagggcaagtagtttggaatatcttaattcaaccccccaccccttcttaagatatctgaggccacttgtctaacaagtggtatcaaagcttcattcttgtataaagtttagaagcttcaagaaaaagatggtctcagcaaattccttattttcagaagggaattctatcaata

SEQ ID NO: 32020 - DNA, 218 bp, Glycine max
  Clone ID: PAT_MRT3847_12891C.1
cgtgtgtgtgcgtgtgtgcgcgcgcgcgcgcgcgcgcgcgcgcgcgcgcgcgcgcgcgcgcgcgcgcgcgagcgcgcgcgtgcgcgcgcgcgcgagagagcgagcgcgagcgactgcgcgagcgagcgtgagcgagagagagcgcgcgcgcgagtgagagagtgcgcgctagagcgcgcgctcgtgcgagcgcgcgcgcgcacacacacacacacaca

SEQ ID NO: 32021 - DNA, 442 bp, Glycine max
  Clone ID: PAT_MRT3847_128920C.1
ggccgaaaacgccttgcaggtcataatgagcgtagaagaaaaccacaaatgggtattcacccaggaaagtctgggacgttgcttcagccatgtggggatagcagattccagggatccatgctaacatcatcttttatccgaccagagatgcttccaagtggggtcatgtgttccgagaaatatggtatgagtgacttctggagacctatcaaagcagaacacgggactggttttaggaatctttcttctatggctgcaaccaatggacatcctctgccaagatctttattttcatcatataacggaaaacaatttccctttcttcatgaaaacagttctacatccaccacaggaagcatcttctgtgagagcaatagccactatccatctgcccttggggcccaaaattctggattgagaccactattccaggacactgtag

SEQ ID NO: 32022 - DNA, 853 bp, Glycine max
  Clone ID: PAT_MRT3847_128921C.1
ggtggaagatttgagcagaagaagacatgtagagattggaatcatccgtgtccctctctctcatctctctttctctctcttcccttggtttccttactaattactttaacccaataatccaataactacatacaaagttgaacaataccaccatcatagcgcatcatcatcagaattccaaggggaattgttgatgtggtggtgagaatgatgtatggggagtagaactacctggagggttgttggtgttgaagatgacaagggagctgaaagaggaatgccgagcttcaattctgagttacccaattccaattcatgctatacagaggggaacacaattgattcttttcgtgtttctgactttggagcatttgatcagtcatatcacatagaggatgctgttgacctcagtggaaacccagtttacaattcactaaaggtaaatagccaaacaatttctccgggttctgttcacattagtagccttggtcagttgccaatttcactcgaaaaaagcccattgaacaatcaaacagagccaccgcataggttgcgattacagaaggttcaatcatcaaatcctggcacaatattagttggtaatacagataactgggaggagtctaccatggctgatgccagtcccaggactgatatttctacagatggtgacactgatgacaagaatcatccgtttgatagaaatcaagcccttactgctgtttccgactctagtgacagatcgaaagataaatcagatcagaagactctccgcaggcttgctcagaaccgtgaagctgccagaaaaagccgcttgcgaaagaaagcgtatgtcccacagttggaaagtagt

SEQ ID NO: 32023 - DNA, 261 bp, Glycine max
  unsure (1)..(261): unsure at all n locations
  Clone ID: PAT_MRT3847_128922C.1
aaattttcagctttatatctcttcacagaaactctaacaactgttgctnccatgaagagataacatataacctgtttataatccttttctttttgtacaaagggaaagcaaaatatagtttaaaggccacaaattaagttttgttcctcccatagccgtagaacttttttgatgcaaatattttactgcacagtttaactgcataatcttttctatttatctgtaaacatagtgaataacacaggcaactttgtatggtac

SEQ ID NO: 32024 - DNA, 359 bp, Glycine max
  Clone ID: PAT_MRT3847_128923C.1
gccgcgtcgtagctcgtatcggctcggaaaaggggggggcggaaaaaaaaaaaaaaaaaaaaaaaaaaagatgaaaaacaaaaaaaagggagaaagacatggggaactcggccccgggttctgtccgggccgtgcttggggcgggccgcttttttttttgggtcctttggcttgtggtgggggggggccttttctttcccgccctttccttccggttcgtgcgggtgcctcgcccccgctcgtgggcctctgcctgggcggccttcgggggggctcctgctttcgtgggttcctttctgcccgctttccggcgccttcttgcccggcgctctttttcgcccccctctcgcttgtggccc

SEQ ID NO: 32025 - DNA, 141 bp, Glycine max
  unsure (1)..(141): unsure at all n locations
  Clone ID: PAT_MRT3847_128924C.1
gcgcggnaaaacctaaacctatttttttttctctttttgtgcgcaaattaaatgtggcaattttatctaaaatgactgaaagccacatcaagcgttggggcgtgtccaatacccaaaagaccctcgggctaaaatcaaaat

SEQ ID NO: 32026 - DNA, 188 bp, Glycine max
  Clone ID: PAT_MRT3847_128925C.1
tctttttttttctttcttttttttaaagcccactctttttgtgattaatgaacagtattatggaagcaacctcaggtccaaaacggcatcaccaactgatattgagaaaccctacctggttaatgacaatgaaacgaaagataaaaatcgagggtttggtggacagtggggctttttgttaccataaa

SEQ ID NO: 32027 - DNA, 182 bp, Glycine max
  Clone ID: PAT_MRT3847_128926C.1
actccaagtctttattgaaaatgtatccaattccagcacacaagttattcatacatgtggtttcatccaattccagctgatgacatcctacttctctcaagtcttttcacaaagtcggactatagtcaagctcaaacagggtcttttttccccgctgattccgacaagcccggacgcctggg

SEQ ID NO: 32028 - DNA, 895 bp, Glycine max
  unsure (1)..(895): unsure at all n locations
  Clone ID: PAT_MRT3847_128927C.1
ggcggcttgaggttcaatatcctagtataccttaataaataatttaagatgctatgatgagagcacggttcccattactgttgctgggacttgttttcctggcttcagtttctgtctcatttggcattgcttactgggaaaaagagaaccccaaacacaacaagtgtctccagagttgcaatagcgagagagactcgtacaggaaccaagcatgccacgctcgttgcaacctccttaaggtggagaaagaagaatgtgaagaaggtgaaattccacgaccacgaccacgaccacaacacccggagagggaacctcagcaacccggtgagaaggaggaagacgaagatgagcaaccacgtccaatcccattcccacgcccacaacctcgtcaagaagaagagcacgagcagagagaggaacaggaatggcctcgcaaggaggaaaaacgcggagaaaagggaagtgaagaggaagatgaggatgaggatgaggaacaagatgaacgtcaattcccattcccacgcccacctcatcagaaggaagagccgaaagcaagaggaagatgaggatgaggagcagcagccgagagagcgaagaaagtgaagattctgagttacgaagacataagaataagaacccttttctcttcggctctaacaggttcgaaactctcttcaaaaaccaatatggtccgcattcgcgtcctccagaggttcaacccaacgcttcccacaacttcagaatcttccgagactaccgcatttttggagtttcaacttccaaacccaacacccttcttcttcccaaccatgcttgacgctgaattacccttatcggttattcccttaaccggggacttggccattccttttcctttgggnggaaccaaccgacc

SEQ ID NO: 32029 - DNA, 1170 bp, Glycine max
  Clone ID: PAT_MRT3847_128928C.1
ttcaaaacaaagctaatattgatcacatttcaatagaggatcaagaagcataatttgtttttttaatagtttgtatgcaccttttaataatccataaatctgcctatgaattattgttaccaaaactttgtcaaaacccacttctaaacttgcattgttaaatggctaagcttgtatgtttctcaaacaaaaaacaagtaataactttcttcattactcaaaacatgatgtcattttcttcatgtatagatattatgccactaagctctcttctttgatgccctcgtgcgagttggtctattcggtgtggtatctgcagatgcctctgcctctgatatttcttcaggaactatgttttcagcatctgagccttccaacttggagcggcgatttttaatcagataatgagccacagatttgaaacccagttttgacaccttactgtatatgttaccagtaggcatccaaccttttcccctgcggcaacgactgcagttgcaaatatcccgacaaggagggcaagtccattttgtgttatggttggcttctaccacattttctccatatctcatgtacaagcaatctccacaaaattgcccttggagtaattcgcatttgttgcaatgagtatgctggccaagagttttctgcctgcattgatggcatgtctctcctttgattggatcatatatacggttcccatcttcatcatatccatctacatacaattcccaagtactctcacagtctcccagaagcttctcctgctcttcagtgtaaacttcagggtttgtaccttctggaataacaatctctacttcatcatttttcttacttgctgactcgcgaaaatctctctcagcatagttaattggtgcccggctcattattctgaaagagcgtctctggggtgaatgattgggttggtgggtgcgcttcttctgtttctttaggggtttgagtttatgagaaaggtcgaataagccaagcttctgcattctctccatgttctctttgatcctttgctccctagcttgctcgtaaccttcgttttttacccttttggaaccttcgttttgggagttttcattttcatcaccatcatcatcttcggagagagaaagaggggcttcttctctcttctttctgcgagtgcccacggacgcgtgg

SEQ ID NO: 32030 - DNA, 393 bp, Glycine max
  Clone ID: PAT_MRT3847_128929C.1
tttcgttctctcttccttggacccatgatgtttgacggagaacatttgctgggatgttctaatgggagagcttttatgccaaataacctgtggaagtcctattacgctgaaggccatgactatttttgcctccctaccaaatccatagggcctccggggatgcacacactcttctactctcttactatagaaggctatttacccctgggataagtcagcctatcttgctgcagatcatgcttcgatgtgaaatccccacccctcaatttcgaaaaggcctccacctttacaggcggggctcttaccatgctactggtcggggactggattgaacgaatttgttaggaacccatgtcggtgaactgcgtgcccctatggggatggaaatttggc

SEQ ID NO: 32031 - DNA, 334 bp, Glycine max
  unsure (1)..(334): unsure at all n locations
  Clone ID: PAT_MRT3847_12892C.1
ntcncgnncacnagtcnaatgcnngcntacntnagnncgcnattcgnantcgangngggcnagantngcgacggnnatggnnnanntcntctcccnncncnnttncacgtcgcctnagntcntaanantcgacgttncacatantnagcngnttanntggntgtntggaggnnttggaantgctgtcaaantgttcnntggtactnntgcnngctnnnannaggctcgtnacggttctcaaggaggnacantgnggcnacttcgangatgtgngaggttntgctncgaggattagagntcgncgntctacanaagcggngtgccangtaggnnt

SEQ ID NO: 32032 - DNA, 184 bp, Glycine max
  unsure (1)..(184): unsure at all n locations
  Clone ID: PAT_MRT3847_128930C.1
gaatgctagcaggatctcaggtcaagcgtattactccccggctctacagctagcantccgggggacgaagactggataccctgataaaggaacatttgctggaggaggagtgtttcctccatccaccgtctcttatcgctggtcttcccggcgtcgattactggtgtgtgatcgccccttgctg

SEQ ID NO: 32033 - DNA, 310 bp, Glycine max
  Clone ID: PAT_MRT3847_128931C.1
gggacaaagaaaggtgaaccatgcggaaaggaatatatttggaaaatcgaccacgcggaatagatgggaaacatactggacattatgctaggtaaattttgataaccgacttaacctaatcaagatgtcttaaacctccttgagacaatatatactttgatcaaaggctgggccagaaacggctataaacccaatgggatatgagatgacagctggagtaagagactatcactaaccctaggatgcatcctgaagggcctgatgctacttgggaaggctgattcaaatgatgaccgccaatactatgttt

SEQ ID NO: 32034 - DNA, 476 bp, Glycine max
  Clone ID: PAT_MRT3847_128932C.1
aacatctgatcattatggcctgtgaaaatgacaaacaaggccacctaatacttgccctaaggcatagtgctctgcgtcaccatgaccttctccccaagggagaccgaagggagggtgccctttgcatgcgaccctatgaacggactcacgaggaggttcatgtactgccacacgcgcgtaccgatccacgagagggtgcatgacctcatagcgaggctcacattgccagagaaacctacgctcgtcgctaacaatgccgtcggcaagcccactctcgacaaccatggatacgattggtggtcataggcactccactgcgaatacaaggagtgccccggcacacaattcggaggcgccttccctggctccaccatgttccccaaggtatataagccgatgatgatacaatcagtcactgtgacaagaaattggacggtgggtgcactgagacagaggatccatgtgcaacggaggac

SEQ ID NO: 32035 - DNA, 1495 bp, Glycine max
  Clone ID: PAT_MRT3847_128933C.1
gtggatacaaaaaagtcggaacctgcatgcctttggtggctgcgtttcttccttggcgttgtgttggtggaatctctctctctctctctgactctgtgtctctttcccaggccaggaccgcgcgaaacacgtaaattccccttcaaacacacaaacaaaacgcagtgtttgaagcatctctatatatacccccccttctcagccaaacaatccccattccctcttctctaaccctatcttctctcttgtcttgattccattcaatttaaacctcagggcgtggcaagtttcaacctttttcgagcacccattaacattaacatggccattccctacccccatttcatcgccaccgagaaagccgccatggacgccggcctcctccacccctcctccccctcctccgtcatcctcacccaagacgacctcaagaaaatcgccgcctacaaggccgtcgagtacgtcgagtccggcatggtcctcggcctcggcaccggctccactgccaagcacgccgtcgaccgcatcggcgagctcctccgccaaggaaaactcaaagacatcgtcggaatccccacctccaccaaaacccacgaccaggccctctccctcggcatccccctctccgatctcgactcccaccccaccgtcgatctcgccatcgacggcgccgacgaggtcgatcccttcctcaacctcgtcaagggccgcggcggctccctccttcgagaaagatggtcgagggcgcctgcaagaagttcatcgtcatcgtcgacgagtccaagctcgttaactatttggggggcagcggcttggccatgcccgttgaggttattcagttctgttggaggttcaccgcggcgaggttgcagaagctttttcaggaggctgggtgcgttgccaagcttaggactttcgcggagaaggatgaaccttatgtcacggataatgggaactttattgtggatttgtatttcgagaggagtattggggatttgaaggctgccagtgatgcaattttgcagcttgctggagttgtggagcatggcatgtttcttgatatggctaccactgttattgttgcaggggagctagggctgacggtgaagaacaagtagttgttcttggtggttaggagaatgaaggtaggttaattggtcaaggttgacatggggcttctaagttctaacccatttgtatggtttagtagcaaaggttttaattcaggggggaaaaaggggtgggggggattttgatgaaatccttttgttattcaatacaaatgttggagaaagtttctaaattctccggtagttttgttttgttttagggacggggggatttagtttgagcaagcagaaagtaaaatggagaaatgagtattgatctaatgcaatggctgttgtgtggtactgaatcggttgtccgcacaatatgttgttgaattgactgtgttttaacatattgaatttatctatctaattcaatttttcgt

SEQ ID NO: 32036 - DNA, 1839 bp, Glycine max
  unsure (1)..(1839): unsure at all n locations
  Clone ID: PAT_MRT3847_128934C.1
cccacgcgtccgaaaactcggaagctgcatggctgcgttcgttccttggtgttggtggaatctctctctctgactatgctgtgtctctttcccaggaccgcgcgaaacacgtaaatccccttcaaacacaacacaaaaacgcagtgtttccaccatctctatctctatctctatatataccctcacaaccaaacaatccccattccctctctaaccctatctaatctgtcttctcttacattcctttctccaccacacattcaattttaaacctctgggcgtggctagcttcaacctttaacatggatgggcctcggcctaggcaccgattaacatggccattccctacccccatttcatcgccaccgagaaagccgccatggacgccggcctcctccacccctcctccccctccgtcatcctcacccaagacgatttgaagaaaatcgccgcctacaaggccgtcgagtacgtggagtccggcatggtcctcggcctcggcaccggctccactgccaagcatgccgtcgaccgcatcggcgagctcctccgccagggcaagctcaaggacatcgtcggaatccccacctccacaaaaacccacgaacaagccctctccctcgggatccccctctccgatctcgacgcccaccccgccatcgatctcgccatcgacggcgccgacgaggtcgaccccttcctcaacctcgtcaagggccgtggcggctccctcctccgagaaaaaatggtcgaaggcgcatgcaagaagttcatcgtcatcgttgatgagtccaagctcgtaaactatttggggggtagtgggttggccatgcccgttgaggttattaagttctgttggaggttcaccgcggcgaggttgcagaagctttttgaggaggctgggtgcgttgccaggctcagaacttttggggagaaggagaaggaggagccttatgtgacggataatgggaactttattgtggatttgtatttcgagaggagtattggggatttgaaggctgctagtgatgctattttgcagcttgctggggttgtggagcatggcatgtttcttgatatggctaccactgttattgttgcaggggagctcgggttgacggtcaagaacaagtagttgttgttggtggttaggagaatgaaggtaggttaattggccaaggttgacatggggtttctaagttctatctaacccatttgtatggtgtagtagtaaaaaaggttttaatccaggggtaaagggggattttgattaaatccttttgttattcaatacagttgttggagaaagtttataagttctccggtagttttgttttgttttttttaggggcggggggatttagtttgagcaagcagaaagcaaaatggagagatgagtattaatctcatgcaatgactgttgtgtggcgttgaatcggttgtccgcacaatttgttgttcatttgacagacagtgtttaacatattgaatctatctatctaattcaatttttcatagcctcaatttttcgtagccttcccctatgaaaaaaaaaaaaaaaaaaaaaaaaaaaaaaaaaaaaaaaaaaaaaaaaaaaaaaaaaaaaaaaaaanaaaaaaaaaaaccctgggggggggccccgtccccaatttccccttttggggggttttttacccccccttattggcccgtgttttaaaaacaaggggttgggaaaaccctggggttccccaatttaattgccttggtaaaaaacccctttttcccaggggggggaaaaaaaaaaaggcccctcccaatcccccttcccaaaaattggccaaccttaatgggcattgg

SEQ ID NO: 32037 - DNA, 119 bp, Glycine max
  Clone ID: PAT_MRT3847_128935C.1
cgcccccatcctccacactgctggcgaatatggtgctacgcacatagactacacagaccaagccgagtgacagagagacaaccaacggtgcgtctctcgcagactctcttacacacaca

SEQ ID NO: 32038 - DNA, 208 bp, Glycine max
  Clone ID: PAT_MRT3847_128936C.1
tttttacttaacaccccaattccataggaaaggatagaggatgaccatttcaacaactaatgaccgaacccttccactaatgtgtactagtttaaagcccagtgaatgactcgatatagaaattatgcacatgcccaagaagccagaaaattgcgatggtctaggtatagataacttacatgttagccacatactggctcatataaca

SEQ ID NO: 32039 - DNA, 209 bp, Glycine max
  Clone ID: PAT_MRT3847_128937C.1
gagatgcgaactcaatgttttatggacactacgggaaccatacataccactccctcacggccaggctactcactcagcacaccagtaatccccaaatccaattgcatcctacatgttacccacatgccactgatagcaaatcttataccaccttggcacatgtgtaacttcacattcgcctacatccaaccaattgattgtagcatctt

SEQ ID NO: 32040 - DNA, 456 bp, Glycine max
  Clone ID: PAT_MRT3847_128938C.1
tgtcagagctggtttctcgaccttccagcggggccatggctctaatgtacgtaatcgtcgccggccttttgcccctcgccgatgtcctgttggaagttgtttcttccgaggatgtaccccgtgttagggcgggcatgactacgaggtagtcgcgcgggggctgcttgttaacaaaccccgtggggggatacttctcgctgtcttttgcgaacgccacttctgagacaccagccttaatggagccctcacaggtgatggtgaattcatctgctggcacgctacccttgccgccgaccttgaactggtaccgaatgctcttttcgatagaagcactggcaccagtgtgatcctccgggggctcagggcgctcgatggtgaacttctagggagccgtcctcgccttggtagtcggagtagcagcctggtccttgctcataattcggtcgagccgatttt

SEQ ID NO: 32041 - DNA, 322 bp, Glycine max
  unsure (1)..(322): unsure at all n locations
  Clone ID: PAT_MRT3847_128939C.1
ccangcacgcgtacgtaagctcggaattcggctcgaggaggaaaaaaaaaaaatatggaaaagaaacaagattaagaattggggtttgaanaanccggtggngtcnccntnnntnntcccnnatngnnctngtaatngnaaantataataactttttnatatcgngatcaagatgcnccgagggagagccacngccgccgtcgtggatccnanggcgnacnaggcganggaaacgcggttccncggcgtcaggaaccggccntgggggcgattccggcggaattcgaaatcngtggaagaanaagnccntttggccgncgac

SEQ ID NO: 32042 - DNA, 2153 bp, Glycine max
  unsure (1)..(2153): unsure at all n locations
  Clone ID: PAT_MRT3847_12893C.1
cccacgcgtccgcccacgcgtccgctcactcactaactcaccctctgcttgtgctcgtctagcgctgtcgtcgactcactcaccattttcgtgctcacttataacagtgcccatgccctctcgaggaaaatatatttgagtggcaatttgcgattagagggcctcgtgataccgaatttgagggtggtatttatcatggacggattcagttgcctttagagtatttattcaaacccccttcatcccacgcgtccgttaacatatatatatccgtaattatcccttcatttttccatcttctttccatcgcgaggacagcaatatccactgcatttcccttttgggtgcagaatgggatcccttgatctgaaatggaattcatcgggatgcatggttttgaagaaggtagagtcaactaaaactaaaggggaagatatgtcttccctgtgtggtagttcagcctatctgtacaaaaggagaggaagaagaataagatgcagagaacaaagagtaaatattgttgctacggggccagccatagatcatgctcctgttattgccaagcccttgactaaagatgatctaattgactacttcgtatctggttgcaagcccaaacataactggagaataggtacagagcacgagaagtttggttttgagcttaaaactttacgtccgattaattacaaacaaatatcagctttactcaatcgcatagctacaagatttgattgggaaaaaataatggaaggtgacaacatcataggactcaaaaatggcaagcaaagcatatcattagaacctggtggtcaatttgagcttagtggtatgcctttgaaaacattgcatcaaacttgtgatgagattaattcacatctctatcaggctaaaactgttgctgaggaaatgggaattggatttttgggattaggttttcagcctaaatggagactggaagacatacctggagtgcctaaggtacgatataacatcatgcaaaatcacttaggtaaatttggctcacctacaattgaatcattgttcatgacatgctcagttcaggtcaacctggacttcagttctgaagcagacatgatcaagaaaatgcgtgccagtattgctttgcagcctttggcagcagccttattcgctaattcacctttcaaggaaggggttccaaatggttatctcaccataagaagccatagggtgggtcagatggacaaaagtcgcgctggcatactcccctttgttttttatgacacttttgggtttgagaagtatgttgattacgctcttgatgtgccaatgttgtttgtttatcgaaaaaacaagtacattgactgccggggcatgtcattcagggacttcatggcaggtaaactccctgtcattcctggtcaggtgccaacgcttggtgactggggaaatcatctaacaactatatttcctgaggtcaggctaaagaggtacatggaaatgaggggtgctgatgatggccctttggaaatgttatgcgctctgccggctttttgggtaggttactgtatgatgaggtttcgctacaaaatgtctagatatgattgctgattggacccccgaagacatacagaatttaaggaataaggttcctataactggtttaaggactccagttcaaggtagactgctgcaacatattgcagaagacactttgaagtgggcaaaggatggcttggacagaagatgcttaaatgaatccgttttcttggatccattgaaggaagtgattggaacaggtttgacccaagccgacaagctattggagatgtataataataagtggggaaacaacatagatcctgttttcagagagcgctgctactaagttgacttatgaacaagaggaatgcagactgaaaataaccccttgctgcaaatgatgacttgcattcaacgttgtataataagttgcttataatctagacagctagtagtgttcaatacgtgtctatttacgaaggaatgtagtcatgctattttgtacggtgaaatctgacgaatagatgatgaatatcacttgttttactttttaaaaannaanaaaaannnnaaaaaaaaaanaaagaaaaaannaaaanaaaaaaaaanaanncannatngaaanngat

SEQ ID NO: 32043 - DNA, 189 bp, Glycine max
  Clone ID: PAT_MRT3847_128940C.1
gcaccacccacaattgttattttctcactgacatcgtaatgcatggcccggtacagctcacgtgctctcaaattcaccaccaccattctcatgaattggtagaacgcttgaaacctactacgtgagccaagcccaccatccttttcgactggatatctctaacagcatcatgtaggccagctaccttta

SEQ ID NO: 32044 - DNA, 316 bp, Glycine max
  Clone ID: PAT_MRT3847_128941C.1
aaaaaaaaaatctttgactacgattaatttcgatatacatcagaataatgtcgatggatgcaatgtacaatttttgactacgtaaaatcttactttttctcaacttttgttcgggataaaccaaaaagacaattagtcatcatggcatgggactgatgggagcagggacatgtaaacattaaattggatggcaaaattcctataaatttcccatagtattttggccataactcaacccaagttttttctaaaggctttcattgctagacctcacttatggggtttggaaggaccctgcttacaaaccggaaaaagg

SEQ ID NO: 32045 - DNA, 473 bp, Glycine max
  Clone ID: PAT_MRT3847_128942C.1
tctaccgattccgattccaaggaaggtttcccgtcatcactgtatgacgtcctccttctttgggggggggggggggggggaaactaggtaaagcgtacacgagggaggtagcagccgaaagataatataagaataacgtagttagaactagagaccagggtgcacaccgatagggaaacgttacaccaaaaagagataacagatgtggtagttataagcgtaaaatcaaaaagaggatagcagacccggggaatgcagcagcaagtgaaagggaataccataggtaggaaattttatgaaaatagagggcgtacaagtgaacgttatggtaagtgggtgggggagtgggtaaaccgttgtgcccgagtggctgtaatattggcgtagtaaatatcgtagagcgtggtggaagtgtcgtaaggcttggtttattaaaacacgtgatagcagtggtagagggtgtagaaactata

SEQ ID NO: 32046 - DNA, 316 bp, Glycine max
  unsure (1)..(316): unsure at all n locations
  Clone ID: PAT_MRT3847_128943C.1
gaaacaaatataatatnaaaggaaattattgatctttttaaattcattgaggaaataaatcgggggatgggagttattaaacaggtgcggaacatttatacttcttccaaggcttgcattgagaataccaatttcactgtccaatagaaggcataattaatgacattacgttatccgtttcaaaatgagttttcaacccaaaataaagagtcatttatgaaccaagcggatcttgacaatcattcttttcattatcatatcactgcggtcaaacagttcatcaccacttctgtgcacattggacattgtcaccaca

SEQ ID NO: 32047 - DNA, 347 bp, Glycine max
  unsure (1)..(347): unsure at all n locations
  Clone ID: PAT_MRT3847_128944C.1
cccacgcgtccgcccacgcgtccggtttttgtttttgtttgtcaccattatcaatacctatcactgtatgtggtcattattcaacaaaaaaaaaaaaaaaaaaaaaaaaaaaaaaaaaaaaaaaaaaaaagggcgaacgataaaaaaagaaaaaaagcttacttacacatgcatgcgacgacatagctttaatgtggggccacctaaataaaatacactggccacccttttacaacgtggaaaatgagaaaaccctngcgctacaaaacataataacggtgcaggacatacacctttcgccaggtgaaaaaatagcgaagacgcacctaaagaacgcccttcccaac

SEQ ID NO: 32048 - DNA, 339 bp, Glycine max
  unsure (1)..(339): unsure at all n locations
  Clone ID: PAT_MRT3847_128945C.1
cggggaaatgggggtttactttttgggaggggggttcccttcccantttgcagttgcaaatgcagtgcgctatttgtaacggggactttggggttcaaatggtcaagttcgggctcaagggttcaactctaaatgggcgggacatgagtccccttctgtgggcttctcgcagccggacccttctgtcgtcttctcgcagccgtacccttctgtcggcttctcgcagccgtacccttctggcgtcttctcgcagccggacccttctggcgtcttctcgcagccggacccttctggggggttctcgcagccgtacccttctgtcggcttctcgcanccgga

SEQ ID NO: 32049 - DNA, 201 bp, Glycine max
  unsure (1)..(201): unsure at all n locations
  Clone ID: PAT_MRT3847_128946C.1
gtcatcctttcatcaacacttatcctcatcaatattctacatcatctgtttctttctcactcccgaggaggcgttctatatatatcgggcgcctggccacctataaatcantctatatatccactaacaactagctcacaccaagctcttttcacaaatattaagacaatctctgaatcctttgctgattaacttattaat

SEQ ID NO: 32050 - DNA, 412 bp, Glycine max
  Clone ID: PAT_MRT3847_128947C.1
cttcctacggctgcggatacaactcaaaggcattttttgcacgtgctttaccatagagtgcgggggggtcatccgataccggaagcagccttggggatcgacctcaaggccggaggtaaaatgcaaaaaaaccaaaggaccagcgcccaagcccaaggatatctatcttaagctcttgatcaagctttatcgtttcattgcacggagaagtgaccgaaaattcaatgccgttatactcaagagattgctcatgagcatggttaacaggcccacattggctttgccaaggttgattcagtattccaaggagaaggaagataaaatcgctgtgggggtggacatgatacccatggatattctatgttatgaaattccagccttataggtgacagcactcatgtttacagagact

SEQ ID NO: 32051 - DNA, 558 bp, Glycine max
  Clone ID: PAT_MRT3847_128948C.1
aaaacacccaaaaaccaaaatccttttaacccccccataaaaaaactcacgggcccaaacaggctttactagcccagaagggatccccccttaaaacaagtttaggggtcccacaacggggggggccaaaaaaacccttttttgggaaaaaaagggcttgacaaaagcaagcaaacataaaaaacggggaaggggggaaaattttttttcccgggtttttgattctgccctctgaacccaaaaaaagaaggggggggcattcttccaaaatttaaagtttttggtatggcccttaaacccctttggaaaccacgggactaggggcttttcccccaacaaaaaaaaatcgaaaaaggtttttaaaaccagggcaacctcctttaaagcatgggaaggagactggcaaaaaaatttttcaatagcatgaagcaataacaggggggatccctcctaagcaacagaagaagaaaaggagtttttttttttatcagcttctttagcaaaacctttatcaattccatcaaaaagagcttaaaccagggcactcatttttttttg

SEQ ID NO: 32052 - DNA, 489 bp, Glycine max
  Clone ID: PAT_MRT3847_128949C.1
acgagatcaggtccatgtgatccttcggattttggaatgtggaataatacgcagcattcatctcttaaggagaaaatccagtatagctcttctatcaatgacctgaaaacagtgcctgtatgttctgagctagactctcaaatattatctggccagggaattaatccaacaaagcatgtaatggatccacttaaacctcttattcctgagttcttacccaaggcatctaaaaacaatcttgaggagatgccacctatgccccctctgcctccaatgcaatggagaacaggcaaggttcaacatgcttccctttttacacagagagaagacatagaagtaaacctagcctcactccaaccaatacagccaaataaacttgacgatatttctcaatttggtttacccacttctgaaaaagagaccttgccatatcagaatctatttttgcctgtcatggctgtggaaagtaatatgcatcaatattcttct

SEQ ID NO: 32053 - DNA, 351 bp, Glycine max
  Clone ID: PAT_MRT3847_12894C.1
aaattgaattgtgaagatgaagagcgtaaacgacgacgcttcaacccaagatctcgaccctcagagcgaccacagctccgattacttagctcacccccaaccccaccctcagccccgccgtcctcggggtttcgcggcggcagcggcggcggccaccaccaattccgccggcaaggggaagaaggagagggagaaggagaaggagcgcaccaagctccgcgagcgacaccgccgagccatcaccagccgcatgctcgccggactccgccattacggtaatttccccctgccagcgcgtgccgacatgaacgacgtactcgccgcgctcgcgcgtgaggctggctgggtcgt

SEQ ID NO: 32054 - DNA, 538 bp, Glycine max
  Clone ID: PAT_MRT3847_128950C.1
accggtccggaattcccgggtcgagcccacgcgtccgcccacgcgtccgatttccgttggaaagttggttactttgtttggatcggtctctcacattgtcctgctaataacgcctgtattattctctccatctctaaacattcgcatcatatcataccataagtgtgttcagtttcttcaaccgtttgccttgaattgttcatatcatcctgggaagaaggtcaaagtttttatctgtttcaactttcagcaatcggtttctccttttgaagctgattgagtttggtggatgatggctaacactaaaatttcatcttctgagtggcgtaagctctctccgagtgttaccacggccttggcgtcggcttttcttgaatggttgctgattcttttcctgtttattgatgctgttttttcttatgttataacaaagtttgctggttactgcaaattgcaaataccgtgcctgttatgctcaaagcttgatcatgtgttaggcaaagagaaaggaggatattattgggacttgatttgagtg

SEQ ID NO: 32055 - DNA, 195 bp, Glycine max
  Clone ID: PAT_MRT3847_128951C.1
cactgagcatcgtctagctatctcgatcgaactgtccaaggtcctgtcaccatccaagtcagcagcatctgagctaaagccaaacaaatatacgagtttccaaattgcgtgttgagaaactaacattggtagttaccgtaaaataagcaaacagataacgcacgtaaccttggcttgggcaataatctagccacc

SEQ ID NO: 32056 - DNA, 343 bp, Glycine max
  Clone ID: PAT_MRT3847_128952C.1
cacgcgtccggcaccattttcaccgcacgaatatcttgttgtttggagctattcgagaaaaactctgtgggcatgttggggtaccatgacctccttacaggtgatgagcttctctctgactccttccgttacaaggaatttgataatggaatgctgtgggaagttgaggggaagcgggttgttaaaggagcaattgatgtttacattggtgcaaacccttctgctgatggtggaagacaagatgatggatttgatgatgcaactgttaaggttgttgacattggttacacattcagacttcaagagcaacccgcattttattataagcaaattgttaccttta

SEQ ID NO: 32057 - DNA, 175 bp, Glycine max
  Clone ID: PAT_MRT3847_128953C.1
ggggaagggaacagggagtgttggtaagagaaggaacaagactcacactctctatataagagatatccaccacatcttccatctccacaacaatcattacaccacttatactttccccaccacacacactagaaaatataactaaagcatcagagcaatccacagaaataccacc

SEQ ID NO: 32058 - DNA, 2102 bp, Glycine max
  Clone ID: PAT_MRT3847_128954C.1
ggaagttccctataataagcaagatacatcttctgggcaaaagcaacctacatctggggatgaaataactacacggaaaattgaggttcctaacaacaaggttggtgtacttattggcaaggctggagatactatacgatacctgcagtacaattcaggtgcaaagattcagatcacgagggatgctgatgctgatcctctctgtgcaacaaggtctgtggaattgataggaagtttggaaagtattgataaggcagaaaaactaatgaatgctgtgattgcagaggctgatgctgggggttctccttcacttgtagctcgaggcctctcccctgctcaagctaccgtgggatctgaacaaattcagatacaagttccaaatgaaaaggttggattaatcatagggagaggtggggaaacaattaaaagcctgcagaccaaatccggggcacgcatccagttgatacctcaacatcttccagaaggggatgattccaaagaaaggactgtccaagttactggtgataagaggcaaattgaaattgcacaagaattgataaaggaggtcatgaatcagcctgtcaagccatcatctggtggctttggtcagcaggcctatcgcccaccccgtggatctggtggcccaccccaatggggtcagcggggctctcattttggccagccaacagcatatgattaccagcatcgtgggccgtatccttctcacaatcaaccatatgctcctccaccatatggaaactatcctcaacatatggctccaagaagcagctttggttctggttgggagcaaaggcctcaccacagctttcaagggccaccgccacataatggtggttatgagtattatggaggacaagggggtcatttatccgaagctccaccatccacacagcttcccagttcagcccccccacatggtgcgggtccttcccctgtaccttctatggtaccaaccccagctcaggtgaattacaactatggacagccacaaggccaggattatggtcatcagacagcttattctcaggcaggacttccccaacaaggttatggacagggatatgatgagtcaaagtatgaaaatcgtgctcctactcaacattcttatgggggacatgtaaattctcaatcaacctatcctcaggctgttgctcaacctaattaccctgcaccgcagcagtatggcaagccaccattatatggcatgccatcacagggacagcctccacaatcttatggtccccctagagctactcaaccaggggatatgccttatcaaggttcaactcctgcccagtcatatggcacgaatatgccaacacaacaaccatacccatatgcagtatctgggccatcacaaacagcatatccaagttatgggtctgcaccagctgcagatggctacagtcacccaccgcctgcatctggcccaccttatacccagcctggtgcacaacccacttatggtcagcctgctgcccagcctgcagccagttatgcgcaggttggtcccactggttatggatcatatccatcttcacagccaagttaccctgagcagccggctcccaacaacgcagtttatggctaccaagcaccccaagatcctggttatagcactggtgctgcaccagcatatagtacagcccaaccaagtgggcagccaggttatgttcaacccactcccactcaaactggttatgaacagtctaacacgcaaccagctggttatgcagctgtaccagcaagtgcttcggctgtgtatggcaaaacattgtccccccagccggctgcttatcaatacgactccacccaagtttatggtgctcctcgataatgtttttgtatgttaaccacatcctagtattagcatactctaatttgatggctccttcggtgtaacctgctattgattttcttgtattctgtactgctttaaattatgaacatcaaaatataatttttcttagctcgagtgctctgatgttacgatttcttgaaaatcaaagttcacttggcctgttgtttcctcgaaggattcaaaagaaaaattaattgagattatgatgccttactttccc

SEQ ID NO: 32059 - DNA, 2819 bp, Glycine max
  Clone ID: PAT_MRT3847_128955C.1
ggctcgagctaaaatcagaaccagtggcactgacacgaaaaaatatcttttcctctcgatcgaattcactcactcattctttcatttccctctcagcgcgcttgcttctctttcacagtcacagctaatggcggaggaagaagttgcggcacccgctgccagccccgttccccctgataacaaacgcaagctcgaagatctgcaacccgaaaacgccgaatctaatgccaactccatctccgacgccgtgaacgccgatgacgccgccgtttccgccgagaccgagaacaagcgtctccgcctcgacgaccaccaggatggcctcgctaatacaaatgggcatcaagatgagcaggttgctgagccaggaaaagagacagaggaaagatccgctctggagaatgtcactcccgagcatgatcaaactatatccgaatatccttctttggaggcaactgctaatgaacaaacatcagctgagattagcgagccagctgattccaaagaacctcctgtagaggactctggacaagaaaatgcagaggagccttctaaagaaactcaacaacaatctaaggattcaaccgagcaagatgcttcttctggcgacaagcaacccaattcagttgacactgctttgcacaatgtggaagttccctataataagcaagatacttcttctgggcaaaagcaaccaacatctggggatgaaataactacacggaaaattgaggttcctaacaacaaggttggtgtacttattggcaaggctggagatactatacgatacctgcagtataattcaggtgcaaagattcagatcacgagggatgctgatgctgatcctctctgtgcaacaaggtctgtggaattgataggaagtttggaaagtattgataaggcagaaaaactaatgaatgctgtgattgcagaggctgatgctgggggttctccttcacttgtagctcgaggcctctcccctgctcaagctactgtgggatctgaacaaattcagatacaagttccaaatgaaaaggttggattaatcatagggagaagtggggaaacaattaaaagcctgcagaccaaatccggggcgcgcatccaggtattgatacctcaacatcttccagaaggggatgattccaaagaaaggactgtccaagttactggtgataagaggcaaattcaaattgcacaagaattgataaaggaagttatgaatcagcctgtcaggccttcatctggtggctttggtcagcaggcccatcacccaccccgtggtggatctggtggcccaccccaatggggtcagcggggctctcattttggccacccaacagcatatgattaccagcatcgcgggccgtttcctgctcacaatcaaccatatgctcctgcaccatatggaaactatcctcaacatatgactccaagaagcagctttggttctggttgggagcaaaggcctcaccacagctttcaagggccacccccacacaatggtggttatgagtattatggaggacatgggggtcatttatccgatgctccaccatccacacagcttcccagttcagcccccccatatggtgctggtccttcccctgtaccttctatgggaccaaccccagctcaggtgaattacaactatggacagccacaaggccaggattatggtcatcagacaacttattctcaggcaggacttccccaacaaggttatggacagggatatgatgagtcaaagtatgaaaatcgtgctcctactcaacattcttatggaggacatgtaaattctcaatcgacctaccctcaggctggtgctcagcctaattaccctgcaccgcagcagtttggcaagccaccattatatggcatgccatcgggacagcctccacaatcttatggtccccctagagctactcaaccaggggatatgccatatcaaggttccactcctgcccagtcatatggcacgaatatgccaacacaacaaccatacccatatgcagtatctgggccatcacaaacagcatatccaagttatgggtctgcaccagctacagatggctatagtcacccaccacctgcatctttcccaccttatacccagcctgctgcacaacccacttatggtcagccagctgcccagcctgcagccagttatacgcaggttggtcccactggttatggatcatcatacccatctttacagccaagttaccctgagcagccggctcccaacaacgcagtttatggctaccaagcaccccaagatcctggttatagcactggtgctgcaccagcatatagtacagcacaaccaagtgggcagccaggttatgttcaacccactcccactcaaactggttatgaacagtctaacacgcaaccagctggttatgcagctgtcccggcaagtgctccggctgcgtatggcaaaacattgtcgccccagcctgctgcttatccccaatacgactcaacccaagtttatggtgctcctcgatgatatttttatgtgttaaccaaatcttagtattagcatgctctaatttgatggctcctttcggtgtaaccggtactgcttcatcaaaatataatttttcttagcacgagtgctctgatgttacgatttcttgaaaatcaaagttcacttggcctgttgtttcctcgaaggattgtaaagaaaaattaatcgatattatgaagccttattttctcatttgagctttgctgggagtaactggacgtgagttggactaccatttgttttgaatatagtgcttccagccaaatattcatcagttattttc

SEQ ID NO: 32060 - DNA, 180 bp, Glycine max
  Clone ID: PAT_MRT3847_128956C.1
ctacaatccaacgccgcttaggcaggatgctatcgatagttgtcaccaggatacgcacactgtaattatatgtactagaccttgaatatcaatcgcccaaaagttcagaactcacttcaggcaaacgtaacagggataccttgttcatggtgaggacacgctgctgcagaactggtccat

SEQ ID NO: 32061 - DNA, 420 bp, Glycine max
  Clone ID: PAT_MRT3847_128957C.1
gctaggaattcccggggcggctataatagaggactcctttttttgtcataccggaccctataacacccccttgctaagatcacccgggggacacttaccttgattcaagcaatttgcatgtttgtgattacatgctcacaataccttaaacttgaatacagaaggacatatataacctacgaccaccaaaaaacatgcttcaccttgccatggaagcaaaatatcagactcatttcacaaaatggctagacaataaattaacaatgtttatatacccaaccttatcatttggatggaaaaatgactcaaacttctaattacaaaagatctgctttttattaactggattgtgaaaattctaaaaatagatcatagcccaaactttattgacggcttacgttcacgacactttaggaactc

SEQ ID NO: 32062 - DNA, 1234 bp, Glycine max
  unsure (1)..(1234): unsure at all n locations
  Clone ID: PAT_MRT3847_128958C.1
gagagtcattttatgacctccagcttgatgtcaaaggttgtcgtgatgtttatgcttcctttgataagtatgttgaagttgaaagtcttgagggggataacaaatatcatgctgaacagtatggtttgcaggatgctaagaagggtgtcctgttcattgatttccctcctgttcttcagcttcaactaaaaagatttgaatatgactttatgcgggatactatggtcaagattaatgaccgttatgagtttcccttgcaacttgaccttgatcgtgagaatggaaaatatttatcacctgatgctgataggaatgtccgcaatctttacacacttcatagcgttttggttcacagtggtggtgtgcatggtggacattattatgcttttatcaggccgactctatctgagcagtggtataaatttgatgatgagagggtgactaaagaagacactaaacgggcattagaggagcaatatggtggtgaggaagagttaccacagacaaatcctggatttaacaacactccttttaaattcaccaaatattcaaatgcttatatgctggtgtatatacgtgaagctgacaaggacaaagtaatatgcaatgtggatgagaaagacattgctgaacatttaagggagaggttgaagaaagaacaagaagagaaagagcacaaaaagaaagaaaaagcagaggctcacctttacactattataaaggtggcacgagatgaagaccttgcagagcagattggaaaggatatatattttgatcttgtagaccatgacaaagtgaggagtttccgtgttcaaaaacagacatcttttaacctttttaaggaagaggttgctaaagagtttggcataccagttcaattccagcgcttttggctatgggcaaagcggcaaaaccatacgtatcgtccaaatcgaccattgacacacatggaagaagcacaatctgttggacaattgagagaggtatcaaacaaggttcacaatgcagaattgaaattgtttttggaagtggagcttgggctggatttatgtcccattgcaccacctgacaagacaaaggatgatatattacttttcttcaattatatgatactgaaaaagaggagctacgttatgctggaaggctctttgtgaagagtactgggaagccatcaaaaatcttaaccaggttaaataaaatgggtgggtatgngntatatgatcctgaannagag

SEQ ID NO: 32063 - DNA, 508 bp, Glycine max
  Clone ID: PAT_MRT3847_128959C.1
caacatagcaagggagacttttttattgtgcaattgtgtattacaataaatcttctcactcaattctacatcttattaccacccgaggatgatttccattcaaacctaataatcactccccaacccttcccacatcacttggaaaaacaaccaaatcatatgatatctcatatatcaagacaccatagacataacatagaataaataatgagaccaagagtaaattatactgaaaagtagacataaatgcacctagatggtcattattaacgagatccttagttattaactcgtgcacaatgtttccttatctccccttcagttccaagcttgacattaattcgtcccattttctcgatagacttggcaaattcctcaaagaatccttgagttgattgaagttgtctatcgataatagaccttgtgataggactagtaagaaattcagcatctgactgaaacaagccccttctcttaacaacttgtttataaaatccaagatcaaatg

SEQ ID NO: 32064 - DNA, 768 bp, Glycine max
  Clone ID: PAT_MRT3847_12895C.1
attcccgggtacgacccacgcgtccggcggtggaatggaatggaaaaaggagggaaatcaaacaaaacgctccttaataaaaccctaaaaacagaaaagcaaacattgtgacttgtttttacttcatgacatgttgtcacattccattttccttcttcaaaatttgttcttcctttgaacccctcaaagtcaaacctgcttctatggcgagactgcttcggaacacttcccttctcacacgctccctattcttccctaaggtctttaaactaggaatgattggcacttctcagattttgagcttctcatctaaaggtagaaggcgctctaaatctgatggaagtgactcaggtgaagagaacatgtctaagaaagagttggcccttcagcaagctcttgatcagatcacttccgcatttggaaagggatccatcatgtggcttggtcgttctgtctcaccaaaaaatgtacctgttgagtctactggttcttttgctcttgatgtagcactaggaattggtggtcttccaaagggacgtgttgtggaaatatatggtccagaggcttctggaaaaacaactcttgctttacatgtgattgcagaggcacaaaagcaaggaggctattgtgtctttgtcgatgccgagcatgcccttgataagacactggcagagtctattggtgtgaatacaacgaacttgcttctctcccaacctgattgtggtgaacaagcactaagtcttgtggataccttaatccgtagtggtt

SEQ ID NO: 32065 - DNA, 429 bp, Glycine max
  unsure (1)..(429): unsure at all n locations
  Clone ID: PAT_MRT3847_128960C.1
actantttgatgctattgaaacaggaaaaaagagcatgggtggaatggggtaatttcaaggggggatggggcgaagcaaacacaaggaagagttgcccagaaccactggactgcaatacaaggaaccaatcggcaccacgcggaggtgggtgacagcggcaaaaggtttaacggccagcagggaaacaaaggcacacatacaaacaacggatagagagcacagttgcccgaaaagcgaacgacacagccgtacaggaagatagggcgactgatgagggagggggaaccgataaaagcgagacatgaggagttggacaagtcgcaggaggagatccgtgtggtgggtgcgatccagccgatagtcaaccgtgggacctgaatgggcaaagaatggatgacaaaaaggaggggcgacacacctgggaggaa

SEQ ID NO: 32066 - DNA, 733 bp, Glycine max
  Clone ID: PAT_MRT3847_128961C.1
gaacattgaacattcctctgcttctctaatagttgactcccctcactcacattgggcgcaacttcattcgacaacgcctctccgatgcagcaagcagaagagcacctcgacgttctcaccaaaaccggcctcaaaaccggcgtgtccaagcccaggggagacgtgcatcgcgatggcgactaccaccgcgccgtccacgtttggatattcgcggagagcacgcgggaacttctcctccaacggcgcgcctcgtgcaaggactcgtggcccgatctctgggatatttctagtgccggccacatttccgctggtgattcgtccctcacctctgctaggagggagcttgaagaagagttgggtataacccttcctaaggatgcatttgaattgatatttgttttcctccaagagtgtgtcataaatgatggaaaatacataaataatgaatataatgatgtgtatctggtaacaacacttgatccaatacctctggaagcctttgtacttcaggaaactgaggtttctgctgttaaatatatctcttatgaagagtataaaaggttactggccaaagaagattcaggctatgtcccttatgatgttaatggacaatatggtcaactctttgatataattgaaaagatgtacaaggacaaatactgtagcccgcagtttgactctacagaagcaaataagtcgttatgctcctatttccctcagtgctgagttgaca

SEQ ID NO: 32067 - DNA, 702 bp, Glycine max
  Clone ID: PAT_MRT3847_128962C.1
gttctggtttattttttatttttattgagtcaatgggatgccgttttggttaatcaacttgatttaaaggctcgccaacacatgttcaaggtgcacctaggagatactccccataacttggctgaaagtgattttgaacatttggctcgcaagacagaggggttttcaggttcagatatatctgtctgtgaatcctgaggatatgtggatcctatgtggaccaaagtaacagagtgcagtacaaactacaattcaggatcttgcggcgaaaggacttgcttctaagatcctgccgcctcctatatcgagaacagattttgacaaagtacttgctagacaaagacccaccgtaagcaagtctgaccttgatgttcatgagtgattcacaaaggagttcggagaggaaggataattctgagagaatttttcttcaaccatcttcactagtttaaacatgttatgatttgtaatttacagagctattggatcaagtgaaatgcatatttttactaatcataatttgtgtataaaaacagactgatgaaatgatcagaaaaataaattttatgtgaatatgtgattccagttactcatgttggtcggcttttttgatgtagatgtcacaaattttatgatacttataggtttgagttttttcagattccaagttggggtgagggttgacaatttcagctgctatgc

SEQ ID NO: 32068 - DNA, 1676 bp, Glycine max
  Clone ID: PAT_MRT3847_128963C.1
tttagccctcgcgtccgcccccgcgcaacccctcgtgtcctcccacgcgcaaacaaaacaccctttccttcttcttcttcttcttcgttccgatcagattcttcgaattctgaatcaaaattcatcgaagaagaaggagaaggagatgtatagcaatttcaaagagcaagcaatagagtacgtgaaacaagcggtagatgaagacaataagggaaactacgcgaaagcgtttcaactttacatgaacgcgttggagtatttcaaaacgcacctcaagtacgagaagaaccctaagatcaaggaggccatcactcagaaattcaccgagtatctccgccgggccgaggagatccgggccgtcctcgacgatgggcccagcggcccggcctccagcggggacgccgcggtcgccacaaggcccaagacgaagcccaaggacggaggcaaagatggagacggcgaggatcccgagcaggccaagctacgggccgggctcaactccgcgatcgttagggaaaagcccaacgtgaagtggaacgacgtcgcggggcttgagagcgccaagcaggctttgcaggaagcggttatcttgcccgtgaagtttccgcagttcttcactggtaaacgacgaccttggagagcgttcttgttgtacggaccgccggggacggggaaatcgtatttggccaaggccgttgccacagaagctgattctacgtttttcagtgtttcttcatcagacctggtttcaaagtggatgggagaaagtgaaaagctggtctcaaatcttttccaaatggctcgcgaaagtgcaccttctataatattcgttgatgaaatagattctctatgtggtcaacgtggagaagggaatgagagtgaagcttcaaggcgtattaaaactgagcttctggtgcagatgcagggtgtgggacacaatgatcagaaagttcttgttcttgcagctacaaatacaccttatgctctagaccaggcaataaggcggcgtttcgataagcgtatatacatacccctacctgatttaaaggctcgccaacacatgttcaaggtgcacctaggagatactccccataacttggctgaaagtgattttgaacatttggctcgcaagacagaggggttttcaggttcagatatatctgtctgtgtgaaggatgttttatttgaacctgttcgcaaaacccaagatgccatgtttttctttaggaatcctgagggtatgtggatcccatgtgggccaaagcaacagggttcagtgcaaactacaatgcaggatattgctgcgaaaggacttgcttctaagatcctcccacctcctatatcgagaacagattttgacaaagtacttgctagacaaagacccaccgtaagcaagtctgaccttgatgttcatgagagattcacaaaggagttcggagaggaaggataattctgacggaatttttcttcaatcatctgcactagcttaaacatgttatgatttgtaatttacagtgctattggatcaagtgaaatgcatatttttactaatcataatttgtgtataagaacagactgatgaaataatcagaaaaataaatttgatgtgaatatgtgattccagttactcatgttggtcttcattataaaaaaaaaaaaactgatgcacctaccat

SEQ ID NO: 32069 - DNA, 261 bp, Glycine max
  unsure (1)..(261): unsure at all n locations
  Clone ID: PAT_MRT3847_128964C.1
aaacaagaaaaggtcgcaatccaaacaatctggacccaacctanacaacgttcttcttcttctcagcgtttcggaatcaaccaaccgctctctgaatcaatctcactctcttattcttcagcgagaactcatctctccgaatccacacgcgatcggatccacgtcgagtcgtctttcaaattcaaatttccctggcgatccgattgatctctcactctcgctcgctgtttcctccgatcaacattgcacgatcgtctcacg

SEQ ID NO: 32070 - DNA, 1614 bp, Glycine max
  unsure (1)..(1614): unsure at all n locations
  Clone ID: PAT_MRT3847_128965C.1
cacgcgtccgcgagccttctgttcaagaacaagctctggcccttgtgtgcaattttgttgatggatgtatagattgtgttgaatatgcttttgctgaagatggtatcatactggatgctgttgcaaggcaattgaaaaaatcttcaaaaattgaaattgggcgcgaccggatgtacttactcagcaatattgcgagtggaaatgagtctcatagagaagctatcatgcagctactcttttcaaaagcagaaaatgtgtctcactctttcttctaccagtttctgcagagcaatgacagttgtttacgcacatctgctgtttgggtcatagtaaatctaacttttcctgcaagtcctggggtatttggtagggttgtaaaactgcgtaatgtaggcattgtttctcaaatcaagaagatggtcaacgatccttgcatggatgttaagcttcgtgcaagacaagcacttgggcagattattacttttggtgataggtaattgtaatcagttactccattcaaagcccctgggctgcaggcaaagagaaatcttgatagaatttattttctcccagttcccaccttattatatgtaaaggtgtatcggccttgtgcttcagcatcaagtatggtgtataaaattacttgtatttttttgaaccagtcagagcagtgacaaggttttccaattttgtaagcactcctgactaggttaccccgaagtctctcttttgctctcatttgtatcaccttttgtaagtcggaagatcgaagtagtttacaggctttagtattgtactatgagtagtaaatgtcaattttagaacttagtttcaattttattctgatgctgaaatattgacaaatggttgagttctatgtgtaagcaacatgtcaaggggtaatccccgatgtgtattattgtattcttggaattctgaatcaaaattctcagaagaaggagatgtatagcaatttcaaagagcaagcaatagagtacgtgaaacaagcggtagatgaagacaataagggaaactatgcgaaagcgtttcagctttacatgaacgcgttggagtatttcaaaacgcatctcaagtacgagaagaaccctaagatcaaggaggccatcacgcagaaattcaccgagtatctccgccgggccgaggagatccgggaggtcctcgacgacgggcccagcggcccggcctccagcggggacgccgcggtcgccacacggcccaagacgaagcccaaggacggagggaaagacggagactgcgaggatcccgagcaggccaagctccgggccgggctcaactccgcgatcgttagggaaaagcccaacgtgaagtggaacgacgtcgcggggttagagagcgcgaagcaggcgctgcaggaagcggttatcttgcccgtgaagtttccgcagttcttcactggtaagcgacgaccttggagagcgttcttgttgtacggaccgccggggacggngaaatcgtatttggccaaggccgttgccacagaagctgattctacgtttttcagtgtttcttcatcagacctggtttcaaagtggatgggagaaagtgaaaagctggtctcaaatcttttccaaa

SEQ ID NO: 32071 - DNA, 410 bp, Glycine max
  unsure (1)..(410): unsure at all n locations
  Clone ID: PAT_MRT3847_128966C.1
cggnaacccccgggnncgacccacgcgnnccgngccaacgcncaaggcaaaaggacaagggagngggaaggggcaaacgcggggnaagaccgccgaangcaaaccgncgggcccgagccgcgagaaccgggacaggacaagngcacaaggaaancnccnnncgacanaggcagncnggcccngggccacagcgaaagggggaggagccngnccgcgcagagagaacaaaacccgagccacgcgaaaaacaaagcagacacaacggaacggcacccccgagcgcggacagagaggggaacccacgccaagggaacaagcgggcccncgggaacagccaagggcaggaagagaggccagaggcggaacgagggagggagacagggagagaaaggaacgggaaaaacaanggc

SEQ ID NO: 32072 - DNA, 429 bp, Glycine max
  Clone ID: PAT_MRT3847_128967C.1
aatacgtcacatatgacctctacatgcacctctgcattcgctccgaagtcggctcgcgcaaatttgatacagataactcactctcatagtgtttggctgcaaacagcttatcatgtgcgagtcaaagcacacaattggagcgttctaatgcatgtacaagatttgcagcgactcctgatctcaaatgtcaatattgatctgactgtagcgtaatgactgggttggtgcagaacgagcacgtaacatctttcagaagatgattgtttttgtggagtaatctggtccatgtataacgcagtgaatcacatgctacgagaattccaacgagactctcgttgacaagattgtgtgtactaacatcacctagtgtattacatatgttacacacgatgtcaacattcatgttaaatatgtgtctgcaactgggga

SEQ ID NO: 32073 - DNA, 429 bp, Glycine max
  Clone ID: PAT_MRT3847_128968C.1
ctggggattgggtttatgtttgttatcttttacattgtgctttttattaacgggacaaagttgttgacgccaaagaacgtgaaggaccaaaacgccggaacctccataaacaaaggtggtgtcacccacacagacaccggcaccatatgccaaagcaacagcttagggggaggagtaaccgacacagccactggccccccccgccgtaagagcttcatgcggcccatgggggcttcttaggcggaaaaccccggaaaatgggcaaaggggggaaaaaaacggcccccgaaccccaaataccccccttgaaaaccccccgagccaagaaaaaggcccccccaaaaaggggggaatgtgatgcccccccaagaaccccaggctcataaaacggggggaactgtaatgactgaagaggcttttcctcgggca

SEQ ID NO: 32074 - DNA, 229 bp, Glycine max
  unsure (1)..(229): unsure at all n locations
  Clone ID: PAT_MRT3847_128969C.1
tatcatgaactatattgataagatggaccatgttatacccatgtgcttgactgcagacttgtagattgctggcaagtaggctgagctgatgaccaagattgacaggcgatccgtcgaacagctngagacggagcccaagtttttgaagaacggtgatgctggttctgcttagatgattccaaccaaacccgtggtttgttgaacttcctgcgagtatccttcattaggt

SEQ ID NO: 32075 - DNA, 376 bp, Glycine max
  unsure (1)..(376): unsure at all n locations
  Clone ID: PAT_MRT3847_12896C.1
tgcaagtgtaggaggctggcttcaatttgtatcaagcctgagttccgagctagcaaatgtgaagaaggctgctgtatggattctggagttctccacagtgaaggcttaaaacttncgaaaggaattgcaagcatagcagaagttgtgcaattaaaccaaaccatggcatcagatgnaagcagtcagaattcacagatcaatgaacaattcatcagaatggctgaggagggaattccaaaattcaagcccaagaaagtgntacttcccaccctgtgaagggattacagagtatttcngggaattgacaaggagagctcnccattagatctctggtgtagagnttctagcagtctgacggcngcaagagtggatgnaa

SEQ ID NO: 32076 - DNA, 390 bp, Glycine max
  Clone ID: PAT_MRT3847_128970C.1
aaaaaaccaaggggatagatatcagaaaaaatatgaacccgattcttttttttttttggcgcaagaaaaaaacttaggctagaaaccgcgaaagcctgccccgaatcaaaattcccaaaaaatgggactcattccacttccacaaactcatccaaagcaaaatgggtgggggaaaccttggcaaaggtgactttggtgaaaccaaccccaacaggggagcgagggggggggccctgatcaacagcaacccctgaaccagggcctttgaaccaaaaggattccttcctaaaaaacttcaccttaacacccctcttggggccaaaaggggggggttttggctttgcttcaacttcaactggaggggggggggttgcgggtgccccccctgca

SEQ ID NO: 32077 - DNA, 624 bp, Glycine max
  unsure (1)..(624): unsure at all n locations
  Clone ID: PAT_MRT3847_128971C.1
ccacgcgtccgattttcttttctttttttgtttttttttttaaattgcccttttgatgattttttaattggattgggtttgctaaaagaaaaataggaattaggggatcgtgggaagttttttctttttttaataaataaccaaaatatctgcaacagggggaagaaccttataaatcttctgctttttttttttaatgttatgaattaataaaactgaaggttaatatgatcaagttccaattttcagttacctttttgctgaatatgatcgatttgatggtgttttcttcataagcatagctcgggtggttggtgtggcgttcaaccatcaattcatttattttcaacacaacccttttttatctattattttattgattaatcttttaaatcaagataattttgaatcagttttctttaattaatttttaaccaaaggttaaagtgaaaaatanatttattgtctaatggatggagaggaattttagtagtagcagtttaatctatatatcantgtannaatttttatactgtcagtcaatgaaaaaattgtcttaggtataacttttacagtaattattaaaagtgaacaaacttggcctaataatctgggattgaaagc

SEQ ID NO: 32078 - DNA, 127 bp, Glycine max
  Clone ID: PAT_MRT3847_128972C.1
ccacgcgtccggagatgtgttatataaatagacttgtctcctaatatattatctgtagatctattacttatttcgggacatttctaactgtatcgcacatctacggtcgcgtgcacgtgtgcattgt

SEQ ID NO: 32079 - DNA, 367 bp, Glycine max
  Clone ID: PAT_MRT3847_128973C.1
ctgggcagctgccagaagacgacagaagggtacggctgcgcgaagacgacagaaaggttgatctctccaactaacaattaggtatttgggggggattttagtactagtgatcatcctactttgcgcattgggtccgaagtattccatgcggcccatttaattactcttcaaggggcgggccctatttgtcattgcatattcttttaaaatgggaaatattgtgtgacattgtccaactcgccatgggcaacaatcttctccttatttaggggttaaaaaattgtcttgtctccccgcatggggctattctaaacaaaaacacagatgacaaaccaacctattttaacaaatataaaaatttttgtgg

SEQ ID NO: 32080 - DNA, 256 bp, Glycine max
  Clone ID: PAT_MRT3847_128974C.1
acgcctttcttctacgtttccgtttcctcgttcgaattcgctttttgatctgcgcaaatgagagcgtgcatctcgatccacattggtcaggctggtatccaggtcggaaatgcttgctgggagctctagtgcctgagcacggcatcgggcccgatgggcaaatgccaagtgacaagacagttggcggtggtgatcatgctttcaatcacgttcttcagcgagaatggtgctggaaagacgtgccagtgcagtgtct

SEQ ID NO: 32081 - DNA, 556 bp, Glycine max
  Clone ID: PAT_MRT3847_128975C.1
tacacgagtggggtatgtccttaagaaaaatagcattggaaaaatttatcacattttagactttgctaaatctttgagctatgaatccttacaaagcttaaaaaatgaagacaaaagcacctccttttggacaagtatccttgattcctttccttcaaaggttgatttagattatacctcgcttcctggttaggtttacacaagaggatgccggttgctctagaaccattataaaaacccacaatagagtcatcattccacatacatcataacttcctatgccttccccatcctcagccgtacccattcctaatggatccaactcaacccattatcatattagtaatgatccaactgttcagtgtacgggaggagctcaaagtcaagtgtttaggaatgggtggatttggcaatttgtttaccattacagtagttccgatgtcaatggaactaaagcttgagtcatcctcagatgaccccaatgcgtatgatttaggtcctctataggttgctgggctattctggagccttcatggaaaccaagctttaaatatca

SEQ ID NO: 32082 - DNA, 294 bp, Glycine max
  Clone ID: PAT_MRT3847_128976C.1
tcggctcgagcacccacagtttcgcggagatcactcaaaacgacacagagaaagcatcgaaggtgctgctgctcggttctctcgcttgcgctccagttccgatcaccaccacagggttggagctggggcaatttccaccagagctaaactcaccggcggtgtttcggtgtgtgaaagtgagtgcaatggacgcaccggacgagcgttacgcgtatcaaaccgcagtggacctaggagggcacgtcttcaagggaattccctacgaccaaggcatcgacggtccgtatgccggtg

SEQ ID NO: 32083 - DNA, 370 bp, Glycine max
  Clone ID: PAT_MRT3847_128977C.1
acggccgtgcctgttcccagaacatattgcagtacggacagttcggatcactgaacagatagacggtgcgcggtgcatccggcttgccgtcctcgatccagttgctcttctccatctgcccccagacctgcttggccatcggcccgtacaccagcttgtgcagcggcgcctggctcaggtcgttgccgttggcgtcatacaggttgccggcgaccacattcttgccatcggcggtcaggtacagggccatgccccgattctggaactgggcggcataaccccgcatgccacccggtgcgtcgaagctgccgacgattttcgcgcccttggcttcgatgctcttgatcggcgcgggcagttcttcggcctg

SEQ ID NO: 32084 - DNA, 2381 bp, Glycine max
  Clone ID: PAT_MRT3847_128978C.1
cggtccgggaggactaaacccaggctgtaaaccctttttccatctagagttgttgcggctctcttctctgcacactcagaatgcagtccacactcttcaaccccacccattcccttatccccacttcaccacactctatcagatccaattctggtcatgcttctctctccgttcgcgcctccatcgccgtggaaacccccacggagacggtgaagctgaacaagtacagctcccgcatcaccgagcccaaatcgcagggcgcctcccaggccgtgctctacggcgtcggtctctccgaggacgacatggccaagccccaggtcggcgtctcctcggtctggtacgagggcaacacctgcaacatgcacctcctccacctctccgaggccgtgcgtgacggcgttgctgctgctggcatggttcccttccgcttcaacaccgttggcgtcagcgacgccatctccatgggcacccgtggcatgtgctacagcctccagtccagggacctcattgccgacagcatcgagaccgtcatggcagcgcagtggtacgatggcaatatttccatccccggctgtgacaaaaatatgccaggtactatcattgccatggggaggctcaacagacctagcattatggtttatggcgggactataaaacctggtcattttgagggtaacacgtttgacatagtgtctgcctttcagtgctatggagaatatgtgagtggatcaattaatgatgaccaaagacaaaatgttattcgcaactcatgccctggggctggagcctgtggtggaatgtatacagccaataccatggcttctgcaatagaagctatgggaatgtctcttccctatagctcatctacacctgctgaggatccactaaagttggatgagtgtcgattaactgggaaatatcttcttgagttactgaaaatggacttgaagcccccagatatcatcactcgtaaatcactacgtaatgcaatggttatagttatggcacttggtggatctactaatgctgtgttacatttaattgctattgccaagtctgttggcattgatttgactcttgatgattttcagaaggttagcgatgaggttccttttattgcagatcttaagcctagtgggaaatatgtcatggaagatgttcacaagattggagggactcctgcagttatccgctaccttcttgagtaaggctttttagatggtgactgtatgactgtcactggaaaaaccctagctgaaaatgcagaacttgtccctcctctgtccaacgggcaggaaataataaggccagtagaaaatcccatcaagaagacggctcacattcaaatattatatggaaaccttgcaccacagggttccgttgctaaaattactggaaaagaagggctgtacttctctggtcctgcacttgtctttgaaggagaggaggcaatgattgctgccatttcagaggatccttcgagttttaaggggaaagtggttgtaatcaggggagagggacccaagggtggtccgggaatgcctgagatgttaacaccaacaagtgcaataatgggtgcaggtcttggaaaggaagttgcattattgactgatggaagattttcaggaggttcacatggatttgtggttggccatatatgtcctgaagcacaggaaggtggtccaattggcttgattcaaaatggagacgtaatcaatgttgacatcaagaataggagaattgatgttttggtatcagatgaggagatggaagcacgcaggaaaaagtggactgctcctccatacaaagctaaccgaggagctctgtacaagtatattaaaaatgtgacacctgcttctagtggatgcgtaacagacgagtagaaagacatacctgcagagcaaaagctgatagtatgccttggtgaaattttgtcttgtgtttccagaacaagttggtaaaaattcaaaaacaaacctcatttcagagaatttaaaacaatggaattgaattgctactattgattagtgactatttaatatttatgattttctagagctaccctgtttctagtttcagacatagctaccattgttatttctcaatactagaaaataaggattcattgaaatggcaactacaaaagtaggaataggactcgcatgcaaagtgccttgccgatgagaagcttgatttaaacgatgaaaatgttggttcgagacaaggttatctgacatccgtgagtacatttagttatctaaatccaatttgttgtgggttttactcgcagatatgggcatgtatgattttttttgccatcctaattgcacatgataaaattcattttggcttaaatacatttttttttcttgtaaaaa

SEQ ID NO: 32085 - DNA, 433 bp, Glycine max
  Clone ID: PAT_MRT3847_128979C.1
acccaaaaggggaaattattaaatcccgggggcggggaacaaaaaaaaagggacagggccttttttctacaaggggggcccacacaaccccaaaacaaaaaaggttacgggcgggacaatggggctggggagagccccaaccccttcaccccatgggaaaaattttaaggggggggaaacccttaagggttaggggggcccccttgggacagggaaggaaaatcatgcccctgggaaacaaccgggccataaacaaggaatcagggggggctctactaagcaccaactgggtgggaaaggaaaattttttgggggaaaactctacggccttgaagacggggtaaaaaaaaagggcggggggaccccgatcgaagacccggaaatcaaaaagcttgaccccccgggggtggggtatttaaaggggggagggggg

SEQ ID NO: 32086 - DNA, 170 bp, Glycine max
  unsure (1)..(170): unsure at all n locations
  Clone ID: PAT_MRT3847_12897C.1
ggaggcgcgaaacgcagtncaaagcatgaatattacgctttctgatgttgtttttcaagttgtttttgtgttatntttttaaaatgatattatntncatgattttcacatttacaantaaanatttaacacatctgtnataaatatttaacacaactattatgccatgtg

SEQ ID NO: 32087 - DNA, 343 bp, Glycine max
  unsure (1)..(343): unsure at all n locations
  Clone ID: PAT_MRT3847_128980C.1
tccgatactatttcttctgccttctgtacctgtcgcgtgcgataccctggganaccactcctgaggatacatgtgaccacagccccggcttttccgcccttgtcctcttataggagtagagctcatggaggcctgctgcctatggcagacctccatgatgatcaagcttgtctagaagagatcggaccaccatcctagcatctacctctgggtgtgaccgtcctattcaacagcaatctttacactctgggaggagggtgctctgacagcaacggttgtgcaggggtccttatacacgctcagggatacactggtgcttccacagcagcaacagtgacagagc

SEQ ID NO: 32088 - DNA, 303 bp, Glycine max
  Clone ID: PAT_MRT3847_128981C.1
attcccgggactgacccacgcgtccgcccacgcgtcagtacaggcgtcagagggctacgaaaagacaaggtctgggagacggtcagttctattcgggagatcccgatgttctccggtccagtgccatggcttggggtcctggtcgctactctgagatccgcatgagggctacggatgggctgttcacggactaccacagtgacgacgaggttcatcatcaccagctactcacctactggagtggctattacagcagtcaggaaccacgagaagtgacctgtgtctggctgatgtcggcaccca

SEQ ID NO: 32089 - DNA, 348 bp, Glycine max
  unsure (1)..(348): unsure at all n locations
  Clone ID: PAT_MRT3847_128982C.1
atggcatggttggtattagggttcatttgcgagatgatgtgggtatgggtaaattctatctatgagatantgaggtatatgatcatggccatctgnagattggaggcctactttgttattcttgataggctatcaatggtgcatgtggtgtcagtagataaaccaatgtcatgcccatcactatcaatcatcgtggtgcctcacgatgctcaagaatttgaagtgaccccagtgaggtttgatgtcactgaggaccgaggagatcacaccaacatgacacccgagggggaggaagtgtatcgtgagcttctacgagatttagagctttcatctgaggaggaggattga

SEQ ID NO: 32090 - DNA, 326 bp, Glycine max
  Clone ID: PAT_MRT3847_128983C.1
aattgagtgtgtttaaatgtatcaataaaaaaaacaaaggaggaacaaacaaaaaaatacataaaaaaaaaaaaacaaagataaagctaaacaaaaactgaaatagacaagcaatactaaagatatcaacccctgacttaaaagtcatggaaaaaagacaaatacgggggggccccccaacttgtgtttagcacgccccatgatataaatcatgaccctgaaccctgggtgttcccatttttccttgtggggggggtatttactaaatgagcaactggagctgtcttctctcccccgtgataaattttcttccgctcaaaatttaa

SEQ ID NO: 32091 - DNA, 834 bp, Glycine max
  Clone ID: PAT_MRT3847_128984C.1
tactataagaagggataaacacaagcactatcaacaccaccaccaaattaccattatatcaatagccttgttgagaaagagttattgccacttccaaccccttcaattccctaagctttctacaacacaaaacaaactccggagacactatatactaattttagttcttttgcggcttcctgactcgaaattcagagactaatctcttgaggttggaggtatgtggcgccttgtggctgcgttgaccaggaaacttcaaaacacaaagaagggttcaagggtggccgatgagaacatgtttgaggctgcaaatggggtcgagctagccatgtttcgacacgatagaggaagaagagaccatggttggagtggaatctcacttatatatggcattcttcatgcccccatatcaatcctctcatgcgtgtctcatcctcaagcaaacgggtcagatggggtttgggtgtctggtgaatttgttcagatttctgaaatgaatcatctaatggtgaatgatagcatgagatatgcaattttgatgtaggaagttagtatgtgcatgtatattaaatatgtagcttttgtaattggttggcttgggtttctctagctagggacttctatgaattagattggactatagctttctttaatttgccctcatttttccctttcttatcttctttacccccctagtttggattatataaaatacacttggtgattgcatgaatcggctaaagatgtgacctatctttggttttaatccatgtgaaagaattttccacatgtgcagatgttagtaaagaagtacatgtttttggaatggataat

SEQ ID NO: 32092 - DNA, 595 bp, Glycine max
  Clone ID: PAT_MRT3847_128985C.1
tttatttagtttccataaaaaaggttgtgtctcgaggatcatcaatgacacccaagcatttaacaagaaatcaagtcagtggcagcaaatctccaaaagcaacttcctggtcttaagattgtagtctttgatattttcaaacctctctatgaccttgttcagtccccttcaaaatttggttttgcggaggcaaggaaaggttgctgtggtactgggatagtggagacaacatctttattgtgcaatccaaaatcactaggaacttgctctaatgcaacccaatatgtgttttgggacagtgtccatccttcacaagctgctaaccaagttttagccgatgctttgattgtacaaggcatagcccttatcacttaagggctcatgaggccataaacgtacgttctagcagtgtaccactaatcatcatggaaatgatgcacgcaccagtttgttatttttccagtccgcagaagcctgtattgtagtatttaataaaattctaagaaatttcattttaactcgttttggagtacactggttatattaatttgtgtttttttaatccttcttcaagaatttagtcatggtcatcatg

SEQ ID NO: 32093 - DNA, 743 bp, Glycine max
  unsure (1)..(743): unsure at all n locations
  Clone ID: PAT_MRT3847_128986C.1
cggtccggnaattcccgggctcgacccacgccgtccgcaaaacttattaattcccccatcaacccctcttcttatcatcattattatattcaaatattaataaaaacattacacaccagccgactcaaagtgggcgtccctttcatttttttttctcaacttctctctttctttctctggctcttaaaaatgggcacaccaaacccaactcaaccaaacgatgggccctgacccactccgccggcaatgggaaagcccggagaagaccacctctctctgccctccgccgaggatccgcggcggaatgcggcggcggcgtctggatgcgccgtgggactccgatgcctcgtcgtcttgcttttctcggtcgcggttttcctctccgcactcttctggctacccccgttcgctcacttcgcagatcccaaggatctgtatttaaattcaaagtacaaagatcatgatattgttgcaagcttttatgtgcagaagccagtttctttgctagaagacaacatcttgcagctttctaatgacatttttgaagagataggagctccctctaccaaagtgatcatcttgtctctagatcccttaccacggtcaaacacgacaaaagtggtgtttgcagttgatcctgatggtaaatattcagaaatgtctgcagctgccattagtttgataagagcatcatttaaatacctggttatacgccaatcatatctncagctcactacattctt

SEQ ID NO: 32094 - DNA, 668 bp, Glycine max
  Clone ID: PAT_MRT3847_128987C.1
cttccccaaccttccttgaaatttcaaaccctaaactaaacaaaactattaattcccccatcaacccctcatctcatcacgtattattatattcagataataataaaaagaaaaaaacatcactcaaactcactcattttttttctcaacttctctttctttctttctctggctcttaaaaatgggcacaccaaacccaacccaaccagacgatgggccctgacccactccgccggcaatgggaaagcccggagaagaccacctctctctgccctccgccgaggatccgcggcggaatgcggcggcggcgtctggatgcgccgtgggactccgatgcctcgtcgtcttgcttttctcggtcgcggttttcctctccgcactcttctggctacccccgttcgctcacttcgcagatcccaaggatctgtatttaaattcaaagtacaaagggaaagggattcagactaatccggagttcggttgggagaagccagtttctttgctagaagacaacatcttgcagctttctaatgacatttttgaagagataggagctccctctaccaaagtgatcatcttgtctctagattccttaccacggtcaaacacgacaaaagtggtgtttgcagtttgatctgatggtaaatattcagaaatgtctgcagctg

SEQ ID NO: 32095 - DNA, 442 bp, Glycine max
  Clone ID: PAT_MRT3847_128988C.1
gtggaaacgccccccagcacgattttctgttgttgatgatgcgaaaaaaaaagatttcaccaggggaagatgtgcaagggccaccccacattaaagtgttggggacacgtatgctatatataggatcattctgtggaaaacacggggaaggtatctagatttttgaagagagccctgatccctacaatctggttgtccttctataacgcgaacagatctgcgggggcgctattttggactcctgtggcggaagacagacctggtgaggcggggctggggctgagaccagcaaccagctgagatcccctacaggaaatatgaatcttgatggagagccctaaagagcggatgggaaacctttgggcggtccaccttgccttgcaaaccgggaaatgaggcctggctaagatcgccatctaatcgctttggggaatgcaccctg

SEQ ID NO: 32096 - DNA, 350 bp, Glycine max
  unsure (1)..(350): unsure at all n locations
  Clone ID: PAT_MRT3847_128989C.1
tgaaaatggtgaagtgggaggttctttttctgtttcagaaggtgtgaaaaagaagcgtggaagaaagagtaaaaaggagaaggaggacatggagaggaagatgttagaggagaaagatgctcaaaacgaaaaccatggtgaaaatggtgaagtgggaggttcttcttctgtttcagaaggcgtgannaaaaagcgtggaagaaagagtaaaaaggagaaggaggacatggaaaggaagatgttagaggagaaagatgctcanaacgaaaaccatggtaaacatgttgaagtgggaggttcttcttctctttctgaaggtgtgaaaaataagcgtggaagaaagagtaaaa

SEQ ID NO: 32097 - DNA, 411 bp, Glycine max
  Clone ID: PAT_MRT3847_12898C.1
gacccaccccggcgaaactcacgcaaacttcactctttctttctgcacaatatctatcccatccatttttggcgaattatcatgacgatatgaggatacctttggatatgataatccacaagcttgttaaagcttacatttgctcgtcttccttacgcaaatctgctttacgggctcttgcaaagacattaacagtagctcagctaacatatctcagagatcaatatactctgttagggccaaacaaaagtggattaatttctatgcagaactttaagacggtcagcacatatctgaagttagaagttattgttcgtttttcaaatttctttaaggcattaacggttatattggcaggctggtttgaggagctccacagatgcctcaaaggattcacgggtcttagaatat

SEQ ID NO: 32098 - DNA, 377 bp, Glycine max
  Clone ID: PAT_MRT3847_128990C.1
aaacaagtgccgataatctaatcgtgggaagtcatgattcagcctcgtggcaagacaacatcaacaacaacaataacagcagcaggtttgatgattcttctctaaggtgtgtgtttccttgtgaaaccaacgaaaggcctagccaaggtctttcactctctcttagttcaaccaacccttcctctatcgggttgcaatcttttgagctaagacaaacaggccaacatcttgattttgtttcgtcgagttccagagatgggttctttggaaaaccagtttctcttcaacagcaacagatggtatcacaagatgggtatgtgagttctaattctaaagttgcaagcgtttatcaacaaggacatttcctggtgaagaac

SEQ ID NO: 32099 - DNA, 541 bp, Glycine max
  Clone ID: PAT_MRT3847_128991C.1
tttattttaactcctccttgtatatgctgaaccattattctaaaaaagcatgtgtcacatttgtgacagccccaactggaacttttgttgtatgcctccttcgctgccgaacaatggaacactgcatcccttcactctgcttagaaaaggtcctccgtttttaaaaaatgatgacctaaatatgcgaaccaattgatgctgttgacctgcaccaaggtattgctcaaggaacatttgacacctccctttatccaagattgcttgccactggcttgatgaaccaaaatgctgttgactaaccatggctcccagctgaaaaggggagtggcacatgcctttcaactggatttaaggagacctatctgcaggaccattgaagcgaacaagatctgtgagtgatgcgcttaaccaccatgagatttattgtccagacatgttatttgattgtataaaaatgcagccttacatagtaaccttttactcgtcaccatatttagaatgaggtgcactgaggatttgggaaatgggcacattctttgtt

SEQ ID NO: 32100 - DNA, 182 bp, Glycine max
  unsure (1)..(182): unsure at all n locations
  Clone ID: PAT_MRT3847_128992C.1
cncacnntcntcgcgntcngnnttngtctgntnntnttgnntggtnnncgccggccncngtgntccagtgtncngcggcnggctcgtnggtcntttgnnagggagngtggtntntgcggctgtgttgactncntgggnnggtggnnnnnngngtgctgnntngnttggttnggtnnntgttc

SEQ ID NO: 32101 - DNA, 357 bp, Glycine max
  unsure (1)..(357): unsure at all n locations
  Clone ID: PAT_MRT3847_128993C.1
aatgttgcacgcgtacgtaagctcggaattcggctcgagnnaacatccatcatcattattattttactcnnaangagttganacngattnctannaatatangaantaanagaatagagagnncatgcaactcntnnnaanaannnannnnnnnncanggtnntgntagnnnaacanatananatnaancaanaaagaaacaagtnnaanattngaggtnnagaaanttnantaagntnnaaagttaangtgnnannatnntaannagnnntggnttaaagangnangantnaaaaggntnaaacggnntnaaaagtagngggnncnntcaaanganngnnttnnaaggnancaaac

SEQ ID NO: 32102 - DNA, 919 bp, Glycine max
  unsure (1)..(919): unsure at all n locations
  Clone ID: PAT_MRT3847_128994C.1
ggaaattagtgtttgtaggtaaagacgagaatgcagtgcgacagcttataagcatgataagtagtgacaactgccacgtggttgaacaagcctgctctgctctttcatcccttgcctctgatgattccgtggcattgcatctgatgaaagcagacatcatgcaaccaattggaacagttctaaaatctgcaggtctggaagaggtaatatctgtattgcaagttgtggtccagttggctttcacatctgatactgtggctgagaagatgttgaccaaggatattttaaaatcattgaaaaacttatgtgcccataaagatccagaggtacaaaggctagctctgttagctgttgggaatttggccttcagtctggaaaatcgtcgcatacttgtttcttctgaaagcttacgagaacttctcttacgtctagctgttgcaactgagccacgtgtgtataaagctgcagctcgtgctttggcaattcttggagaaaatgaaaacctgaggcgtgcaataaaaggaagacaagtgggtaagcaaggacttcgcatactctcaatggatggaggaggaatgaaaggtctagcaactgtacaaatgctaaaggaaattgaaaaaggaactggaaaacgaatacatgagttgtttgatttaatatgcggcacatcaacaggaggaatgctagctgttgcacttgggattaagttaatgactttggaagaatgtgaagatatatacaaaaatcttgggaagcttgtttttgctgatcctgttccaaggacaacgaagctgctacttggagagaaaattagatcaactntataaaagttcatcacagagttntaggggttgttggtcatggatcaaaacatagtgcagaaacagttgaaaggctattgaggaaaatgtgtgctgat

SEQ ID NO: 32103 - DNA, 307 bp, Glycine max
  Clone ID: PAT_MRT3847_128995C.1
caaatttcttcctcaatcatctcttccccagctgttaccactgtcaaccgtgcctgtgccggcatggttgctccattcactgtcctcaagtccatggcttgcttccccaccataaagaccaacaatgacattacctccattgctagcaacggtggaagagtgcaatgcatgcacgtgtgtccaccactttgcaagaaaaattttgatactctttcctacctgtccgacctttgataatccacaattttcaaaatgaaataaaattaccttctttatgaaagttattgaattccctttcttttaaatt

SEQ ID NO: 32104 - DNA, 192 bp, Glycine max
  unsure (1)..(192): unsure at all n locations
  Clone ID: PAT_MRT3847_128996C.1
cangcacgcgtncgtnagctcggnattcggctcgaggcngccgnntttcttgtgctnccaannnncnagttacatgtatgcgtagtcttnttttttcntntngatgtactttttcatttaaaanangaatgcancaaannnggaacnaaanacnnanaaagngccnngaggncangngnggggggggggggc

SEQ ID NO: 32105 - DNA, 283 bp, Glycine max
  Clone ID: PAT_MRT3847_128997C.1
acgcttggattcgtacattacatccacttttggttgatgattggtgcaatgtatcgtatgagcgtgacacccaatgttgaagtgtgtcataaaatggagctggctgtgatacgatgctagaagcatctatatacgacatatttatcgtgaaaagcattctggctgaactgcgacggacgaaagtgatcactcaaaataaaaacataaaacgaaaatgcagaaaaagaactagctgcaccatccgcatttgcaaatgaaatcaaatatcgaaactcgaatgaaa

SEQ ID NO: 32106 - DNA, 507 bp, Glycine max
  Clone ID: PAT_MRT3847_128998C.1
ttcggctggagtgttactgtcaatgtcacaatgacgcaagtgtaaattatgcacatcactacttgaaccactcgtacgttagagaataggatgtccctacaatgaatgcaactatatattgaatccattcagaaaggaaccatggaaggcttttacaaggagtttacctatttccaaacgcaatcaaagtccgtcttttacgaacaaaacagcctggggcatgaaactcaatgctctgaatagacctccaaaaatggaaagcacccgtaatggctcgatgaatatatggtggactgctgtgaacctgtagaaactcttacgctagcaggcatcacaatacggtaagctggagcgttagcctcattgtgccgcagcaaaagttgatgccttacatcctacacatatcaacatggatgagacaggtaaatctctgaaaaaacgttccatgtaccaggactgacacttattttcatactaccacagaactggcctcatacaaactgaaat

SEQ ID NO: 32107 - DNA, 177 bp, Glycine max
  Clone ID: PAT_MRT3847_128999C.1
ccacgcgttcgtagattagtagttcatcaaggccggtgccgaggagagagagtccatgtttagtgagtggtagagacttttattgctcataatactcatccatactttcctctttcaatgtcgtatgtcgttattttctggttcatacctaacctttatggttcacgcttctcttcg

SEQ ID NO: 32108 - DNA, 768 bp, Glycine max
  unsure (1)..(768): unsure at all n locations
  Clone ID: PAT_MRT3847_12899C.1
attannnnnnnnatataaacataatactgctcatgtagaattttgggtgagacacattatggagaatattctaactatgaattaacaatagatataaaagcaaacttgtttccttttgtttgcccatgacaagacggagatcggtacgggcttaaacgcttttgcatatgtttggatagaacttggaagatttcgaaaattcttttactttagaagcaataatttcttccttattcatttgataccttaaatttttttattgtatatagattgaaatttataaaaatactttcgaaacttaaatccacacatttttttactctcaaatgccatttgggataaagacctctatcttgctgttgctattcccagccagaaaatcgaggttgtataatataagcaccattgccattgaagagaagaaagttagcacaggtccaaagatccaaagtaaaaggggaagtgccgaatagaaaagcctgttccctaccgtgttcaataagatggccttgtccaaaagttgagttaaatattccaaggtcactaaagacttgacatcttgtggggtgcaaataaggatattcacttgattgagaaaccctatagagaaagtgtgaaatagaaacgagaataataatattgcaaggatgatggcatatttcagtcccaccataaagtcactgtgtgctccaaaaattgtgtcgttgattacatttttaacactgtaagtgctnnnnataactnntcctnnnnnngtgcagatgnnnc

SEQ ID NO: 32109 - DNA, 267 bp, Glycine max
  Clone ID: PAT_MRT3847_1289C.1
aattcactctgtacaattcttcggtcggtctctggaggtattatccttttggagcttaaagggcggacgctgaaaccttcgttttccaggctgagatcaaccagcttttaagtctcatcatcaacacattctacagcaccagggagatttttttgcgtgaactcatcagcaatgcttctgatgcttgggataaaattcgattcgggagcttacccgacaggagcaggctcgatgctcagccaaagctttttattcgtttggggcctg

SEQ ID NO: 32110 - DNA, 396 bp, Glycine max
  Clone ID: PAT_MRT3847_128C.1
ggattcatatatatatatatatagatatagatatagatatatatagtaagtaaaacatttactactaccaatgacatgacctgaaatatggtttaaaaaaaaagaaagaaaaaaaaaaagatttgcaagggcatagggtttcatttttctccaatggggtatatagggtataatataaattctctggccctactaggcttcctcttcctcttcctcttttaacgcgttggggccattgttaccggggccgccgccgaaattacatttttgtgagagacgattccggcagggacgacgtggggcggcgttttcttctccccgtaaagaaacttgtggaggacgatcaagctcttggcgagcacgtgatcgtgccaggcgtcacgtgacccaaggaaa

SEQ ID NO: 32111 - DNA, 377 bp, Glycine max
  Clone ID: PAT_MRT3847_129000C.1
cccttattgcagccagaagacgacagaaggggggaggggaactggagggcctaagccccaaaaacccccagaaacaggagcaacagcacgaaagcgcactaaaacacacaagaccacggaagaaccaactgacgcatgaaacaataccagagccacataaaaaggaaaaggccctacaagaacaaaacaacactctcgccaagaagacaaaggagaaagagaaggcactagcccaacaggcacaaccggagcgaattggtgatgaaggggatcagacttcctcagcccaagaaccccaaccaccggtgacaacaaacattagaacccccacacaaaccagaggagaaggagataaccaaagaaccccaactccaacc

SEQ ID NO: 32112 - DNA, 481 bp, Glycine max
  Clone ID: PAT_MRT3847_129001C.1
tccaagaaggtttcccgtcatcactgtatgacgtcctccttctttgggggggggggggggttgctacgggaatcaagagagagagccgaccgaagcaaagctattcatggaaacggatacaaaatggaggaaataaagggcagggatatgtaggataaggggttgacaaaggcaaacaaatttaaaagagagcaaagtggaaaaccaaacccacttgcgttgggtaaagaatacaagttgcatggaagggaggacgtgtagcaggggttgtaggggcaggatttaccgggggttccgttaaaacgccgaactgagtgggcgtgggcattgcacacattaagcccacagtattagtgaatgcgggtgggggcggcgttgtagcgtacaaagaacacgataaatttagtttaaaaatcgtaaggacgaggttaacaagcggttggttcgcaaacccgtagctacgaagcgcgacttaaagttg

SEQ ID NO: 32113 - DNA, 1832 bp, Glycine max
  Clone ID: PAT_MRT3847_129002C.1
tctcacacacagtttgtgtcactcttttttttaattttaattttttttcatttatttttttgcattttcttgtgttcttcaccttgagagggtcctctgttctgggctctgttttctaattggagctcgagccgatcggctcgaggttggttttgttgccaagggaaatcaagcaaaaaatcggttgccgaagaagactaccgcgacagcctcgaccagaaacccaccaatttcaccgcgacagatagcgtaaaagttgatttcaaagtgaatgggaataaggaagatggttctaaaggtgatcaacttgctctggacgtaaagagtttaaatttgaaagaggaggcttctcaggatagaaaagataatggcaatcgggcacagacattcagttttaatgaacttgaagctgcgacgggaagttttaggttggattgttttttgggtgaaggaggctttggcaaggtttacaagggacacttggagagaataaaccaggttgtagctataaagcaacttgaccctaacggacttcaagggattcgtgaatttgttgttgaagtgttgacattgagtttggcagatcaccctaatcttgtgaagttgattggattttgtgctgagggagagcagaggctattagtttatgagtacatgccattaggatctttggaggaccatttgcttgatattcggccaggtagaaaaccacttgattggaacacaagaatgaaaatagcagctggtgcagctaggggtttggagtatctgcatgataaaatgaagcctcctgtaatatatcgggacttgaaatgttctaacattttgttaggcgagggatatcatcccaaattatccgattttggcttggcaaaagtaggaccaattggagatgaaaacccatgtttaaccagagttatgggaacatatggatattgtgccccagactatgcaatgacgggtcaattgacgttcaagtctgatatttatagctttggagttgttcttttggagatcatcacaggcaggaaggcgatcgacaatacaaagcctgctaaagaacaaaatctagtttcatgggcaaagtctttattcaaaaaccgtaaaagattctgtgagatggttgacccattgcttgaaggtcagtatccaatgagaggtttgtaccaagctcttgctattgctgccatgtgtgttcaagaacagcctagtatgcggcctgaaacaaccgatgtggttacagctctagattaccttgcatcccagaaatacgatccccaaattcatccagtacaaaactgtagaaaaggtttatcttttccaagagaaagaagcagtggccatagacgtactgttagtaatgattctgatccaagagcaagaagcgatggtcatagacgaactgtttgtaatggttctgagacaagagcaagaagcaattgtcataaacgaactgttagtattagtaatggtcatagtagtagttctgagacagaaagctctagaaaaggtctatcttctccaagggtgagaagtgatggtcacagacattttgttagcaatggttctgagacagacagttctggagattagaaatgtgatgtgtttttggatattcatattgtaaaatgcttagctatccaattttgcttcatataaagaagattcttctttttggctcttctaaaattggtgtacatgtgggctggcttttttgtattcaagatggatgcctctcctcgggaatttttgttttgctccatcttttagaatttatcctctgccacaagaatccactttttgatcttaatgataattgcagttcctgggtc

SEQ ID NO: 32114 - DNA, 491 bp, Glycine max
  unsure (1)..(491): unsure at all n locations
  Clone ID: PAT_MRT3847_129003C.1
gtcatcactgtatgacgtcctccttctttgggggggggggcgggggggggttgttataaaaggggccaggctgtgcgggtaggctaccattacaacgtttattaggccgaagtagtacgccggcaggcgttgaagacagtaggccaggtaaacataggttaagtggatgccgcacagtaccgaattagtaatagctggactaaaaggtacaacattacaggtagtggcgactttaacggtggttattgggacgtggcagcgtagtagtacatacagtattaacgaaagcggtgcagagggttagggagcccntgccatgggtttgtagtggtatagggtagccgccttgttaggggtgcaggtatgcgttagatgcgggctgctggtaatgcacgcgtagtgtggattccatgttaggcctggtcgtaggacagcagttactggaggtcatgcaaggacgatacgggcaggggctggtggaacactggaaa

SEQ ID NO: 32115 - DNA, 386 bp, Glycine max
  Clone ID: PAT_MRT3847_129004C.1
aggacaaaaggaaaaggccccaaattcaatttaagtggacacttttactcaaaatttttacggaaaacattcccatttgaaaaatctagggaaatcctttcaaacttggcattttttctttgcccctaaaacattgagaatttttaaaatgtttcccccaaattccatataaacttttagcacttggatcagcacaacctttaggaaccgaaatttttacttgccaaatttgctttggctccaattcaaaattggaaaaaagttcccctgttaatagcatccttgttaggatttccaagggcagccttgtttaaatacttgtgaacccattggactcttttgacattctcttgttcttggacaaactttttaccataccttaaaaa

SEQ ID NO: 32116 - DNA, 759 bp, Glycine max
  unsure (1)..(759): unsure at all n locations
  Clone ID: PAT_MRT3847_129005C.1
gctgcgagaagacgacagaagggggatctgggacttgcacttgttcctgttttgtgggtttttgctgctttaaacttcccttcgggaacatcattgccacttctatggctgcctcacacatcctttataatcctcctcccctttccaaaacttttattaatcaccctttgaaccaaaacccttctcctcaaaacctaattctaccactcaaagctactattaaaccgcgggttcttagagcagttcacccccagaagatcactgctaactcctcgcttcataactccgatactaggactcgttttcagcactgtttcacaaagagtgaagatgggcttttgtattgtgaggggcttaaagtgcatgaaattatggattctgttgaaagaagacctttctacttgtacagtaaacctcaaattactagaaatgtggaagcttataaggacgccttggagggtttgaggtctataattggttatgccatcaaggccaacaataatttgaagattctggagcatttgaggcagttgggtttgtggtgctgtgcttgtgagtgggaatgagcttagattggctcttcgggctgggtttgatccgacaaggtgtatctttaatggcatggggaaagtcttggatgattttggtcttggctgccaagaaggtggtttttgtcaacattgatagtgaatttgacttggaaaacatcatagcagctgcaaaaattgctcaaaagaggntgaaatgttttactacgga

SEQ ID NO: 32117 - DNA, 197 bp, Glycine max
  Clone ID: PAT_MRT3847_129006C.1
aaatataaatcggctgtgggggttggttacaaatataaatgatacacaaacccttacaacacgaacaaatagtggcaacaaaatcaggttgcatggaaggcccatccatttcaaaaaagtgcctaaaaccataattaatgggctccgaaaaagaaatttggttttttacccgcccatatgtttttgaactaataaaa

SEQ ID NO: 32118 - DNA, 506 bp, Glycine max
  Clone ID: PAT_MRT3847_129007C.1
ccatccgaatccattttatttataaataaaaattatactccaaaggaaaaaaaaagattttaaaggatcccaattataaaaattggaaggggaaataaaaaaggaattatttttttaaaaaatttttttcaaccgggcccgggagaaaaaaggggcccatcggttctggaaaagcccccttaaaaaggacttcggcttccccagggaagggctgggaaaaaaaaaagatttcttggaatggggggttatccgggttaaagaaagcccggaaaccaacaagaaattcccttaccggcccaatttcaaaggaaacaaaaaacccattcgtcccagaaaaaaaaggtattatcgggcctcccacggaaagaggagctgatggggattgttaaaccaacccgcgcaaccggggacccctggctaatggatttggagaagctttatcgagaccagaagcgaatggggcaaaagcttctaattcggggaatggggctaatcccaattttaat

SEQ ID NO: 32119 - DNA, 321 bp, Glycine max
  Clone ID: PAT_MRT3847_129008C.1
ggggagaaatataaaaacatttttttgtaccaaaaaaagtgttaaggggtttttttgtaaaaaaaacagaaaagaaaacgggcgggaaataaaaaatagatccccaaaaacccaaagaagctccccgaagggtctctctgcaaaggggggggggggcgggggccaaaagggggaaaaaaaaaggtcatgggaaaaaacaggggtgcaataacaacaaaaagggggaggggggcaatgatagggggggatagggtttttaactccatgattgggttttcaaaggcatgtgttttttggaggggggcgctgttttttttgtgg

SEQ ID NO: 32120 - DNA, 736 bp, Glycine max
  Clone ID: PAT_MRT3847_129009C.1
tcgtaggaaaagcagtctaatacacactataaatgctcctccaattattcattcttgtccttgttcactttctgagaagatgaatctacgggtttatcatcataatctattaatgcaattaaaatccgaagagcgagtctaccaacttgacgaaatagaaaaaaggcgatttccagccggaaaaaatccaaaaagtagactcacgatgagaaaagtgtatgtggctccaatgacagttataagaagggaaagtgcagagttgttggccacaactagacgcacagccgccataaacgccaccggcaccgttacaaaggcaagaatcaaacaactcattgcaaggatagttgttcgtgttgccaatttatgatcaaaaatcaatgccatcaacataagtccacacggacgcacggggcgacacatagctgtcatgttgaaggtggtgaatacccaaaagaatcgtttatgagctaaaactgccatccctctatttttagggtttgtgtcatcggaactgtatacacctcctggcacagtgaaagccgctgcaaatgtcacagtgaccatcaatgtggccacaactaaaaatgtgttgatgagatcttttaaacttgaatttgttttggacacttgctggtgttgagaacgcaacatattatttaccttcacgggaacaccagcttcttttaatactcgatttgctagaaacttgcgaatcgtcatttgatttttcagc

SEQ ID NO: 32121 - DNA, 221 bp, Glycine max
  Clone ID: PAT_MRT3847_12900C.1
tcaaccaccctacaacagcattcccctaatattaactcgatcatcatatacctattccccctctcactcctctcccccaaaccttccttccccttcccccacctcctctcctcaactactcccctaaccctatagcccctcacactctttaattaacttactaacctcctaacccaccatacaaacacgcattcctcttcccatatacccaatccaaaccc

SEQ ID NO: 32122 - DNA, 412 bp, Glycine max
  Clone ID: PAT_MRT3847_129010C.1
tcaaggaacttggtcgatcccttttataagtgaacgttaaggttaaatgtgttgtgggtgcaaaaatgttggcagtgggggttctactcaaaattcctgttccaaaacaaacattaaaaacatattttacagttacatctgaccgaacaaaatacaatgcttttattgattgtttgcttttgaagattagaaaattccttttgcataccgagtcaaccttatttgcagaagttgaacttattttcacaacaacatacaataaatcttggactataccaccaattcagatggagtttcatgtgtgttattgctttactaattccatcaaaatggtcaagtgtcatactatatctgctctttacttctcattttgtatgttgtattcatagtgctaaatacatacttaatctta

SEQ ID NO: 32123 - DNA, 393 bp, Glycine max
  Clone ID: PAT_MRT3847_129011C.1
gaaacttaagaacagggttctggtctatgggtgagatacatatgggcagagactcaacaacatatatgccatctcattatcatttcccagctgcaaataatttataactcggcgggagcgggtcaaaattttttttttttgacctcaaagctctacataaaagagcttgtggtcatcattttagcagaagagtacaaagggcctgctagctcgagaacttacaatgctttaagtgcccttacgaaacgggttagcatgaatcaaccgagccatttcctgtttccacaaccaaagtccagagggccttacgccaccattaaatccgaagatatgatgtgaccaacaaggcgcaggttaatcggatccacctctgctacacgaagcgcctgccac

SEQ ID NO: 32124 - DNA, 541 bp, Glycine max
  Clone ID: PAT_MRT3847_129012C.1
tgtccctccgcaagaggctgagaaatcttgggcacaatctcaaggacaaagcctcggtgatcgcagcatcactctctctcaagcgccacgtgtcctccgtccgcatccatgtcctccacgccaccacccaccgcctctctgctccgccatccacgtcgcaaatcgccgccgttctctccgccggaaaaggctcctatctcctgtcacgcacctgcatagacaccatcatggaccgcctccacagaacccgaagcgccacggtggcactcaaatgcctcttcactcttcacaacatcgtatccgagagaaagggacccttaacgttgaaggacaacctctcccactacccttcgaacggaggacgcaacgcccttaacgtttccaccttccgcgacgacacggacgttgaaaccatggagctcagcgcgtgggttcgatggtacgctaatgttctcgaacatgtcttaaccgtttcgcgcgttttaggttattatctaataaactcgaatgacggcaccagagaggttttttcgagtgtcga

SEQ ID NO: 32125 - DNA, 1337 bp, Glycine max
  Clone ID: PAT_MRT3847_129013C.1
actaaaaaccatataaatcataaaataggagtttcaacaaagtcacagagcatgaagacagatcttggacatcctgccttcttagattgatggccaattgttagttacagatgtacatcaaacacccacttcaaattaaaaccagcgcaagacccacttggctgtctcgatccccgctcgctttacaaaccattatcaaagaagtgtgacctagaacaattaagctactaccggcgatccagggaactggttggggttttatactaagctaacaagcccattaaggaccatggtgatgcttcagcttatgctcaaagtaggaggacccatgaagcagatctttttcatgcagaaggatctccctttgttatacccatggcacaacaagatcaccaaccctaggtgtacaaatgaaaatgtccacaagatggattagctgaactctgcctacaagataaaattgagtgttgtgaagagaactatgggcttgattcccataggccatcttcttctccaagttctatccactgatcccaaactaagcaatgcttaagtcttcctatcaggagtgttctctatcagattggcaaccgagtgaagattcaataggcatattgttatgatctacaaagatttcctttcaatttggctttccttttttcggtttttaaattccaaatccagcaaaccccttttgccggatcaaccccagttgggtttgagaaccattatcaaagaagtgtgacttggaacaatgaagcaacaaccacagatcatgtcaacaggttggggttcttattcaactcacagccttatgcttcagcttatgctcaaagtggggggacccttcagtccagtttttcatttccaatgacttcttcctctgagcttcacaggcctcagccagtgaaccaaccttcttcaatctttggcagcaggtttgtgtctgatggattagctggtttctgcattccagatagaattcaaggtgtggaagagaatcatggagttgcttccaataggccttcttcttctcctagttctatccactgaccccaaactaagcaatgctttagtcttcctttcaggagtgttctctaccagatttgaaaccgagtgaagattcaataggcacattgttatgatctacaaagatttcctttcaatttggctttcctttttttggcttttaaatttaaagttagttcccttgattcaacccttgctatctatatgtataattttatattgatgaaaatgaccttgtgctgaatttggttttgtagtcctctcactgtattgtgaatgttatttcagaataacatatttcatctgat

SEQ ID NO: 32126 - DNA, 363 bp, Glycine max
  unsure (1)..(363): unsure at all n locations
  Clone ID: PAT_MRT3847_129014C.1
ttcctctcnatctcgnttttatttttagatctcgaacatctacactggggaagttttcatcatcaaactttttaaacaaaactacccattttatctaaagaatcaaatctcaacttctcttcaattgtccataaataccctatactatctatccttctaggcgaaaacaccctttcctttaaaatataaaaaaaaaatccaacacagttgttgtcacccctcaatcttccttttattttatcattaccattctaacacataaatatgcttccctctaattttcaattcaatcatttatttttttttcacatttatcaatctttttatattaccattcccaataatatcactgcatacattttc

SEQ ID NO: 32127 - DNA, 1575 bp, Glycine max
  Clone ID: PAT_MRT3847_129015C.1
tgtgcgtccggtttacttcccccacttccccttgaaatctctgaagcccttctcgttcttttttgttttttttacttctctttatctccctcaacaagattcctataaagttcgtagcggctttcacacaactttaagaaaatctcgtgaatccgtgatcgcaaacaaaacaatgtctcccccttctatgttaggcaaccgcaaagacggttctgaaattgctgttgcggaaaactatgctgacattaattgggatgagcttggatttagtctagttccaacagattacatgtatgtcatgaaatgtgcaaaaggagataagttttcacaaggatccatcgttccatttggaaacatagagatcagcccttctgctggaatcttaaattatggacagggactctttgaggggctaaaagcacatagaactgaagatgggcatgtacttttatttcgaccagatgagaatgctcaacgcatgaaacgaggtgcagatagattgtgtatgccatccccatctcctggccaatttgttaatgctgtaaagcagatagttattgccaacaaacgttgggtgcctccaccagggaaagggtcactatatattcaaccattgctgataggaacaggagcattgaaaggggtggcacctgcccctgagtatacatttcttatttattgttctccagttggcagctaccagaagggtgcactaaatttaaaggttgaggataaactatatagagcaatatctggctgtggtggaactggagggatcaaaagtgtcaccaattatgcccctgtttatactgcaatggctgatgcaaaggccaacggattctctgatgtgctgttcttagactcagcaactggaaaacatatagaggaggcctcagcatgcaatgtatttgttttgaaggacaatgctatctccactcctgcaatagatggaaccatcctacctggtatcacccgaaaatccatcattgacattgccattgatttgggttatcaggtcatggaacgttccgtatcagtggaggagatgctaggtgctgatgaaatgttctgcactggaactgcagttgttgtcaactctgttgcatctgtaacttataaggaaacaagggtggattacaaaacaggcccagcaacattgtcctcaaaactacggaaaacacttgttggaattcaaacagggtgtcttgaggacaaaaaatcatggacagtccgagtagattcaacaatatagcaccgtttccgtcacaaataaaaagagaaaaatattgcaccgtttgttaaattatgcacgattcttattttatccctatcatcactaagttctcgcctctcgagtttgaaatacttaaaaggcaatgttttgtctcatatagtaattttatcctattcaaataaaattatgtgtaacataccgtggacatgtgatccagaagaaaaagtaataagttgttactcttttatagtttttacagtaagtatttagtagtccctacgtcttctaaatttaagcagtcatctgtctcttttaattagtgaatttttgtttttcgtgtt

SEQ ID NO: 32128 - DNA, 211 bp, Glycine max
  Clone ID: PAT_MRT3847_129016C.1
gtttaatgatgataaatagcttgtaatgtgaatttgattaaggctgcatatgtgaaaattgggatgtttagtcaataattgaagagttgtttgtcattgaatggagaattgtatgcgactggtttggttatatagagggagaaaagaagtttcagtctatgatactatcttatggctttgtttttggtgatcattttttgcagctgctgat

SEQ ID NO: 32129 - DNA, 602 bp, Glycine max
  Clone ID: PAT_MRT3847_129017C.1
gcacgagcgaaaggcatggtcttcgagtttgtggacaaaagcttaaaccctaataactatgatgtagaagacgtgaagaaagtcataggcattgctttaatgtgcactcaagcatcagctgcaatgaggccagccatgtctgacgtagtagttctactcaatggcaatgacttacttgagcatatgagaccttcaatgcctatcttaattcagtcgaatttaaggtccgataaagatatctctgcttcaattggttcctttacgtctgatactactacctccaattctatagtaccaactcaatgataaattactaattatatgatgcaaatgaaaattcctttttgttcattattcacgatggatataattatatatgtgtaataaattttattttaaatagcagattacacttgaattttgtaaagaatgcacataattccttcctttttttttaggatttatggcaacccttacatggttacattgtataatgtacgtgttcccttagtaacgggaagtcagtgtaatgtgtacataggagatatcaatgtaacatatttcaatcaattaagaatggttatcagtagaggtataaaaaa

SEQ ID NO: 32130 - DNA, 338 bp, Glycine max
  Clone ID: PAT_MRT3847_129018C.1
ccccggggtcctctttagtggacctgctggggggctatttgtaagttcctatcacaaacagccctctttgcttctgctgtgtttttcgtgttggctgcttcattcggcgcccctctcctattattaatagcaacaaggatcagcattattgtgacggggcgcggtcagagtatcacatgacatttacttattcatttttatagagctgctgttgagagcagtttgaacttatctctatagatgataaacacccctcccatcgttctagctcattttattaagacagcgtagtgcggcttatcatcaagtggtgttttactgatgctcgtcaactaatc

SEQ ID NO: 32131 - DNA, 375 bp, Glycine max
  Clone ID: PAT_MRT3847_129019C.1
gccttgtgtgccttataaatagactggataggctctaggttcaagtctaacattataggctgcacctgcgggaggacttgcaggccgatggccagacaggaggctcgtaacatagctcaactcatcacgccaacattcacagcaagcttagagaggatgatggaaaagcaggctatataacatcacctaggagagtaccatgctaactaccgaacgatcgtgagaaggaccttcatgcgcgccgtcatgcaaaacatcgtaccagacattgaacccatcgtccaagacagcgtcaaggattgggaagggcgtctgaacagcagtttgatcgaaatgaaaactgtaacgtaaaacgttgctctgaacgcaattctg

SEQ ID NO: 32132 - DNA, 499 bp, Glycine max
  Clone ID: PAT_MRT3847_12901C.1
tacggctgcgagaagacgacagaagggacaaaattaaactttattaaactcatgaaagtcccttctagcgtggaattcgcaacaacaaccatcagtcatctaccactatatattactcctcagctcttatatttagacgcacacaattatacagctctagagaatcaagaaaattattatacccattaagatgaaaccgtacctacgtgcaatgttcctgttattccttatccttctcgatcaatttatttcagcgagtgctggtggtattaatagtgaactattcaaatttattggtctaccatttaaagcaataagaaagataccgaacaagaaagaaaatttggagaggttaaataaattgacggagaggttcgagaaagtgatgaacgcctgggacagtttacaactaaagtgccctcccccaccgccaaacgcaccaccaaagcaaatatatattgaaggcatgtctgtggtcaaagattacttatcatactac

SEQ ID NO: 32133 - DNA, 302 bp, Glycine max
  Clone ID: PAT_MRT3847_129020C.1
gaataatgttgaaggctctaaatgagatgatgctttggaattttgagaatgctgatcggcctttcccctttgccgcctaaatgaatcttttacggccactagattcatccaggtggccttcaccagcgttaaacgagccacttgctctcagaaatcagacgatatctgagcgagcacgagaaatgcgtcataaagcttacaaaggttattcggagcactatctatgatgttgcccttgatcgcatacttcacagaattcatttgtacctgcaacactggggaatggaggacaaaaacgtaag

SEQ ID NO: 32134 - DNA, 473 bp, Glycine max
  Clone ID: PAT_MRT3847_129021C.1
aaactggcatgtgctgcatgacttattttgtaggcactacttgcttatggtttatctagctcgaggcgtgcaccagatgctattcatccgtcagcgttaattatgtttctcacccctgcttccctatttttaatctcgaatgttgaatatgcatttccattcacatgctgtatgattcaggagctattgtacataattgttgctgaatcactcactgattttgcaaaatctaactggactcaatatatgataatagtttgtgatgccatccatttctatttcatgggatgaactgatatattgcttttgtctttgtgtgactttggaatttaatcggtatgttaaagtggcaatctgtcttctatttctgcagttatggctattccaaggaaagatttgtttggtccttgatatctgctgttgggatattttgtcttggttctggtgccaccgttgttaatggagtacagaac

SEQ ID NO: 32135 - DNA, 1292 bp, Glycine max
  Clone ID: PAT_MRT3847_129022C.1
tcgatggtctagtagtggcaatagtagtactaggtcgtgtcatgaaacaaaggttctccagcaatcagcacctctcaacattcctgattggtcacagatttataggaacaagtcaaacaagaccacccccaagagtgtttcaaggtttggtgactatgatgatatctatcattctgttaatgatgagggcgatgttgatggtgatggtgttgtcaattatgggggagggtatgtggttgatgagggagacgaacaggatggatttgattcccagcttcccccacatgagtttattgcaagaagacttgcaagggggggggggtgcttagttattgagattgtgtgttgaatatgaaagaattcgtttaggcatttaccatgaaaaagcaatgattcagctttgttgtggcaattgaaagtggtttgtttgaaatttattgcatgtggtatgttgttccgagcatccatacagacaaaatgatggatgtattaagtattgtaattgaatcataaagccattaatcatttagaagtgcagaagtgtttttgagaccaaaaaaaaaaaaaaaaaaaaaaaaaaaaaaaaaaaaaaaaaaaaaaaaaaaaaaaaaaaaaaaaaaaaaaaaaaaaaaaaaaaaaaaaagaaaaaaaaaaaaataacaaataaataaaaaaaaaataaattaaataaaatgaaaaaaaaataaaaaaaaaaaaagactggaaaaaaaaaagatggggggcgggcttaataggggttgaagtataattctgttttggtgaggatggaataatttttttaaagggggaggagccataaatttgtttccagttgatcttcaaaaatgaatgactagaaaatggggtggtgggaagcccactccaaaatggtgattttgggaaggaagggtatcagcttgatccataacagggggaagacaatatcgttctattggtgaatatttatacatatgcaatacgtacgatttctggaaaaaaaaacgaaggaaactgctaagatgggtattgttctcattcttttctgttcataaatttgagtgtagaggttcattcccgtagatgaaaatcagatatcagtgtaatcaataagggctgacactagatatccatgtcatatcataagtttttggagctgtgctcagttgcttgtggttcggtaactgcttttcacctgggaattctctcgctttgtattgcatgtctatttacgattgttataattgaacaataagggaatattgacatagaaattatgatgcgattcgtttaac

SEQ ID NO: 32136 - DNA, 150 bp, Glycine max
  Clone ID: PAT_MRT3847_129023C.1
agactttgaggcatcttcgcttgcacttcgacaccagtacgctcacaaacgtggctgccctgcgtgagcaagcggcatacacactgttagacggcacctgcatactcagactcatcgtggcaccttccatgatcaacatctgctagcctg

SEQ ID NO: 32137 - DNA, 308 bp, Glycine max
  Clone ID: PAT_MRT3847_129024C.1
gtaattgagggtttgacgtatgacgaaacttaagttatgagaaaaagtgggttgaattcaggggctgtgctgaaactcactagggggggggtctatgtgaatgtggtggcgagggttagggacgcttttaagacttaggagtgcgagaaactggactgtgtgcatatggaaactatctgtctgcaaacagataggagtgaagctaaaggatttagcgccatgcgtccctatcttgcttaaggattatcatctaatactctggagaggaaattgctatgaagagcaaccttcataatcatattgttttc

SEQ ID NO: 32138 - DNA, 388 bp, Glycine max
  Clone ID: PAT_MRT3847_129025C.1
agcgaagctaaaaccaaacatcaaagcatggctgagtagctcagcttgttcgtctgggtgtgcgccatccaccacctcgaccgcatataattcaccgcatacgcgctccaacttcctatatggaaatcatacaaccattctcatgatacactgaggctgtatcaggggcatcattgctgccactgttcgtgcatacttatacacagctcttaatggttacgatcccacagcatcttaatcccattattttgaagtggcttcatgaactagtactggtgagctcatcacttctatgtttggagagcccaactcatagaactgcaatcatgccctctttacttcctatgaagtcctgcaattatacaagaactatttgcctcaaatattt

SEQ ID NO: 32139 - DNA, 1783 bp, Glycine max
  Clone ID: PAT_MRT3847_129026C.1
cgcctcgaactcccgccgcctccgctcgcgcctcgagccgaatcggctcgagttagttcttttccatggctctattattcttctactttttggttcttatttcctttgccttcacaaccattatagtacaaaaaataagaaagaaacccaagaaaactgatgacacaacttgtaaaataccccatggtcctagaaagctacctattataggaaatatatacaatctgctatgctctcaaccccatagaaaattaagagacctggccataaaatatggacccgtgatgcatcttcaacttggacaggtttcaactattgtcatttcatcccctgagtgtgctagggaagtgatgaaaacccatgacattaactttgccacaaggcctaaagttctagctattgaaataatgtcttacaattccacaagtatagcttttgctggctatggaaattattggaggcagctaagaaaaatatgcacattggagcttttaagcctaaaacgcgtcaactcattccagccaattagagaagatgagctcttcaatcttgtcaaatggattgattcaaagaaaggatcccccatcaacctcactgaagcagtacttacatcaatttacacaattgcttcaagggctgcctttggcaagaattgcaaagaccaagaaaaatttatatcagtggttaaaaaaacatcaaaacttgctgcaggttttggcattgaagatttgtttccttctgttacttggcttcaacatgtcactggcttgagggctaagcttgagaggttgcatcaacaggctgatcagataatggaaaacatcatcaatgagcataaagaggcaaattcgaaagccaaggatgaccaaagtgaagcagaagaagatcttgtggatgttctcatacaatatgaggatgggagcaagaaggatttttccttaactagaaacaagatcaaggccataattctggacatttttgctgctggaggtgagacaacagcaacaaccatagattgggcaatggctgaaatggtaaagaatccaacagtaatgaagaaagcacaatctgaggtgagagaggtatgcaatatgaaagcaagggttgatgaaaattgcatcaatgaacttcaatatttgaaactaattgtgaaagagaccttgaggttgcaccctccagctcctcttttgctgccaagagaatgtggtcaaacatgtgagatacatggttatcacataccagccaaaaccaaggtcatagtcaatgcctgggcaattggaagagatccaaactattggactgaatcagagaggttttatcctgagaggttcattgatagcactattgactacaaagggagtaattttgagttcattccttttggtgctggaagaaggatatgcgcaggaagcacatttgctttgagagctgcggaactagcccttgcaatgttgttgtatcactttgattggaagcttccaagtggaatgagaagtggagaactggacatgagtgaggattttggagtcacaactataagaaaagataatctattcttggttccttttccatatcatcctttgcctgtctcatgagctcagaatgagaaactgaaacatttggtgatggctgtcacatttacttcagaataaagatcttctgttaattgaaattagactttgtgctgtgattggttgtaacagaagatggaaattgtgactactgcatattaaaatagcttttatatatcctcaatgttaattaactttgataaaaacccccc

SEQ ID NO: 32140 - DNA, 241 bp, Glycine max
  Clone ID: PAT_MRT3847_129027C.1
ccacaccgcatcgctcgtggttccatcctttgtgtctgtctctctcttcggacacaaagcaacactttccatgtccatgtctctgtctcttcttcgtatcttctcttgcgccccacctttgccacctgctctgcttctgttccaacttccaactcttgtccttccctctgacccattctttgccttgtccaaattgaccaaattgtccccctctccccttcatatgttacttatgccacag

SEQ ID NO: 32141 - DNA, 718 bp, Glycine max
  unsure (1)..(718): unsure at all n locations
  Clone ID: PAT_MRT3847_129028C.1
gatttggtggatgttcctcctgtgtttgttcttggtgttatagggggaatacttggcagcttatttaatttgattttgagtaaagttcttcgcatatacaattttatcaatgagaaaggcaccattttcaaaattttgcttgcctgtttaatctccatttttacatcctgtcttctttttggattgccatggttaacatcttgccgaccttgtccgcctgatccatctgagccttgtcctacaataggtcggtctggtatctacaagaaattccagtgcccacctaatcactacaatgatcttgccagcctcattttcaacacaaatgatgacgctattagaaatctatttagcaagaataccgacgatgagtttgagtttaaatcagtgttcatctttttcatcacttgcttttctttaagtatctttagctatggagttgttgctccagctggtctttttgtgccagttattgtgactggtgcatcttatgggcgtattgttggaatgttgcttggcaaaaaggacagtcttagccatggtctttatgctgtacttggtgctgcttcctttctcggtggctccatgaggacaacagtttctttgtgtgtaatattctagaactgaccaataacctgttattgctacccctaatcatgatggtgctgttcatttctaagactgtagcagatgctttcaatgcanatatatatgacat

SEQ ID NO: 32142 - DNA, 307 bp, Glycine max
  Clone ID: PAT_MRT3847_129029C.1
gcgagggtgaggggatgagggtgaagtcggggaaacgtgtgggggtgagcttggggagggtgcgggagatttggtggtgagggtggaaatgagggtgtcgagcttatgggtcatggtttgcaggttttcactgagactgagttgatgaatggtgagcttagctatggcgtcttccaacttttcagagttggacttcgaggccatgagagcgagacgagagcaccaaattgttaggaatgcgtttataaattctgggcttcgagggccagactttcctgccttatttcatttaaatggtatttataat

SEQ ID NO: 32143 - DNA, 264 bp, Glycine max
  unsure (1)..(264): unsure at all n locations
  Clone ID: PAT_MRT3847_12902C.1
cataattctattacaatatatgttagtaactatattagttatgtttgacaangatnattttnaattttnttactaactgaaaaactaatttgattgttntgataagtaagtntttnccntttagtaattnctagtgtttattgaaatgctacttgaaatagtgcctttaaaatattagtttctaacttttattattttatatttnnnnnctttnatttttaatatatttatncatttnnnnattatcntttaaaataanntata

SEQ ID NO: 32144 - DNA, 377 bp, Glycine max
  Clone ID: PAT_MRT3847_129030C.1
gtgtcttcccccttctctcccccacccaacaaaaatcataaaagttaaaattccaataaaaaggcttcaaataggtcttaaacaggataaatggatgaaagcaactccccatttagtccacttcctcaatttgggggccggcaccacttccaccagagggggcggcataatcatcctggggtgccccagcaccagcaccacccatggggggaccagccccaccttggaacattttggcaatgataggattgcagatgctttccaattccttcatttgggcctcaaatccatctgcttttgcgagctggttgctggctaccccctggatagcttgctaaattgcgtcctaaattttttttttgtgagagggatcaagt

SEQ ID NO: 32145 - DNA, 490 bp, Glycine max
  Clone ID: PAT_MRT3847_129031C.1
gcgccgaacctcgaattcggtcagctcatcctatcggttccacttttttttttcttcttggcgctaacgactacggagggcgtgttcaatctacaatattggcctttttacatcacaatcttagacacgccttttactctgacgaagtcaaggccctaatcaacctcaagcgttcccgacttatcctgaacatttccgttcaagggggtgaaatctggagcccatactgttagctgttactcacattatctgtcatcccatcggtctaaccctctttctctggagacttacctgctaacaaaccatgatgtttgaaggattgggaacaagtgcttgatggaattcaaggccctgtttgttttcgccaagtcaatcccagtgtgagacaaactgaaccggatcctgtcattgtcgatgactacggcgatgaagaaaattgtgcggttggaactggcgaagatgatttcaatggacaaaatgccccccccgc

SEQ ID NO: 32146 - DNA, 212 bp, Glycine max
  Clone ID: PAT_MRT3847_129032C.1
gcattgccaatggatgggcctcaagtgtctggtgtccacgtacaatggagtcaggaggcgcatctcgtggcccattagcagagacgaggtttggatcagtaatgtgctccatacgcgtctagtcgaggatagaggaggtcgtgattggctgtcagtgaagagggctgaatttggatttcctggtggaggtactcaatgtatacatggtgcag

SEQ ID NO: 32147 - DNA, 485 bp, Glycine max
  Clone ID: PAT_MRT3847_129033C.1
gtcacccactcggccggctcaggcaatccgatcagcccaacaccaaaaggtaacactaactttattccgtcttcttacggtgttattttccaacagagctggctgccaattgtgaattcgatgtcaatgggcacatacatacaactgcactagcaacaccacttgcaccaacgagtgccccagcaagtgccacaacaagtacaacaccaaatggtgaacaaaaaaccaatataaccacggaggcacaggcaaaagttgaatggccgaaacttaaacactggcaaactgacacagcggcagcggccaaaaataatacaatgggtaacctcgcaaacacaccacagacacaaatacacactttagcactctgagagcacctgctaacactaaccaaaaatacagtaactaaacaaccagggacaatcgggactgtggagatcgtactaaacccaacagctgctgaaaaactcacaacaacacaaact

SEQ ID NO: 32148 - DNA, 474 bp, Glycine max
  Clone ID: PAT_MRT3847_129034C.1
ggtttcccgtcatcactgtatgacgtcctccttctttgggggggggggggggggggaaagggaacaagagagataggaactggagctccggtatagcgtagtaatgccataacacaattgcgcttactacgagaaaagtgtttggtatgaactgagcaacccataaagccaagggaaccgggatttggtgtttgtggcaataacacaatagttagcatatcggcataattgtatgtggtaatatgagatagtaagtaaaagtgtagttaggggtgccggtaagttaaagtgggccctgccgaccacaagataagaaagaatagcagataagacggggggggggcttttgtaccgtgtagaacgaaaaagataatttaaaatatggcaagtgaggataacaaagggatgagtataaaacgccgataatttacaaaggaacggcaacaaagcccacgtgctagaataaccgtacag

SEQ ID NO: 32149 - DNA, 510 bp, Glycine max
  unsure (1)..(510): unsure at all n locations
  Clone ID: PAT_MRT3847_129035C.1
aaaaaaaaattttttttttaaaaaaaaaaaaaaaaaaaaaaatataaaaggaaaatatattatttaaaaatattaaataaaataattgggggggcgcttttgaggtttaaaagtttatgttcacgtgcgtgggactgtaattttttttttttttgggccccttgtttttctcctctgggggccctttttcaaggggggggcttttttttaccctttnnctttcccccctttttcgccttggggctcttttccttttttttgtcccgccattttttccaaaagggccggtctttttaaccctttcctttaggttgccccccctttttgccccttttttcgcgccctgtaacattccctttttcccggggggtttttttttttaaagcccccnaacctttttcctttccctagccgtttcgcccgttgtttttgtttttttccctctttttttggggcctttatccgggttttgccgtggggttttcccccgggggctccctttttttttcc

SEQ ID NO: 32150 - DNA, 310 bp, Glycine max
  unsure (1)..(310): unsure at all n locations
  Clone ID: PAT_MRT3847_129036C.1
gctacgacattcattacggaatacaggagtggggaaaaataaggagggaggggctgaggaagaatcaattgctcacacagcatgctaagacacctaattattccacacacaggatattgaaacagcccatgatagcagaaaattttgtctttgnnngaatctagtgcctaaatactgcacgccggcggatccaatatntctatagcggtcgnnnnngcgagggatatccggnntctggtccctttaatgaggattaatggcgcgcgtgggaaaatgatggccatagactgtttcctgcgagatactagta

SEQ ID NO: 32151 - DNA, 317 bp, Glycine max
  unsure (1)..(317): unsure at all n locations
  Clone ID: PAT_MRT3847_129037C.1
ggaaggggtactttcaaccggatttattggaaaagaaaacccaaaggctcaaacattttatggggaaagaaaaaaacccatggaaattaaaaatttccctggacccagggggtgaaaanccaaaataaaaaaccaggggggaaattttccacacaggagaggggccgggaacaccaaaagggttcccaagccatgttgaaaggaaaaattttcctgaaccttttaaaaaaaccgggttacaacctttttgggacaaaaaggggaaaaaaatgcccccttgacaatgggcctccccaccctaaatatttaaggatccc

SEQ ID NO: 32152 - DNA, 385 bp, Glycine max
  Clone ID: PAT_MRT3847_129038C.1
ctcgcacttctagttttggtgttctgagttcgagcgaggaaggtctatgacctgagaaagtcttgctgctgtggtaactgaaggtgcggaagctcctgcaagtgcggcaacggctactgaggctgcaagatgtacctaaacttgaactacactgagtcaaccactaacgagaccttgttcatgggaatggcacctgttaaggctcaattggagagtgctaagaagggtgagaccattgagaacgacggctgcaaatgtggaccatactgctgctgaacgtctgcacttgcaatggaggtgttgggagagcaagcttcaagcagagagttcccttaattacgataatgatgaactattaatgagtaactaagaacttatgtactat

SEQ ID NO: 32153 - DNA, 1021 bp, Glycine max
  unsure (1)..(1021): unsure at all n locations
  Clone ID: PAT_MRT3847_129039C.1
atgatctgattgatccgtttctggcttatttgttttcctgtttgtagcataacatttagtgttccaactaaatatggattagttacgtgacatgaattgcaccctcccctcgttctgctctcccccatcccgaataatattaaatttatgggcaatagcttgtggtttattataaatcataggatgcagcaagattatacaaatcttatttcagcaacatttcccttgtatccatactgccatcttgtgaaacattctctactcgtcagtactagttgcaacatctgagtgctcaaaactccttttccctttttcaaatgtgacggacctctttattccattctatttatgcaattaacttgatacttctctgggataatgtcaaactttcacttttcgcagcaaatttgaagtacaaattttctttatttttcattatccatctattgaactctccacaatcaactctgcacaattatgttggttataatatttttgaatcttaaaatcaatatactatgcatgtggattaattctccctttgttctatagctagctcagatttccgaaatgtacaatcccccattcttgatcctgtacggataatgtccattctttttcgcctaagctttgactattcggctagcattcttatgagtaaagatgtctggtttagtttgagtttagtctggccgttgatttttaatggatataatttgataggttgataatgttctgctctgagacattttatcttggaggtttagtttgatgagtatggttcattggggggatgaacgtagggaaagttaaaatattagatccctctgtatatgattttttacatttatggtgcaattaagtagtttaagatgatggtccattgtatatacagcttagcttcatgacagttgctttgatgtttgtatttaattaaacttcatcccttctaatctatttaggatatgtttggccctgccaaaataacaagggtggngtattatgaaaaaagaaaaaataa

SEQ ID NO: 32154 - DNA, 364 bp, Glycine max
  Clone ID: PAT_MRT3847_12903C.1
gaacaaacgaaaaaaccttgtttttttgtttgtaacggtttgagttaaatccaccaccccccccaggggagggggggggtataaactagagggggggggaattttagagaaaaagattaaaatgggcatagggttaaaacagaaaccccaccccttaattttgtgcaacttaattcctacagaaattttggcataaggggccacctaaagacgggggggggaaattaaaaaccctttatgaaattggggggggggggggaatatttgggaaacctacccctgtgggaggggcccaagacacgagggtccaattaaatagggggggggggctttttctttttttttttctttgaaaaaaggcccc

SEQ ID NO: 32155 - DNA, 231 bp, Glycine max
  Clone ID: PAT_MRT3847_129040C.1
gtgattgttgtgactcgttcttcttcgtcgttatcttcttcttttgttgtttgtgtgtttgctatatctctcggttttaaaatgtctgctgcgggggaaactgtagttgcattagcgcctgcaagttcggcaacggttgcggaggctgcaagatttacccagacttgagctacaccgagttaaccaccatcgagaccttgttcatggtagtggcaccagttaaggttcaat

SEQ ID NO: 32156 - DNA, 450 bp, Glycine max
  Clone ID: PAT_MRT3847_129041C.1
caaaaagtaaccgtaaagcaagaacacttgactaagcaccgcataagtcataacattcagattcaggacacggagaaggaagagaaaagagaaaaagttggaataaacagatggatcaagtgtcttgagtttaaattttagatatatatatatatagttgtattaaatattcatacaaaagttttctcgttagtattttatctgatttcaacatgaatgataggaatggaaaacattgagccgcacctacaatcactgcaactttaattgctacaatacctgaactcaatattcagtagcagcagcataaagagacgtgatgaactgatgatgtgtgaattatgatgacattaattttttttattgacaattattaattattagtttttgttagcaaagatggaaccacattgtttttccttcttccctacaccactacggatggcgttc

SEQ ID NO: 32157 - DNA, 166 bp, Glycine max
  unsure (1)..(166): unsure at all n locations
  Clone ID: PAT_MRT3847_129042C.1
gaaaanangccatgcctctttcaccatgtntgcnatgcttgtcggagncgatctnccnagaggcttgtcattcctgtagtatccancactgntnnagattcagaggaattnnacantcccagntccacatgttggaagttcccncgtcnggntnaaagagttgggt

SEQ ID NO: 32158 - DNA, 236 bp, Glycine max
  Clone ID: PAT_MRT3847_129043C.1
ttacacaactgcgacttagttcatcccttctcaagccacctatacctcactttttgaaattacttgcatagatagataatcatggctattatgaaacttgctgcttcctctgcgcttcgctctcttattgcctcatcctccaccttcaccataaaccttcatgcctcatgtgattagatgaatattgttttgtgttctacatttgtatttaatattctattattaatctatatttt

SEQ ID NO: 32159 - DNA, 107 bp, Glycine max
  Clone ID: PAT_MRT3847_129044C.1
aacacgcgtccgtaaaagcaagcctaagataaaagcacagccataggctctatataagatggatgcgactcatgagccacctatctctggtcacttactacactcaa

SEQ ID NO: 32160 - DNA, 680 bp, Glycine max
  Clone ID: PAT_MRT3847_129045C.1
ctcttagaaaaatcgactcaaacctttcaaatgtgattggattgaatcatgaatttgatcaaattcaatccaaaccaacctatttacatatctaattaagatcataaatatcagaatctatttccaccgtgaacaacggctatttggctatccgtaggtaaaaatacgatagccagcaaaatagacacagtataaaattcaacaagcaactaatctcgatacacttccccttccatgtcagcatggatgtaaaacttgcttttctctcgactcaacagaagcagtaaagtcaaggagctcttctaaaaatacctatttgtaactgtgtatatatatatatatatatatggacctaactgcttgtttctgttgccattttttgtttatgtgacctcttccttttcctacttctcttcactgtgttgtcttcattcgtttccttcaaaggaccaatattttgtttttcacttttcttcttcttgcatgaaagtgggtttggacccttagctctttttctcttgaactgaggtttatccttgatttccatacgattccttgaggtaatacccttctctactgcctgcacatttatgggtctgatcttctgaatcttcaatttccattatttcagtaatgggaattgtttggcttcctcaccagtcaatctattcattacccta

SEQ ID NO: 32161 - DNA, 285 bp, Glycine max
  unsure (1)..(285): unsure at all n locations
  Clone ID: PAT_MRT3847_129046C.1
ncgcncgcgaacacggagngaaggcagagcagccgcgggaaacccngaaggaagccancgnagccnacacgggcnncncnccnnccaccnncttctctgtgctggcgcttctttttgccgtttactacgtcgncacgggnctctngggtccctccgacgagggggtgaccgccaccgccacgncgaggaggaggaggagacgccgccncggggccccccggggcaccacggcgagaacacagcggaggagcccaaggcccacgacggcaccgancccgagaagcc

SEQ ID NO: 32162 - DNA, 1438 bp, Glycine max
  Clone ID: PAT_MRT3847_129047C.1
gcccgccccagcctcgtgccccgtccccgtgcccccgggctccccggacctaaaggctccgctgcgcgcagctgcgccgccgggactctgtggccgtcgccgctgcgcacagctgctccgccgtgactctgtggtcgacggtataaaatgaaggtgaaaaagcagaagaggcacaggaagattttgacgttttacactgcttgcttcggttttcggaagccttacaaggttctatgtgatggcacatttgttcatcaccttcttgtgaatcgaataacccctgctgacacggccattggcaatgtcctcagtgctacgatcaagctctacacaacaagatgtgttctagctgagttgaaacgacttggtagctcgtattctgaggctctcgaggcagctcataaacttatagttgcaagatgtgagcatgaaaaatgtaagagtgcagatgcttgcatcatggaggttgttggagaaaaaaattctgagcatttctttgttgctagtcaggacactgacctgcggaaacagttgcaagaggtacctggtgcgcctgtcatatttggtcttagaaatgctcttttccttgaatctccatctgcattgattgaccggtgaggaagctaaccattccatttctcaaataatggaaaatgacgattcagaaagatatttaaggatagggtaatgaatagattgactggtgaggaagccaacaattccattactgaaataatggaaattgaagattcagaagatcagaccataaatgtgcaggcagtagagaagggtataaaaacgaggaatcctatggaaatcaaggataaacgtcagtgcaggagacaaagaggtaaggatccaaacccactttcatgcaagaagaagaaaagtgaaaaacaaaatattggtcctttgaaggaaacgaatgaagacaacacagtgaagagaagtaggaaaaggaagaggtcacataaacaaaaaatggcaacagaaacaagcagttaggtccatatatatatatatatatatatatatatatatatatatatatatatatatatatatatatatatatatatatatatacacagttacaaataggtatttttagaagagctccttgactttactgcttctgttgagtcgagagaaaagcaagttttaaatccatgctgacatggaaggggaagtgtatcgagattagttgcttgttgaattttatactgtgtctattttgctggctatcgtatttttacctacggatagccaaatagccgttgttcacggtggaaatagattctgatatttatgatcttaattagagatgtaaataggttggtttggattgaatttgatcaaattcatgattcaatccaattacatttgaaaggtttgagtcgatttttctaagagaaaaaaaaatgaaattcaactcaaa

SEQ ID NO: 32163 - DNA, 148 bp, Glycine max
  Clone ID: PAT_MRT3847_129048C.1
cctgctaactgttacctgtgtacttcaaaaaggtggcggttgtatctggaagatataatgttggaccctaatattaatttcttctttggcctaatttagtcctttaaatctaattttttttgaattaaattcctctacatgctgtctg

SEQ ID NO: 32164 - DNA, 206 bp, Glycine max
  Clone ID: PAT_MRT3847_129049C.1
aaatcacaaattttattagaagaagaactcaagaaaatagagactgaaattatttggacttgaaagaaactctttctagagcaagtgtgtaaagatgatcaacaatgccataaccaatacacgatttgtttgttctcaactaaaaaaacaaaagtaaaaggtcacgaaaaattggccacgccgatgtgggggacccccgtgggggg

SEQ ID NO: 32165 - DNA, 375 bp, Glycine max
  Clone ID: PAT_MRT3847_12904C.1
cccacgcgtccgcccacgcgtccgaacaaataaagctacttacttctctttctcccagaggtagccatacatctgggacttccttgatgcaacttcaggaattttctggtgtaagaatttcatagcaccccagactggaggagcccttgacaaagaaatacagaatttttaagataaagaaatattacaaaaagaaccatctcagacaagagttaaagatcaaaaccaaccttgtcactggaggtgcaagacaaaagcttaagcatgccttcttgctttcagccagaagttcttctgcggcaagaaaacaagacacagcaccaatgtggctgcttggttcactacccttgtcaaggatcagtccatggtagtagt

SEQ ID NO: 32166 - DNA, 256 bp, Glycine max
  Clone ID: PAT_MRT3847_129050C.1
tcggataatttttgaaatgtctttgcaatgatctggctggcaatatctggtgggctccaaaatgcagtcatacaccaattacatactgagaaatattaaagcagagtacattgatatatgctgacaattcaagatgggtattggtgtgccaagtgaaatacaaacaaatgtggttcatgtgtgaagcaagaagacggattgcttattgtccatatgtgagccagtggcagctaaagtgctgagttcttgcttttct

SEQ ID NO: 32167 - DNA, 302 bp, Glycine max
  Clone ID: PAT_MRT3847_129051C.1
gggatgtaaagagaacaacagtgacagcaacaacccttgcctccacctttgcatcccttgcattagatggggcagcatccctttcttctgatgtggtttatatggggaaattaaataaatgatgtatgtacctcttgcctatgtaggtttgggtgtttcgttttgttgtctagctttggttattaagtataagggacgttcgttcgtgtctcaaaaaaaggggtgctaccactctgcagcgtatatggatgctggaaatcaatgtgttttgtatttgttcaaaaaaaaaaaaaaagggcggg

SEQ ID NO: 32168 - DNA, 280 bp, Glycine max
  Clone ID: PAT_MRT3847_129052C.1
acagctggatgattcctttattgaaaatagacctacaaatgaatcaaggcaacttttccaccctatagttttatattatattatatatttcacgtattctgtccatgcccttttctttttttatctacaacccccccccctaaaactcttttaaaactattatattataacttctgttttaaacaattaaaaaatttctaagtaatattcttttgcatatacaaatcttatttgcttctttatttcatactcgtatatcattccatggtttttatcgtct

SEQ ID NO: 32169 - DNA, 718 bp, Glycine max
  unsure (1)..(718): unsure at all n locations
  Clone ID: PAT_MRT3847_129053C.1
ttttgttgcactgagtcatgataggttactaggagatacaagcaataccatcaacaaatgcagatggttgttcaatcattcgagtcagtggtgggtcttagttcggctaccccgtacgtctccttggctctcaagtcaatatcaaaacacttcaggtgcctaaaaaatgcaatctcagatcaactgaagcttacatgtgaagtcttgggagaggactattcaataccaaccacaagtactggtagtaaatttgacaacaatgtggccaggctaaggtgcatggaccaaaactttcaaaaaaacaaatctggcggggctaacataaactttcttgagccccaacaacacgtatggaggccccagaggggcttaccagaacgctccgtggcaattcttaaagcttggttatttgagcattttcttcatccttaccccacggacactgataaacacatgttggctagccaaacgggtctatcacgacaccaggtatcccattggtgcataaatgctcgagtccgcgtgtggaagccaatggttgaggaaatacacatgcttgaaacaaaaggcgcaacagaagcccaccaacaccaaacctctagttaaaatgaccagttagcttctgcctctngaggcagcaacaacccagctcaatctgataaccaacctgctcacgagtttggcgcgcatgcattgcattcacatgccatccctgaaa

SEQ ID NO: 32170 - DNA, 384 bp, Glycine max
  Clone ID: PAT_MRT3847_129054C.1
acgaggttcataacaatattcataggatacaacatacacatgtaaatcaaatctaatcaaaatattcttgaactccaaaactagaataatttttggaatcatactataacaacactacaatatgatttacatcaaatattaatataaataaatatatagctaaatctatatatataaaactagcacacatcatactgaatcatgaatttcaaaataagctttcaatgcaccaattccaatatatatatacatatgtaactaacatgaaacaaggtatacgagtaaacaattcaaacatataaaagagtagaaagcaaatctattggactcaattatataaaaaaaattatcataagtaaatatttatatagtaactaaagttat

SEQ ID NO: 32171 - DNA, 758 bp, Glycine max
  Clone ID: PAT_MRT3847_129055C.1
ggctcctcaataagtatttatccctttcaggccgctcgatattcttttcttgttgaggagccttgaaatctcactagttatatttctttgttctagtcttgtcttcattttttcgctctccctccttttttggttgttgtgccaccaaaaatggctaatgctacacctaatggttcggtgccacacaaccacgtaggagcagtgcttccaacaattcccacaatcaaaattgatgagaagcaaaccctagccaccagcgaagaccacaccagcattgactatttacaaagggcacagtggcttcgtgcagccgttttaggagccaatgatgggttggtttcggtaacatcattgatgatgggtgtaggagctgttaaaaaagatgcaaaagctatgttagttgctggttttgcagggttagttgcaggggcttgtggcatggcaataggagagtttgttgctgtgtgcactcagtatgaagttgagctaggtcaaatgaagagagagatgaatatgagtgagggaggagagagagacttggagacggagaagagaacattgcctaatccattgcaagctacttgggcatctgcactctccttttctattggtgcattggtgcctctactttctgctgctttcgtagcagattacagaactagggttatttgtggttgtggcaatggctagtttggctttggtggtgtttggaagtgtgggggttcagctgggaaaaactcctaagttaaatcttgtgt

SEQ ID NO: 32172 - DNA, 254 bp, Glycine max
  Clone ID: PAT_MRT3847_129056C.1
ctggagaaggggattcaaggggggcaactgcctttcttggaaagggatgtgaggaactttgttcaaaaccgtaagaaggttgttcaagagaacgaggcattgctcagtgagaagagagaaaatgatgtattggaacttcttgaggcgtgcaaagccatgaaagaagcagatgatgactttgtttatgattttactgtggatgcgaatgataaggttgaaaatgtagcttggtcgtatagtgactcggttaatgc

SEQ ID NO: 32173 - DNA, 144 bp, Glycine max
  Clone ID: PAT_MRT3847_129057C.1
cgcgtccgacgcagcgtccgcccacacgtccgaaattttaaaacatgctgaccgtagttgggaattcttccacctccatccttattatagtcatatcctggtaatccttttaatccttcggtgatttaccccgattcctgttta

SEQ ID NO: 32174 - DNA, 150 bp, Glycine max
  Clone ID: PAT_MRT3847_129058C.1
agaaaaacatctttgaaactgctgttgttactggcaaagtcaatggcagcataacaaatgaggaagtcttggaatccatcaaagtgacagcattgtttcctgtgaataaactccaggtgccaggggttaaatcgtcaacagaagaggctg

SEQ ID NO: 32175 - DNA, 214 bp, Glycine max
  Clone ID: PAT_MRT3847_129059C.1
ggcaatttggaggaatgtaatgtttccgatagcttatgtaaaaatggttggccccctgcattgtatttgggtcatttatctatcatgtgttgagtcaaagtttggtgatattgaatgcataatgtcattcattacactaacccaaattgtttaaagaacattgaatgttgtctctagacccaaaagaatgaaaagtgaaagataaaatgctgca

SEQ ID NO: 32176 - DNA, 600 bp, Glycine max
  Clone ID: PAT_MRT3847_12905C.1
ggttttctttcctagaccaaactctcaaccgcttggactacctgccaacttcacctccttgtctcatacttctcttctcttccttttttgtttctcaattcttgaaagtgagagataatcatcatggtggagtgattcttgctcagtttggaagctacaaaaagaaagaaaacatgggttctgcttcaagagttgaaagtagcaactacgattactcctttaaggttttgttgattggtgattctggtgttggcaagagtagtcttcttctcagctttatctccaactctaactccatcaatgacctctcccccactattggtgtggatttcaagataaagctttttacagttggtggtaaaagattgaagcttactatttgggatacagctggacaagagaggtttggaacagtaataagttcttattatagaggcgcacatggaatcattcttgtctatgatgtgacacgacgtgagacatttacaaacctcatcgatatatgggcaaaagaagttgagcgttattccactaatcatggtagcatcaaaattcctgttggcaataaggtggacaggttgtataacttttcaggatagt

SEQ ID NO: 32177 - DNA, 213 bp, Glycine max
  Clone ID: PAT_MRT3847_129060C.1
ggaaccaaaccacaaacacttagtttctcaactcatcatttcgaattctacctcttttctcttgggcgtaacagtccaagatgaataccaataacgagaccgagtctgagcaatcatttcgagaagcacatcggagatcttgatcatcatcttctccagccaatgttgggactgagaattggggaactcacataatgggcacccctcgctgtt

SEQ ID NO: 32178 - DNA, 433 bp, Glycine max
  Clone ID: PAT_MRT3847_129061C.1
ggctcgagctcaacggatctaaggtttcagtgtagcctgcaatcatgtcaggcaaggatatcattgctgctattcttgcatcatccggagctgcatgggtttgagattattatggttcacacagaatgctatttggaggtttctcccgtggaactatttcaaacaatgagagggcagaagagactgacaaaaaattgtacgcatgggctggtactgtcggtccaccagtgggcatgaatcccataagtcgccaaaattccattgtcaagtctcgtcctgagtaataatacttgctgactgattttgagttaattgatgcttggccatgccatatgtttccatacatgatgataatgcttgaggaaaaactcttacagtttaatgtagtgttcgaagcttaaacatgttaatgtgtgtactcgctaaaataaaa

SEQ ID NO: 32179 - DNA, 271 bp, Glycine max
  Clone ID: PAT_MRT3847_129062C.1
gaattgcaatcaccctccttgatccaccttgatctcgatttttgtctcaacatagactcatgagcttgggctgctgtccaaagatcttcctgcagctggtttcttttctgctcttctagttgggataattgtctttggattgtgtcttcctccaaattgactagttaatattcaatccggtctagctttgtataagtatcaccataatgttgctctattctatctcttcaagctatgcgttagtttcgtaaatttttctgtaaggatgtat

SEQ ID NO: 32180 - DNA, 438 bp, Glycine max
  Clone ID: PAT_MRT3847_129063C.1
tactaccggattacattacgtgggatcgtgtctacctcggtgacttacactctaccatatcttgcttacggctgaagaggaaaagtatgggggtgcttagaaacaatggtattcccggtgtagtttacgacgggcgagccaaagaatggactaaacacgaggaaaatgaaagctttgaacggacaaggaaaagatggaggcgattagaatcatacgcatgcctgctggtgtgcttgcatagtgagcttatgacttggagaagcatgtggctcaaaactgcctactggagcaaatttgtgttggggacaagcatgtattctgctaatgataataaggcaggcggaaatcatgacctttaacaacccgtagtgggacatgtggaaattctgactgatagtgcgagggatgacagaactgctatggcgggataaaatatca

SEQ ID NO: 32181 - DNA, 383 bp, Glycine max
  Clone ID: PAT_MRT3847_129064C.1
ctccaacaatgcggatttccatatcgagctgagcatcattcatgccatggctatgacgaccgatcccaagaggtgccacaacatgaaggacagaatagtccgtgtctccaaaaaaaccaccaccggagtaaagaggctgtaccagatgcaggccaatggctccatattgctccctgccatcaacgtctatgactcggtgcccaagaccaagtttgatggctggtgtggatgccgacgctcgcttccccatggactgatgagagccactgatgtgatgattgccggacaggtacctgctgagtgtggctactgagacattggcatggggatgagctatcagccatgaaacaagcctgtgctcgagtcattgtcaccaatattga

SEQ ID NO: 32182 - DNA, 244 bp, Glycine max
  Clone ID: PAT_MRT3847_129065C.1
aaaaagtttagtggccatgggaatgggatgctccagatgctctatttctgcactattattccccctgtttttctttgtcctttccttcatctttttctttccctggaagaaacaaaaccatcttagccatcactttgcttatgctcctcctttggtcctttccactatcaaaaactcagacaaccacacaaatattagaacctctctttctccctcaccacaaccaccaccaccacgatttgag

SEQ ID NO: 32183 - DNA, 674 bp, Glycine max
  unsure (1)..(674): unsure at all n locations
  Clone ID: PAT_MRT3847_129066C.1
gaaagaagttgttttccttcttctatgatcaaatagaaaatagtaatacataaaaagttttgtgtaattcttgttacacctgaaaatccgatcaatgctacatagtaccttacatttttaaactgagataatcgtgcaaatctttggcttctacccattttggaccaaacaagttccggtactcctagttgaacggtttaactctaaccaaaggttttaaatagtggtcgtggtcgagttgcagttaaaaccttgatgttacagcagcatcaacgttatagcataaaatcagttcttacaccgaaggtcagagcaattcgagtggacaaaacaaaaggaaacagtaagaaaataagatgagaaggtctattgttgttcattctgttcctgaagttctgctaataggcattctcagcatagttcatggacagttcacagacacaccaactaccaatgctcatgtgacgaatagctcacgtgtgtcggcattgtatgtgttaggggattcctcagttgattgtggagacaacactctgttctaccctctgcttcacggtcgactctctttgtatccatgtaacggctctgatgccacccttcttcctcaactacttggnacttctctntaatcttttttctcatcatttggactctgcattcgtgattcaagcaaa

SEQ ID NO: 32184 - DNA, 350 bp, Glycine max
  Clone ID: PAT_MRT3847_129067C.1
cccacgcgtccgggccaagccaggtctgcacaaccaaagcaacaccccaaaagggttgagcttctgtgcccatggcgaggccacttaactttgttaccaacaacaaccagccttaatcctaagccttcttcaggccactacccttacgccaaccaaagaggacccttttcaccacgaaagcgatgtctaactccacacctcaaatcaatgcatctaagaaggagaaggcaattgccggacttacagcaccttctgtgacagcatctatggtggtaacggatgaggcacatgctgctggatatgagttcttgctttatgtaaagaactatctactcaacatcttttctggt

SEQ ID NO: 32185 - DNA, 297 bp, Glycine max
  unsure (1)..(297): unsure at all n locations
  Clone ID: PAT_MRT3847_129068C.1
tttncatgcnctcntacgtaagctcggaattcngctcgagcagcattcaatggnctctctttttcttcttcttcctcatcggtcttcgctggaagtggtatttattctctccgcgcgggtcccacctcggtngtntcnctncnccggnncttcccgntnaccatanagaantcccanaagaatngggtngnggatngcnannaanggggnaattngnnggnnaagtgtcnnngngccaatgattngtngggnnnnntttcnnngcngggtanntantcggntgctgnggnanaattt

SEQ ID NO: 32186 - DNA, 354 bp, Glycine max
  Clone ID: PAT_MRT3847_129069C.1
aaaaaataataaaaaaaagcaaaaaaaaattttaaattaaaaaataaaaaaaatataaatggggatagttaaaaacaacaatattatattccgtgaacaatctgaaatatcataacatctcttgtcaacatcactttccaagtgtcacctaggtcaaagtcattgtctcgcaatcatataacggaaattgaaagtattactcctagccttatctataataatttaagttcacttttttagctttttctccagtggacatcttacatatgtcgtataataggtttatcaattcataatttttcccgttcttactttatttttttgctttaccaactttatcactttttaatgcac

SEQ ID NO: 32187 - DNA, 412 bp, Glycine max
  Clone ID: PAT_MRT3847_12906C.1
aaaaggggggggggggcccccagggaaaaaacttttttttggcccaaaccctttttaaaaaaaaaatttaacaaaaaaccccgggaatcaaaccaaaaaaaaattggcaggcaacattccttagggattggaggggcccccgacctttgcacaccaaaaaagagggggtttaaggtcccccccatcccaagggaaaaaaaaaaacctttttgtcctagggcccaaaacgttttttccaactcccccaaaaaaaaaaaaaagggggttcaacaggaaaccccttttaaaaaaaccaaaaatgcccaaagcggggaattttaaacgggggggggaacaagactttagccccaacccttccattaaaaaggaaagggggcaaccctctggttttaaatcggaaaaattggaaaaa

SEQ ID NO: 32188 - DNA, 481 bp, Glycine max
  unsure (1)..(481): unsure at all n locations
  Clone ID: PAT_MRT3847_129070C.1
aaattccttttttttttttttttttttttttttttttttttttttttttttttttttttttttgggaangggaaaaaaatgggggattttttaaaaggtaaaggtaaaggcaacaaaggccttcaattgccccccccaaccaaaaaaaaccaatccctttaagccccggggcccaatttttgaaacccaaaggtgggggtaccaacattttttacaatcaaaaggcagatttaaaggttttttccttaaaacccggttttggacatcttttcaaaaacaaccatcaaaaaggggcctttatcctatccgggggcctaaaggggactttttaaacataattttaaaaacatactttttttttttaaaaagggggttctggaaaaaattttgatttaggccccgaaggagcccccaaaccctcaaggaaggccctcacatcggcaggggcatttagggaggacctaactttggtcgggttttg

SEQ ID NO: 32189 - DNA, 324 bp, Glycine max
  Clone ID: PAT_MRT3847_129071C.1
gtcactcgtgcggagcttccatgggcgctggtatatccaggcgtgatccacggcatcatcgacaagctaggatgctcgcaggaattggccgcatagatcgatacttggatccatactggagaccattcggcatacataattgctatgatatttgctatgatatgaaagatgtttggatcgtaatggattactgaatgtggtatagtttatgtggatgcttaactgggtacatatgatggtcattatgaatatcatatcatatatacgttcataagcacattatgtaacagtatacagatgtggtaacaggactggtaacatgac

SEQ ID NO: 32190 - DNA, 1266 bp, Glycine max
  Clone ID: PAT_MRT3847_129072C.1
ctgtatcttttttgtcaaataagtttctattccaaccttcacttggtagggcacggtggtgttactgtttcttacggtcccacccacccaatccaaaccagataatatttgccattacgatacatttattctcattgaaacaaaaaaaaacaagaggaaaatgaagataacgatgaaagtgaaactagcataaaacaaagtgccataattctaacccggaaattaatgaatttacatacaagtaaaaggggaagaggagatggaggaatagataagcttaggattcccgaagcaaactgacaaagcgattgccctatctacggtcccgattgcataataattgtgaatgggacccaatctacggacaagagcaatctactcagtgtagcgcgttgaggccaaagttgacgttattattaccaccctcacccgctggtcatggatgtcattcctgtacacgtgtcacctctgatccgtaaacggcaagtcaaaccagattcgtgatcactcacctaaattctgccaaactagtttcaataacacaaattgggatttcacaaccctaaattatacaattagtaatgttcttcttttggaacaataatactagacagatagggtagctagcaatagcttagcgtatcatatatataaaaattaatcaaggggaggaatatattgatatgcatagttcatacccagagagcgccgacttggacgagtttggggatgaggtggccgctgacgtggagggcgacgagggattcgaggccgccgatgcaggtgccgccgatgaaggcggcgggggcggtggtgtcggggagggggagggaggcgatctcgtggtcgtccaattcgatgacggtggggtggacgccgatggtggcgaggagcttcttcatgacgtggcacatgcagcaggaggatcgggtgaagatgatgacggggtgctccgatatcagccgttggattcggctctcgggggactcgtccagctccatcgatagcgaggaagaggagttgctcatagtgggacttagctccagctgccctacgacgtcgtttgagcagcaccctatccctatgccttgcatcccctcctcactcttcactgtagttgttgctggtgcactactagaagaagtggtgcagcggaagaaagagagtgtgtgccgcgtgaccgaatctggtttgactcaccgtatacgggtgagtgaacgaatctggtttgactcgccgtacacgtgtcgccgttctcgagcgtct

SEQ ID NO: 32191 - DNA, 1127 bp, Glycine max
  Clone ID: PAT_MRT3847_129073C.1
ttttgtacggctgcgagaaacgacagaaggggagggttggttgctcttcttcctcttcctcttcctctgtgaatagggtttctgccttttttaacaacaatttcgaatcgattcgattgggtctctcaaagttttgattgcacagtttgcgaagatgcctcgtcccaaaagaaaagctgccccaccaatcacttcctctgatgttgattcttctcttcgcaccgaaccaaagaaatcaactacaaagcaatttgatcgaatagataacttatttgagtcatatgcaaataagtcattgggtttaattgacccagacgggattgaagcactttgtaaagatgtgcatgtggaccacacagatgttagaatgctcatacttgcttggaaattgaaagctgaaaaacaaggttatttttccaaggatgagtggcgaaaagggctcaaatgtttaggggctgacactcttccaaaattaagaaaggctattaatggactgaagaaagaggtgacggtaccagagtgctttgaggatttttattcctatgcatttcaatactgtttaacagaagaaaagcaaaggagtatagatattgagaccatctgtgagctgttgaatgtcgttcttagatctgaatttcctactcaagtcaatttattaactgagtatctaaagatccagaacgattacagggcactaaacatagatcactggagaaatttttatcggttttttaaggaggtaagccttattgatcttcgaagttatgactccagtcaggcatggccagtgatcctcgacaattttgttgattggttaaaagaaaaagaagagaaaatatagttctcatatttctcaagtttaagttcaattttaatctgctgctgactccgaacaagaatactgtttgaagcggatatacaattgtgtattgctgatctgagtaatcagttcgcagttttttttgcagaaaattgttatcaaatgattaatcacatgtaacaacaacttcatacagtgtcaactgtcaaagctatattcctttttcctgacctggagatattgttttaagctcttttttttgttttttactcgttgttttttaatattttcctgaatcttttatgcg

SEQ ID NO: 32192 - DNA, 1089 bp, Glycine max
  Clone ID: PAT_MRT3847_129074C.1
gaagctcgaattcggctcgacctttacaagctccaccgtggcatgacatctgctgtaatacaagatatttgttttagccattacagtcagtgggttgccatcatttcctctaagggaacttgtcatatttttgttcttgccccatttggtggtgagacagttcttaagatgcacgatcaagacactgatgggcctgctctgttgccaatttttcctctgccatggtggttcactccacatttcacagtaaaccagcagcagtattgcctgacacccccacctctggttgttctttctgtggttagccgaataaaaaatagtaatgctggatggctcaatacggttagtaatgctgcgtcttctgcggcagggaaagtctcaatcccatctggtgctgtttctgctgtctttcatagttccattccttataattcacacaatgcatactcaaaaattcatgccatggagcacttattagtttataccccttctggtcatttaattcaatataaactactgccaccattggtggcagagccaagtgaaactgcttcaagaacagccccagttccttcagcacagatacaagaagaagatttgcgtgtgaaggttgaacctgttcaatggtgggatgtctgtaggagatatgattggccagaaaaagaagtgggcatattggggaatactgttggtagactggaagctgtggaaatgatcttggatagttcagattatgaagataataatagtgtcgggaacaataattctataaaacttaataatggcaatgtcacttctcaaatacagaggtacatataagctctgggcggataccaatttggcaagaatctgaggtgtctttctttgtgattagtcctttggaagctggagagctgaatttatgtgaacttaatacaagtggagaaattgaaatagagaatattcccggtatgagattgaaataaaacagaaggatctgttgcccatcttcgaccatttccatagaattcaatctacttggggtgaccagaggttttgttatggggaagatactctaactctttcatctggtttcacattggaactgga

SEQ ID NO: 32193 - DNA, 780 bp, Glycine max
  unsure (1)..(780): unsure at all n locations
  Clone ID: PAT_MRT3847_129075C.1
aatgatctaaaagtttctacattcttgaaatattttcccatggaagtctatgatacgaaatcaaaccatggcgatttcccttgattattaccccttgtatgatgcacattaaagttgtgttgtttaggtggaagatgttcagaagacctttaatgcccatacacgttaaattattttctgacagttgaaacttatttggcagatccagaacgattacagggcactaaacatagatcactggagaaatttttatcggttttttaaggaggtactgctgtttttattttttcatacgttgcctctggattttatattctgtacatttttcacttctggttgtgtttactatctgattgtgaggttaatttgagtattggtaagtatttatgttgtttgatcggtgaaagttggtgtgcttcacttttaaaagtcgcaagcagaaaaaaaaaaatgtctgacgttttgttgcttccaggtaagccttattgatcttcgaagttatgactccagtcaggcatggccagtgatcctcgacaattttgttgattggttaaaagaaaaagaagagaaaatatagttctcatatttctcaagtttaagttcaattttaatctgctgctgactccgaacaagaatactgtttgaagcggatatacaattgtgtattgctgatctgagtaatcagttcgcagttttttttgcagaanattgttatcaaatgattaatcacatgtaacaacaacttcatacagtgtcaactgtcaaagcttattccttttt

SEQ ID NO: 32194 - DNA, 558 bp, Glycine max
  Clone ID: PAT_MRT3847_129076C.1
gtgttattcccaggcaattttgttataggaatgtccaattatgatctatattatttgcagtgtgcattttaatttgaatatttttagtgtgtatctagctagcttctgttttctgataacagataactgcaagcacataacttggatgataacttgtttctttcatttgctgagttcttgatagtaattatttcatttcatgttttcatttcagaaccaaagaaatcaaccacgaagcaatttgatcgaatagataaactatttgagtcatatgcaaataagtcattgggtttgattgacccagacgggattgaagcactttgtaaagatgtgcatgtggaccatacagatgttagaatgctcatacttgcttggaaattgaaagctgaaaaacaaggttatttttccaaggatgagtggcaaaaagggctcaaatgtttaggggctgacactctcccaaattaagaaggctttaatggactgagaaagagtgacagtaccagagtgctttgaggattttattctatgcattcatactggtaaccgaaaaagcaagga

SEQ ID NO: 32195 - DNA, 2398 bp, Glycine max
  Clone ID: PAT_MRT3847_129077C.1
ttcatccacaggtcatgatgaacaagaggccattaaccgccgtctacaacaaggcgatccccgatctttgcaatcgagaactcggccaccttcccccaaggaatttcgctctccgtcttggcgcctccgaggtcccacgcttctcctaaccctcttttttcattcattcgttctcgtcaatcgtattattttatttttttggtttctctatctggtcgatcatttaggatcttgtccttcgacttgaattactgaggaatctgcaaaaacacagaggttgtgtcaacactgtgagcttcaatgcagatggtgacactctagtctccggttccgacgattggggggttattctctgggactgggaaactggccgcattaaactctccttccattctggtcattctaacaatgttttccaggccaagttcatgcctcactctcatgatcgtaccattgtcacctgtgctgctgatggacaggtgagacatgctcaaattcttgaaaatggacgagtcgaaactaagtgtctggccaagcatcagggaagggctcataagttggctgttgagcctggtagccctcatatcttttatacctgtggtgaagatggattagtgcagcattttgatttgagaactggggctgcaacagaactttttacatgccagccaatcaaggataggtggagttacatgccagtcatccatcttaatgcaattgcaattgatccaaggaacccaaatctctttgcggttgctggctctgatgagtatgctcgactttatgatattcgcaggtataaatgggatggatcaactgattttggccaaccaaccgacttcttttgccctccacacttgattggtgatcagcaagttggaataacaggcttggccttttctgaacaaagagagctgcttgtgtcatacaatgatgagcttatttacctttttacccaagatatgggtttgggaccaaatccccctgatcctgggtcccctaaatctatgaacagtgatgcaagtgaaattggatttagtcatggatctgtgtcatctcaatctaacatggatgctgatgacaaaatcaccccacaagtttttaagggacacaggaattgtgagacagtgaagggtgttaacttttttggacctaaatgtgagtatgtggtgagtgggtctgattgtggtcggattttcatatggaaaaagaaaggtggtcagcttattcgtgtcatggaagcagataagcatgttgtgaactgcattgagtctcatcctcatacaatggttcttgccagcagtggtattgagaatgacatcaagatatggactccaaaggcccttgagaaagctactttgcccaaaaatattgagcagaaaccgaaggctaagggctggatgtaccggatagcttatcctgaagacctaatgcaactgatttcacttccaagacgaagggtcaggacagaaagcaatggagaaaactcatctacagatcgagaccttctacagttgatattgacattcaatgccaatagtgacagttctaacgaagatgatgacgatggtgatacaaccagccaagacgacttgttcagttagttgagagttacaccttgtcaaaacttggcccttctaagaaaaatgttagcaattgtaaataatataggattaacaattactgttggctggaatattgcatagtatgtctaaacaatattctacatacaattgtgctaaaatttatttcttgtcttttttttttcaagttggaacttaaaagcacataatgatattattacctgtggatgaatgccttttatgtgtacgaagcttgttatgtttataaatcttactgggagtttctataaaaactccatatagataaaatctattataacatactataatatattatcataagaaccgaaatacataatgtgaagatattatcccaagcttttctggcccttattcctccatctgcccctagctgtccctcaatcttgatcagtcaagagccaaaaaaaagtgtgatgttatatttttactacagcatatatttgattcttcgaaaattctggcctgttatccacccattactatttaatgatggatcctctgtgttatccattgatcagactttattgttattgttttgatcatgtagtcagaattgtgtgaatcgcgattcgattcttacattcaatgtgattcagaaatgcagcgatgtagattgcatgctgcactgtttttggtcctgaatcactgtgaatactatcctgggttaatcacttgaatcacagaaaaattgcatattgctgtgctctggaccaacgggattattcctaatatcaagttggattgtgtgcaaccttgttaggaacccatattag

SEQ ID NO: 32196 - DNA, 298 bp, Glycine max
  Clone ID: PAT_MRT3847_129078C.1
ggtttaagtccacaaactccttttgggataaatagggggatggagaaactgtgttgacccgagggtacttacagatgggctaaaagaatgccttttactattgggggaggagctggagcaaaaaatgctattctcatgaatacgccataggctgttaactcaatgtgcggatattctggaggagatcaaggatctgacgtgtataagatgggatctccgtacaataagtgtacgggccatttcttcatagcacatggaaattgggctgatgacaccatcaatttggaggctattccct

SEQ ID NO: 32197 - DNA, 299 bp, Glycine max
  Clone ID: PAT_MRT3847_129079C.1
tgcattacaataaaaaatcctccttaagaaaaacggactttcgcagatatcctttatcaatcatggccgttggcttcattatgctttgacgtcctatcatggcaacacgcatcacctagaattacctatttcttttaaggtgcaacgtattgccggaacgacctgcaatttctactacaggcacccgcattacattaattatccctagtttaaacaagattatatcacatgaaacactccacgagcattgttctgacatacctatagaaagaggtcataatgagcaaattgaaagaaac

SEQ ID NO: 32198 - DNA, 273 bp, Glycine max
  Clone ID: PAT_MRT3847_12907C.1
gaaattaatcacgcgtaaaaaaattatgattacaagttttattttatagtggacttacaatcccaataaaaattattcaatatttttaacgaagttatttcatatcaatattatatttagcaactttaacttttattttgtcaaataaagatttaagagaataattttacatacccattaaactctaaatattaattactatttatattattgcacaaataaaaaaataattagctattaaatgattttgtaggagttgttaagagttgtgtt

SEQ ID NO: 32199 - DNA, 522 bp, Glycine max
  Clone ID: PAT_MRT3847_129080C.1
agccttctttcaatgacactgaattatgttatattcaactgtcattgtatatggaccacagtcagtgttatatgaaatctatcactataaacaacgaactctgatcagttcatactcttcatcatttcccagagtttaagacttcatggctgtactaatattcttccttgtttaatatacacaagacccctgcttctcaaaacgtcacgtacttaactctgtatcacttcttgaaatcttacccgaaaggtttgctagtgtaaatcctgcaaaaacctgaatgcatccaaggatgtacattgcagagtacttgcgaccatgtataaccatgtcagctatcatggcaacgggaattgtcaaggacattcccaacgtagaaaccaaaggagctgtccaaactatagaaagtgcccataagtaatctgaaatcacgcttgagcaaatgctatttgcaataacaatctcccaagtggacattgaacttggaaatttgaaatgtggttcaattcccggacgcgtggg

SEQ ID NO: 32200 - DNA, 408 bp, Glycine max
  Clone ID: PAT_MRT3847_129081C.1
cccacgcgtacggtgaattgagttcactgaccacatgttgcgccccaacactcaactcggctcgtcgctatggctggcgtgcttctcatccatatcaaacaaagtgtagatcaactatcatggcagctccattttcatcctccaatgaatcaccaatggggcacacattccttgtcactgcatgttcctctcttagggctcaactgtcttgttgtttccttcagcccctctctttgttaacgctccaacagcgattctttccccgccctgtgcaggaacatatggcaatcgggtgaagatagactgattaataaaaattctgctgcgaaagcagtgtattgtgatgaattttggacaccggcgaggagttcacctgatgatatttggtccataacgagtgattagcaa

SEQ ID NO: 32201 - DNA, 323 bp, Glycine max
  Clone ID: PAT_MRT3847_129082C.1
gagattccttttgacagcttcctccaatttctttttttggtctccttctcttcataggactaaaaaccatgcagtttactcttttcactggtgcttcctgggacttcctttgaacatgtctaaactaccttaacccattttttttaccacacatctattttagcattttcatttctaccgctctcacatttttaatgcccaacatctagtattatagagtacaggcagatatgatgtaacagtaaaataaaatttgcctgagcttggtaggtaataataggtattttgtgatcataaatcctttcttcattttagctgctaag

SEQ ID NO: 32202 - DNA, 651 bp, Glycine max
  unsure (1)..(651): unsure at all n locations
  Clone ID: PAT_MRT3847_129083C.1
cccacgcgtccgtacggctgcgagaagacgacagaaggggagtcagaagcagcttcttccaaagacatgggtgatgtgtgtgtgtgtgcatgcctctcttatcatacataaaatgctccattccctctctcttctctccccaggctcgagcccaacaacaaaacaacaccaacaactaacctttttcataccatagttcttgagttgagcatgtctttcagtttcactgaccttctttttaccaacaacaataacatgaacagggatgatgatccctttggacttgagtttgctaataacttcaagtcagcttcactgcctctctctccttcttcaatctacccttcttatgctgagttccctcctggttttgccccaaccacacagtcattgaattcacaccactttttttcttctcaaaatgttcctgcatcttacacaactgagccatcttctagcatgagcttcaacatgagaaacagttcaactatgggtcaacatggaaacaaggaggaagagagaaactactctgaccactcttttcaaacaaaagcaaaccacgtgcctctctttcaatctccacaagcatatttcaagtgcaggagccacanaggaacaggacacantgatattcaatgaagctgcaaagca

SEQ ID NO: 32203 - DNA, 542 bp, Glycine max
  unsure (1)..(542): unsure at all n locations
  Clone ID: PAT_MRT3847_129084C.1
aaaaataaagggtaaaaggacttgcattacatatcaaagtctcctaatgggttacaaaagctaacacataccgcactcaatacaagggaaaaaaatgtacactaactcgggtcccattgaaccgggtctaaagtctgcgctacctttctctaatctgagtaatcaatcactacagcacctagtttttttttttcttttcttttcttatgtaataaaaagaatcagaaactgggaacaacatgagcaggggcaaaaccagtctcatccacagaaactgtctccttcttttgccgcatctcgagcactttacgatgatggttcgagtgtaattcacttgaaaatgttgggctacaagcaggcctgtattcgggtaaaagccggcccgacttgaagcggaccccacacgcgttgcatagtgtttttgggcctagcggcccagttctccactgaggggttttctgcacgccgcaatgactgcaccttcgcggcgccagggtacgtgggcggacgctttggttcatttttttggnatttggctcgga

SEQ ID NO: 32204 - DNA, 314 bp, Glycine max
  unsure (1)..(314): unsure at all n locations
  Clone ID: PAT_MRT3847_129085C.1
nncccatcnannntangcnattnngnatttgntccanatcgnaagntnnaacgaanggttncattcgagaganncctgagtgntatcataattntcnaagnnatgaggtntctaatnctaannctngacatgaagctgcanaggntgcganagcagtacttctgcaggaaanntgantatgaagaaaagataanaganttgaagttgtcgantgatagtcttgagaaggaacgggatttctactttgcaaagtnnanagctattcagctcagtgtncnagantcntnagatcgnaanactnaccgcntgttgcc

SEQ ID NO: 32205 - DNA, 392 bp, Glycine max
  unsure (1)..(392): unsure at all n locations
  Clone ID: PAT_MRT3847_129086C.1
ccncccaacatgcaagctagcctttttttttattgccacctgcgcaaaaaatcatgctgccatatatcctaataataggaaataccgggttctgtaaataaaaaggtaacttttaactaatacgggcatacactaatcccccaaaggaaatactggaagttccaaaattatctttattcatatcggatctccaaagccaccgtttccacccagttaggcgtggagcttttgaagttggagggactggacctcctaaattagatctttaaaacgggggggagaagacccaccaacctgaatggctttttttgcagaataactaagcgctttaactcttttcctaattttttaaaacttttttccaccgcccataaacaaagaaatggcctttc

SEQ ID NO: 32206 - DNA, 387 bp, Glycine max
  Clone ID: PAT_MRT3847_129087C.1
aaacaaatctagccatgaacctaattggagttccaaattgggggaacagcatatgaaccaaaccaaaatcaattataaaagctgggagcctcgcccttcaaagtttcagacgagacagccaaaattttttttgggaactttccacatctccttgctgccacttgaatagagcaaaattttgaaggaaaatagccgccccccacccccccgacttttcctaatttaattccctttcttttttctctctttctctataacccccattcaggggggaaaaaaaatcaaagattaagggtgcattgggcaaccaaggaggaactacaatttacacgtcaagaaaaggttaggcgtatgtgaacaattctgtccaaaaatcaattacctagg

SEQ ID NO: 32207 - DNA, 191 bp, Glycine max
  Clone ID: PAT_MRT3847_129088C.1
ctttaccagttgccacactacacctagatttccactaaacccgtttgcgctgttgtttgcggggaagtttcatctaacaggagcgtgggaacattaaatgaggatgctttgaatgggaagagcgtgttcgagagggtctatctagtcgtcagtctagatgaccaccatgtctttaacgtttacactagaat

SEQ ID NO: 32208 - DNA, 485 bp, Glycine max
  Clone ID: PAT_MRT3847_129089C.1
aaaaaaaaaaaaccaaaaatttcatgggttcacaggaaaaaaccaaaaaggggggctaaacttaaaaaaaacaaaaacggggctctaaaaaaaaactggaaaaggaacaaaaggccggggtttgggatgggaaaaaaaaaaagggccctgaagcaacttcacaacatcaaaagcattataaaaaaaaaactgggccttgggggggttccaacccacaggggaggaaaaaaacttgggggcggggggaaaagaggggcaaaaaactggcctaaaaagggtttaaaaaatggccttatgggacctattatttccaaggcacagaaaaaaaagggggggaggggcgccattaaccaggggaaaaaaaaccgggtaagaaaccaacccctgggtaaatcccggggggtaaacttaaaaaaaagggggaccttttgaaacaggggggggttaattaggaagcacactttccaagggaaccaaaaattttt

SEQ ID NO: 32209 - DNA, 444 bp, Glycine max
  unsure (1)..(444): unsure at all n locations
  Clone ID: PAT_MRT3847_12908C.1
caannntntnnntnttttatttttttttcttttttttttttttttttttttttttttttttttgttttttttttttttttggacaaaaaacagccaacccaactgaagcaccccttttagtcttttccccccttttaacaatttctgggcccccttactttttaaacaataaaggaagatgtttgcctaaatttgcaaaatgcatgacccctgttccttccatctacttggggacccggcttttaatgcttgaggctgaaagccaaatgggcaaaactgtcccaacccttccaaaaaaaaccacttttttgggggcaccaacattcctacaaaacttggggtaaacatggaaaatttttttccaacccaccacgtgtttttttccctttaaacccaaattttctcccccccccggtgggccgtgtggtgaggcttttatcccca

SEQ ID NO: 32210 - DNA, 878 bp, Glycine max
  Clone ID: PAT_MRT3847_129090C.1
gttcttactaacatggttgcatacattcaaaaagaatttcctggaaacacacttaaattctggcgattacaatccccaaggtacttttatggtggtgactggaatcaaaatgggagctgcttgttcaacaagccccttgaggaggatgagcttgacttatggtttgaacccaggaacaacggagttaacaaggaagcgagagtgttgaattttgtgattgaagaagcattacaagctgcaaacattcaattgcttgacttgactcatttaagtgagttaagagccgatgctcatccggcaatttggttaggaaggaaggatgcagttgcaatttggggtcaggattgcatgcattggtgtctgcctggtgttcctgacacatgggttgatatcttgtcacaactgatccatgacggcttaggaagaactggtcggctgtagaaactgaagaagctatttgaattccatcttacataccataaactgaaaatttccatcaagatgctggggggcatgctgccaagttctgggaccaagaaatgagaattttgggttgtgcttgaaatgttcaaggctgatcttggttggaacttggaaggaaagctttgatgaaggaagtaagcgactgattggtcgagcataagctatactgaaagcagctccgatctaaatatcattcatcattgggccttaacttgtcaaatacatttaatcatttaatcctttcattcagattattattgttgttgttagtacgtaatcttctattcaaaatttgatatttagcaagtgcagtacatatttacgtcagactaactagcttgtgagggaaattataataagcaatgactcaatgagtgcattatccttttttattt

SEQ ID NO: 32211 - DNA, 426 bp, Glycine max
  Clone ID: PAT_MRT3847_129091C.1
ggaaattaaacaaattggttacattttaaaaacattcacattaggggatcaattcccgcttttttttaccaccagcaaaattccccaacattttcaaatacgacaattatcaaataaaaattttaaaaaaccccgagaaaaaaaaaaagggatttcacttcgaatcccccttgaaaaaaaaccctaaactctttttttttttttaattaacccacattaaagctttaacgggaacccaaaaaccaaacttaaaaccaagggaacaacaccaccaccggaccttccgccgttacgtttaacggggtcgttactattattggggggcacattggcagggttatcgggagaatcagcaggggccttaaaatcatccgccggggcattaaccgccttttttttctttttccccttttttgccggggcaag

SEQ ID NO: 32212 - DNA, 547 bp, Glycine max
  unsure (1)..(547): unsure at all n locations
  Clone ID: PAT_MRT3847_129092C.1
cggcctcgagaaaagaatcattaatgttctttattacacacaaattatatcaagagggtctaacttggttggtttagcttggcagagagtatgagttgtcgtaaaccttctcatattgtcttcgattcctaaggtgttaaaaacacacacacactaattgtgttgagtcactgaggttcaaagaatgtgtcactgttcattatcaatggccacactatactaccactgattgtgttttaattctcatcttccatatacaaaggtgttgcataaaccctctgtcttttctaggtggcatgatcctgcttcaaccactacttagtatattattgccacccacagaaacaccaccattccactgtcacaaagaactaattgtctttttgtttctcttttgttgtttttcttgtgtcattctttgatctattctctctctttttgagactccactttcagccatgaaacaagagtcaccagcctcaccactgccatcgtcgctttcacaaccatcaccaacaatgacaacaacgaanaatgtgatcaagct

SEQ ID NO: 32213 - DNA, 492 bp, Glycine max
  Clone ID: PAT_MRT3847_129093C.1
ggaaggtgacatataacacggttttgaattgttattttatacatgttagtcaaatatgagtgattattttgtattgaatttgatttgattgctcgtatattgctgtgattatatatatatatatatacatatattgtaaaaaggatttggtgtttggtaacctaaattaacataacaatgacggtggagatataatattgtagattagggggtagaccatgtgagcttagtaaagattaattaacggattatttgtagattagtgcgtgtgtcttttaaatttcgtagttggttttgttctattgcggccttattaccatatagtgaatgagcttcggtgggaagtcaaaaatcaggagcctcatatttgggattcttgttgacttgctcctataaatataatgtataaacaagaaggtgccaaaccccagattgacgatctaactttcagtttcacacagaataaaatggatttgagtctcttgctgtcaa

SEQ ID NO: 32214 - DNA, 142 bp, Glycine max
  unsure (1)..(142): unsure at all n locations
  Clone ID: PAT_MRT3847_129094C.1
aatagaggtcctaatttttattgaaggcaggaaaccatananannaggggctctcatggcacactcaatatcctaaatgaacgaacggcggggggaaaaatattcaaaaaggaaaccacagggtttttcgtgaaaaaccacc

SEQ ID NO: 32215 - DNA, 360 bp, Glycine max
  unsure (1)..(360): unsure at all n locations
  Clone ID: PAT_MRT3847_129095C.1
gctcctcaaatattaacaaaaggattcccaccacacttggggaagggaaaaaaaatggttttcttacctaaagtgaacccttttccagtaccttaccggcttgtctttttggccgttaaaatgaaaatcttaagtcttaccccccttaatctatgctgacgccacttcttgagaactgtgagagtctcaaatatctgggtgatgagagtgcttttgcatttgtgaactcgtatgtagtattttattcacttaaataaagcgcattactatgtgcaatgagtgtgtttaaattttttanaaaaaaaataaaaaaanaaataataaatataaaaatnanatttatttattttttttttattt

SEQ ID NO: 32216 - DNA, 444 bp, Glycine max
  Clone ID: PAT_MRT3847_129096C.1
gtccgtacggctgcgagaagacgacggagtggagaagacgaaaagagagtggagagagagagaaagtgagagtgtgagagggagcacagtgaagaagagaacgaaggaacgaagatggagactcctcctccgcaacaaggcgtggtgaagaagaaggagacaaggggccgaaaacccaagccgaaagacgaacacgccaaggcgttgaaggaagggagaaaaacacagcaacaacaacatgatcagcagcaacaacaacaacagcaacatcaaccttcggtggacgagaaatacacgcagtggaagtcccttgttcctgtcctctacgactggctcgccaaccacaacctcgtctggccctctctctcttgccggtggggccctcagcttgaacaagccacttacaagaatcgtcaaagactctacctttctgagcagactgat

SEQ ID NO: 32217 - DNA, 536 bp, Glycine max
  Clone ID: PAT_MRT3847_129097C.1
ccatcttgtacatagagaagcaataaggtccattgtgtccctccgcctgtccacgcaccccttctgctccgctgcttgctcctcagcgccccttgtgccctccttttcattgtggtgcacaattattcacctgtcagcagaatgaagatgactctgcaatcattcctacgtggtcaactattgatttacaaataaatttgatcatagcctcacatcggaccttgttgcttctctatgtacatgttggagttcacattttgtcacttaatgaggcacatcctaagcattcaacctttcagatcggctgcatgctactaagcagcacttgtgtattcctgaatattgttattacgtactattttcctaacaaaagaactgtatgagtatgaccttggcatgcttcctgccctcgcttgtgttgtcccgattatggtgcttccttgcggttttcctatctgatgtgcggagatgaccttggaaattttgctacacttgtattatttgatatacaataaaggtgtatcatagcaatgcat

SEQ ID NO: 32218 - DNA, 933 bp, Glycine max
  Clone ID: PAT_MRT3847_129098C.1
tacggctgcgagagacgacagaagggggcatttaagaaacacaaaagatagaaagaaaataaagagaaggagaaggggagaagagagaaaggttgtattgagagatatggggaggggtaagattgagatcaaaaggattgagaactcaagcaacaggcaagttacctactcaaagaggaagaatgggatccttaagaaggcaaaggaaattagtgttctatgtgatgctcaagtttcccttatcatctttggtgtctctgggaagatgcatgagtacatcagcccctccactacgttgattgacgtcctggacagataccaaagagcctctgggaagaccctgtgggatgctaagcatgagaacctcagcaatgaaattgatagaatcaagaaagagaatgacagcatgcaaattgagctcaggcacttgaaaggagaggacatcacgtcactgaattacaaggaactgatggctctagaggatgcccttgaaaatggcctcagtggagtccgtgagaaaaagatggaagtgcacaggatgttcaagagaaatgacaagattttggaggagcaaaataaggaactcaatttccttctgcaacaacatttggcactagaaggtgtgggaaacatgcatggacaatggatttaacgagattaaaagggtattcaattcgcatatgcaacgcgcagctagcctaaaacagccaaatctaaaagaaagaatatagattaatggctggtcttgtcaaattagttctgctcaaagccttaagttatatgaacttctatcatttctgatttcggccgtatttgttaaagctcggtagtgtatctctaaaacttgttatacgattattgaattctgattacgaaactatcaattaatgtgcatgtatgctgccaatttgagttatatatacatgcatggag

SEQ ID NO: 32219 - DNA, 1141 bp, Glycine max
  unsure (1)..(1141): unsure at all n locations
  Clone ID: PAT_MRT3847_129099C.1
tatatacttccaagtttgaggaccaaagcaagtatgttcttctgcctctctcacatgaaaatatacattatatngcattctgaatttgagatgcccatggatttttttttttttttgagaaaaaatgaaagatatgataaatttaaaaataaagattgaggacctaatcgacaatagcaaatttgttcttctgcctgtcttccataaaattaaccatgggaaactgataatcagaatgctaaataatatacatgaaacacataaaatcgaggaccaaagtattcattacaaatgctgcagcaacaaggtgaagtttctttcagaagtatatgcttccgttagatggtcaactttccctaaaacaacccttctcgcaattcatccaaggaagttttatcaatgctctccccattcttgatgaggcaaattctcccgtcgcggcgaacacatatctctggaatgcttttaacttcaccgttgatgctatcattataaactctaatctcaatgtcaccctcaacataaactgaagagtttttaaagagtttctgtactgcataggcccccagtatatcattatgcacagcaatcctatgccattgagcaggttttggcaaatcctttggtccttgaattctctggtcaaacatgccccctgtcccaactgtaaagatggttaaatttctaccattcctcagtattttctgtacaggggcttggccaacttttccacaaataattgccttgtgcacgccacgaaatccccaacccttcttgggatccacaccttgcaactgtagctcggccttttcgccaagaaaatcatcaagttcaccatccaatgcttcattcttaggtgcaacattatcttgtgaaggctgatattcacctccagatagagaggtcgaataccatgacgctccacttctcggcacaccaccgaatgaagatgaggtcggtgcagagagttggagatgcttcacaagtctcaccgccatagaattcatttccggcaacaaccttcaaagacgaacaactgcaatggaagggtttaactttaaccaaacacgcacgcacggtcttcgtttatgcaatcgggctcactctgtataatgtatatgggcccggccatacaattggg

SEQ ID NO: 32220 - DNA, 327 bp, Glycine max
  unsure (1)..(327): unsure at all n locations
  Clone ID: PAT_MRT3847_12909C.1
gtcgnatgcangcgtagtaagntcggaattcggatcngaaaatagaaganncctangtagtaaaatcaccgtngntncntnngatcaagaatganangagaagnanncaagtccanagcttatnnntggnggatgannaactcnnantaatnatagtagangntgttcaagaagnaggnaantanaagcagctnaaaaaaggtgctaangaagcnantaaaancctgancaggngnatcncngaanntgttgngatggctnctgatatgagnaccttgagattcttctagatnttntctacttggagcaggatanangatgtgcana

SEQ ID NO: 32221 - DNA, 211 bp, Glycine max
  unsure (1)..(211): unsure at all n locations
  Clone ID: PAT_MRT3847_1290C.1
tgttgttcaatctaacaaacttctctatatcgtttactttttcaacacaacatacgatagagnntanntaggncnnncatatnnatatcatngcttcnanggaagtttcggttataaatnntnggatgatngtgtgtggcataaagtgtaactggcactagtgttggcgagatgccttaaaccaaagaggaaggtcacgattttaaggagg

SEQ ID NO: 32222 - DNA, 305 bp, Glycine max
  unsure (1)..(305): unsure at all n locations
  Clone ID: PAT_MRT3847_129100C.1
aaaaaaaccgcgncgacccacccatccgaatataaaccaccaatttttattttttaaaaacaaaacaaatcaaatcgttctgtttttttaacaatcttttcttcacctaaattaaaacaacaccatttctttcacttctatactatccaaacacatatattccttaaataatttacaatatcatacattttaatcaaatgaaaattatcattaaatatacccaaattttaatttctcatcccaatttctcccctctcaattaaaatacttttttacttatctaatatctccattcataaaattct

SEQ ID NO: 32223 - DNA, 1036 bp, Glycine max
  Clone ID: PAT_MRT3847_129101C.1
cacgcgtccggaagagatagaggtggaggaagaactggaagaggaggtagtagaagagatagaggtggaggaagaagaagaggagggggaacaaggagaagaacaacaagtagaagaaatggaggaggaagaggaagaagaagtcgaagaggaggaggaggaggaggaggtggaagaggaagaagaagaggaacaagaacaacagcagcaagaagcagtggaggagaagaaggaagagcaacaacagcaacaccaagcagaagcagcaatggaggaacaagaagaagtgccaatggaggagaaggaggaggacaaaccggcggtgccaggttctccactcgatgcggataaggatcgcaaagattacggccaacatatggagtttgaggggcaagacaaaaacttgggaccagtttcttctgtggctgaaaaccctgaagtaatgccaccatctagtacgcattgcatggaagagaataatgtcatgctcaaaaaaagtgacatacctacattgaattcggaagagcttcccctgaaatatgaaatttcaagtcatccaaaatcaagagaaaatctgacttctgttgaagtttgcagaagtcaaggattagatgttgaagttgaaaatgctggatcccttctgcagaagaaaacatttagaggatactgtgtgccaggttgcaatagcaaagctaatttatgtggtgacaataatattgattccagggccagggccaccaagtcatctagtgatactgtacaagatatggttattggccccctaccgagagattgccttgttgaggattctaatggtggtcagaattctagaaacaaaatcatgctgtcggagatggagtcaagggatgatgtgaaacaaatgacatcaaggactagaaatctgtctgcctaggctgagattaaagatggaaacaaacgcctcacaattatatgtgacttatttgctaaaggatgggcatcataggaagttttgagctttcttatataaagatactgggacatactgcctgaactg

SEQ ID NO: 32224 - DNA, 502 bp, Glycine max
  Clone ID: PAT_MRT3847_129102C.1
cagagctcctggcatattagtatattcaagaacttgctagtgctatctactttcaaccgaaccagggagtacttcgttttttttttttccttctttgaaccgtccggttcgttgcgaactgaatactatggcagctctgttaccttgcgcgccgaacgtagtctctgctcccttggggaaccggagcacgtgccacttcccgcaccgaccttactcccacgctttctccggttcgaccgccagacactttcttcgcggttcgcttaccgtcgcccgcttcgggttccaacccggtttcttgcccgagccggacgaagctgaaggtgttctcagagaactgtttggccgagcggagggacttctttacacgattgccgatgtcgccgtttcttcttccgatactgttgcggcttccaccaccgccaaacagagcaacgactggctttccggaattgccaattacatggagaccgttctcaaggtactcaaggatgggctttct

SEQ ID NO: 32225 - DNA, 719 bp, Glycine max
  unsure (1)..(719): unsure at all n locations
  Clone ID: PAT_MRT3847_129103C.1
cacgcgtccgattgctttagtattactgtctcttatgaaagaacaatatgcatatcttgcattatatacttgctatattgttgtatatctgttggcattgtgcttcttcaatgttagaagaatatttctttatttgaccattgactttgtcatataagcaataataatcttctcatccttagttgttcgattagcatatggatgtccaactaataacttagccaatgcatgattatgactctcacatattaacttcatcatccatccttcacctctcaccactagtttcactcgcagcttaaagagacatccacattttctacttccagtaactgttcatactaaatctttcttcctgaccctatattctcactcctttcacaacctattaaaccaaatgaggtccttcctctaataatangtatttgtgtctgacctcataaccaccgccacaaaaccaatatcatacgcaacagattgagctaaattcaaaacatcatcacaggtaccaaacacctacaatagggataatacatgcttagacattcatttacttactttaacaaaaaaacacatattaatacctaagaagtatttgaagacatcagaataatcaacatgttgatgcataccaggttcctctccattttcttcattcacaccaggttcctcttcattgtcttcattcatatcaatttcttcagaattatattatcata

SEQ ID NO: 32226 - DNA, 353 bp, Glycine max
  Clone ID: PAT_MRT3847_129104C.1
tcatccacaactattaaatttccatacacactaagatccatttggaaaattagtatctatacaaatccacataaacattaattcccaatgccccaccccattaatactaaatatcacttacactttttacaggcactaactcattaaactatatgatactcctttttatcctaactgcactctttcataatgtaattccacccactcatcaatctcattatactctcttaactttcccttccttacattcctcctcttattctatattttctacttacctcaaattattctttaaccctaataaaatttctttttaaatcttcaaatacaaaaatcctctatacacttcaatt

SEQ ID NO: 32227 - DNA, 250 bp, Glycine max
  Clone ID: PAT_MRT3847_129105C.1
cttcattggctccctctacatttctcatcccctcatcatcattctctggctgcgtcactatccgaatatccgaatttcctcggctcagagcctcagcggtgagaccaaggatgatcttcactgagcatcgccgaagacgcagatccacgccagtatcaaggagagtccagtacttggaggctctcacaagtaggggtgcaagctagatcgacacttgaacactcaagccacgatggagttgactctggct

SEQ ID NO: 32228 - DNA, 145 bp, Glycine max
  Clone ID: PAT_MRT3847_129106C.1
gaatctcctaggctatcattaagtactctctcacttccgctcgttagctctctctctcatggcaattcgtttcgctcctttctgcgtttaaggttgatatcaggagttttggttggtactgcgagttggaccactgcctattgtg

SEQ ID NO: 32229 - DNA, 287 bp, Glycine max
  Clone ID: PAT_MRT3847_129107C.1
aaaaacacccaaatttggtgcattaattattttttgccacatcaaatggttggttcacattttttaaacaagttttttttttttggaataaagcaactttaaaggaccccccccttttattataccactttttcctttggcttaaacaccagcccaataaaaattttatcctgaaattataaccggggctcttggggggcccgcctttgggggcccccaaaatagaatcggggcttttggcggcccttcctttgggggccccaaaattttaatccgggcccttgggg

SEQ ID NO: 32230 - DNA, 140 bp, Glycine max
  Clone ID: PAT_MRT3847_129108C.1
tatcaaatcaaccgcgaatatatagccttatgtctcgaattaagcattgattgtggaccttataataaacgcaggacgttaactggctggaacaaaaataaagactaaactcaactgcttcttgacaatacccaccaatc

SEQ ID NO: 32231 - DNA, 284 bp, Glycine max
  unsure (1)..(284): unsure at all n locations
  Clone ID: PAT_MRT3847_129109C.1
gtgttgtaattaatggcagctgcaagtagcatcatctccatctcctctgcttcactactttactccaacaacaacccaatgcctcctcaaacacaattacaaggaccatgatcatgttcatgttcnnnnnnnnnnnnnnnnnnnnnnnnnnnnnnnnnnnnnnnnnnnnnnnnnnnnnnnnnnnnnnnnnnngtttggaatcaccacaacaaccaccagggttaataatgttcctcctcgtaggtttagttgttcagcatcgtcatcttcttcctcttccactc

SEQ ID NO: 32232 - DNA, 496 bp, Glycine max
  unsure (1)..(496): unsure at all n locations
  Clone ID: PAT_MRT3847_12910C.1
tttcgcatgnttgaggagagtaatttccatgcttggaatttgtaaattgaaacacacaaagccaacaacgccttcaaatgtaatggatatcatccgttagcattttgctgcaaatccaacggaattacgtcgaaagtcgacttataattagcacaaaatgtctccagcaatcagtgggaccgttctcttctgtcccaattgccgccgttctttggcatttttccctttgctaattgttcctctgattttgctcacttttctctcctccgatgtccattcttcgtttgttgtcccaattgaaccagacaatgtctttctccccccgggcgtccgctccttccgttctttgctggtcaaccaaaggctcagttccctttacgtcggctcccgtgaccatttcttccgtttgtggctgttcaatgtcaacgacacttcctccgccgttttgtttgcccatcggtcgcttaatgtgcgggcggaagagcgcgaggaatgc

SEQ ID NO: 32233 - DNA, 230 bp, Glycine max
  Clone ID: PAT_MRT3847_129110C.1
ggaaaacgtggagtagatgctagacagaatagagaagctggtggcaagttctcagaccgaaggaagaggcgtaaccctcttgagagcatacaacaataatggaagaggacacccacacaagatccccccaagccgagggcatggtggaacacagtgtcatgagcattgtggaacgtcaggctacaagtcgagtttacactgccgatgcgtattaacgacgaggacgagca

SEQ ID NO: 32234 - DNA, 240 bp, Glycine max
  Clone ID: PAT_MRT3847_129111C.1
attatatataatttggtccagaattgttgtttttcaattcaaatcaacacaaaatcgaggcgggcatatatcaatggcgtctgatactcatatatcttcgaccatcatttctatcaccacactctattcatctagtatacatctacaactcacactacataaaggaaataagtcgtatgctacatgcgtcatacataattcatgaccccgagagctgacccaaaaaccgtttatactaaa

SEQ ID NO: 32235 - DNA, 216 bp, Glycine max
  Clone ID: PAT_MRT3847_129112C.1
gggataaggaggaacccttgctcttttatcagcataacaacaatccaggaaaggagcaaggagaatgcccattttttttgttgccagtgattttgtaacgagggtgattgttgagttctaattctaatataatctacaactttaaaaaaaatgttttcgttggatgaaaatgtaaaacttccttttgtgagaaaacttcaattcctaattcacctt

SEQ ID NO: 32236 - DNA, 638 bp, Glycine max
  Clone ID: PAT_MRT3847_129113C.1
tcgaacttcaagaacacaaccactcaaaggccgtgaaagagagaaaagggttttttcttgtattgttgtggaaaacagctccctcgatgagtattcttccttcttcttccctgatatggatcccaagcgtcgtggaaacgacaccgctttcaacgacctcctcaattccctcatccacttagacaacaaacaaaccctcatggatcctactcaattccaattcgactcctcccccccaaccaagagacctcgtcgtgccattgaagacatccacaatgtcacggtccaacaacaacaacaacaacaacgccgcctgtgggtcaaggatcgctccaaggactggtgggagcgctgcaaccagccggacttccctgaagaggaattccggcgctacttccgcatgagcaaggccaccttcgacatgatctgccagcatctggactccgccgtcaccaagaaaaacacgatgctccgccaggcgatcccggtgcggcagcgcgtggcggtgtgcatttggcgcctcgccaccggcgaccccctccgcgagggttccaaacgcttcggcttgggaatctccacgtgtcacaagctcgtgctggaggtctgctccggcataaaaaccgttctgatgcccaagt

SEQ ID NO: 32237 - DNA, 279 bp, Glycine max
  Clone ID: PAT_MRT3847_129114C.1
gggcaagaaattaagaactggttttagtatttactagaaaaatactggaaatttgacaaaaaaaattcaattccatacttgaatgccaaaatgggaaaaaattattttttacaacctgtggggatctgcaacatataccttgttaactctaaaaaaatgacaaaatttattaactggttgagtgcgtatttttacagaatataagtgatgttgatcgcaggagggcctttttttttaaaaaattggtcactcaaagaaacttaaaaagaaccttgagcc

SEQ ID NO: 32238 - DNA, 312 bp, Glycine max
  Clone ID: PAT_MRT3847_129115C.1
gatggttacacgccgtcgtcgctgtggttgtgtgtcgcttgttcgcaggttcaactacccatggtgacgggaccccgcgggcaacgtgttagactctacgtgagggcgcctatactcggatacataaggtccaagttaaaccaccatgacatatacattcctgatccatactgaaggtgtgaatgccgaagaacatgtagcatggtctgcttggaagaaaatggactatatccacaatgctaaggtgttgaagaatggaagccattaccgatgcatattgggccaggctacgaggcctcatattaaccgtgg

SEQ ID NO: 32239 - DNA, 2141 bp, Glycine max
  Clone ID: PAT_MRT3847_129116C.1
tggcggtacttgggtgcttggctatggtgtttgaatgaaaaaagggagggaattattcgttggtagttacagaagccttcaccaaacaccgatttcccccattcagttccagcaaacgatgtcgcattccgatccttcaaacagatactcctacacccccactctaaactggaaccctcaagttcaccactacttcctcaaagcctacggcgccgaccacttctctcgcatctccaccgcgctaacgcgcccttctcgctactcctgcatccgagtcaacacgctcaggtccaccggcgacgccgtcatccacaagctacgctcgctcgtgccgaatgctgacgtgccaccgccgcaatccgattccggagatgacgtggcgaatccgttgaaggagtgttcggctgctgctgctgctccaatttccaagtgtgagattcctggacttgattatgtggtgtttgtttggggttcgggaccgcgccgcatccattacggcgatgcgcctcccaaggaggtcattgttagtaggaagtgtgctgaggcagttcttcgaggtgctcaggtgtatgttcctggtgtgatggcttgcagtgctcatgttgagaaaggagatacagttgcggtttcggttgctgtggagaagcagggtgctgatgggggatggggtattgctatgacacgtggcactgttctccaaggatctgagacagatccttattattttgaacgaaatgggctttatattgggcaaggaacagcaatgttgtcaagggctgggatgttccgagtttctgaaggagttggtgtggatatgaaggatagagtatatgaactgcattcttttcataatgtgcttgagggagaaatatttcttcaaaacctgccaagtattattgctgctcatgctttagatccacaaaagggtgagcggatactagatatgtgtgctgccccaggagggaaaacaactgcaattgcaatacttatgaaggacgaaggagagatcattgcaacagatagatctcataataaggtgctggatattcagaaattggcagctgaaatgggcttgagttgtataaagacatttaaattagatgctcttaaatctgtttgtcgaagagatgatattgatacttttactgatccgtgctgtaataatgccaaaattgatgtgacaaatcaagtgttggattcaccaaatttgcaagtagaaagagtgtcaccccttgttacagaagataaaggcaaaaaaccaaatggaggagcttatgttagcaaagctgacatccggaagaacatgcgaagagcacgaaatggacctggaagaaatcagtgtgtgggtggtagggttgatcgttcaaaaggtttttctcctgacagttttgacagagttcttcttgatgctccctgctctgcccttggtttaaggcctcgattgtttgctggagaggaaacaattcaatctttaagaaaccatgcaaaatatcagagaaggatgtttgaccaggctgttcaattagttcgacctggaggaataattgtctattccacttgtacgattaatcctggtgagaatgaagcattagttcgatatgctttggataaatacaaatatctgtcattggcaccacagcacccaagaattggaggaccgggtctagttggtagctgtgaatttcctgatggatatatagaggagtggttacgaccaggggaggaagaccttgttcagaggtttgatccatcgtctccgcttgatacaattggattttttattgccaaatttctcgtggggtctaaagatacctgacaactattcatgagttggcgtggatatatgtttacttcataattgccactgaaggaagccatcaagtttttttatgattggcctctggcaacagtctgagagcttctcatatgtccatttggaaaatgaattaagaaaatttcaacaatctagatgcacggcgaataagttgacaactattcatgatgttatgtactgtagctcccattttgcatctgtgcatgtacccatatattgtcaacttattggattagttcgtttaaatttatttgttaaaaaatacttatttttgataaaataagcagtttgttgtttttttgtgttt

SEQ ID NO: 32240 - DNA, 446 bp, Glycine max
  unsure (1)..(446): unsure at all n locations
  Clone ID: PAT_MRT3847_129117C.1
ttacgcttctcttcctcctctcgccaccatgtccgtggagaccatgtgctccgttctcaagaaatactttgggttttcggattttcggccttatcagagagaagttattgagaaaattcttgatgttcagtttgacaagcttccacttcatggactggggaaaaattatccagcaaattggtggaaagcacttggacatcaattgatttctcaaggttatttgaaggagattgttagtgacagatacagaactattagtgtcagctcaaaaggagagcaatttttggcgtcttctagaccagattatcaacctcccttggttttgacattgactgctgaaatgcttggagaagaagataatggaaacacacangaagcattcaaaactttatccactttagaatcagaaggtttttcagaggctgagggacagctctaccaaatgc

SEQ ID NO: 32241 - DNA, 449 bp, Glycine max
  unsure (1)..(449): unsure at all n locations
  Clone ID: PAT_MRT3847_129118C.1
cggacagcccttcgtccttttttttttttttttttttttaatannnanaaattttattttttactttttaatttttttttttttttttttttttttttaagaaccaggggcgttttttgggaattacccacaccacataaaggggcgttaacaaacctagctaatgcccctattcctaattgaaaagggcaaataaacaaacccttttacaaaaaaaaaggagcaaactcttactaaattgttgaaaaaggggaaaggaccacccaatggaatacaggggattaagaaacttaaagggcccgtttttactacgggtccgggggttacccccgacccctgggatcacccgggaaattccgaacggcacctgaagggggaccaatttttcctaataaagaatcaaataaaacttgggcgaaaaaaggtaaaagctgtttcccggggaaaaa

SEQ ID NO: 32242 - DNA, 648 bp, Glycine max
  Clone ID: PAT_MRT3847_129119C.1
ccacgcgtccgcttttctcttctctttctccttctatctttctcctcaaccaatatatatcatataccctatgttatttgcttcttgatgtagccgctgctattgcaaaatcccatgatttataaaaaaaataattcaattttcttttattgcattggattcaaagatgcgattttgtttgaccccattggtgcgtttttcggattaaattaatgggcatggtcaaagttcatgcatgattccttcctgtgtgatttttttttattttatttgggggggttttatattcatatatttctatttctcagagttgatttgatacgaattttggaaaaagtccaagatggtgaaagcaatcttacaaaattacgctaatttagagtttagaaaagaaggcacaaaccgttttgaagcattattgagtacatggggtctattgcgtgtgcgtatatatatatatacatatatattgacgatgagaatcagaattctctacgggaggaaattctgcttgccactatgggcgaaacagttttcccttcgaggattcaatacagttgcatatccggtatctcaacacgaaaccactggatactctgaaacaacccgtgctgtttgagcgatgggctcgatggtagggtctactac

SEQ ID NO: 32243 - DNA, 375 bp, Glycine max
  Clone ID: PAT_MRT3847_12911C.1
catatactgaggggaggcactcattgagcctatgatatgaaagataaaacggaacaaaataaagggcggacaatgccccatggctgacataatgtcggataacactggatttagacaacactatactcattgatcaaaatcaacagacctaaccactctctctcattaccaattatgcgaatctctctgctgcatggacccaacttcgatccctctctctacggccaccaacatccccttcactgtgcaacctagtaatcacgtgaccctcgtctacaacagcaacaccaacaccaaccaccctccttacgatgagatgatgtacacagcaatcggggctataaaagagaaagatggttccagcaaacgagccat

SEQ ID NO: 32244 - DNA, 277 bp, Glycine max
  unsure (1)..(277): unsure at all n locations
  Clone ID: PAT_MRT3847_129120C.1
caacgtaccgtagcaaaattcctcttattccaatttgtgaataatttaattttataccttttggaatctcgaagttgataacattgaccaataatatttctctatagatgggagaaatccgggttccctccatgtatattactatttctttcatttttccatcttaattgctttaatttataattctatctcacacatggctctctctattntgtatccacttcttactgccacctttcttttaatgcaaactctggtatagtattcatatgttcat

SEQ ID NO: 32245 - DNA, 1242 bp, Glycine max
  Clone ID: PAT_MRT3847_129121C.1
tgtgggtatgctataaatctatttaactgtacaactatggtttatcagcttatcactattctgagggaaaatttatctgttcttgtcaaaagaacatgatataataactataaaaaaaatgatataagaattcacaaaaatgtttgatctgttattttaatagttattgcaatatatttttattctcttacatccacataggatggaactataatacggggacaaaatgaaatttctcatccaaccagtggaacaatggagcttattaagaaggaaagcttttcagctccagcacttccttcgaaaataaaacgggtgttctacatgtctagcgagggaaaaaatttgctccatgaggtctttccctcagctaatgcggctgtattagagcagttaaataatgtagactgcattgtgtatggcatgggctccctttttacttcaatctgcccctcactggtgttactgggaattggggagattatttcttcaaagtcctgcctcaaggtacttgtgctaaatggaacacgggaccgggaaactaatgggttttcagcttcttgttttgtaactgccattacggatgctctaaatcgaacatatggagagcctaacaatcgcttacagaatcccccaagtcactatataaatacccttttggtaccaagaaatggtgaaattccagttgatgtggactgtctggctgcccaaggaatatttgacgtgatagttgttgactccctaagagatcctaaagtaggtataatttatgacccgaggtcactgataagatctctagttgacttaatagacagatacatgaagtcgcaagttaatggcttaattgataccagacgttaatgattaacgagaagagccagtgaaattaccatcatttgactctgaatcttactgttgctgtctgtatttcacaagatacaaggtgaattgacatgtttatgcgaaatcttatatggcaagttcaaattcccccctacctggtgttcctgtttatttactaccatcagaatacagcgactggtgataacgctcgagtactctgaatgcgataatatttttgtgaaaaatattttttgtttgttgggttttgatctagttgacgataaacaaagacatgtcagagctgttgtattgttgagaatattgagaacaaaataatctagtttctgttgtatataaatatctcgttctttaatttttgctgttccattatagaaaaaa

SEQ ID NO: 32246 - DNA, 478 bp, Glycine max
  Clone ID: PAT_MRT3847_129122C.1
cccaattaggaatgtagagtggagcttcttcgcgtgttgctgtcgttttggctgccggtgatccaactggagaaagatgctctagtgacatggtacatttctttgcagaatttagaaaattcattagccatgattattatgcttccctggatcaagaaatgtctttggaacgaatgaactatgagaccggagtaacctctacagcagcattggcttctatgacacctgcgatggagccttgcagtgattcttattggactgatagaataatccaaagcattcccaaggagctatcattgacaaaataccagaatgagagagtggtttttttacctgagactctaactgaggctaatcctctttctttcaagttgcaaccgtctgctgaaactaccacagatttatgttataagcagcaagatactgatagaaatcttggatcagaatcttctaaacttgtggaacatttggattggag

SEQ ID NO: 32247 - DNA, 214 bp, Glycine max
  Clone ID: PAT_MRT3847_129123C.1
cacaaggaaatactcttttactgaattaacagaaaatagtgaagggaacgaaataacttgtcttgagtgtacatatcaagccataaacacatttaacacaaacagctgcttctacgacaacacaagatctcaacctgagtcttaaacacatacatgctttaaatggacccggtacactaccggctgtctgaaaactcctgtatatgaactaagc

SEQ ID NO: 32248 - DNA, 1667 bp, Glycine max
  Clone ID: PAT_MRT3847_129124C.1
ctccacggctcgacgccacgcgtccgataattaattatattgttgttgacaaggacaggggcaaccctcactcactcactcattgtccttactcacccctctctctattagcattagcatcaaaaacactctcttggttatccaatccaaacaccacccttcttctcataccctgctcagttagcagcagctactctcattcctctaccggagcaaaactataaacaaaaaaaacaagtccatcgtatgggtctcttagcatcctcatgcttcattctcattgctctcctactcctcactcccaaaggtgttatgggtgccaccttcacattctttaacaaatgcgactacacagtgtggcctgggattctcgcaaatgccggtagcccaccactcgacagcaccggttttgagctccccaaggacacttctcgcgccttccaagctcccaccggctggtccggtcgtttctggggccgaaccggttgcaccttcgacggatccggcgccggctcatgcctcaccggcgactgcggctccggccaagtcgaatgcaacggcgccggagccgccccgccggcaaccctggcggagttcacgctcggcaccggaggtcaagacttctacgacgtgagcctcgttgatggctacaatcttcccatgatcgtggaaggcactggtgggtcgggtctttgcgcctccacgggttgtacctcggatctgaaccagcaatgtcctgcggagctgagagcctcggagggaagcgcgtgcaagagcgcgtgtgaggcttttggtagccctgagtactgctgcagcggcgcgtatggctcacccgccacttgcaggccgtccatttactcggagatgttcaaggctgcttgccctaggtcttatagctacgcatacgatgatgctacgagtacgtttacgtgttccggcgccgattataccgttaccttctgtccatcctctccaagtcagaaatcttcacgagataccactaccaaccccatgacctcaacaacaacatcaccagggtcagggacagtgacaggaaccggaaccggaacaggatccgaaggggcagtggtatacacgggtgcggacaacggcgttgcgtataatacagttacggattccgggtcaagttcaggatccggaggagaaacaatgctcgcagatgggtcatatttagctggtttagccatgggagactcccctgaaagaacagtttccatcgcgtttgtttactctgctagctttttgcttattctcttcctgctttagctgcaccagcattgtttgttaaatgtgtaaatggctcttagattttcgggtttttcgtgggtgggttcaagaattttggctttgccagtaaagctggcagattctctccctcattgtaaaccaccttccaaaagattcgccagaaaaagtattccgtgtttcattcgttaaagtgcttgtttttatattagtattatcatcttgggagcatttatctcccccatccaagcttttttgaggctctatgattgttgtggtttaaaaaaaactaacacatctctgcaatttttgggctggctttgttggtttcacatgtatggtaataataataataataataatataaatatctgtgtgctgtgtgcctgtgttgggctatt

SEQ ID NO: 32249 - DNA, 301 bp, Glycine max
  Clone ID: PAT_MRT3847_129125C.1
ggtttttcagatggccacacccaacgccattgcatgaaggagctgatgaaaacgatgaatgacagaatcgtaaggtctgacagaaacctagttggtgcaatgaatgtgcaggatgcttatcattcccattcggaaaatgcgctgaggagaccatctgttgtgccgatcatacgcacaaggcccatccacttggttacattcacgaaaaccatggatcagattgaacccaacatgaattcaatgcagcatcttcaactcacgactgcccaagaagaactctgtcaaggaaaggagctccata

SEQ ID NO: 32250 - DNA, 349 bp, Glycine max
  Clone ID: PAT_MRT3847_129126C.1
aaaaaccagaccataatggcctgcgaaaacgacaaaaaaggccaccgagaacaagccccagggcccgcgctctgccccacccagaccaacaacccaagggagaccgaagggagggagccaccagcaagcgaccctaggaacgggcacacgagggggaacaagcactgcaacacgcacgtgccgatccacgagagggagcaggaccacacagcgaggctcacaatgccggaaaaaaacaggcacgacgaaaacaaggccaacgccgagcccaggctcgggatccaaggacacgagaggcggacagaggcgccccacggcgacaccaaatgagggccccggcaccaagaac

SEQ ID NO: 32251 - DNA, 246 bp, Glycine max
  unsure (1)..(246): unsure at all n locations
  Clone ID: PAT_MRT3847_129127C.1
atcagtgaaagagcaaaggctgaggcaactgatgcacttcanaagganaatttgctgcntnnagagcaaattgaagcgtnaattaaggngaaaaattctttcaanaatgcttntagaatccagcatgagcgatttgcgattatgnggttaagaaccaagagttacagcatttgatgcattggnggtcccaatacnnngtgcanattngatccccccnnggggataacgntgcttnggnatgcattg

SEQ ID NO: 32252 - DNA, 172 bp, Glycine max
  Clone ID: PAT_MRT3847_129128C.1
aagacagataaatagttgtaagcttgaatacacaaggaaactgccaaaaatctccagctcctgaatcaatgagtacaagtaacccatagcctttgcggtggtgattgccaaataaagaaggagttagggccaaaagacaccaaggtgaacagaagtgtgtatagctttatta

SEQ ID NO: 32253 - DNA, 591 bp, Glycine max
  Clone ID: PAT_MRT3847_129129C.1
tggaagtgggagtgtcaagagataccgtaagtaaagttcttgtcttcgtcttctctttttatggtatgatataaagcaatgtagggtgtctttgttttatcctttcaatggcagttttaatccgtcggcacaatttccgatacgtggttctctgggtagtaatgagttcttgaaagtacatttgaaacttgttcaacggaaatatagacaagcacgtaaatattatgagatttctcgaacttttttggacttgtaaatggtggtgacactgagattggaagaaggataatttttaactgcaagttttttatttgacatttaaaattgattttgaatatattttcatatcattatacattaaactagaatcaaaattaattttgccttcaaaaattaattcaaatacacaagctcttcccaaaagctcgcagagcagatcttggattgttgttttgttattatttttagttaagacaaattgtactaccattattttgtacttctcttgacaaaggtctgaactaaaaaaacggaaatatattactcctatttttttatatataaattgaaggaaatttgtagtactactat

SEQ ID NO: 32254 - DNA, 558 bp, Glycine max
  unsure (1)..(558): unsure at all n locations
  Clone ID: PAT_MRT3847_12912C.1
ggggaaggaaaaaaaaaaaacaaaaactctcgagatttgatttgctcagaacatgatacgggaatttttgcatgagtcaaaaaaaaaaaaaaaaaaaaaaaaaaaaaaaaaaaaaaaaaaaaaaaaaaaaaaaaaaaaaaaaaaaaaaaaaaggaagaacacaaaaaaaggatccaagcaaaaaaacccttccatgcaaaagaaaaaaatttattatagtagtcactaaaataaaattaattgaccgcggttttaacaacctcaaaactggaagaaccgtgccttaacccaacttaataaccttgaagcaaatgcccttttccccactttggggtaagagcaaaaaggccagaacggaccgcctttcccaacatttgcaaaaccttaatggccaatgggaccacccctataccgccgcaaaaaccccatcggttgcgggggttacgcaaaaaaaaaacantacactggccaccctccttaaacccgttcctttaggttgtttgctttcctttctccccaatttccgccgatattacccccgttaagctctaaaaacgg

SEQ ID NO: 32255 - DNA, 329 bp, Glycine max
  Clone ID: PAT_MRT3847_129130C.1
cgtgctcgagattcggatccaggtgtagggaatatcttctcgtacacatctgcatatagtgacggtagaggcttctatgagatactcatttgatctaactttcaatgcttgccgcgccaggctgagactccgacgcttcttctcacatcatcatatatcatgggttatctactgtcgttcgatgcgagtactccatcagggctcgtaaatggagaacacactactggatgggagtccaactgctcagttgaagatctgggaatatgcatatccaaactgctgtgatctacattcacaaccgaaatctactgttgatacccgtgcctaca

SEQ ID NO: 32256 - DNA, 529 bp, Glycine max
  Clone ID: PAT_MRT3847_129131C.1
cttgaattttcatgagaatgtggtgagacatgcccagtcagcttcattgatgcctggcagtgttttcaatgatgataaaccatttaccgatggttctcaaatggctgatatatatcagcataataactcatttgggcaaaagagtagtgacttacccgaaatgagtataaaaacacaagcaggcagaagtgaagaagattttgtgactgacctatatgatgacagtgatttgaatgctgaaaacaattatcactttggagatgcaaggacaaatagacaatctagtaaagtttcctcttctcatttcattactccaactgatgatcacaatgataatttggacttggatgactggaatacgaggaacaaagctgtggaagacccttttgttactgatgaagtaaacactcagagaaacaatatggaaacaagttcttataatgatactactgttgtatttgatgattctggatcagaggatgatgatcataagtttgatgttgataaaaagtacaatggtgagggatct

SEQ ID NO: 32257 - DNA, 1116 bp, Glycine max
  Clone ID: PAT_MRT3847_129132C.1
caatttgcagcttcctaatctcgctcagattttctccagaaaagggatcttaaatactaaaagacacacatttcatcaatcgatttgcagcatcctaatctcgctcagattttctcgagaaagggaaaataaataattaaataaaacaataataatatcttttcttattcgcaaaacgccatcgtcgcggccgtaaattgaaattagggttagggttttcattttgtcttcgcccggaaaataaagggggaagaagaaagaccaagaagaagaagaaccgttcctttatgatagaaaaggtgcctctggtcatcgtcgcggtgttaatcttggtggtgcaatcctctgtagcgttccacggtagaaacagaatcatgaaggtccaccctgttcctcgaaaacgcaacatctctatccaattcggcggcgacggggggaatccgatgtcggaggctcaggcgctgttggggatcgccgggaagaagctccggcgactcccgcacgtgttcagctgcgtgctggagcttcccttccgctccgacgccgacgtggcggtggaggaggctcctaacttcttccggttcgtggcggagactgacggaatcggcgacgtgagggcgcacacggtggaaatccaccccggcgtgacgaagatcgtggtgagggagggtggctcggtggagctctcgctcgaccagctggagctcgatatgtggaggttccggttgccggaatcgacgcggccggagctcgcgagcgcggtgttcgtcgatggcgaactcatcgtcacggtgccgaaggggcatgaagaggagaatgatggggatggtgatagaggcatgggcggtggtagacttgtgcttgtacagtagtgatgaatgaatgaatgagtgggtgaggtaatgaatgattcttttgttaacgccttgtggcctttccaaacgtggccttgttagtatgtcggttagatttcaggttgttgttggaactagtttctctgtgaattttattgttgctattgttcagtcaggaacaaaaatgttttatctggattctggagaatggtttattcatcatggcaatggcaattatccaaattgcctgttcccggatggt

SEQ ID NO: 32258 - DNA, 447 bp, Glycine max
  Clone ID: PAT_MRT3847_129133C.1
cgcgtccgtacggtgcggaagacgacagaagggggaaattaggaattagggttagggttttcatgatcttcgcccggaaaagaaaggggggaagaagaaagaaccgttcctttatgatcgaaaaggtgcctttggtcatcatcgcggtgttaatcttggtggtgcaatcctctgcagcgttccacggtataaacagaatcatgaaggtccaccctgttcctcgaaaacgcaacatctcaatccaatttggcggcgacgggggcaacccgatgtcggaggctcaggcgctgttggggatcgccgggaagaagctccggcgactaccgcacgtgttcagctgcgtgctggagctgcccttccgctccgacgccgacgttgcggtggaggaagcccccgactgcttccgctttgtggcggagaccgatggaatcggctacgtgagggccc

SEQ ID NO: 32259 - DNA, 333 bp, Glycine max
  Clone ID: PAT_MRT3847_129134C.1
aaaagcatcttctttttaattacaaaaaaaccctctttaagtaaagaatatccaacttggacataaactcccttatctttttctcttcccccaaaatattttaactccattctttccatacaaattaagaacagataccccactctatcttttatactcaccaaacaatgtcttctttaaacttcccttcttaataacttctattttatttttcaaaccttcctttcctttttttaaaaacctctcttacttcacaattttcttttctttttactaagattttaaactttttcatttttaaattaaattttaaattttttaaaacacaatcca

SEQ ID NO: 32260 - DNA, 719 bp, Glycine max
  Clone ID: PAT_MRT3847_129135C.1
ggctcgagcttctatcattggagatgctgtttcatatatgcatgaacttcaagcacaagccagcatgctgaaggctgaggttgaaggacttgaaacatcctcattgaactccaaaaattaccaaggattgattgaaaaccccatgagggttcaattgatcaccaacaagaagataatccagatggacatgtttcaagtggatgaaaaagggtttcatgtgaaaataatgtgcaataaaggagaaggtgtggctgcctcattgtacaagtctctcgagtctctgacaggcttcaatgttcagaattcaaacttgaccacaatttctgatcgcagttttctacttacattttcattgaatgcgaaaggccctgagccagaaattaacctgcccaacttgaagttatgggtgactgaagcttttgtgaaacaaggctttgaattcataccttttttttatgcttgactctttcaatctaggtgtaactaattaaggtttgcgttagagagtcagtgtatgtttgaataaaagtttgtgaagttaagtttgtaaacctagttagctcaagttttgtttttacaaagttgagtttcttgacaaaaatttgatgtgctaatgtattttttggaggtaatcaaaatgtcagtaattaaaatgcgtttctttttttaaaaaaaaaaaaaaaaaaaaaaaaaaaaaaaaaaaaaaaaaaaggacgaag

SEQ ID NO: 32261 - DNA, 317 bp, Glycine max
  Clone ID: PAT_MRT3847_129136C.1
cttcggggtttggtttttttctgtgtggaccaaccacaccaagccctttccctttactacgcataattgtccaaagatttcaatgtcctaatcttgttaagagagacacaaattcagaattgttgacactcctagattatagcgggggtgcatgtgtccatgtttgaatctcccaaccttttttttttttttattaacataggcccggggtgggggcaaaaaaccttggaatggcgttcttcaacttattagccttttagagaattcgacacaagggtttgtggcccttttacaaaaaggctctcgaaatttttttc

SEQ ID NO: 32262 - DNA, 383 bp, Glycine max
  Clone ID: PAT_MRT3847_129137C.1
cccaaaaaaagaataaaacccttccccatgggaaaagaaaattggtcccggaaccattgtttggttggtttttaagagaaaaaaaaatttttggcaagaaaggggacttataagttataagcttaaaaaagggggggggaattgttatttccgcccccgggaagcaacttggttggggctccatggtctttccggggccataaatttttttagaaatcaaaaaatttggcggttacaaaaaaagaaaaaaaccctggccaagtttgaaatggtcccattggtgccaaaaagaaaggggtggaccccttttttttttcctatggggggggaaaacaatggaagaataagccattaaggttggcttggtcacaaactccattttt

SEQ ID NO: 32263 - DNA, 412 bp, Glycine max
  Clone ID: PAT_MRT3847_129138C.1
tttttgaagtatcaaagttattttttatttttttaaaaatgcactccaataatggtgagtcattagtataatacacattcccatctgggtctctgatcctcagatcaaccaactactacctggatctttcttcacacaaatctcgggcatcctctccctacatttaagagcttcttcccattttccctctccaatgtaaatgttggaaagaagaatataggcaacatgatcactaggattgaattctatcatcttcattgcacatttttctccaatttctttgttattatgattcctacaagcgcttagtaatgttctccatgctgattcacttccaaccttctgcactatttggtatgcttcctcaagccttcctgcccggccataggcatcaactaagcacgaataatgc

SEQ ID NO: 32264 - DNA, 285 bp, Glycine max
  Clone ID: PAT_MRT3847_129139C.1
aattccctgtcgaccacgcgtacgacacgcgttcgataattaagtgaaacaaggcttttcaagaaatgcctatcatcatactcagggggtcatggctgattactaagaggactatagctcatatgaatacgctacagacttgaatgttaatcagcctatcacgactaaaggaactactattgtccatacgaactataacgaaatgctatacgatgactgttgaactgcagataccaatatatgtacatatcggatgaatgacttaaacattcgcgctgtcactaa

SEQ ID NO: 32265 - DNA, 418 bp, Glycine max
  unsure (1)..(418): unsure at all n locations
  Clone ID: PAT_MRT3847_12913C.1
agaccgcanggacttgagagcganancgatnaagggtaaacctagctccaatgcggtcgagggacaaaagaggaatccctggcataatttttgtttttgagtggtacagaatcaaacagcggtgcctagagcaaggtcaaccgggtggaacctaccatgaatgcaaggcacaacagccactaaatgggggcttcgagaattggtccagactgtcgagagacctttttatcaatcacatgacactcctacatagaacaaagaatatagtggtttacaaacatgcaccagcagaccataactatgcatttaagcatgcgtcagaacattctcaatcccttggagtttggggaacgtaggcagctatactgatctcataaacagcttcttgcttctactacttagacataaacttagcatg

SEQ ID NO: 32266 - DNA, 437 bp, Glycine max
  Clone ID: PAT_MRT3847_129140C.1
gttagagaacattgcatctcacttgaaacatcctttgggggtaaatgattcttaggtgctcacttggtctgagctcagctgaatgcagggaggaggggacagagtgacatttttcctctgtgcggactccagctgagccggtctctgaatggttccctcccccgcattgtgggcactaaccatgttcctggcacactgaacctcacaatgtcccccggtcccaagtccttttgctgcccatgggtcataggtcataaaaggcagcaatccactgactggccccatcttgaaactcgtggaaagggaaagcgaggagatgggactctgaccacacacagtgatgcctcacacacctgaggtggcggattttgtacctgtttgtacaactttggtcttgatgggaaaaatggagaattacacagtgttttgagaagctt

SEQ ID NO: 32267 - DNA, 361 bp, Glycine max
  Clone ID: PAT_MRT3847_129141C.1
cccttatgcgatcttactgaataaattagattttctttatacaattctgggtacagtggaccattttagggttatggaaattctccccaacttgtaagtccttgaatcaatgtatgtgattgtagacaaataattagaattgcattctctctgttgtaagaggcttaaaaggattatgattgaactatgttatgattattaatgaatggatgattaagaatgtgttgtttcccatatagaactaattgtttttttcacatggctgtacataactctaatactcgtcgtgttacttatccgacatttcaaatgcatatttagaaacacattggtactcaatttaaaaacacttttgattttc

SEQ ID NO: 32268 - DNA, 348 bp, Glycine max
  Clone ID: PAT_MRT3847_129142C.1
aaaataatgaactttttgttgccacaatttcggacggtcttacattcaccactataattaaaggaaatcccaaaaatttttttaagaaacaaaatctaattccaaacaaagtgttgggctaaaaagaaacaaggttcgaaaaaaaaggagggaaaacttcaaaaaaaaaggccaaaaaacaaaattattcctttaacgggcagcccaaaaatctactggcccgacgggaagaacaatcaacctttgggcacccaacactgaaaagaaaattggggagggaaaaaacactgactgggtttggacacaaccaaagccaacaatttcaacccctgacttggtgggacttgg

SEQ ID NO: 32269 - DNA, 420 bp, Glycine max
  Clone ID: PAT_MRT3847_129143C.1
aatgcatatgttttaatttcaatagaaaatatgcctcccataagggtgcggtaccatacatgataacaatgtatgacattaaaacacccactcgttacacaccattgaaatcaaagtattgctcctctggttattgaatcaaaaagaaaccccaatcttcatattctgacgaaataatatgttttcatgcaagaacaagctaattttcttacaagacaacacctcacgccacaattattttcttaacgaatcacgtacagaaagacctctatgaagttatatttggctaacattccagcgatagaaacaggatggtccaagagcctcactctcacgggagatgaagactggggccttcaccgatgccagaaccgccgagtccgtcaagggcaccacgcacaacaaatacttgctttagcc

SEQ ID NO: 32270 - DNA, 491 bp, Glycine max
  Clone ID: PAT_MRT3847_129144C.1
tttgccgccacaacgcggtttatgttctgctgctttcactcttctgttcaaacttcgaaatccaagtcgcagttgcgaaaccgcaacacaaactgcgatagcgccgccccgcaccggggcgatagcggacgcgacggccgctccttcaatcctccccgcagcagaggtcattgtcgcggcaaggggccgctccgctccggcgcgatacttagatttgcattagcatcaaatgaatgcgaattttgggccagggttggtagtcctagcaggactgtctacagcataagcttttgtccgaagccttttcgtgttaattttgtgatgtatgcactcatttctatgtctaagagtgtgtcggggaatgtaggtatcgtgttatggttgaatttgatgtttaaaacaaacagaatttgcatcattcttgagcatttgttaagaggttaactgtaattgaagggatgtgacatggaaagtccccactctcagaacag

SEQ ID NO: 32271 - DNA, 240 bp, Glycine max
  Clone ID: PAT_MRT3847_129145C.1
ttttaaaggatccaaccttacttccccgtgcttgcaacgtattagcttttttttagggcaacctaaattaaattaactggccgccgtttaaaaacgccgggactggaaaaaccctgccgttaccaaactaaatcgccttgaagaaaatccccctttcgcaagttgccgtattaccaaaaaggcccgaaccattggcccttccaaacagttgcccaccctgattggcaattggaacccccc

SEQ ID NO: 32272 - DNA, 314 bp, Glycine max
  Clone ID: PAT_MRT3847_129146C.1
ctgcattctgtgcactgcccatgtgaactagtcctgtgctgtctccagatactacgatcataactgcgagacattgccacactcacgtatagcatatgtgaaaacaactcggataaagtcggtggataaaagaaatgaacggggagcggaaagctgttgtctctcataaatgagtgagcaatgcgggatgggaatatctaagttaatagggtcaaacgaaaaaggcgaaagagacttgttagcgcaaaggaagccgaagagggcttagaaggcagatctaggagaagcagcgaatatggcatggaggataggaa

SEQ ID NO: 32273 - DNA, 157 bp, Glycine max
  Clone ID: PAT_MRT3847_129147C.1
ctccctttttttttttttttgtcggatacaaataccctttggggtggctgcttccaaagtgcggtcttccatacatcgtctcacacttatattccaagggccagatgcgcactgcatatggctccaaagattgccggatataatcaccaatgcttta

SEQ ID NO: 32274 - DNA, 429 bp, Glycine max
  Clone ID: PAT_MRT3847_129148C.1
ggtttttaacctggtttcaataaattcagcaatttacatatttctttgtttgttgattcagtattgctttggaaagtgaaatcccttttatgtcaccatgtcttgattggaacgattatctaaaaatcgaatagactccaatttggacttttgttagtgtttaattgattcagccaattaattgtgtcaatttgtggattggattttacgtgaatttcatttcattcaaaaatttgccttaccttcttgtatgccctgtggttccattgaagcaacacctatggattcttgtaatggattttgttgtgtgaatatcttcactgataccctttagatggtgccaacagaaatttctgattaatttccttatgggctggactgtactttttacataatcccccttcctgttggcatattaacgttttggaa

SEQ ID NO: 32275 - DNA, 313 bp, Glycine max
  unsure (1)..(313): unsure at all n locations
  Clone ID: PAT_MRT3847_129149C.1
tggcacgcnnncgtgagctcggaattnggctcgagggtagtntggntttttttttttccaggattttttttgctgtcattggtggatgtttcagattnttgtatctnagtgaggtgaattgccaagantttcatgggttcccgtggttaatgtttggccatgatatatatatntatntntnttgcnttngctttgtttntgagctattgtatttnttatttggcctttaaattgtgaacactaagactcaatnaatgtgananntgagtctttcttttttcctatcatacctactgttagagattnncncngc

SEQ ID NO: 32276 - DNA, 261 bp, Glycine max
  Clone ID: PAT_MRT3847_12914C.1
taagtggtaatcccattttaattctcagatccatgctggcgagactgataaggagaaagagattggtctccattgattctgtgatcgatccgctaagtgaattcgtagaggacatcgtgaggctcgagaagctcttctacatacccgatcgcagagaattctccaaggttgtcatccgaactgtgattgttttcatcctgaaggcattcatcgtgctgttcttgaggctcatgggtatatcgattaacatcatcatggacg

SEQ ID NO: 32277 - DNA, 315 bp, Glycine max
  Clone ID: PAT_MRT3847_129150C.1
ctgtgcggcgctcaggcggcggttcggattattatttccttattctagcatgcgcattttactgtttgtgaaaacgacttggtcattctaatcactttttttccattcctattgggttggtcgtttttgtttaacgggtatgtatttagaattgacatggtcattggcgttgttgcaattgttttcttccattaaggaagcaatatgagaagtgcaggaagcaattccggatgtgcagaaagaacaccccagcgatgttcgatggttggtgttttgccttatcagcggactggtattgcatcatgtgtctgtttt

SEQ ID NO: 32278 - DNA, 459 bp, Glycine max
  unsure (1)..(459): unsure at all n locations
  Clone ID: PAT_MRT3847_129151C.1
aattcgtttcgagcttctctctctgtccgaagatggcttcacgcaggttcgtatcttctctgattcgatcctcccttcgtagatctcaatcgaaaccctcgatttccgcatccgcatcgaggctcacgtcatccaaccgtgcctctccgcacggttacttgctgaaccgcgtcgccgaatacgctaccgcggcggcggctgctaccgctcctccctctgctccgcctccgggcaagaaggaggttagcggcggcgggaagatcaccgatgagttcaccgggaagggctcgatcgggcaggtctgccaggtcatcggtgccgtcgtcgatgtcagattcgacgagggtttgcctccgatcatgaccgcgctggaggttctggatcactcctcgaggctcgtgttggaggtggctcancatttgggtgagggcgttgtccgaaccattgccatggatgcca

SEQ ID NO: 32279 - DNA, 355 bp, Glycine max
  Clone ID: PAT_MRT3847_129152C.1
gaagactacaaaagtttttccaacaaactccttatgagtcacaagccataggacggtcgagggagaatttgtgtgttattgagtgtcacctcgctgcatacaacacaagaaggacgaccaaaatcagcactggtttataaacctattgactgccacggagagaccttaccttagccatatgagacccacaagttcgatactcagggattgatatcatcacaatagctcctttcaagcatggcattgagtgataatatactgtcaacgtgaccgccatgtagcggatgcaattataaaagtcagactagcacatgtccttgatagaaaactaaaaccaaacataacgctctatatc

SEQ ID NO: 32280 - DNA, 1277 bp, Glycine max
  Clone ID: PAT_MRT3847_129153C.1
gtcttcacctcttcgctgctctggagggcttggtcttgacttgaaccaagtggatgaagcttctgacgtgggcaattgcttgagcagtaatcataaaattgatgtgccaattatgcaggtgaagccatcattgggtggtccaccaaatcgagaagtgaatgtccacagggactttgatttgaacaatggaccttcagttgatgaagtcaccactgaatcctcattgttttctctgcatgccaggagcagtgtgccatctcaaccgcttgtttctggacttagggtgagtactgctgagccagtcaacttctcttggcttccttccagtggcaacacctattctgctgtcacaatatcttcaattatgcctgatagaggggatcatcccttttcaattgttgccccaaatgggccacaaaggttgttgactcctgctgctggtggcaacccatttggacctgatatttatagggggccagtattgtcatcttctcctgcagtgtcatatgcatctgctccatttgaatatcctgtcttcccttttaattccagctttcctcttccatcagcttctttttcttctggatcaactacttatgtatatccaacatcaggcaatcagctttgctttcctgcggtaaattcacagttaatggggcctgctggtgcagtttcatctcattatcccaggccttttgttgttggccttgcagaaggtagcaatagtggtagtgccgagaccagtagaaaatgggcaaggcagggtttagatcttaatgcaggacctggaggttcagatgtggatgggagagacgggaattctcctcttccatctaggcaactttctgttgctagttcacaggccctagctgaggagcaagtaagggtccagctggctggtagtgttcgtaagaggaaggagcctgatggtgggtgggatggccacaaccaatcctcatggcaatagcaaaatatataatcatacaatctaatgaccacaaatgcttgtaagtgtttagatttgtatattcaaatgtttgtaacactttgtcacttgtgggagaggatctgaaaatatatcctgtgtcatgctgatgtaattcagtgagggggttacttttttcgttaagaaatatatttaaatgataaaggaataaatgctattgccatttctctgtgggcggtcttctgtcccatcttcattgagaaatcctgctcttttgcagcctactgtggctctcctatatttcatttttcttgctagtttatttttaact

SEQ ID NO: 32281 - DNA, 2557 bp, Glycine max
  Clone ID: PAT_MRT3847_129154C.1
catatagtgtcactcctttactctcggattcattctttctctcttctctctctgtccgaagatggcttcacgcaggttcgtatcttctctgattcgatcctctcttcctcgctctgaagatggcttcacgcaggctcgtatcttctctgattcgatcctcccttccgtagatctcaatcgaagccctctaatttccgcatcgacatccgatgcgctcacgtcatccaaccgtgcctcaccgcacggatacttgctgaaccgcgtcgccgagtgacgccaccggccgcggctgctgctaccactcctccctcttcccttcctccgggggggaagaaggagctcggcggcggcgggaagatcaccgatgaattcaccgggaagggcgcgatcgggcaggtgcatttaggccagccgagctcaggaaagttatggtaatgccttttggggcgctaacttcctctatacctgatgctccagctggaaagcagagtcgagcaccattggatattgacttgaatgtggctgatgaaagaatacttgatgatatttcttctcaaccctgtgctcgtcacacggattctgtatctcttacaactgatggtcatgatcctgtaagcagtacaatggcttcacctattccctaatatgtagggctttgtcttgtcttgaaacaggtggatgaagcttctgacgtgggcaattgcttgagcagtaatcataaaattgatgtgccaattatgaaggtgaagtcatcattccggccccctccttatcgggaagggatagtcatcaggcgctttgatttcagacttcgaccctctgttacggaaaagacctctagaacctaattatgctgtgtttaattcaggtgcactttttgctcttgtccagccgtctttgccattatggtcactacatcaaaacctgccttcttcttctgccttgtttttaggctgcactcacatattgtaggtagctccaatatgtttacgcaattcatcacctagctcagtagtcacaggcaccatgccaggatgatcagcagatattacgcttgtcttcgcgctgatccaattttgtgccaactaataccaatgggatgccaggggcaaaatgctggagttcagggatccacttccttcagcacattctcatagcttgcgcgactaactaaagaaaaagccaagacaaagacatctgcccccctgtagctcaagggcctttgctttcttgtgttcaattcacaattaatagggcctgctcctgcggtttcatctacttccccccggccttatgttgttggccatttataaggcaaaaatagaagtagtgcttagtgcagtaaaaaatgagaattgcagtgattatatctaaatgcgtgacctgaaggtccatggggaatttgttgctactacaacaaatgagcttgatgttctcccctacatctccatcaccaacggccatacatttgatgaatcttggggcagttgtcgttgctattggtgcaagcaaggagcagtgtgccatctgaaacgcttgctacagaatttaagcagagcaatactaagcaaaactactgctctttggttccgtcaagtggtaataactattctgctttctctatatcttcaattatgactgatagagaggatcatccctttacaattgttgccccaaatgggccacaagggttgttgactcctgctgctggtggcaacccatttggacctgatatttatagggggccagtatgatcatcttgtcctgcagtgtcatatgcatctgctccatttgaatatcctgtcttcccttttaattccagctttcctcttccatcagcttctttttcttctggatcaactacttatgtatatccaacatcaggcaatcagctttgctttcctgcggtaaattcacagttaatggggcctgctggtgcagtttcatctcattatcccaggccttttgttgttggccttgcagaaggtagcaatagtggtagtgccgagaccagtagaaaatgggcaaggcagggtttagatcttaatgcaggacctggaggttcagatgtggatgggagagacgggaattctcctcttccatctaggcaactttctgttgctagttcacaggccctagctgaggagcaagtaagggtccagctggctggtagtgttcgtaagaggaaggagcctgatggtgggtgggattgacagttatgccttcaacaaccacatttgcactgaaattatcaaacacagtggggatatagtccgtggggaatttgttgctggtatagcaaatgagcatgcaggtcttccctacagctccatcgccaacggtcacacacttgatgaatcttggggcagttgcagcagccattggaacaagaagaaaagaagaaactttctcagaataatttaagcaaaacaaaacagaagtggggttgttttgttgtgtgttggattgttaaagattgaagcttttttttgattgaaccagagacagatagagagagaaagagagagagagtggcggcacttcacatgattctcac

SEQ ID NO: 32282 - DNA, 407 bp, Glycine max
  Clone ID: PAT_MRT3847_129155C.1
ccacgcgtcaggaatcagtcataacttttccaggactcctttcaccttttgactcattcttgctttcagattttacctttccttcctgattagtttcacacttttgagtatcttgatccaccttacatttcattgtatcacacttgatcctttttgaaattgcaaatgcattacacttgctattaatcttaggatcagttgaattattattctgaaaaatttccgttttatgctctaaaactttttgcataaagctactccctgtattttgcttctcaatcttgtcaaaatcctgaccagatattgactctagtgtatcctccttcactgcttcagtggaaaccattctacatttcacaccatcctttatcaacctccttggatacttcaaaagccttaacagtgac

SEQ ID NO: 32283 - DNA, 203 bp, Glycine max
  Clone ID: PAT_MRT3847_129156C.1
gagctattgtagtatgtacaaataactattgttaattgtaatgcatgaagaaactgaattcacttaatagcttgtagatttcaaaggctatttcatatctgtatattatgctatatctatacaggtatgcaacatactctgcaatgcattatagtgtcagactggaatttcagcaagtatttactcacaaaacgatctcgtta

SEQ ID NO: 32284 - DNA, 381 bp, Glycine max
  Clone ID: PAT_MRT3847_129157C.1
cacctatgaggggtctacacacggttacgcctaacgagagatcggggaacaatatgggtctaatgagtgaccttgatgattctgatgttacaactcttgcaactggccctgacgagactagccttctggtgcctctcactatgatcatacagtttggactccacagtcctgatgacaactgcaaggcctctgcagctagcttactaatctctcgacttggtaggataatacaccaatcgacacaaggtctatggatcaacaacacaacacatctgctgctaacactagatattcatacatgctaccgctagactatttagcgtcctggtataccacgcatatacacgtttgtcacatggacagactcacggatagtgctac

SEQ ID NO: 32285 - DNA, 171 bp, Glycine max
  Clone ID: PAT_MRT3847_129158C.1
attcttctcagtctcagatcagaaccttagccatggcagcgttccagaagatcaaggtcgccaaccccatcgtcgagatggacggagatgaaatgactagggttatctggaagtcaatcaaggacaagctcattttgcccttcttggagttggacatcaagtattatgact

SEQ ID NO: 32286 - DNA, 259 bp, Glycine max
  Clone ID: PAT_MRT3847_129159C.1
agcacaaatcatatctacctacaacaatttttttatgaatttttccagctccttaacatggaccattgtcaattctaaatgaattgggtcgcacaatctttattatattaaaagaatattatcaaatattttttcattttattaagatcacatttcttacatataaactttgtttatatatcatatgtaaatatatttgtaaattatctttttaattattaaatttatttttactttaattaatatctcctactatctt

SEQ ID NO: 32287 - DNA, 174 bp, Glycine max
  Clone ID: PAT_MRT3847_12915C.1
gtggaagtgcgctcgggtggatactgtatctccatctactactccatctagcgaactgcgacaatattctcaaggtaaagtgaccggaagttaagaagtgtggaatgtcaccgcaacacttccccgacagtagtgggaaaccgaataatgtcacttgcgcttcatggctatggt

SEQ ID NO: 32288 - DNA, 554 bp, Glycine max
  Clone ID: PAT_MRT3847_129160C.1
gagaggggcgtgagctccattacattaccactagcgacttttccaattccttttgagacagagatcccttcgagaaatatttgtgtctgggccctgagttagtgcataattttaattaaggcgatataatattttcttcaacggggcgtgcgtatttaatctttagccttaacatcaattttcatcattagaatttgagtaaaaaaattactgtggcgcagggcggagaatcttctctagtgccaacaagtgcaggaggtgtgtagaattttatagggcttaggggaattttgtgtttgaaaaattgtgaattaaaatttaataattaaacaatttaaacatctcattcaataagaattcatttaaccaatatttttgtgatataatttatctcaaggtaattttaaaaaaaaaatattttcttttgagaatgagaacaattactattataattactaatattattaacaatattatgtgaacatggcgtgcgtgggaaaggagttaatcttttaaaaataatttaatatttctaataaaacattaattttttt

SEQ ID NO: 32289 - DNA, 254 bp, Glycine max
  Clone ID: PAT_MRT3847_129161C.1
tattctcttttgatcatttaaatcttcaatttaaacaactctctagtcaaaattgaaacacaaggtctgcttagtgtcaactgagacaaaagatacaaaataacaaaacacaaaatatagaatctatgctttttaaaaaagttttcttcaagattgggattatctagggtagtactagtacttaggcagctctatggttattccaatcttgtttgacacctgattacgatgcattggatgtgcggacgcgtggg

SEQ ID NO: 32290 - DNA, 638 bp, Glycine max
  Clone ID: PAT_MRT3847_129162C.1
gtttagtattcttataatcccccctccctgtgcgtggggagcatcttcttttacggctgacagaagggggtattgagcgtggagaaagagaaagatgatgaggttaaggtggagtgtactcgtaacggtcacgttcgctgtttctctgttttggcttggacccctgcaagtcaaagcctctaattctgtttccgccttcgttcaaaacgccatctactccaacagaatcgccgttttctccaaatcctattgcccctactgtttgtgaatggcaagcatattggtggatcggatgatctcagtgctgccgtccaaagtggtgaattgcagaaacttctcagtgcaagttgatggtgtactagagatttacgagcactgacatccttcatggataatgaagttttcaagcatttagaagcataatatgttttgttgcccttttagttttctgggtatttaggcgacagtgcctattctttagaggaataggatgccattctgcttaaaatccacttgaattcttcacctagaaatgtaggactcttgaaaatgatgagctctaaaacatagaatttgagctctaattggtagatttggctctctatttttggtttaacagttgattaatagtgaattat

SEQ ID NO: 32291 - DNA, 569 bp, Glycine max
  Clone ID: PAT_MRT3847_129163C.1
tttagtgttgttaacgcgtccgcaccctggcgagaagacgacagaagggggtattgagcgtggagaaagagaaagatgatgaggttaaggtggagtttagtcgtaacggtcacgttcgctgttttgctgttttggattggatcgctgcaagttcaagcctctaattctgtttccgccttcgttcaaaacgccatctactccaacagaatcgccgttttctccaaatcctattgcccctactgtttgcgcgccaaacgcttgcttgctgagctcaatgagaaaccgtttgtggtggagctcgatttgcgagatgatgggtatcaaattcaaagtgttcttctggatttgataggtagaaggacagtcccgcaagtatttgtgaatggcaaacatattggtggatcagatgatctcagtgctgccgtccaaagtggtgaatggcgaaacttgtcagtgcaagttgatggtgtactagagatttacggcactggcatgcttggtggggtatggacgtgggggagctttggcacggtggtgtgggggggtgccttgggagggggggggggggt

SEQ ID NO: 32292 - DNA, 879 bp, Glycine max
  Clone ID: PAT_MRT3847_129164C.1
gcaattcagtatgcacgtaatcgcccttccctgtgcggttttcgcttaagaaacccccttcctgaggagagaaaggggacgggaagaaacgcatcgagcgtggagaaagagaaggatgatgaggttaaggtggagtgtactcgtaatggtcacgttcgctgtttctctgttttggcttggacccctgcaagtcaaagcctctaattctgtttccgccttcgttcaaaacgccatctactccaacagaatcgccgttttctccaaatcctattgcccctactgtttgcgcgccaaacgcttgcttgctgaactcaatgaaaaaccttttgtggtggagctcgatttgcgagatgatgggtttcaaattcagagtgttcttctggatttgataggtagaaggacagtcccgcaagtgtttgtgaatggcaagcatattggtggatcggatgatctcagtgctgccgtccaaagtggtgaattgcagaaacttctcagtgcaagttgatggtgtactagagatttacgagcactgacatccttcatggataatgaagttttcaagcatttagaagcataatatgttttgttgcccttttagttttctgggtatttaggcgacagtgcctattctttagaggaataggatgccattctgcttaaaatcagcttgaattcttcacatggaaatgtaggactcttgaaaatgatgagctctaaaacatagaatttgagctctaattggtagatttgtttttctattttttggtttaacagttgattaatagtgaatttcaatgttcttgctcgtatcttataaatttataaatagaaaaaagagagttccaatttataaatgaaggtaatggttaaagcgggaga

SEQ ID NO: 32293 - DNA, 342 bp, Glycine max
  unsure (1)..(342): unsure at all n locations
  Clone ID: PAT_MRT3847_129165C.1
cgtctcgtggtttcttgctgcatatggttgcctcataccacataatcaacatcctatctaaagaattaatgccttcttaatgtagctgatgctnacttaaggagaatctgaaataaangntatttttcaattcnttaggtgatgtattcatgtatttgtatccaaaanntattttggtaccgtaaagtnncttttaaaaaggtttgcatttctctctctttgtgttttcccttaagttctgataagttattctcctaatgaagacctaatcatatgtacctgtactgtagtgtgaatgatattagtatttgtattgctgtcagaatattgtattgtctaata

SEQ ID NO: 32294 - DNA, 251 bp, Glycine max
  Clone ID: PAT_MRT3847_129166C.1
tgtttacaactacacggtgactccgccggcaccacctgtaagccttggtgccatttgtggtctgccacgctgccgccggcggcctcgccgtgtagttgtaaacatgctaagggttgcccgaccacaaatggaccacggcttacaggctggccttcaactccacagttcaggttgtctcgcaggatctcggggtcattgctcctgagcgccacccggttcatcttcacgggttcaattctatgttgtaggct

SEQ ID NO: 32295 - DNA, 248 bp, Glycine max
  Clone ID: PAT_MRT3847_129167C.1
cccacgcgtccgataataaaaacaagcttttaattataaattacaatagtattaaaattcaggggaatattatatgaaaaaaagcctagttattatatatattgaccctaaaataggggtttaggatatactttttatagggcggttttctactttttctactgctcttggtttctaatttattgttgggggggccctttttagtgtcctattctttttttcggttgttgtgataccattattttttt

SEQ ID NO: 32296 - DNA, 244 bp, Glycine max
  unsure (1)..(244): unsure at all n locations
  Clone ID: PAT_MRT3847_129168C.1
cccacgcgtccgggaactttgacacctttggtcattgagttaagtaagccacatcctgagggtgaattatatggtgctgttagccaaaactacatacctnccatcnaattagtttaagcttttattttttttactgacttattcttttttatgtttatnattttttttttttttctttattatttataattatttctcctcatcattttatttttttaatattatcttttttatctcttaatta

SEQ ID NO: 32297 - DNA, 282 bp, Glycine max
  Clone ID: PAT_MRT3847_129169C.1
cataaaaaaaaataaaatggcattggataggaaaagaggcaaacatagaaaagaagaatctacgaacaagaaacaaaaccttgaccacaaaagggttcgggaaatctctggaaaaaaaaagaagaattccacggacaagaagccggatttccaaaaaaagtacccggggaaacaaagggaaaagaattttaatgtggtggcgaaataaaacccactgggcggataattacaacgggcgagaaggggaaaaacctggcgataaccaacctaaacaaacatgcc

SEQ ID NO: 32298 - DNA, 330 bp, Glycine max
  Clone ID: PAT_MRT3847_12916C.1
agaaaaaaaagaattttagaccaagagcaaatatcaataaaaagggggtggtttaaaaaacacggatataacaaaaaataaaacacaaaaggggcgggttcagatttgtgatcttgccgacccggaaataaattctggacgggcgcctgcaggcagtactcttttttcctatatggaagtgaattaaagatgggcctttcaaaatcacaaatgactcctgtgtgaatttgaaatccggtcaaaatttcttatatcatctaatctacaataataaattgtgaattctggggatccttttgagcgacctaactaaaattagttgagtgcctc

SEQ ID NO: 32299 - DNA, 382 bp, Glycine max
  Clone ID: PAT_MRT3847_129170C.1
atcgaaaattgctgaactgctaatggaaaagctgcctgggacatgctccaagatgttcattagagaacgtgttgtgcatgcatgggaccaactcatgtgaactggaaattcgaccaatatctctacacacgcatcttctgccgagaaggataatgattctatatctagagcatcatctcgctctaggcgtcataggcgacgcagagagaattccaatcctgatggaaatcctttggacgatttgaaaactccagttgcagtaaatgctggttcaccccctaattctgaggatatgccaacagtgaattccagtattcggttatctgatagtacagctcccaaagcttttaaagataagtgttttacttgagatcctggggct

SEQ ID NO: 32300 - DNA, 202 bp, Glycine max
  Clone ID: PAT_MRT3847_129171C.1
cgggggacagaacggcatggacagagacacagagacactgcgtgttgggttgcgttgtgactgcatacacaactaaatgaggggggtgggtcaccattcaaaatgacatcattaggatctgtgtcaaccaccaacatctctgacgcagagggcactgtctactgtcacaggcatcggtgaccgaaacacacaccacggaaac

SEQ ID NO: 32301 - DNA, 374 bp, Glycine max
  Clone ID: PAT_MRT3847_129172C.1
ctactctttgtttaaatcgtctcttgatgatgtagaaactactaatggttccatgtcgaccacttaaaacttgtcaagtctaacaagtgtactatccaagaacacagttggaggtaccattttacgtagtgaattataggcacattctttgacatacgacagttccttagacacgtggccgatatggagcacacctgtcacacatgaagggatgagtcaaacgagtggcctcagggtggtagttcctgataatacagggtagtagcatcggcctgtgctatgaatagttcttttagggggcgcgccagttgtgatatttacaccacatgctctgaagactgaggactatggtatcctgattggacaaaagcact

SEQ ID NO: 32302 - DNA, 630 bp, Glycine max
  Clone ID: PAT_MRT3847_129173C.1
ggggggttttttttttttttttttttttttttttttttttttttttttttttttttttttttttttttttttttaaagaaataaatttcttagggggccaagggtccaaaagggaaaaaaaagctatttttccaactaggaatcccggcaatcccccgaagggggaaggcatactttccctaaccaattatttcaggaccctaccctcccccaacaatatcttgggaattttttccccccagcaaaatagggggacgggggggggggatccgccagaatcccaaggggcccttcagaaaaaaattctttcggaacattccagggatcagcagggggccgccggaaccctgcaacgggtttaggaacgggagatttcacgggggagggccccccactgaagcgggcaagggggggaacatgatcaggcaaccaacggggcagggcatagggggcggataatacagaagctcccaaagctgggccagccccctgaacagaggctatggataatccaaaactggcatttctcgactttcttctcttcgggacaaaatgggcccccttataagccctatcagggaaatctctagcaagatcttcatctccgcccttcattaggcctgctaaaac

SEQ ID NO: 32303 - DNA, 323 bp, Glycine max
  unsure (1)..(323): unsure at all n locations
  Clone ID: PAT_MRT3847_129174C.1
gctgcatatnngttgggagtcatttttgnccaagattnggttgaagggatggaaactttgaaacgcagataggcacaancaatctcttgttgatcctccttgcccaaattgtatcccaatacattgactgttgcccaaaaccaaatctttcccaagaagaagcacctcctccaccaccaccaaattaaaaaaccaggaaatctcaactggattcttattaaatgatacccaaccaatttgaaaaaaagaaacctaaagaaatggacatactccctccatcacagaagcacaaacctatctcgcaccttcaacaaagactgctc

SEQ ID NO: 32304 - DNA, 373 bp, Glycine max
  unsure (1)..(373): unsure at all n locations
  Clone ID: PAT_MRT3847_129175C.1
tcagatcttcagaaaaaccctaagcagtaaaacgatcacgttggagataaagtcttcggacaccatctacgacatgaagaccaatatcgaggacgagaaagacgtgcctgcgaaccagcagcgcctcatcttcggccgaaagcatctaggaaacggccacaccctcaccaactacaacatccacaaagagtccacggcttacctcgtcctccgcctgcagaacgggaccaagaagcacaagaagaagacctacaccaagcccaagaatatcaatcacaagcgcgagagaagcaatctcggcattcttcaagtctacgggatgcgcgattctgtaagagtccangaactccacaaagagtgccccagcgccgag

SEQ ID NO: 32305 - DNA, 273 bp, Glycine max
  Clone ID: PAT_MRT3847_129176C.1
gaaagacttacgaatgcgcaaaaactggagctgcttttgactgctggcattggttctgatggggtagatctcaaagctgcagctgctgctggtctaactgtggcaaaggtcacggcaagcaatgccacatcggctgctgtggatgaactcatgagaattcttattctaattaagaatttcttgcctgtgtgccatccagctcaatagggtgaatggaatgttactggcattgcacatagagcttatgatcatgacggcaagacaatcagaacc

SEQ ID NO: 32306 - DNA, 539 bp, Glycine max
  Clone ID: PAT_MRT3847_129177C.1
aaaacaaggggggaaaataatccaaaccacaaaggcctatttaaaaaatccaacagggtatgctaatcctacagcaatccaaatacgaaaaaggggaaaccaaatccaccaaaaacaaaaacttccttagaaccctgactaaaacaaaacatttaaaacccccgcaaaaaaacggggggggagcggacgggaaaaaaaaaacggggggacaaatttttggcaaaggactaacggaatctaaaacacaaaattgtcattgaaaaaaagggaggctagttgaacaactgggttggtttgctggggagcaacatttttaaacacaaccatgggttaaaaaacttttgccttaaaagcattgggggacccaatcaaagggaaaacttcagggggggccatctccaaaagcatgcccggaacctttggaaaaaaatcatgttccagctgaaccacaagggggtaaaaagcttcaccgagcaaaaccccctggtgttctgggggagcatttgcgagggctgtaaccaaagcttgaaggggcattg

SEQ ID NO: 32307 - DNA, 680 bp, Glycine max
  unsure (1)..(680): unsure at all n locations
  Clone ID: PAT_MRT3847_129178C.1
cacctccagctcatccatcactgcctagctagctagctcgcacatttagttatattacacatattttgctagccaagaaatactatcattgaatatatggggagtgtagattatgagtacccttccaagttgaggttccaccgccacagccgtttttcaagtctctaaagtactctttgaaggagactttcttccctgatgaccctttgaggcagttcaagaacaagccagcttccaagaagttcatgcttggctcttcagttcttcttcctcgttttcgagtgcttcttccccatcttcgaatgggcacccaaatacacctttcagttcttcaaagctgacctcatagctggcatcaccatagctagcttggccattcctcagggcatcagttatgccaagctcgccaacctccctccaattcttggactatattcgagctttataccaccattgatttatgcgatgatgggtagctcgagggatttggcagtggggactgtggcagttggatcgcttctgatgggttcgatgttgagtaatgcggtcgatcccaatgaagacgccatgctttacctccaccttgctttcacagctacattatttgctggtgtttttcaggctgccttgngtctgtttaangttgggttaatcgtggattttctttcacatgcaaccat

SEQ ID NO: 32308 - DNA, 536 bp, Glycine max
  Clone ID: PAT_MRT3847_129179C.1
tcggctagctcgcacattaagttatataacacatatttgcttgcttagaaatactattattgaagatatggggagtgtagattatgagtaccctttgggcatgaacaactttgagagagtgcaccaagtggaggttccaccgccacagccgtttttcaagtctctaaagtactctttgaaggagactttcttccctgatgaccctttgaggcagttcaagaacaagccagcttccaagaagttcatgcttggccttcagttcttcttccccattttcgaatgggctcccaaatacacctttcagttcttgaaagctgacctcatagctggcatcaccatcgctagcttggccattcctcagggcatcagttatgccaagctcgccaacctccctccaattcttggactatattcgagctttataccaccattgatttatgcgatgatgggtagctcgagggatttggcagtggggactgtggcggttggatcgcttctgatgggtgtcgatgtgagtaatgccgttgatcccaatg

SEQ ID NO: 32309 - DNA, 487 bp, Glycine max
  Clone ID: PAT_MRT3847_12917C.1
cgaatataaaagacacagctcactcactcacctactcccaaactgtctccacccataaccactcccttaccgtagcgggtctctcaatccaccggcccgggatccataactaactaccaccaggaacaccaacaataacactacctctcatatgtagcaacttttgaagaggacaatacatgcaggggtggacaccaatcagggagacgaaggacgagactctttcctactaaccagacctcgatgatgcccaacccacataggaaaccctataccttatatggaaaggaggcctccttgctaaaatcagagttggatcactgtttctggtaccgggagcacaacatgtcaccttgatactatgatggacactactggaccatgtggaagctgcctatgtttggctgcactgatgcttctcaggtgttgaaggagctcaagaggctaatactgcataccccaatggcttcatccgtatcattggatt

SEQ ID NO: 32310 - DNA, 203 bp, Glycine max
  Clone ID: PAT_MRT3847_129180C.1
ggggtagaataagggttggtttttggctccttcgcagactttgtatttgtataagtattttgttttcaaggagggtcgattaatttattttcctatgagaatgagaattggatatttgagggacctaagagagaaagcgcgtgtgatccccctatcactggcacagttggccacactgcgtttttagtgccgaaagatatatg

SEQ ID NO: 32311 - DNA, 229 bp, Glycine max
  Clone ID: PAT_MRT3847_129181C.1
ggcttttgtgggtggcccgtttgccatgccttgcaaccagtttcttagctcctgtgctgtcggcttcctgggtgatgttattcagcggtctcttcagagatcctcgcctgtcaacaccgggaacagccttgcttgttgcttcttttttgctgccctttccaacattcgtggtgggtgcatcctgccacgagtccctaagtccgtttttgatattgaccgttaccgtgat

SEQ ID NO: 32312 - DNA, 331 bp, Glycine max
  Clone ID: PAT_MRT3847_129182C.1
ttttttttttttttttttttttttttaattggtaaaacaaccttattattcattcattgtttaggatttttattctaaaaatccaaatagaaacctaaaaaaaaaaactatggccaaaacaaaccacacagcccgtcaatattaacaaaactcccccgagaaaaaaataaggagtccaaaaacccaccttaaaatcaacaaaaacttgagtttccaacccacctaaaggggtcgactgccaaccaaaaccaaggagccccaaacccccacaacccgggaagaccccttttgattaaccccagggtccagatgtcaaaacttaccgtcaacc

SEQ ID NO: 32313 - DNA, 265 bp, Glycine max
  unsure (1)..(265): unsure at all n locations
  Clone ID: PAT_MRT3847_129183C.1
caaaaagcaaaaggcataggttgtatacttgtattcaagtcctcaaggtaaataaacaacagggtataacttaatttctattaatatattatatataggaaactgcaagggaagcaaattaagcataaggtaaatcaatacatataaatnatgcatatgaattttactttgngcctccctgcagtgatatatatttcatttcctagctaataataattatagtgattattatgttgtatcagcaacggtnatgccttctacagtt

SEQ ID NO: 32314 - DNA, 324 bp, Glycine max
  unsure (1)..(324): unsure at all n locations
  Clone ID: PAT_MRT3847_129184C.1
cggcggccgcccttgggtttccggttggtgtgtgtttgtttttttttttttatagaaaattttccctcatcatttgattttcttaaaatatcagccaacaaggggtctganaaattgttgcacatcgctcacacattnattcccttatttctttcaccttaaaccaagcnncccggggcgggggncnnnnnnnatnccnnaccnccatacaccttctctgcttctgggctgcccttaatttttncttctttttccaaattgctnttttccctgaagagcttgccagggagttccttgggtggtttcttctcatccttaggcttt

SEQ ID NO: 32315 - DNA, 208 bp, Glycine max
  Clone ID: PAT_MRT3847_129185C.1
ggcagcaacaagttctggcactcttaaaacaactcctttcctaggccaaggcaagggcgccaatgccaatgctcttagggatgtcctttccatgggaactgggaaccacaccacgggcaatgcaccgtgtttcgtcctttacagagtgaaatacttgggacccttttcagctctcacccccttcctactcgaaaggagaattcccggg

SEQ ID NO: 32316 - DNA, 237 bp, Glycine max
  Clone ID: PAT_MRT3847_129186C.1
aggcaggctaatacagtaatatgacttcatttgtatgacgatttctggtttatgaagcttgttgtaaaaaaattgcggtccatgaagtgaagttcatttgtcctatttttgtgaccatggaagtttaaagcataactatgacttaaatatcattttcttcatctgtgaatctctatcctttttttccccttttctcatgggaggtcaagaagataatattgcggagtactatcagca

SEQ ID NO: 32317 - DNA, 469 bp, Glycine max
  unsure (1)..(469): unsure at all n locations
  Clone ID: PAT_MRT3847_129187C.1
ccttcacaagattctcacaaacaactcttgagaaagaaagaatggctgccaacacattgatgagttctgccatctcagccttcccatctctcctttcctcctcaaaatccagatgggccatgcttgctgttccagggattttggttccagaggcattgggcttaggcaactgggtaaaggctcaggaatgggctgcagttcctggtggccaagcaacctacctaggcaacccagttccatggggcaccctacccaccattctggccattgaattccttgctatttccttcgtggagcaccaaaggagcatggagaaggaccctgaaaagaagaaataccctggtggtgcttttgatcctttgggatactctaaggaccctaaaacattccacgaatacaaagtcaaagaaattaaaaatggacgtcttgctttgttggctnttgtgggattctgtgttcaacaatcagc

SEQ ID NO: 32318 - DNA, 109 bp, Glycine max
  unsure (1)..(109): unsure at all n locations
  Clone ID: PAT_MRT3847_129188C.1
atagataagatacggnctggtgtntttactactcccatgttngataggtagaganaataagaagtctttgngttgagnggatgtcttggtgtggatctttactccattg

SEQ ID NO: 32319 - DNA, 730 bp, Glycine max
  Clone ID: PAT_MRT3847_129189C.1
tttctttttttttttttttttttttttttttttttttttttttttggttttttttttttttttttttttttttttttttttttttttttttttttgggacttggaagtttgtttcaagcttttttggcataccaacgagttgccagagtatgagtttgaattcgaagtttaattaccacccaaaaatcccaacggagcaacccgattcgttacaaaatgttacatggaattatacagggagctattgaaacaaatatttgatttttttttttcaaggcaaaatcgatgggggaaaaaggatgtttccaatggtgttgggccatgggtcacccaagggagcagccaagttctccaaagggccagggccgggataagctgattgttgaacacaaaatcccacaaaagccaacaaagcaagacgcccattcttaagttctttgactttgtattcagggaagggtttagggcccttaaagtatcccaaaggatcaaaagccccaccagggtttttttttttttttggggccttttccatgctcctttggggctccacaaaggaaatagcagggaattcaatggccaaaatggggggtagggggccccatggaactggattgcctaggtaggttgcttggcccccagaaactggtgcccattcctgagcctttacccagttgcctaagcccaatgcctctggaaccaaaatccctggaacagcaagcatggccca

SEQ ID NO: 32320 - DNA, 284 bp, Glycine max
  Clone ID: PAT_MRT3847_12918C.1
ggcattcggctgaggcgtcatctggcctgccggaggaaccacgccactgcccccaccgcgatgttcatttcgaatttgttaggttttgagatttgaatagagttctgaacgatgactaggggcattttcacaaggaaatttcgtatgaggtacatacaaatttttgcacatgacagtgactgcaccagaggcttgtggattggtaataatatccacctgcatctgctcggaattttctacctcgcgtagcataggagtttttctttcggtggtgcatatggaag

SEQ ID NO: 32321 - DNA, 1159 bp, Glycine max
  Clone ID: PAT_MRT3847_129190C.1
ccgggaacccccttggccctggtctcccccaggttttaaacgggacccctttggggaaagctggtcccccccaggggcccggcccggaatcaatccccggggcggggggccccttgtcggggggccccccttttttttttttttttttttttttttttgtttcaagcttttctgtcataccaacgagttgccagagtatgagtttgaattcgaagtttaattacaacacagagataccaacgtagcaacccgattcgttacaaaatgttacatggaattatacaggtagctattgaaacaaatatttgatttttttttttcaaggcaaaatcgattggggaataatgatgtttccaatgttgttgggccatgggtcagccaagtgagcagccaagttctccaaaggtccagtgccgggataagctgattgttgaacacagaatcccacaaaagccaacaaagcaagacgtccattcttaagttctttgactttgtattcatggaatgttttagggtccttagagtatcccaaaggatcaaaagcaccaccagggtatttcttcttctctgggtccttctccatgctcctttggggctccacaaaggaaatagcaaggaattcaatggccagaatggtgggtagggtgccccatggaactggattgcctaggtaggttgcttggcccccaggaactgctgcccattcctgagcctttacccagttgcctaagcccaatgcctctggaaccaaaatccctggctgcaaaatataagaaatttcagcatattaaagttttttttaatatcgcggacaatgtctgataccacgtactttttcaagtgaaataaaattggatctcaatatatgacgttggctagtgtgttatttaacaaatcgaggttcatgcatacgtatgcagtattagtgtcaaaaaattcatattgtcaatcaatcatatcataaaacatccttcatattacttgtgtaagatagtaataataagagtgaacaaactttttctataataagagtgaacaaactttttttttgagtaaaaagagagcacaaacttattatatataatactgtgattaaatgaaagtattcatgaaatgtttactatcctaaatgcatgtttctgctagcatcttaacaacc

SEQ ID NO: 32322 - DNA, 1200 bp, Glycine max
  unsure (1)..(1200): unsure at all n locations
  Clone ID: PAT_MRT3847_129191C.1
ttgggggccccataaaaaaaatttttccttgcaagcacggggaagttaaatttggttctttaaaacgggcgcctttttttttttttttttttttttttttttgggttttttttttttttttttttttttttttttttttttttttttttttttttttttttttttttttttttttttttttttttntgcttcaagcctctctttcataccaactagttgccagagtatctatgagtttgaattcaaagtttaattacagcacagcgataccaacgtagcaagatcgatccgattcattacaaattgttacacggagttatacaggtagctattgaaacaaatatatattttttttcaaggcaaaatcgattgtggaataatgacgtttccaatgttgttgtgccatgggtcagccaagtgagcagccaagttctccaaaggtccagtgccgggataagctgattgttgaacacagaatcccacaaaagccaacaaagcaagacgtccatttttaatttctttgactttgtattcgtggaatgttttagggtccttagagtatcccaaaggatcaaaagcaccaccagggtatttcttcttttcagggtccttctccatgctcctttggtgctccacgaaggaaatagcaaggaattcaatggccagaatggtgggtagggtgccccatggaactgggttgcctaggtaggttgcttggccaccaggaactgcagcccattcctgagcctttacccagttgcctaagcccaatgcctctggaaccaaaatccctggaacagcaagcatggcccatctgcagtgaatgagttctgactctttgaacctctcaagattctctggtacttcaccaagacgaagagggtcgaatccaaagtcaccaggtgctgaaccatcaaggtaggggggtctaggctggccaggcatccagtcagcactcatggaaaagcgagaagaagaggcattggtgacaacaaagctggaaagaggaactgctgcggcaaatctggattttgaggaggaaaggagagatgggaaggctgagatggcagaactcatcaatgtgttggcagccattctttctttctcaagagttgtttgtgagaatcttgtgaagggaatgtaactggcaatttttagaatctcaacaacaccctcttctgtcgtcttcctcgcagccgt

SEQ ID NO: 32323 - DNA, 431 bp, Glycine max
  Clone ID: PAT_MRT3847_129192C.1
ggggaaaattaaaccccctaaagttttaatttaggcttttttctaaaaataaaacctttcaaagctttcctaaaaggaaatttttttcaactccccccaggtggttaacatactttttttcttactggcctaaaaagtttgcttttacaactcttaattttacaggttcttgcaatagccctcatgggcctgagcttcagctaaatcaggccccctgaaaagttctttaacatttgcccctagtttggttttacaactcataaacctattgtttcaggcaattgtttacatgaaaattgcctttttccgaaatccgggacagggcagggttcttcatttttttcatccaggacttaaatcctggggtttttggaaaacaccaaggttttgggggctttatgtgaggcaaccctgctttgggggggcactgg

SEQ ID NO: 32324 - DNA, 1370 bp, Glycine max
  Clone ID: PAT_MRT3847_129193C.1
gccgccctttattttttctttttttttttttttttttttttttttttggtccaaaacatgttttattcatcattagatatggatgtaatcatgtaatgcaagttttaaacttggacttggaagtttgtttcaagcttttctgtcataccaacgagttgccagagtatgagtttgaattcgaagtttaattacaacacagagataccaacgtagcaacccgattcgttacaaaatgttacatggaattatacaggtagctattgaaacaaatatttgattttttttttttcaaggcaaaatcgattgtggaataatgatgtttccaatgttgttgtgccatgggtcagccaagtgagcagccaagttctccaaaggtccagtgccgggataagctgattgttgaacacagaatcccacaaaagccaacaaagcaagacgtccattcttaagttctttgactttgtattcatggaatgttttagggtccttagagtatcccaaaggatcaaaagcaccaccagggtatttcttcttctctgggtccttctccatgctcctttggtgctccacaaaggaaatagcaaggaattcaatggccagaatggtgggtagggtgccccatggaactggattgcctaggtaggttgcttggcccccaggaactgctgcccattcctgagcctttacccagttgcctaagcccaatgcctctggaaccaaaatccctggaacagcaagcatggcccatctgcagtgaatgagttctgactctttgaacctctcaagattctctggtacttcaccaagacgaagagggtcgaatccaaagtcaccaggtgctgaaccatcaaggtaaggaggtctaggctggcctggcatccagtcagcactcatagaaaagcgagaagaagaggcattggtgacaccaaagctagaaagaggaactgcggtggcaaatctggattttgaggaagaaaggagagatgggaaggctgagatagcagtactcatcaatgtgttggcagccattctttctcagagtttgaaagttgttttgtgaaagttgttttgtgaagaaatgtcatgacacagggcaatatagcgtcaatccttatcgaaggactgaaattatgggcaaagctcagaagcaaaccagcaactacctggaaaaagccataaatataaaaagaaaatgacaactaattgaatttttaagtttatatttagagaatgttatggaagaatagaaggattgatttatgtaaaattttcatgatttttatgtcattgtccatatggtgacaggaaaagtcaaatcttgagaagttaatgcttgataccagtctaatgtaaaaaaaaaaaaaaaaaac

SEQ ID NO: 32325 - DNA, 263 bp, Glycine max
  Clone ID: PAT_MRT3847_129194C.1
gtttaacggttaaatttctaatttcaaaataaaaaggtccaaacatgaaccatttcactttaaaaaaaatcatctttataaaacctcagaaacacacacaaaagaaagaactgatgtcttgctactatactcatgctgcatcaaagatttgaagtatattgaacctcaagtaaaaaaatcaaacactcttttaacatttaaacccctattgtggtgctgtgattccattgcagccccatcatgatgagtgctggagagttgga

SEQ ID NO: 32326 - DNA, 391 bp, Glycine max
  Clone ID: PAT_MRT3847_129195C.1
tgttctgttttgagtacccataaatgatgtctgcttactaaaccctaaaaagggtagaaaagtacgacacaggcttgtatctctacagagaaagccctgtgatgtacaacgattgtggtacaagtgactactactgggacaccaggatcgcaagtgtcacctgatttgagacccgctgctctgcccatgcctgcgttgaaaaccacagaaaagattggcttggggctacaaatatgtgggatctatctcagaatccttgcctaagaagagttggggagttccgcaaccttcatggccgggtttttgggggggcaccctcctttggaaattagaattatatccacgatctttcgtatactggagaaccacctcctgaatcggtgcgggatgg

SEQ ID NO: 32327 - DNA, 779 bp, Glycine max
  unsure (1)..(779): unsure at all n locations
  Clone ID: PAT_MRT3847_129196C.1
tttgggatttatgttctgcacgctctgcttcaatcgagtgttctttcttcgtttcaacaccttatattgcacacgctgcttcttcagcttgagaaatggcacaagaaaacctttctattcacatctgattctgtaaacgagggtctccccgacaagctgtgcgacccagatctctgatgcattgcctcgatgcgtgccttgaacaggatcctgacagcaaggttgcctgtgagatttgccccaagacctacttggtcttggtctttggagatgtcacaccaaggccaacgtagacctttgaagaagattggtccgtgaacacttgccgcgaaattggattcttctctgaagaatgttggtcttgaagctgacaaattgcaaggtgttggtcaactttgagcagcataacccttgattattcgccccatggtgtgcaccggtcaacttcaaccaagcgccccaaagaggttggtgcttggtgaccaatggtcacattgtttggctattgccacttgataaaacccctgagtacattgcccccttcatccattgtcctttgcaaccaatactttcggtgcttcgccttcaccgaggttaggaaaaaattggtaccttgtgctttggcttgaatgccagaatggcaagaacacatagtaaactgnnttgagntactacaatgaaccaantggtgccatgnttttccagtttcgtgtcccacacttgtcctaatttncacccaacatgatgagaactgtngagcaatgacccaaattgctgct

SEQ ID NO: 32328 - DNA, 630 bp, Glycine max
  Clone ID: PAT_MRT3847_129197C.1
atatcaatcttttttgatcttgttccagaagaataaaataatcgaattttcattgaatccaaaacaaatgcatcaaatcaaatgtatataattcaaaatgagtacacatataaacaggttaaagtttcactatgaccacgaggacctcccctcagcctgatcagtcacttatgacaccaacgtttggtttgatttgcccacctaccttgtaccatgtcaagcatagtcctagaaaaggagcatcaatcaaatcagtcttctgttaagtgttaatggttgaaactcaagcatttcaattctatcctcttgaacttcaagccttcttttcattgttctttcctattgaaatcatccataatacctgcttcagtcatcccacatcttccttttcaaagccaaacattatgatgcatacactttgaccataatgcgttttaataagctctgtgctctgtcctcattccccatattcgccaataaaactctaactagaaaggacttgaaagcagatttcttttcaagaataattaatccacccaatctcccttcaaaatgtttatggactcaaacacatccacgatctcctgaatgatggtttaataatcttttatctacattctccattttcaa

SEQ ID NO: 32329 - DNA, 308 bp, Glycine max
  Clone ID: PAT_MRT3847_129198C.1
cgacccacgcgtgctgtaattcaaccttacacccattcttccactcacactcctaaactctcccacgtatcataagcatagtcttattctaccaccaactcgccctacaaccactacagataactaaaatcctccacatcactctcccaatgaccataaataactcctcacttatactagcaccccaagcctatatggaaatttaaaccaaagccacaacacttccaacatccccactataccatatcaatctaaaccgttttcttgtccttaacactgtttcccccacttatgtcaataacatttct

SEQ ID NO: 32330 - DNA, 482 bp, Glycine max
  Clone ID: PAT_MRT3847_129199C.1
cgccgaggaattgtacaagatcgagacggtgcccgcgcgcaacagcatgtcggtttccgtcttggggcgggaagagcccaccgtgacggatctcgagacgaccgagcgcgagtggcgctactatggggattcctacgtcttgacacacaaaaccgagggcttgtctcatcgcgtcgacgaacccctactcaagcggaatctgggcgatttagagggcgctcacctcgagcgctctgatggtctggcctgtcgcattgcattcggcacatacaagatgtttgcagtggaagacagcgaagactactttcaccgccggcgtgcgccgtcgcccgaggcagacaaggaggcgcaaagaaagaggttggacgaggtgacggcgcgtttgatggcccgagttgtatgatgtcattgtactcttcatgtatcgagttgtccgttctctaaaagaattagctcagaacttttaaaaaagggcggccgcc

SEQ ID NO: 32331 - DNA, 231 bp, Glycine max
  unsure (1)..(231): unsure at all n locations
  Clone ID: PAT_MRT3847_12919C.1
gaaacanagcacggataggaaaaaggaaaaatggaaaagtatttcggagaggcttatcgtggcaacccgggagtgccccattcggaccggggtcgcttcgggaagatatgggtcggatcgggtgccttcnggggtcgcgcatatggcagtccctacatgtgggacgtctctaaccggggaggtgggtatggcagaccagatgctatatgagcaatacgactggagacaggc

SEQ ID NO: 32332 - DNA, 257 bp, Glycine max
  Clone ID: PAT_MRT3847_1291C.1
ataggcatgggtctcgtctgcacttatcagtttagggccacatgaaggtttgcacccgcttgctcactatgtaggtctgatccggtcttctgcctgccagagaagtcgatgggccccctgaggatcggtggatttgacatgtcaacaccatacccaactgacttagttgacgtaatacgtgtgatgattggtagtgatgcaaattgatggacttatcttcaaattgaacgagcagttgggcagctatgttgtctcaa

SEQ ID NO: 32333 - DNA, 927 bp, Glycine max
  Clone ID: PAT_MRT3847_129200C.1
ccacgcgtccgcaaaaccctacatgtcttcttaagaaaccttatttaccttatcatttccaactttaaaaatttcacaaacatactctcacaaccctagtaccttttaatttgttgattgcaaacctagctaatcaactacctacacttcttggatgatttttagaaggcactgcgttttgcatggctggtgatgcagcatttccctcttacacttccacttgcatgatgaccttcttcttctctttgctcttagctcttcacttcgccatggccgtcccagaacgaagcttctcctctttagcttctataaaagaaggtgcaaagaagaggaacaccatggtagctgcttcaactgctagagaagaaggaagcacacaaaatctcaagacagaagaagccacaccaaaagataaccatgtttctgatcatctcttgaagggtactaataaagaaggaagttctcgatctccgcgacctccattggagaggcaaaacaagatcttcaatgctagtgaacatgaagtccctagtggtccaaaccctatttcaaacaggtaaatattcaacatcagggcaaaaaaaaaattaagattaagattaagattaccatttaccagcctagaggttcgtggttttcaggttgtttatgttctctttcctcttatatattattattattattattttttcgttcatttttgttctgagaattggtttggattgctagctatagctagggattcaaaacatgcagtttgatatatatgtgagtgcagttctgttcatattattgtcatgaaactgaaccacacgcgtaccaatcatttaaaacatgaggatatgtgtacatgagattctacttctagtcatcattatgttcatatatatgtatatatacggttgctacttttctgaatggtcaaaa

SEQ ID NO: 32334 - DNA, 479 bp, Glycine max
  Clone ID: PAT_MRT3847_129201C.1
gatttatgtcatcgctgcttagtttgtatgggggatcttgccaggtataaacaacaatgtgaaaacccagatactaaaaatcataattggtcggttgctgccacccattatttggaagcaacaaggatttggccagacagtggtaacccacaaaatcagttggctgtactggcaacatatattggtgatgaatttcttgctctttaccattgtgtaagaagtttagcggttaaagaaccttttcctgatgcctggaacaatcttatcttgttgtttgagaagaacaggtcatctcctctggaatatgtttccagcaaaatctgtttagatttcttgaaaccttttcgaagaattggtgaagagaccaaggcacaatgggaagatgatagctcaaactgcaacaagtttgaaggcaaaagtaatcattttgcaaagttatggtctcttgtggtcagaacaataagcttcctcttcatatc

SEQ ID NO: 32335 - DNA, 427 bp, Glycine max
  Clone ID: PAT_MRT3847_129202C.1
tgatgactagtttcactagtgtacttcacttctccaactatgatacaaccaacaggacggagatatctagtactttgcctgctaacgagattctagttgctatgggatatcttttgcaaattgaatatgaggttattggagaagacttggtaaatctgtggcttctcatgttgtcatgctctgccatcaattgcaatttggtgaatgttcctgaccaatgcccattaccttccactatacctgccctgggatgccaaacaatttatctctacagtcaacttcgccaggtggaaattgctattttagcattgtgcaaagcaataaggcttgttatatctcacgagggtaatactgagggttcttccaggttcttggtatttctgtcgaatgaatttcattctgaagcagttgaaaggctgttatcttc

SEQ ID NO: 32336 - DNA, 221 bp, Glycine max
  Clone ID: PAT_MRT3847_129203C.1
ggctcgaggttaatatatggctacttgtaataaataccttaagtaacatactatctctggatgggagaatcatatgccacaatgccttcggatgttttgcacccatctatgcatattatatacacatcaatactcaaacgttcaccatttcatacaactacaaggtccaaagtctacatccctcttttataaagcttaactagcgagacagaccccttttc

SEQ ID NO: 32337 - DNA, 485 bp, Glycine max
  Clone ID: PAT_MRT3847_129204C.1
ccgcttcacccaccgtagcatcaatgatcattgcgagagggaaccgactacagatctctccattccccttccaagatggagtttgcttagcgatgaacgtacttctttatgacggaacgcccgaagatggaggtgcccaatatccacgggatccacctgctgcaccgctccttacaccaagaccatcccaagaagacagccgggaggatgcactatctctgccttctcacccaaaatggcctccagttcctcatgacacttcctcggccttccttacggaatcgaccctgtctctcttatgaagcaagccaaggcggccccatgaccttatacggcccagccgcacatcgtggcatggccccacctttgttctactgatagagaagatccggggcagaccgggatggatacctgggaggtccactcggacctgattgccatctctgggacggagccggagctactgcttactaccagccttcttt

SEQ ID NO: 32338 - DNA, 247 bp, Glycine max
  Clone ID: PAT_MRT3847_129205C.1
aaaacagtgagctgagcgcaaccagtggagagtcaaaagtattcaaaatgcgtagaatttaaggaaattatgaggaggtgctgaacagtcttagactgttgattgtaaaatttggacagaatgtaggaaatttgatgttataatattataaggaaatttatgctggccgcttcagggattttttaaaaaaaaaaaaacaaaaaaaaaaataagaaaataaaaaaaaaaaacttattagaagaaataa

SEQ ID NO: 32339 - DNA, 1251 bp, Glycine max
  Clone ID: PAT_MRT3847_129206C.1
attagttatattacggctgcgagaagacgacagaagggggagagtctgtttcggtcacagcagagcagagagtagtaagaagacactgcacagatctgagtggtgactgaaggaatctagcttctttcatttctcatcactattcttaggtctgagggctcattgccattatcatgtcaaggaggccagtaaatccttcgcgtcggttaggtgatggtggaagtataccatttgctgcatctatccggtctaaatctcaaaactctcccctactatctattgggcttgtcattgtgggtgcaatccttctgattggttattgttacagcaattcaggtggagctagcggtggtattaaggatgtaagtaaacttgaaggtggtgcatcatgctcatcagaagtcctacaagcattgcccgttttgaagaaatcatatggagacagtttgcacaaggttttgcatgttggccctgactcttgttctgtgttatctagtttgttagaagaagaggatactgaggcttggggaatagaaccatatgagttagatgatgttggtgcaaagtgtaaaagtcttgtacgcaagggcattgtgcgtgtggctgatttgaagttttctctaccctaccgtgcaaagtcattttctctggttattgtgtcagatgcattggattacttatctccaagatacctgaataaaaccctgccagagttggtgagggtgtctgctgatggtgttgttatctttgcaggttatccaggtcaacagagaactagaggtgaagaagtggccaaatttggtcgtccagccaaattgcgcagctcatcttggtggataaggtttttcgttcagtctagtttagatgaaaatgaaactgctggaaagaagtttgaacaggcttcagccaagaaggcatacaagccagcatgccaaatttttcacctcaaatcatacccttgaaatttcactgtcttatttgtatactccacttaatggttagaagccatgctgatgagataggcatcttcagcacccgaagggtaaagttccatatatgctgttgaaattatagttcgatggtgatgacatattttatttagattcaattattaaactatttttgtcttggatagtgttcctcatgtttttgtattcacaactgctatttattatttagaaaaatttctaatttgacacatttacttcatctatagtatatgatgggaaaaccatatttgtttaaaaactc

SEQ ID NO: 32340 - DNA, 1246 bp, Glycine max
  Clone ID: PAT_MRT3847_129207C.1
attatatattagtgcatgaacccgaatccaccggtttgagagtctcttccagtcacagcagagacagagtaagagcacactgcacagatctgagtggtgactctttcacttctcatcactattattattaggtctgaaggctcattgccattatcatgtcaaggaggccagtaaatccttcgcgtcggctaggtgatggtggaagtataccatttgttgcatctatccagtccaaatctcaaaactctcccctactatctattgggcttgtcattgtgggtgcaatcctcctgattggttattgttacagcaattcaggtggagctagcggtggtattaaggatgtaaaacttgaaggtggcgcatcgtgctcattggaagtcctacaagcattgcccattttgaagaaagcatatggagacagcatgcataaggttttgcatgttggccctgactcttgttctgtggtatctagtttgttagaagaaggggatactgaggcttggggaatagaaccatacgagttagatgatgttggtgcaaagtgtaaaaatcttgtacgcaagggcattgtgcgtgtggctgatataaagttttctctaccatatcgtgcaaagtcattttctctggttattgtgtcagatgcattggattacttatctccaagatatctgaataaaaccctgccagagttggtgagagtgtctgctgatggtgttgttatctttacaggttatcaaggtcagcagaaaactagaggtgaagaagtggccaaatttggtcgtccagccaaattgcgcagttcatcttggtggataaggtttttcgttcagactagtttagatgaaaatgatactgctggaaagaagtatgaacaggcttcaaccaagaaggcatacaagccagcatgccaagtttttcacctcaaatcatacccttgaaatttcactgtcttatttgtatactccacttaatggatagaagtcatgctgatgagataggcatcgtcagcacccgaagggcaaagtttcatatattctgttgaaattgtagttcgatggtgatgacatattttatttagattcaattattaatgtattttattggcaaccgattgtaaactatttttgtcttgatggtgttccacatgttttgtattcacaactgctatttattatttagaaaactttctgatttgacacatttaattcatctatagtatatgatgggggaaccatatttgttc

SEQ ID NO: 32341 - DNA, 504 bp, Glycine max
  Clone ID: PAT_MRT3847_129208C.1
ctcattggaaaagtgtgggaagcctgattctcccaaaactcaacatgctatagctagtgaagatagtgctcaagccccaaagcgtcaaagaactgagtaattaagccatatgaatctgctgaatcacagtatcaatagtgatactacaagacaatactgaatcatgaaagatttcatttaagaaagattaggctgaatgattggtcgagctcgtaacttatgagtccctcctgtccaattgtggtcaatgaatgagtacaatgtacatttagcaaaaaggatatggcctcggttacttgaaaggctgatattagttttgccgttagaaatccaccttggtagagtttgtaaatatcagtatcactgtaagtgccatactaaacttgtgcacactctatccttagaatgcggaacccccttcctgagctctatactttatgccccagaaaaagaaaataaaaaacaatgagtcaagtcaacgagcttgtagctcaacttgatgat

SEQ ID NO: 32342 - DNA, 399 bp, Glycine max
  Clone ID: PAT_MRT3847_129209C.1
cttttgttgggtattgaccacaaccagcatatggacagggctatggttattcacatgcctaagacccttctcatcctcccaactagcctgcccatcatcatcatcatcatcatcatcatccaccagcatatagctacttttggtgatttttttcataagaatgctttaggttgggttgcatttccatcaagtcatacatgtgtggtaaaattagtcagattgattatcaagttgcgtttcccttatacaagacaaacatattataccttgtctagttttatgtatactttgatgtcatattgtcattagactcattactgttcacccgtggctatatttactttttttcttatgcgcaatgggatataatgccatattgccatgtatcaaatactaaaa

SEQ ID NO: 32343 - DNA, 647 bp, Glycine max
  Clone ID: PAT_MRT3847_12920C.1
gacaatgtagtatattgtacaaatgtagggctggacaaacttccactatttggtcagtaaaaaattagtataatacatgtaacccaaatgttatacaatgtggttgattaatgggtaatcattaatcaagatataatgaagatcaaaaagaaggaaagcaaaggcgtgtcatcagcacattgaatgaataacgttctattctatgagagagcacttgtatgccatcatcgaattcccgtgtagtaggacactttccaatcatgtcacagttttgtgccaagtagaaaggacatatagcatatcgattaacacatcttggatggtcccataccaacggatccttgtcaaaatgaactaaataccctaagcattgaactaatcaacgtctgaaaaaggcattctccaataattccatgagttgaagtcctcctgttcaaccaaagaagtaggagggaacatatcattgacgagtgtgtgtaatgatgtgtaagattttgcatcaatacgatgacttattgccacctcacccttaggattaataataaatatcttgcccttcgggattcctatcttcctgtaactgagttcatccgtgtctctattgccaaaccccgcatagaacggattatagtcggaagggaaaagtc

SEQ ID NO: 32344 - DNA, 670 bp, Glycine max
  unsure (1)..(670): unsure at all n locations
  Clone ID: PAT_MRT3847_129211C.1
cgcggaccggccggaattatttcctttcgacagttattagtccgcggccgccctanaaaaanttttttgtatatttgactngttccttgattttatcgccgccagaatagatactgatgcccttatttttctttcttctttggatgtagagatagctattagcagctcatccaaaatcacatcctttaaggaagcataagtagcgcctgatgaactaatcaagctctcataaattgatgcaatgtctacagtatattcttcatcacattttcctaatacctctgaataatgtagttctgaaattctcctttcagtcagttctgacaagtcctgcagggaatatcttctggagtttgaacaaacttcatcaaactttcctaggctatatgatctttgtatctcggaactttcttcatgatttttctggcttggcctatgtttgcaagctgatgtaaatgttacatgatcaaacaatttttttggctgcgatgcatcctcatttaattcatcctctacatgacaatttaagagagtatttcctggtttatctctgtattttgagatagataaggtaaaatcttctatagacctgttgaatctgctagaatcaaacttaattatgtttcttttgtccaactgttcttgcattggatgttgatgagcttgaggc

SEQ ID NO: 32345 - DNA, 250 bp, Glycine max
  Clone ID: PAT_MRT3847_129212C.1
ctgaaaatgattcttctttacagtaaatggcattcagtatgctaagagattatgacaattacgtgttattatactggcaaataatagaattgcaggctaacaaacttatatattgttagcattacataaaaaataactgatggtaaggcagggggatttataagatattatttgccagtataataacacgtaattgtcataatttcttagcatttgaaatgccatttactgaaaatgattcttctttaca

SEQ ID NO: 32346 - DNA, 241 bp, Glycine max
  unsure (1)..(241): unsure at all n locations
  Clone ID: PAT_MRT3847_129213C.1
cttcctttttttttttttttttttttttgggggaaatctctcattttttttctcngccacatgcttccacttggaagccaaaaccattggctctttattctttttaaacaaaggtttgattgaccccccccgacccccccaaaaccaattttttacacccagtgcatgcctattttaacacaaccccccccttaaaggccgatgtttccctaaagaatactctaccttttgttccgaggaa

SEQ ID NO: 32347 - DNA, 169 bp, Glycine max
  Clone ID: PAT_MRT3847_129214C.1
ctctaaccgttcattattaacacttccttagttcaataagggcaagcgcttcactctctctctctcttacctcagcttgctactcttgacgagtgcatgctccgctattagctccagcatgctcatcgagtgccaactcaacatcctcaacgcgtcgaaaccctacctc

SEQ ID NO: 32348 - DNA, 446 bp, Glycine max
  Clone ID: PAT_MRT3847_129215C.1
ccccccggacaaggagttcgacgggcaggttaaactttctttacaaaaaccaaggaattttagccttccttcattttacttttggcacacaaaaaaggacgttttacaaaacactacttgcaaagggggtaaaaaacttcctatttttttggggaataaaaataaaatccttttgttggacacccagggttggaaaactgttggcaacctttttaactgaaacccaggggggggatagctaacataaaatttcacctccgtggggctcagggcttgcaaggttcactactggggtttgttttaggttttccagggggggaggggaaatttttggggggttttgaatttttaaaattttccccaaatcaaattttttccgttttgttcaaacaaacaaaaaaggcccccatagcttcaattttttttaaccagccccccaaaaaccc

SEQ ID NO: 32349 - DNA, 1146 bp, Glycine max
  Clone ID: PAT_MRT3847_129216C.1
tcaataaccagtgagagtcacaatcaaatagtagggaatgggttaatccttggaacagggctgattccatattgtgcaaccttctttgtattcactgactacatgagaggtgccataaggctttctgcgctgtctgaggctggggttatttatgtcatgacccatgattcaataggacttggagaagatgggccaacccaccagcctattgagcacctagcaagcttccgggcaatgccaaacattttgatgcttcgtcccgctgatggtaacgaaactgccggagcatacaaagtggccgtgctcaacaggaagagaccctcaattcttgccctttctaggcaaaagttgacccaacttcccggaacttctattgagggagttgaaaagggtggctacatcatttcagacaactcgtcaggtaacaagcctgatgttattttgattggaactggttctgagttggaaattgctgctgctgctgctgaggatctaaggaaggaaggaaaagctgttagagttgtttcttttgttagctgggaactttttgatgagcagtcagatgaatacaaagagagtgttctccctgcttcggtaacagttagagttagcattgaggcaggatcaacatttggttggcaaaagattgttggaagcaaaggaaaggccataggcattgatcgatttggagcaagtgctccagcaggaaaaatatacaaggagtttggtatcaccaaggaagctgttattgctgctgccaaagaactttcgtagatctatttgttgagtttcttttaatatctcatctagaacttgtggttttcactggtggctttgggttactgttacattatttgttttttgagatatcacttttagccacaataaggaagatcagattgttcttgcatatgattgtcagaggaaccacttacattgaaggatgagttgaattaatgaagttgtatgaatttgtaacaactatttggcttgctctgtggtgtagttgaattagtgatgctcactctagcactcaattctggacagatatggcttctaggaagaattatatccttctctatttttttttcttaaaaataaaaaataaagaatctagtttaaaaccattaaaaaaaaaaaaggaaa

SEQ ID NO: 32350 - DNA, 377 bp, Glycine max
  Clone ID: PAT_MRT3847_129217C.1
gtatgatgtcaagttcccttatgtggtggatcgtggtccaccggtgtaaatctattcggtgtttactcccctcgaattccccaataaactttcaatcacaccttgcgagaaggaaatgcttgcatctattggttggctaaatgaggagcaaactctcaagataacttccttttgattagttcttgttcttcacccatgcatcatttgttaattgttaaaaaatacaaattatgctagatatattgttaatagaagatcaccttaaggtactacatgtttctgagatgaaattaggtgagatagaagattcacacttcatcaaagagattttctacatttccctttaacttgtgcaacaaaaatcaacctttcattat

SEQ ID NO: 32351 - DNA, 495 bp, Glycine max
  Clone ID: PAT_MRT3847_129218C.1
attgggatgagctcttctgagtgaagcaggtgactgcgagagagggtgcaaaaatgagcacggtgtctcttctcaagtgctacagaccctttttctctatgcttttccctcactctgccccacccagaccccacgcctccatcttcaggaggaaaaacttcccttctttttgcgccacctcatctccgccgccgttgacggcggagaagggttgcggcaaattcgactccgagggtctcgccttgccggaggtgtggctgcacaacaccatgagtaagacgaaggagctcttcaaacccaaagtggattccaaagtgggaatgtacgtgtgcggcgtcaccgcttacgatctcagccatattggaccatcctcgcgtatacgtcaatttcgaccttctttacaggcagatactttaagcatttgggatttcaagtctgttatgttcgcaattttactgacgtagatgacaaggatcttagtctgcacttttcaaa

SEQ ID NO: 32352 - DNA, 190 bp, Glycine max
  Clone ID: PAT_MRT3847_129219C.1
ctgaagatgaattttgaattggactgggttttaatttttttattcaccgatgctactactctaattgggaggtgtgtatcataaaaaaggaagggccaccctcccccattgttcttttcagactctagtcccaatgtcctctgggtgccttggcaataaaatttctttggtcctaaccaaaaaggccctt

SEQ ID NO: 32353 - DNA, 732 bp, Glycine max
  Clone ID: PAT_MRT3847_12921C.1
cggaatcggctcgagctttttctttttttgttacaccacacacaattccattgctaccagtttaacagaatgcatagagttttataataatatcatagaaacaaactgaacacataaaaattcagttcagagaagcttctcttcatcaaagcttcatatttttatttttattgtataaactctaattctcaaccttagtttctgtttccttatctctctcttgttttccacttttttgaaaagaagtgatactgtgtggtagtagtgtgagctgaagtttgatgtctgtgtcattggagcaagaaggctatgtaggcttatcagaggttcctgcaatggaaggttgttctgagaggactggtggtggcttgaacctcaaggctactgagctgaggcttggtttgccaggttctgagtcaccagagagagaagagggtgtggaggacaagaatgtgcaccctttaggcatggtgaagtgtttggtgtcaggggccaagaggggtttctcagacaccattgatgggggttctgggaagtggcttctttctgggaatagtggatctgaggtgggtttggggaaagatggtggcttcttctctccaggggtgttggtgttagtgttagtgctgccaaggctgagtgtaccaaccaacaaacttgtgttgtaaaagataaagttcctcaatctccaagccgttgaatgagaagaacctcagaatctgttcctgctgc

SEQ ID NO: 32354 - DNA, 673 bp, Glycine max
  unsure (1)..(673): unsure at all n locations
  Clone ID: PAT_MRT3847_129220C.1
cgccgtaaacaaagcatggaatctttgaagaagcaggtcagcaaaagaagccagcaatggccaagtccaagaacaatgccaagaagttgtcctacatctcagttccttctcagatcatcaactccatctcatcttcttctcttcaatctctgcttgaatctcccaagaagtgtgcaagacactccaaattcttcacctttgtcaagtgcataaggccaagactcttccttttcactctctttttccttgctttctttgccatgctcaagtttggtctcaatctttacaccccttttcctccattcccatgtgcaacctcagtagacccctcaaaatccaatcttggacagcaaggtggtgatgttggtgtttcagaggctctgattagcagtgtgcagttacatggtacagaggttccaagtggggtgggtgaaaagagtgagttttgggagcagccagatgggtcagggtacaagccatgtttgaatttcagtaaggagtataggagggagagtgaaggggttgtgaagaacaggaggaggtacctcatggtgggtggtttctggagggatgaatcagcagaggaatcagattgttgatgctgntgtcattgctaggattcttggggcttctttggttgntcccatattgcaagtcaatgtcattttgggag

SEQ ID NO: 32355 - DNA, 393 bp, Glycine max
  Clone ID: PAT_MRT3847_129221C.1
gtcaaacataatcttgttttttgttcaaattattaatggagttatggacaacattttatgtgagcgtttcttgtttgacagttttgagtcacttgacgtgttattttgtttattaacaaaaaaaaacaagactcctattcctccttttggcagagagaatcaagctacaaggctttcatgccaaaccttataaaaaaaaaaagggcttaaaagaattatgtacgctgggaaaaagagagagcaaagcacctgataccagccatgatgaaagaaaaaaccactgaagcggattttgaacccccccatttaaagaaaaaaggagatgaaaaaactcgccgaccctttagatgggaacaacgtcaaacaattttatatccacgtaacccagacttt

SEQ ID NO: 32356 - DNA, 345 bp, Glycine max
  Clone ID: PAT_MRT3847_129222C.1
atgtaccttttttatgcctcagggcgctatgtatggttctgttgtggtataaaggcactactggatgttaatcatatgctgataatacattctagcagaaatgcaagatctctaaagatgagattcgggatgctgagattgactacactattttgagcactgtcacgaacaccaacctgtcagctgttaaggtgttaaatgaaagcctggttgtaaacattggtatttaaacacgaaaattaattgtggctttaacggtagtaactggccatgtgaacatttgttcacaggaaaacatctgaagcaacgaccacagatgcggcagtgagggcctacacagagacg

SEQ ID NO: 32357 - DNA, 190 bp, Glycine max
  Clone ID: PAT_MRT3847_129223C.1
gttctagatgatacattatttactcctccttgctacgacataattcttctattatatcacctaaaataaataaactagccgccgttttacaacaacgtgactactaaaaaaatgccgtcaccaaacttaataatcttgttgcacatcatccttttttcagctggtgtaataataaaaaagaggccaccaa

SEQ ID NO: 32358 - DNA, 455 bp, Glycine max
  Clone ID: PAT_MRT3847_129224C.1
gccttttccagtttgctcgaaagattgaggacttgatattgaataatgttgcacctgaagagattcctttccaagttgggctgtcaaaagcagatctacggaagacgttaaaatccagtttatccggggtggacaagtccattgctgcgatgtataagaagttgcataaaaacttgacttcggaggaactcttaccttccttgtggaataaatgcaagaatgattttcttgataagtacgaaacctttgtccaacttgtcgcgaggatttaccctgctgaatcagtcccttctgtagcagagttgcgagaccttttagcttccatgtaaaggtttatacacatgccttctttccatttttttggcctgtaatcattctttttacgacgtaatttgatttactttatgaagtgcatttttgtggttttaaaaaaaaaaaaaaaaaaactcaagggg

SEQ ID NO: 32359 - DNA, 487 bp, Glycine max
  Clone ID: PAT_MRT3847_129225C.1
ggcgtctgcaacattctacactagcaccttctctttgcccaatggggtttccatctacgatacaagctcaatgccatggtttcatgggatcccgagcctgaaaccgatgccgctacttgtggaagcgcctagagcgttatccgatatatcgcttacagcttgtccaacatcggctgcgccatgtgcaaccacatgtgtggttctgtacactacgaaggacttctggcagaagacacatacggatgagctgatgacgctgtagaggaagccctagtagaaccatggaaaccagatgagcgcgatgcttacagggctacgaggcgcgagtctcgatgcgcttatactacatcagtcgagacacttgcagtggtcattctagaaccaatgacaatgcttgtaacatggatgaccctatggagtactcgtacccgtgcgatgttgaggacaacactgacgatccctacatgagaccagcatatgctgcatc

SEQ ID NO: 32360 - DNA, 1827 bp, Glycine max
  Clone ID: PAT_MRT3847_129226C.1
ggctcgaggccgaacggctacttggtagttggagtggtagcttttgctctactttgctcattcagagtttctttgacagattcagttccattattttcgcctgttcatgacgctgcttctttgactcgcaactctttccctgctggcttcatctttggggctggatcctcagcctaccagttcgaaggagcagcaaaggaaggtggaagaggaccaagcatatgggataccttcacacataaccatccagaaaagataagagatggagccaatggagatgtcgccgttgaccaatatcaccgctacaaggaagatgttaagatcatgaaggatatgaatttggattcatacagattctcaatctcttggcctagaatactacccaaaggaaagctcagtggtggtgtaaatcaagaaggaatcaattattacaacaacctcatcaatgagctattggctaatggtgtactgccatatgtgactctttttcattgggatcttccccaagctttggaagatgagtatggtggtttcttaagctcccatatagtagatgattttcaagactatgcggatctttgctttaaggaatttggagatagggtgaagttttggactactttgaatgaaccatggttgttcagccagggtggctatgcaaccggagcgacggcaccaggaagatgtaccggtccacaatgcctcggtggtgatgctggcactgaaccttacatagttacacacaatcaaattcttgctcatgcagctgctgttcatgtgtacaagactaagtatcaggcacatcagaaaggcaagataggtataacgttggtaagtaactggttcataccgcttgcagagaatagcacatcagacataaaggctgcgagaagggcaattgactttcaatatggatggtatatggaaccattaacaaaaggagagtatcctaaaaacatgcgagccctggtgggaagtagattgcctaagttcaccaaatggcaagccaagctagtgaatggatcatttgattttattggcttaaactattactcctctggttatattaatggtgtccctccaagcaacgacaaacccaattttctaacagattctcgcaccaacacttcatttgaacgcaatggaagacccctaggtctaagggccgcttcagtttggatatacttttatccaaggggacttctagatcttctgttatataccaaggaaaaatacaataaccctttgatttacatcaccgaaaatggtatgaacgaattcaatgatccaaccctttccgtggaagaagctctcatggatatttatcgaattgattattattatcgtcatttcttttatcttcgatcagcaattaaggctggcgcaaacgttaagggattttttgcatggtcatttttggactgtaatgaatggtttgcagggttcactgttcggtttggattaaactttgtagattacaaagatggcttaaaaaggtaccctaagctttctgctcaatggtacaagaactttctgaaaagaaactagtgttagacccaccgtttgaaagctatgcagcacctaaaaacggttaggttaagctcaatgtttgtagttgtagctaattccacgtataagtcattaggttgttgttttctgttagaataatttcatggcacactactaagtgtcctgcaccagcacagctataaattaatatgttatagctgatccttcatgtatcggtttgattttgaatgttatctcagaattaagattcagtttcagtttcaacaattataatcttcgcgtgatgattcctagttc

SEQ ID NO: 32361 - DNA, 336 bp, Glycine max
  Clone ID: PAT_MRT3847_129227C.1
aaaaaggagggtttgttgggttggttaatggccaaaagggggggaggtgaaacaccttaccctttgtgaaatacttgagagtgcgcgtggaaactctttcccgcaacacttcctttaccctcggtttcaacttgttgattctccgcttctcccaagagggtaggggttgtgttctcgacaagttctaggtgacagagcgcgtcattttctgtgtctaaaactttcagaaagccgatcctttttagggtaaccccaatgctcactttcagaatgacccttgattgggtagtgtagattcagtagagatcgcgatggctcttgaggaagagattgggg

SEQ ID NO: 32362 - DNA, 338 bp, Glycine max
  Clone ID: PAT_MRT3847_129228C.1
gggttgtttttttgtgtttgtttttgttgtttcttttttttttcttttttttttttttctaacaaaaaatcatagccggttttttccccttccgtttaccctatggttgactgacatgggcgggtacatacgacttcctcctttacgaggaacgtgcaacggtccttataaaaacctaaggctgggggggggaaatttaaacggaaaaaccgggggggggtgggagataattcttgggcacataaaacggcgtggaaagaaacctatgcgggggtcattcatttttcataggcaccaggggggggggtggttcaaaccctatggggattgcccccccc

SEQ ID NO: 32363 - DNA, 606 bp, Glycine max
  unsure (1)..(606): unsure at all n locations
  Clone ID: PAT_MRT3847_129229C.1
gcctccgaaaaccctaacaacacaggcgcagacgcanacgcaaacgcaaacgcaaacgcaaacgcagagcgtgatccattgacgaagatggtgcagcgtctcacctaccgcaaacgccacagctatgctaccaaatccaaccagcacagagtcgtcaagactcccggtggcaagcttgtttatcagaccacgaagaagagggccagcgggcccaagtgccccgtcactggcaagaggattcaggggattccacacttgaggcctgcagagtacaagagatcaaggttacccagaaaccgtaggactgtcaaccgtgcatatggcggagtgttgtctgaggattatccgagctttaaaagattgtgaagaaggtcttgaagatccagaaggcaaaggaaaagcaagcctcaaaggcttgaatttgaacaacacaatgagacatctttttggaggacttttaggtttgagtggttatagttaatcacaaattttattagagttgtcatgttaattgtcttttattattttgcctgtttgaactctttctagagcaagtgttaactttgtcgacaatgtcattatgatacagttttgtttctcattttc

SEQ ID NO: 32364 - DNA, 365 bp, Glycine max
  Clone ID: PAT_MRT3847_12922C.1
aaaaacaaaactttagtaatttgaatgggaagcctatggggttcaactatcaggggggggcgccaaaacaaactaatacagtcgaacagggatcagctagaactccatagccaaattttaaactgaacctgtaccttattttccacgggtgaataacttaaactcaggcaacctgagcaacagtctcaaatgtatttgttttttgccttgcaattccttccccaacttccattctgggaaaatcaacaaccctcacagatgaacccacctccttggatagattatccaacactgccttcacattcatagggtcattcataaaaaacttttgggccataaaaaccacattctcaaaatacttgggg

SEQ ID NO: 32365 - DNA, 1322 bp, Glycine max
  unsure (1)..(1322): unsure at all n locations
  Clone ID: PAT_MRT3847_129230C.1
aattcccgggctcgacccaccatatcccgcgtcgggcggctgtcgtctgacttcttttgtgtgcgggaagaggaaccctagctagggtttggaagaagctgatccgagaagatggtgcagcgtctcacctaccgcaaacgccacagctatgctaccaaatccaaccagcacagagtcgtcaagactcccggtggcaagcttgtttatcagaccacgaagaagagggccagacggacacagggcgcacactgccaacgcaaaacgcaatccgaagacgcaaacgcagagcgtgactccattgacgaagattggtgcagcgtctcacctaccgcaagaggcacagctatgccaccaagtccaaccaacacagggtcgtcaaaacccctggtgggaagctcgtttatcagactaccaagaagagggccagcggacccaagtgccccgtcactggcaagaggattcaggggattccacacttgaggcctgcagagtacaagaggtcaaggttacccagaaaccgtaggactggtcaaccgtgcatatggtggagttttatctggaagtgctgtcagggagaggattatccgagccttcttagttgaagagcaaaagattgtgaagaaggtcttgaagatccagaaggcaaaggaaaagcaggcctcaaaggcttgaatttgaaaaacacaatgagacacatctttttggaggactgttaggtttgagtggttatagtaaatcacaaattttattagagttgttctcatgttaattgtgcttttattatttggcttgtttgaactctttctagagcaagtgttaaagttgtcgacaatgccattacgatacagttttgtttgtctcattttcttttgatggtttattggtatcatcttgtttctttatattctaatagaactttgtaattccactggaattgggatataactcaattctgactgctttactggtggtattttgcaattaaaatgttttttttggctcanaaaaaaaaaaaaaaaaaaaaaaaaaaaaaaaaaaaaaaaaaaaaaaaaaaaaaaaaaaaaaaaaaaaaaaaaaaaaaaaaaaaaaaaaaaaaaaaaaaaaaaaaaaaaaaaaaaaaaaggggggccccttttgggggtcccagttttcctgccccggctttccaagtgtttattttttttttggggccccctaatttaatttcctggcccgggttttcacacctgggggctgggaaaaccctgggggtccccaaattaaatccctttggcacattccccctttttccccggtggggtattccaaaggggccccccccg

SEQ ID NO: 32366 - DNA, 793 bp, Glycine max
  Clone ID: PAT_MRT3847_129231C.1
agctgaccccctgcgcgaccttttcgaattccgggtcgcttacgcgtccgacggctgcgagaagacgacagaaggggtcgccgaaaaccctaacaacacaggcgcagagcgtgatccattgacgaagatggtgcagcgtctcacctaccgcaagaggcacagctatgccaccaaatccaaccaacacagggtcgtcaaaacccctggtgggaagctcgtttatcagaccaccaagaagagggccagcgggcccaagtgccccgtcactggcaagaggattcaggggattccacacttgaggcctgcagagtacaagagatcaaggttacccagaaaccgtaggactgtcaaccgtgcatatggcggagttttgtctggaagtgctgtcagggagaggattatccgagctttcttagttgaagagcaaaagattgtgaagaaggtcttgaagatccagaaggcaaaggaaaagcaagcctcaaaggcttgaatttgaacaacacaatgagacatctttttggaggacttttaggtttgagtggttatagttaatcacaaattttattagagttgttttcatgttaattgggcttttattatttggcttgtttgaactctttttaaaacaagtgttaactttttcgccaatgccattatgatacagttttgttctattttcttttaagggtattgaatttgtacctgtttatctaaaatttaaaaaaaccttgttattcccccccaaatggggaaatttccaattttaacgcttttatgggggccattttccccc

SEQ ID NO: 32367 - DNA, 1164 bp, Glycine max
  Clone ID: PAT_MRT3847_129232C.1
acgtcgcatacgtcgcatgctcacgctcggaattcggctcgaggttctagatcgcgagaagacgacagaagggggagaaatgaggtgcattcctaccactacatgcgtttggaacgctgaattaattttcgcctaaaaagacaattcggtgggatctaggttagcagcaaccagcgcaatctgggacttttctttctttctccccacacccagattcaaaaactcagctctgctctttcgtttggatctcaaaacatgttcttcttcgattggttctatggcattctagcttccctcggtctctggcagaaagaagccaaaattctcttcctcggtctcgataatgcagggaagaccaccctccttcacatgctcaaagacgagagattagttcagcaccagccgacccaacaccccacttcggaggaattgagcattgggaagatcaagtttaaggcttttgatttggggggccatcaagttgcccgcagagtctggaaagactattacgcaaaggtggatgcagtagtttacctggttgatgcctttgacaaagagaggtttgcagaatcaaagaaggagcttgatgccttactttcagatgaatcattggcaaatgttccatttcttgtgctaggcaacaagattgacattccatatgctgcatcagaagaagagctacgttatcatctaggcctgaccaatttcaccacagggaaggggaaggtcaacatcacggagtcgaaccttcggccactagaagtgttcatgtgcagcattgtccgcaagatgggatatggagatggcttccagtgggtctctcaatatattaagtagattctggcatcatttcccacctttccttgatctactagcactgtctgcagttacatcagaagagattttatctttgtttttgcttttgatgatttcattttgattgaattatttaatacaactgcagtgatgttatgttatgtgtcacagtttgtatctttagatattttctcttgtggggtggggtatattttctgtttgaaacactggattctgttgtaggggttatgtatgactggggagaaacacataataattctggaaaagttttatttcactttcttcccggacaattttgactggaaactgagctatttcttatctttc

SEQ ID NO: 32368 - DNA, 764 bp, Glycine max
  Clone ID: PAT_MRT3847_129233C.1
attcctaccacatgcgtttggaacgctgaattaattttcgcctaaaaggacaatctaagacttcggtgggatctaggttagcaaccagcgatctgggacttttctttctcccccacaccacacccagattcaaaaactcgctctgctctgctctgcaattccccttccgtttcgtttcgatctcaaaacatgttcttcttcgattggttctatggcattctagcttccctcggtctctggcagaaagaagccaaaattctcttccttggtctcgataatgcagggaagaccacacttcttcacatgctcaaagacgagagattagttcagcaccagccgacccaacaccccacttcggaggaattgagcattgggaagatcaagtttaaggcttttgatttggggggtcatcaagttgcccgcagagtctggaaagactattacgcgaaggtggatgcagtagtttacctggttgatgcctttgacaaagagaggtttgcagaatcaaagaaggagcttgatgccttgctttcagatgaatcattggcaaatgttccatttcttgtgctaggcaacaagattgacattccatatgctgcatcagaagaagagctacgttatcatctaggcctgaccaatttcaccacggggaaggggaaggtcaacctcacggagtcgaaccttcggcctctagaagtgttcatgtgcagcattgtacgcaagatgggatatggagatggctttcaatgggtctctcaatatat

SEQ ID NO: 32369 - DNA, 762 bp, Glycine max
  Clone ID: PAT_MRT3847_129234C.1
ccacgcgtccggtctcaaactcataaaatgtttggtcagtgtggttgcataacaaacctctccaactacataaactagactcgttcacccagttgtttaaggcattgttattggacaaggaagctttgaacctcatcaaaatttgagcatttgtgtctcccaacaatggcacaaaacaaatattggccaacaccaacagcataagaaggcaataatatgctcttctaagagccatagtaagttgatcacaggttgaaccaaaatgggttattggttgacgagaaaggaaataatagagggaataatgaaactaattaagaacaaagaactatcgagaaactaattaagaacaaagaactatcgagagtttgaaaggaagtgtgcataggaaattatgattcaatggtttaaggggtgacattgacaaagtcctacatgcaaataataagctggttaggccggccatatactatagtattaatttgaatttggaccttgttttctatggtacttttttttaatagcatatattatatcaagaagaggggttagtttaaagctgttttttcttgttattgatgaggatagtgtcttctactgcattggccgtagcttgattcatataatttttatgtgagttttatttgtttggtgtgtgctttgttgttattctgatgttacgttggtcgtagtttgtatgtgccatgtgtttttattttgtgtcatacatgcatttctttccgacacatattgatgagaact

SEQ ID NO: 32370 - DNA, 780 bp, Glycine max
  Clone ID: PAT_MRT3847_129235C.1
ccgcatttacactttttattcatttctctctctctctctctctccttcccgtgttcatcctgggcgggcgagaaccccacctgctccggcagcagctacagaacttagcggcaggtgaaatgatcgaacttgcagcgtaattatttcagtccagctgaaattgaaagtaactgctttctgagattctgcaaccgcatgaaaccctagaaatgagtgccgcaggtggtgcatttggtggcaatagggggctccgtccagtgcctcccgaaaaggggatatttccattggaccacatgcatttgtgtgacctcgagaaaatagaatatctcaattgtctaaagactgctgggcaccagtctgaaaaatgcaggcaattctcaaaaaaatacctgcagtgtcgcatggagaagaacttgatggcaaagcaagacctcggtgaacttggttttaaggaaagtaatgtagaaactcctggagggaacattactgacagggttgataatcaagaacaatgaaccccaagattaagaatgcatattgattttgaggttgagttttggtgatgccattttttccgttgtctttcaattcatttgattagtaatgtaccagcactgtgaacaaaagatgatggacaatttgccctaagcactctgaacaaaatataatgaaaagttggtcctattccctctatggggcgtgtagttaagattatatagacctagataattaatgcaaagaggaattttgggttttgttcaaaaaaaaaaaaaaaaaacc

SEQ ID NO: 32371 - DNA, 398 bp, Glycine max
  Clone ID: PAT_MRT3847_129236C.1
agaaaatacatatccaatacatatggatttatacgctctaaaatcctcaagactatcgtggcaagcgtatgtggatgatcacctaatgtgtgaaatgagaagtatcctcataactcacgcggctttactacactaacaccgaatcgtttgaactaagagcgccatctatcatcaaatgacacatgacgtaataactgccatcaataatgacttgaatgatgctgaatcaattgatacacctgtattgtatatcagaggctactaatacatggatatccattgcgagacctggtgctatcatgagagggtagacagggcctggtggcgatactgggtagacgactggagctgacataatcagaggcatttatgataaacgaattactcactgacaatgc

SEQ ID NO: 32372 - DNA, 447 bp, Glycine max
  Clone ID: PAT_MRT3847_129237C.1
gtgtctgtgtataaagactctcaatagagaacaacaacacaattccatggctgattttgactcaccttatagtactccttctcctctttgcgctcctattttccttcaccctcctcccattgggtcccgacgaccaccaccacaacatccttgtcaccgacgacacgccccctcctacgacaacctcttccaatgtgttctttttcgacgattttcaaattcagaatattgactacccgttcactaatcacgattcatcgcccactcatgcaccaaccaccttgcaaggtgggcagaacctattattaaaaggcaaaataacaaccggtccaagtccaagcttgagaagggaacaagagataatggaggaggacgaggacgaggctccatcgatgaaattccacacttgccattatctctaattaaccacgggggcactcctcaaaa

SEQ ID NO: 32373 - DNA, 1076 bp, Glycine max
  unsure (1)..(1076): unsure at all n locations
  Clone ID: PAT_MRT3847_129238C.1
agggggggantcggctcgaggcggaaacttcaaaaccatctctgaagctttggctgccatcccaccaaaatacgacggaaggtacgtggtttatgttaaagaaggagtgtacgatgagaccgtgacagtgacaaagaaaatgctaaacgtaaccatgtacggtgacggacagcaaaagagtatcatcactggcaacaaaaatttcgtggatggagtcaggactttccaaactgcatcattcgttgtacttggaggtggattcttggcgaaagacatgggattcagaaacacagccggtgcagagaagcaccaggcagtggccgcaagagtgcaagccgaccaagccatattcttcaactgcgccttcgagggctaccaagacactctttatgcccaaacccacaggcaattctaccgcgactgctacattctctggaacaatcgacttcatcttcggcgacgcctccgcggtgttccagaactgcaccatggtggtaagaaagccactggagaaccagcagaacatcgtgacagcacaagggaggctcgacaagcaggagaacaccggcttcgtcctccagaaatgcgtgatcaaggccgacaccgacttggtacccctcaaagacacaatcaagaactacctcggaaggccgtggaaggagtattcaagaaccatcatcatggagactcagattgatgacctaattcaccctgatgggtttcttccttgggaagggaactttgccctaagcacactttactatggtgagtacaacaacaatggggctggttctagcaccactgctagggttaattggcctggccgcaaagtcatcaatagggatgaggctaccaggtacacggttgaggctttcttgcaagggacatggatcaatggcacaggtgtaccagctcaactaggcctgtacagttaaaaggctctaattaacatcatcatgtttaataaatatgtataccagttgagttgaatgctccagctaatttaatgtattctaatgttttttatttgaaagggattaataatactattatttatgattaataaaaaaaacaaa

SEQ ID NO: 32374 - DNA, 127 bp, Glycine max
  Clone ID: PAT_MRT3847_129239C.1
aaagtgtggaacaagggcgcatagccgacaagcgccaccatagattaaacatcgcattgcggtccctaacaagacttgggagagaaaaaggggaaactacacttggtgattcaagcgcaccgatccg

SEQ ID NO: 32375 - DNA, 1534 bp, Glycine max
  Clone ID: PAT_MRT3847_12923C.1
ctgttttgtaaaagcaagagacaaagagagagaggaagaggaaggtggaaaagccctagtgtgtgttctgctgagagtccgatacacatctaggaaacgctatctatggctttttacggaggcgcgaaacgcgtttgtgtatccataaggcactattgttcgaattcagcgtcagagaaggtgaatctgataaagcagctgagagagagaacaagcgcagctatgaaggacgtgaaagcggctctggtggattcgaattgggacatagaggaagctcagaaggaactgaggaaaagaggcaaagttttggcgtccaagaaatcctctcgaactgcctcccaaggcctcctcgctctcgcccaatcccccaccaaactcgctctcatcgagctcaactgcgagaccgacttcgttgcccgaaacgacatctttcagcacctcgctttgcgtttagccaaccaagctttgtctctgtcgctcgattcttcttcttcttcttcttcttcttcctttcatcttggacctcaatcccttcaggacatgccattcaatctcgaccatcctaagttcaacggccaaacaactgttcacaacgcaatcactgagctcgccgccatgatgggggagaatgtcaggcttcgaagaggttacgtcattcctgcatcacccaatggcttcatttctacatatcttcataccagcccccaaccaggtttgggtcgcattgctggaattttgtctcttcaagtggacgatggtcaaactcaactccaagctcttcaacgtgttggatccgaattggctatgcatgtagtcgcagcaaagccattgtttttaactaaggaacttgtaccttcagatgccttagaaaatgagcgcgaaattcttaaatctcaggcagaagcctctggtaagcctaagatggccatagagaaaatggttgaaggacgtctccgcaagtattttgaggatgttgtatttatggaccaaaagtttattatgaatgatactatgaatgtgaaggcagtgctggataatctatccaaggaggtgggttcatctgtgagggttgttgattttctcagaatggaagttggggaaggaattgcaaggcaagaaacagatacatctgagactgttgctcaggttgcctgagtttaaggtgattctgtgtattcagggaggaaaccctgagagctcagcttttgtttttaaggcttttgctctctagctgatatttaaacatgtatgttcagttattcatccgtggaagatgaggtacaggttcagttgaaaatttggctatggagttctagctgatccctgttcgactgtattagtttgttttggcgcactcgcctgatagttgaaccacataggcttcacattcaaattactaaagttttgttttatatcttttgtgagttcacaaagtttctcaatttaattttacaaagctgacaaataagttgatactttggaattatcgaaacaattgtcgaatagaagacataaccttgtttgtgtttgcttg

SEQ ID NO: 32376 - DNA, 420 bp, Glycine max
  Clone ID: PAT_MRT3847_129240C.1
ctaacgcatatttttttttattaaagacaaacacaaatacattcagtcacttcaagtacatgacgtaagtatacacaactgattaaggaatctggagacttgggttacacatttatataaagccaggaacagtacttaagccagcatagggaccttagatacacaaactgttgggaattcctctgaaagctatcccttttgagtagaaggaactagtaaagagtaaggttttttaacgggcccatagcggctttttaacgtctcatcgttgctcttctgtatgggctttgtttaaatgctatacagcgccatatcctatcgttaaaaagcccctaatggaccggcatcacaagaagaggagtccaaccatctctctgggaaggtacaactcatcagatgcgtgccttgacaagatttcta

SEQ ID NO: 32377 - DNA, 221 bp, Glycine max
  Clone ID: PAT_MRT3847_129241C.1
ggaaaacattcttcgccgacaaagaggtcatgaagagacggaaaggctcgattgatcgctatttccagagaatagcgatccccaatgcgtttagatgttgccgtttcaaaaaaaatctcctttttagaaaaaggtggccagcccatagtggtaaaatccattctgagcgagttaacagaaagggtccccaaactacaccatcggggtgctcgttgtttgaa

SEQ ID NO: 32378 - DNA, 372 bp, Glycine max
  Clone ID: PAT_MRT3847_129242C.1
gggaattatactgcaacagctacacgtcatatattgagtcctatcaatcccaatacagtttgttttccaaaaaagacttacacttaatggcacgtatacttgaccggttgtcacactaaacactatttccctagccacggtcacgaattatgatctaactactgcccaaagaaataaaaaaatctaatctgggcattctaaatttaacccactgtgccgtttatcgcaacttttactaagtatgcactttaaatctttaggggtaaattgtgatgccacgacactaaacttgcaatgtcattaaatttgataacccccacgactgtatgtatataaggcacaaaagaaggcaacgactatgataaaattata

SEQ ID NO: 32379 - DNA, 110 bp, Glycine max
  unsure (1)..(110): unsure at all n locations
  Clone ID: PAT_MRT3847_129243C.1
ccggaccggaaaacccgggancgacccacgcgnccgtttcattgccagccaaacgcaaaagcaccgcacgcgggggcgcagacgaaagaggacaccgaggagacggaaga

SEQ ID NO: 32380 - DNA, 755 bp, Glycine max
  unsure (1)..(755): unsure at all n locations
  Clone ID: PAT_MRT3847_129244C.1
cttatatatggcttcgaagaaattctgacatagtagggatgaagaaagatggaatatccgtctttagagagcttgctctctttcaagattaccatgggttacctgctttaaaaaatgaactggtggactttatggcaaaaataagagaaaatggcatcaaatttgcttcggagaagctcgttctcactgccggcgcaactcccgcgaatgagattctgatgttttgccttgctgatcctggggaagctttcattcttcccacaccctattaccctgggtttgatagagatctgaaatggagaaccggggttgagattgttccaatgcattgctccagctcaaatggctttagaatcacttcctctgctttagaacaagcctaccaacaagcacaaaaactgaatctcaaaatcaaaggggttttagtaaccaacccctcaaacccactgggcataaccatgaccaaaactgagctcaaccacctagtagatttcgcaattgacaaaaacattcacataataagcgacgaaatctactcgggtactgtcttcgactcacccaaattcgtaagcattcacagaagttgtgaacgagagaattactactgtcaacaacaatagcattaccagcatttggaaccgcattcacattgtttaatggtttctccaaagaccttggcataccaggattttcgtgtggngaatgattntctccaacacgaaactgttgtggctgctgccaccaaaatgtcaagc

SEQ ID NO: 32381 - DNA, 258 bp, Glycine max
  Clone ID: PAT_MRT3847_129245C.1
ttatcctctatactaattgtctggctttcattcacgagaggttcagaaattctacccgaaacttaataactattatcatcataattgcccaaatacctcaattaaaccacattcccctttactaaatcaaacaactaccatatatccacacatacacacattactttataagccacaataatcatttaaatcatcatataaccaccactctctctcttataattacttacttattccttcttttgaactagtggctcc

SEQ ID NO: 32382 - DNA, 315 bp, Glycine max
  Clone ID: PAT_MRT3847_129246C.1
atcaatttctaaaagaacacataaagataaaaaaagggtggactttatatcaaattataattaacctacttaaacactatcacaacatttaatatccattcacttacactttatattattcctcgacaatccttgcgccatatagcaatccctcacttacatcagtcctactatactcactcctttactagaaacataagtaatcaacttatgcataaatgcccatattagaacaacatataaacagcctactcacttctcattatcattaccaaatcctttactgatacctcatcaaacagttacagatccaat

SEQ ID NO: 32383 - DNA, 333 bp, Glycine max
  Clone ID: PAT_MRT3847_129247C.1
catacagttggaatattatatcaacgatgttgagtggcatgccgagaacttgctaggcagtgcttcctccacatgagcttgagctcttacatgactaactatgagattaatcatatcgatctaccaaaggaatactccaaatccagtatatgcaactgatatggggttcatagaagattttgcgtaccaactgcttaacaattgacgctataccctgattctgctatgggaagccaaggtaatgctaagatcctgaagcatgttcaagtcgggagcctgcaaccgagtgtaccggtcgaagctcaagagctgtgacaggagaagagcccactc

SEQ ID NO: 32384 - DNA, 296 bp, Glycine max
  Clone ID: PAT_MRT3847_129248C.1
ggcacgacttttgactttaaaatgctttaacaagataaaactccaacgatcgaggccttgaatagtgggtgggttataaaacgcaaactatagttatttttaaatacgctggttataaaattagagttgtgggaagaaataaaacttaaacgatggaggccttgaatatggggtctgcccaaaattgttgctaaaagcggcatatttctaaattagacaacaggataatggcgggcatatatgtatacagaggagtggaccaaagcttcctccgaattgggaacacactgacactg

SEQ ID NO: 32385 - DNA, 214 bp, Glycine max
  Clone ID: PAT_MRT3847_129249C.1
aagctcgtaattcgggtcgttccatgccgaagctttcctctgaacagaaggggcacctctaaaggggggggtttattaaagaaacggggcgttcccaacaacaacaaggttaataagagcacgcaccatgctgcagacaggacggtcctggttctgacgcgccctaggcacaccaacgagaacggacatacggacagcaagagcataaacaaga

SEQ ID NO: 32386 - DNA, 514 bp, Glycine max
  Clone ID: PAT_MRT3847_12924C.1
gactctcagcagcgtgccctgggttgtcattgagcagcgctgcgaccgcatgcaatgggtctctcgcatcgactgcagtctggaagatgatctgccgatggaggcccatgaaaccagatgtgcttggaccacatgatatcatacatttccatgggagctctacagagagataaaccagcttgtactggtggccgcgctctggtgtttcatctataccaaacatatggagggttggcttactccaccactcatttcctgaaactaaaggcgtgctctaaatactctatcagacgttaggccggactctagattgcatcgtgcgtgcaatacactgtttacagggtgttgatgaatcgtgccttgtcacataatccgtaagtggtcgcatgtaagggggagggttatttacttctagaactcgaagttgttatgagaatttgcagcaggatcatctaactgctatcactgagagtgaagaactcttattctcgagcgaaaacaagatatctacaat

SEQ ID NO: 32387 - DNA, 166 bp, Glycine max
  Clone ID: PAT_MRT3847_129250C.1
ctcctgtacgaggagcgattgccatatagctacaccatagcacgtaataccttgacctacacatgatgaatgtgtaggaagattgaacaatggactaatgaaatgacttcgagttgtaagcgccttgccactgccttaatagctgactagagggggatccattgct

SEQ ID NO: 32388 - DNA, 564 bp, Glycine max
  Clone ID: PAT_MRT3847_129251C.1
cgacaatagatgtaaaggtaagtctcgttagcgttgtgcttgttaagggaaagtagtttgcatcatttttgaaaatggtaaggctggttttgtccaattccaatctttttgtgtttgtggatttttatgtttgcattcatttcttctgttcctcaatgtgaccacagaatctggttagggaaatttctgacttctttaaattgaatagagcttatgaaaaagaagaaaaaaaaaggagaggggactctgcaataagtaatcacaagttataaagttctaattagagacatcaatttatcttcttgtatcagttttatgtctctgcttggtgggaatgggatgcttacagtaatcaaaatattactaggtattcttcaatatttcataactttctcattaggcagaagggtacaataattcactaaataatagaaattttctccaatcatagtagtgtaggtgatttctgtattttacataaaaaaattaatctgattgtttatgcatgccctttgtcctagattgtttgtcttatttcatgtcttttgtcatcatttatgcatt

SEQ ID NO: 32389 - DNA, 274 bp, Glycine max
  unsure (1)..(274): unsure at all n locations
  Clone ID: PAT_MRT3847_129252C.1
cagaaacagtagaanaaacanctanagaagtagccccanaggagcctanngnagtttccagttgagaccgaggaggtggtggcaaaggagacagaggaagagaagccagcagaagagaaatcagaggagaaanctgaagaagtgaaagaagaagcagaggagcctaaaganactactganacagnatcagcagcagcaggcaccaccagcaaccacagagggaagagaacaaaccagctgagtcagttggaaccccagtagaggttcctgttga

SEQ ID NO: 32390 - DNA, 1770 bp, Glycine max
  Clone ID: PAT_MRT3847_129253C.1
ctcgagccgttttcacattttcatataacctcttgtaacctagggctaaagctacaccctacaacttcccctctttgtgctttcctaaaccttgtatttatataattcatcttttataattttattcgaattcaaatataataccaaaaccgatccttgtttggccattggctctctacgtactagcggtttgaaacatttgagactcaaagagtaagttatatatatatatatatagagagagagagagatagagagaagaaattggagatagacatggggcatcactcttgctgcaacaagcagaaggtcaaaagagggttatggtcacctgaagaagatgaaaagctcatcaactatatcacaacttatggacatggttgctggagctcagtcccaaaacttgcaggcctgcagaggtgtggaaagagttgcagattaagatggataaattatcttagacctgatttgaaacggggaagcttcactcctcaagaagctgcactcattatagaacttcatagtattctaggaaacaggtgggctcagatagccaagcacctacctggaagaacagataatgaggtgaagaacttttggaattcaagcataaagaagaagctgctttctcatgatgttgttccttctttagccacattttctgatcatattcacggtcctcccaatggttccatggaaagtttcttccctttaactgacaaccctatcctaaactcccatcatcacttagaccagctattccttcccatcatcccatccccaatcctccaagcctttgatcatcatcaccataataatgatatcaagattgacataaacaaattttttaataataatgccaatttcctacaatattttcagaatccaatgccggaaacagtgcctccaatatccaatactactattccatctttgtatgaagaagatgcatggtcttctttggggtgtgtacctattcaccttaatccaaatcaagaaaatcaaatcatgatcaccaaaagtgatcatactaccccacacttgattgttgagaaattcatcaatccaagtacatggcagcagcagcagcactctgtggaagtggaaccccccattttgccaaaagtctgtgagagcattgaggattatgtctgtagcatcccatattcttcttctgttaattcacaagaccaacatgtggaagctgttgcgtgtttcacacctgttatttgtccacaagatcaagtggagtacattgatgccctcatcatgtcatcattgccatcctcaacaacaacatcttcatcagtagtatcattcttccaagcagacaaatagtcacaaaacctatcattccttcaagttaattggttgtcgtcatgagcattggttactatatcatataataggttaattttatgtgtatataattgagtagtgggagagagtactctatttatatttgtgataagcagaattaattccatgcattttaagggggggagaacatgcatatgcatttaatttttctcttgaattttggaataagagggtgagtagatgctcctatcggcaaacctctgagccttgctagttcaggctcgatcttccactgaacgatgtttgctgaagttccataaatatgtacgtctaggttctttcacatgtttgtcgaccaaaagtacgtatccgtgtatgattattgtttctttgtgaagtgctgtatgttgtataacaatcatacgatgcatagttgtgcactttaagttg

SEQ ID NO: 32391 - DNA, 184 bp, Glycine max
  unsure (1)..(184): unsure at all n locations
  Clone ID: PAT_MRT3847_129254C.1
agccantcctncttncnncagccaangtgcngcnngtatcgtcnantgngactgtgtgtgtccancgtatgttggtccggggttgcctnctctgtaccaacaancattgggtngtngtaagctgtgacctccgcatatgtcttgtgctcagttctgaacattgntngcttntgatgtncattcc

SEQ ID NO: 32392 - DNA, 406 bp, Glycine max
  unsure (1)..(406): unsure at all n locations
  Clone ID: PAT_MRT3847_129255C.1
cacactcnngatttgactcggtgtttatttcagaagacgacagaaggctnttgtgtgctgcaatacattatagactgtggttatctttgagcatgaaacatggtaaccttgttatatatttttgctcttgcataaatattttggggataatttcttgatgttggttggatatgttgtccagtgttatatgttctatttaacattctatgtaactatggaaagaatttgactttaaaaataaattgttttatagaaattgatcggaaattgaatttccttattctttcatttgactcttactttacctttatttgtcattcacattgttatttttttaaccaaatttttattcttgaacaatatttctatacacttattacttacaattaacaaactttttactctt

SEQ ID NO: 32393 - DNA, 514 bp, Glycine max
  Clone ID: PAT_MRT3847_129256C.1
cagctgcaaaacccttgttgtgctcaaacttattgggggcttgaataggaacccttttccgttggattttaaatccgttgatcttcccttactaacaaccctgcatttgcaatcatttatactggagcgtagggatatggccgagcttcttcgcgggagtccgaatctcgagtacttgtttgttggccatatgtattttagtggccctgaagcaaggtttgaaagattgcccaagttgcttagagccaccattgcgtttggccatgttccgttggaagttgttaataatgttcagtttctgcgcatagattggatggagcacaaagaggaagccaacttgattcccgagtttcaaaatttaacacacctcgaattgggctattcggagtgtactagggattgggttgatgtgttagaagtgatccagcgttgccccaatcttcaaattcttgacattgacatggggagtattgacatgactactagagacgatgaaggagcagattggccattc

SEQ ID NO: 32394 - DNA, 156 bp, Glycine max
  Clone ID: PAT_MRT3847_129257C.1
ggccgccctttttttttttttggttggtttaatttatttcctgggggaaaaggtgtttaaaatggtttttaggaggaaaatggaaaggtttccggggaaaaggggttctgctgtaaatccttggaaccaataatgggtttgggtgattaaaagtga

SEQ ID NO: 32395 - DNA, 159 bp, Glycine max
  Clone ID: PAT_MRT3847_129258C.1
actctctctatataatctacataatctgtgatttttgacaaggatttttacatatttaacgatgagaaaaaatcacaccattttatggcccgagcatgcatgcttctgacacaagcaagaaatcacgcagggtgcctcaggctcttagagaggaagatg

SEQ ID NO: 32396 - DNA, 227 bp, Glycine max
  Clone ID: PAT_MRT3847_129259C.1
atcaagccagagcacaaagaggggttcctagacaaagttaaggacaagatccatggtgagggcggtgacgccgagggcgagcagaagaagaaggactaggacaatatgctacatggtcatgaaaattgctcatgcaagagtaccagcagttacagtgattgaacttctggatcatctatatcattaaacagtttatggggccatagtactcgtcggctgtggcttaa

SEQ ID NO: 32397 - DNA, 333 bp, Glycine max
  unsure (1)..(333): unsure at all n locations
  Clone ID: PAT_MRT3847_12925C.1
ccacgcgtcctcaaaactcaagcattgcatccttcttgatttgtagtttgttttgttctttcgataaattttctgccacgagcggacnnnttttaanatcatantttgtgtttttcaacaatggctaagttctttgctgctataatctttgcactcttttccatttccatacttcaaacagtggtaatgtcttttaatgaacaaagatgccacttttattacaacaagagcatatattgaagttgaagtttcaatagttaccaattcccatttcaattctttagtgtatttatccagacccaataccacaagccctgcattttttttttgtca

SEQ ID NO: 32398 - DNA, 159 bp, Glycine max
  Clone ID: PAT_MRT3847_129260C.1
cgaagtttgggctgaccaccgctcagattcttagggttgtgaagaacctggacctcgcgggcatgctggattggctgcgactgacacattttcacaccggttctcagattccctcaacagcgttgcttgacagatggtgtgggcacacgctgcgcagat

SEQ ID NO: 32399 - DNA, 597 bp, Glycine max
  unsure (1)..(597): unsure at all n locations
  Clone ID: PAT_MRT3847_129261C.1
gcttcaaacatgagggcgagtttattgagcgggaggtgggtgaggcaaagctaagagtgagaatcttccacttttcagcagagtctattgcgaagctgagagcgaggggtaactctgagtgcaaatccaaaaccagcgagatctcttcgtgccaatccttatcagcgcatgtgtggggagccgtaacacgagcgggggggcggccaaatgaggagataacaaggtgcgaattgggcataagcaatcgagcaagagtgggaccgcctcttccacacgaggactttggaaacgcaggtgatgtggggagcgactggngggtcacggcaggggaattgcgtgagaaggagctaggaggggcancatggaaggtgcacgtgggtgtggcgaaccaaaacgacaaagcggggagacaaaagctcaaagagtgggggaggcgtcctgtggggtgccaacgtggggtgcgctttgagccttgtgctgtgaccatgtgnagttccccgaggtgcaacatgtgtgggaatgaatttgggatggggaaagcggttgcgnttctnagtgggtatgccaacaaaaatgaggggaacgtgacagcatacc

SEQ ID NO: 32400 - DNA, 263 bp, Glycine max
  Clone ID: PAT_MRT3847_129262C.1
attgggttgaaatatactttacccatcatttaaatctgtttccagacagaacatttcttttccactatgacaaccaacattcctatactaaatcccaacagacttgcattctccttaagaatttaaacaccaaattggttttttacccacacaaaaaaatttctccaaaaaaaaatcatattatggatgctactttctcaaaaaactcccttgggagaaggggtcccgaaactgtcttagggacagcattggtgaacaaaact

SEQ ID NO: 32401 - DNA, 255 bp, Glycine max
  unsure (1)..(255): unsure at all n locations
  Clone ID: PAT_MRT3847_129263C.1
agaccgcactattcaaaatccagaaggggctagctttacgattgacactaagccatgtcctaaatcttaacaaatgaaaacaagtggcctctctccacacagataaggcacatgtaaccnnnaagaataaaaaccagtaatatatggtatgtgaaaaacaggtaaccgatcctaataaatgcttttaatggaagtttgcttttcctgtagacatcaataggcatatcaagacgtcttttgcaccgtccagaaaat

SEQ ID NO: 32402 - DNA, 433 bp, Glycine max
  Clone ID: PAT_MRT3847_129264C.1
cgtacgacccgtacctctctctctctctgactctccctcaccgaaccctagtactaacctgagagagcgctttagggaccgatacgccgctcctgtactcgctccccttcttcttcaagcattctgtcaggcgctacctagatcaatgtcccacaccagatctagatcactggtagagcgcagaacacattaataatggcacaagctgcccttagagctgctacgccaggcgataccagataacgtcaacagaagctacagagaattctatacggctttaatatagcccacacagcatgctgaacaggcagcatccgaagcccatatctcagctgtattcaaagctatcacctttacaagaccctcagctgaacccgaacactgtattcactctcttgacaggctaataccatattcaccgaactcggcacta

SEQ ID NO: 32403 - DNA, 486 bp, Glycine max
  Clone ID: PAT_MRT3847_129265C.1
gatctccaaattcagatataacatgacaacattcacagtttgtcccgaaatacattgacatgatcaaataaagatttacctattgaaattatagaagaaacagatttgagaatcatgagaccaatttttacaattgattttgttgataactcatttgcttaatctgatgatgactttggggatacactagtggacaccgaaaaaacgagacctctctggtgtgcacttctgtcatgaataagtggttcagagacccaagagctatgaggagtaactccaacagttgcttgtctttctctagaagatgcccaagtcaccatatatagaccggtaatgataaaagatcctcctatgatgcccatcattacagccaacagaaaggtaaagactggaatggacggctgtatggcagccgcataagttggattagtatagcttaaaccaataagaaacaaaagctggttgccaaatatcctagttaatcca

SEQ ID NO: 32404 - DNA, 1382 bp, Glycine max
  Clone ID: PAT_MRT3847_129266C.1
gccacgcgtccggctacaatttcctggggcaggccctggttgctctttattacctatttcaaccaggtgcgaatgataccctgtttgattgattcagggtatgtggcaaccagcttgtgttccttattggttgaagctttattaatccaactttggcggctgccatacagccgtccattccagtctttacctttccgtcggctgttatgacgcggtcagtttcattccacttgtgtcttttatctgttacacttttctgtatggttattcttctcactggaccccccaaggcattcccaaacttttcggcttgaaaagaggaatttaataaactcatttaaatacgcctggccatactgttaggtgtatatatagagaacttactctgttatagatggtctggcaaaagttggaggaactattatctgtgtctctggtgccatatttatggttttgtatcggggtccagctttgataggatatgccgaactcggtcatgtaacacaaaatgaaataagtgccagaggtcagccagagccatctggatggttaattggtggcttacagaaccttgggtttgacaattttcatcttggagttttgtgcttgatagggaactgcatttgcatggctgcatttctagccattcaggcatcggtattaaaaaaatatcctgcaaacctatctgtcacagcgtgttcatacttctttggagctttactgatggtgacagtatcattattcatgactactgagtcaactgactggagtttgacgtcatcagaaatacttgctgttatttatgctggaagtattgcatctgcccttaactatggactcattacatggtgcaacaagatcatagggccagccatggttgccctttacaatccgcttcaacctgcgttttctgccatcctgtcccaaattttccttggaagtccaatttacttgggaagcatcataggaggatcttttatcattgccggtctatatatggttacttgggcatcttctagagaaagacaggcaactgttggagttactcctcatagctcttgggtctctgaaccacttattcatgaaagaagtgcacaccagagaggtcttgttttttcggtgtccgctagcgtatccccaaaatcatcatcagattaaggaaatgagttatccattcaattgtaaaaattggtctcatgattctcaaatctgtttcttctatactttcaataggtaaatctgtatttgttgatcatgtcaatgtatttcgggacaaactctgaatgttgtcatgttatatctgaatttttaaatacattgtgttgtatctgaatttggagagcaattttgtaatgtgagtctatatattttatgttccttct

SEQ ID NO: 32405 - DNA, 1257 bp, Glycine max
  Clone ID: PAT_MRT3847_129267C.1
cacgcgtccgctccattattaaaaaagtatcctgcaaacctatctgtcacagcatattcatacttctttggagctgtattgatggtaactacatcattctttgcaactaatgaatcaactgactggagattgacacaatctgaaacaatagccgttatttatgctggatttattgcatctgcccttaattatggactcattacatggtgcaacaagatcttggggccagccatggttgctctttataatccacttcaacctggagcttctgctctcctatccagaatttttcttggaagtccaatttacatgggaagcatcataggaggatctttgatcattattggtttgtatgcggttacttgggcgtcatatagagaaagacatgcagctgctggagttgtttctcatggctcttgggtctcggaatcactagttcatgacaagagttcttttagggttaacattttctcaggaccccccagcctgtccacaaagccttcggattaacgaaatgaattgtggaatttcatgtaaaaagtcgtcccataatgctttgctgtctttatacataatagttgttttgaagaaattaagagagttgacgttaaaattttgatgaacttatcaaattccacaaggctatttgtcatcttaaaaatgatttcatataagaattttgaatgtcccttgcccggagataatgaaattgagggttcaatctcttctccttctctccaacgcttgaaaaccctagcagaacaaccaggggaaaaccttaaggaatcttagggaatcgctagagacatagttatcgctgctggactacacacatgagtcggctcagagcatcataggaggatcttttatcattaccggtctatatatggtgacttgggcatcttctagagaaagacaagcaactgttggagttactcctcatagctcttgggtctctgaaccacttattcatgacagaagtgcacaccagagaggtctcgttttttcggtgtccactagtgtatccccaaagtcatcatcagattaaggaaatgagttatccccaaaatcaattgtaaaaattggtctcatgattctcaaatctgtttcttctataatttcaataggtaaatctttatttgatcatgtcaatgtatttcgggacaaactgtgaatgttgtcatgttatatctgaatttggagatcaattttgtaatgtgagtctatataaaaaaaaaaaaaaaaaaaaaacccaag

SEQ ID NO: 32406 - DNA, 250 bp, Glycine max
  Clone ID: PAT_MRT3847_129268C.1
gacatttgttgtggcttagttaatcctcagatggcagtggaaaatatctgagtccacgaagagtccaacgttgcccctccaccatcatggggacaatcactatcgctcgctttcactttgtacgacactttggtcctcaggttccggtccattgactggatcttcttctattccctcagatgctcaacaatcagagacttctttcgtctatgcgaatgtcattccatagctcaaagcctctctctctcac

SEQ ID NO: 32407 - DNA, 314 bp, Glycine max
  Clone ID: PAT_MRT3847_129269C.1
tcccggactccacccacgcgttcgtccgaacatatcagcgatctttcggcctttataaacaatcaccataatcaggaacactgtccaaataacaaacccatcacaatcatactctaccataaaccatattatgcgactcatcatcacacccttaaatcgtacatgactgaactcctctaaacactcattttccactactaccactcattctccaatattacataccacaagctcaccaacaacagcaatttcaatcctaaacccctaatattcaattacatcattcacacatacactaacaacatccttaccat

SEQ ID NO: 32408 - DNA, 548 bp, Glycine max
  Clone ID: PAT_MRT3847_12926C.1
gtgtcaagaggagggaagagaaggaatttgagttggtcggaggaggtggtgacgtgaaggaggcagcagtggccgccggaacggtaacacttacggaaggagcagcaggggtgggcagagtggacgacccgcggcgggaaaacagcaaccgaatggttgccgcctgtgttgcgaccccctccgtcactgttaccgccaccgccgccacttatttcaataatcagacggggtttgccggcactctcggaggtggtggtggttccaaaaaagggatggaggcgaacagtaacccatccaaagcctcgaaaggagtgaccatgaccaccgcagaggtggaccagctcaggcaacagctgcaatcggtggttgaaaatggagatctcactgcttcgaatgtgtgtgttgaacagttggaaagtgcggtgttaagcaaggatacactcgaggcaactcgtatcggccgttttgtgaacgacgtgcggaagcagactggccagcaatggcccgacttcttcaaacgttgtcgtgcgctgataaagcaatggcag

SEQ ID NO: 32409 - DNA, 529 bp, Glycine max
  Clone ID: PAT_MRT3847_129270C.1
ggctgagtaatgggaggttaatattatagtaccaggctgcccttaattttctgagtaggtagctggtttagttaacctgattttcttactatatgagtttttcaaaatgacttccctgttttgtttacacattacatgtaaaagtaaattatctgttgcataaattttcatacagaacaaattaccaacaccaaaaattaagataacacagatatttttacttttgagcaatatgctaagttctaacaaagaaaaagccttcaggactcaggagatgtatataccaggatatttggtataagacatgaaccattcttcagacttcatgcaaatactacatctgaacgaaacacgtacttgacacccttggtaacatttctggcttcatgcaacaaacatttatctccatgaaggtgcagtagggctgtcccttcagtaggagccacctcagccacagttttgtttctttgaccataaaacactgtttctcctccaactaaaggatcaacagatgaaactgagggattgc

SEQ ID NO: 32410 - DNA, 683 bp, Glycine max
  Clone ID: PAT_MRT3847_129271C.1
cttgccgtttgttgttgacccttgtaagttgcgaacaacacatatgacatgatttgtgttcttctttcttaaaagttgagatagttagtatttgatcatgggtagtagtactgaaatgggaatcccagaagaagaaaaagaagaagagcttctgaagaagatagaacggctagaagctggtcacgctcacctcaagcaagaaatgtccaacttcaagctcttccaaaacaacaagtctcgttccaggttcggtgctgccacgtgtaacaaaccctcttcttctctgcatcaaaatggaaacaagtatctcaatatcttgcagtcaatgggccacgctgttcatgtgttggatcttcaatgtcgtatcatgtactggaaccctagtgcggagagtatgtatggttatgccgctgaagaagttctagggcaggatgggattgagatgcttgtggatcccagtgattttggcttagccaatgatgtgttcaaccatgtcaaaaggggagagagttggagaggccagctccctgttaagaataagagaggggataggttctatgctgttacaaccaatacacctttctatgatgatgatgatggaagcttggttggggttatttttgtctctctgtgattcaggccccttccttgagaccagaattcccttgtcaggggtagagaat

SEQ ID NO: 32411 - DNA, 1028 bp, Glycine max
  Clone ID: PAT_MRT3847_129272C.1
ccacgcgtccgcccacgcgtccgcccacgcgtccgaccttatcaacatcctttacctcttaatttttctcatcagtttaaaactactattcttcagaaaaaggttaaaaaacccagcaccaagtccaccatctcttccaataatcggaaacctccatcagctgaagaaacagccacttcaccgagccttgtacgacctctcacagaaatatggccctaataatatcctctctctgcggttcgggtcccaacccgtcctcgtcgtttcgtccgcatccgcagcggaagaatgtttcaccaaaaacgacatcatcttcgcgaaccgttttcgctcttcattgacaaagtacatcggcttcaaccacaccattattacagcatcatcgtacggcgaccactggcgcaacttacgtcgtataagctcgctcgagattctctccaaccaccgtctcaactcctttttaggggtccgaaaggacgagaccatgaagttgcttcgaaagctggctaagggttctgataaagacttcaggagagtggagctgaggccaatgttttcggagttaacgttcaacattatcataaaaatggtgtgtggcaaacgctactacggcgaggaatacgatgggaccaacgccgaggaggctaagaggtttagagagatcatgaatgagatatcgcagtttgggttggggtccaaccttgcagattttgtgccgcttttcagattgtttagtagtcgcaaaaagttacgaaaggttggagagaagctagacgcgttcttccaaggactcattgatgagcatcggaataagaaggaaagttcaaataccatgatcggccatctgctttcctcacaagagtcacagccagagtattatactgaccaaactatcaagggccttataatggcgttatatgtggctggcacagagacttccgctgtagcattagagtgggcaatgtccaatttactgaacagtccagaagtgttggagaaagcaagggttgaattggacactcaagttg

SEQ ID NO: 32412 - DNA, 216 bp, Glycine max
  Clone ID: PAT_MRT3847_129273C.1
acgaggtcaatttgtcaggtaattttttcaaccgaaaggtaaactcatagatatatctccatgctattaaaaaaaacagatatatttacatgtttgctttggtagtttaattatcataaaaataaaatatacactaattttacactgtaccattgaactcaaatgaaatttatagtaacataaaattatggattaaatcatttttatttggttatt

SEQ ID NO: 32413 - DNA, 366 bp, Glycine max
  Clone ID: PAT_MRT3847_129274C.1
gctttgcgttttatcaagctacactccaactccattgttggaatttgggttgcaaaaagacagagggttaattgtggagtactctggaaggatgtctttcgttggtcataacgttaatcaggcccaagagacagatttgttggggggaaatttttcctttgatacataaatcttcgctctcgattgggaagagtttcctctacgaaagcacaattgtgtttgtggtaaaaccttcaaatatgatgtattgggtgctggtttacattgttcagaagattctcctgatgagggagatcaagattaacctggaaagattgatgcctgagtgagacacatgatagatcctcattataatgaggttcatgc

SEQ ID NO: 32414 - DNA, 350 bp, Glycine max
  Clone ID: PAT_MRT3847_129275C.1
aaccccccaagaataatgtgcatgccccttaccaaaagttatttaatttggttgggcatctccccccatttgaaacatggataaactcagcttcaagatttaggggacttgtaatcgttctaaaccaagagtgaagctccagaaagggaatttgtggttgcaatttagctgtgtgggtttgctttacaaaattgtttagtgaactttaattatgtgtttactttgttatgtttatatttgactcactaatatatttgtgttataaaggttgtccatgcctccggattctgttaacttgctagtttgtacattgcagaaattatagatcatgtaattttctttcttctttc

SEQ ID NO: 32415 - DNA, 247 bp, Glycine max
  Clone ID: PAT_MRT3847_129276C.1
gtagcactggatatggtgggggcaataacgcagtcaccagcggcttgaggataatatgcaccgaatgaaataaaatataaaattgtacaattaaataaacactgaaggaaaatcacccatataatggctttgaggtgttaaaaataaatcaaaagtacttacctttatgtggtcgtctctaatgagccatccttacgtacacatccattcgacgtcataattcttttataggcgcacctaaatacat

SEQ ID NO: 32416 - DNA, 515 bp, Glycine max
  Clone ID: PAT_MRT3847_129277C.1
cgaggatgatgttgaaaactactaggaaaaaaattccctaaatgttcaaatgtacattaaaatattttaaagtgtaatacatgttaatatctcagaaaagtgaatttctttaaaaagaagactgtactttactttaaactttaaaggaagaaaagcatgtctcctttgcattgtcaactacgcataacttaacgcctgtgctttttgatattacaaatttaaaatgcagccgtaggtagctcctttgagagtacgtacacacaaaagacatatgcaaatggtatggagaaaaaacataatcaaatctctaccgtttatagtatagcgttacaatgtccaaagcagacttaactagatatgcaactaattaacaaagatataaagcaatgtggtagctggtgagctttattgttttgtatttggtcatcacaaactcataggataaggtttgatgctggaattaaagattagttagacattggttcgaattaccgtaatgaataacatcactttgt

SEQ ID NO: 32417 - DNA, 114 bp, Glycine max
  Clone ID: PAT_MRT3847_129278C.1
atgccgtttgagcacgaggtcgagaaagggagtgctttcgcacttggacttctcactgtcaaggaatacactgtcccttggaagatgctctcagtattaacgacagaaatttaa

SEQ ID NO: 32418 - DNA, 104 bp, Glycine max
  Clone ID: PAT_MRT3847_129279C.1
taacacgccaaagctcagacgtaaacgggagactagagagctctttcattcatcacgaatatccttcaattctcattcatgtttccttgacttttcaagtttag

SEQ ID NO: 32419 - DNA, 268 bp, Glycine max
  unsure (1)..(268): unsure at all n locations
  Clone ID: PAT_MRT3847_12927C.1
gagattaatgatgaaggagaaaggtcacccttggttgggagaaatgaggaggaagaaggggtgaggagggagattggggaaagaggaattaagcttggacttggtgactttgttttctacagtgttcttgttgggagagcttctatgtatgatttggatgaccgtctatgcctacaccctccccattacagccggtcgnnccccccnctctngnnngnganncanncnnctcancnccccnccccnncggnggcccgtcctgcnnnna

SEQ ID NO: 32420 - DNA, 650 bp, Glycine max
  Clone ID: PAT_MRT3847_129280C.1
gaaaattctggtttgaaaggtaatctgcaacattctgaaagattctctaaaggggctttaaatggggtggaatcctcaccagatagggtcaatacttccctgaattttgaggagtctgagattcgtcatctccgcaggttgattagaaatggggaattggaagaaggttctaggtttcttgagtatatgactaacaaaggcaaaagtcctgatgtcattgcttgcactgctttaatccgtgagttttgcaagattggcaggactaagaatgcaagtcaaatcatggggattctggaggagtctggagctgttattgatgtaaccagttacaatgttttaattagtggttattgcaaatcaggggagatagaggaagccttgcgggttctggatcgcatgggtgtttctccaaatgctgctacatatgatgcagttttgtgtagtttgtgtgatagagggaaattgaagcaagccatgcaagtacttggcaggcagctgcaaagcaagtgttacccagatgtagttacatgcactgtattgattgatgccacttgtaaagaaagtggagttggtcaggcaatgaagctgttcaatgagatgagggataaaggctgcaaacctgatgtgggtacatataatgttcttataaa

SEQ ID NO: 32421 - DNA, 137 bp, Glycine max
  Clone ID: PAT_MRT3847_129281C.1
tacggaagctcgagttttcctcaatatcagatgtgaatcaatatcagggtgctcaatttcatgtcactcgtagttcacttctcgtgatgtccgaatctgagcgccaaatcgttatgacgttggtatatataagatat

SEQ ID NO: 32422 - DNA, 259 bp, Glycine max
  Clone ID: PAT_MRT3847_129282C.1
gaaactcatccagataaagactagacccaacaaacgacccgacatacaatactctaaatgaacctccgaacgatgcggccaaggctgtagtcacgggcctactgacaagccagcgtgagagtcatcctcaagagacatctagtagcaatgcttaaccccatgcttaaccattccttcaagcagaactgcattctgtacaggaacccttctcgaaccagtcctccaaccgcaatggccaacccctggtcctaacctggcc

SEQ ID NO: 32423 - DNA, 1670 bp, Glycine max
  Clone ID: PAT_MRT3847_129283C.1
gtacttcaaaagtcattattgatttccaatacatatgaacacagtagttactaatttacgttgagtcccaaggttcgctgcaacgtaattctaagagacatagactaatttgtctttttgtttggtatgtacagtataattactttaaaactttttaaattaataattattaatttatcgataaattactaactctctaaattaataaatttatctggtcctgacattattaatttatagagttttaactgtagttgtagcttaaacacttttgtcggcagctttgcctaaggaggtgaagttcaacctgataagcggcttcttcattggtacaggtgcaggaggcccacttaacaatggtgctgttagctcagcaggcttttgccaaaagaaaagagaccaaggggagggagaaaaaaaaaagaatagttagaaccacatcaattcttcatccaattgtatggtaaaataacactgaaatatcgataaatgataaacatgctactgtaatgtataggattgatccataaaagatctaagtaataacaaatgcatattcaggatgaaagggaacaagaaaacagaagcttaaaaatagaaagggctttattaaccataacaaatcaacgtatatttgtaatacacaaagtcacaaaccaatctatggatcgtacagaataacaggcatgcagccaaatacatttgtgctcttgtgaggtcgttacataatccaaatagaaagaaacttttaagccataactttattgggaatgtaaatataaatcacaaggtttggaaagcttatccttttaatgcttgtatcccctacagaagaaaataggacagagcactgcagtctcaaatctcaaccgttgaagcagaaatcctttagcacaatgtacgtatatgttttatttcaaaaatcactttggctagaaatgagcctttaactcttacttttcatttccaatttgtctatcaaggatcagcacttatccaattggcagtatattatcatcagctctttgaattcaatttctccaagaggatcttgttaaggagacctggatttgccttgcctttagataatttcattacctggccagcgaaaaaaccttgtagtttagttttgcctcctcgatattgctctacctgttttggattctccacaataactttgtccaccattttttcaatctcaacaggatctgctatctgaaccaagtcctttttttgtatgagttccttcacagttccacccttggctaatagctcaaatagtatctccttcccaatcttgccactaatggttccacctttaatggaagctatcaactcagacaactcttcaggtgtaagctttatctcatttatggtcaacttttcatttttcatgaaggcagcaatatcactcattatccagttggcaaccagctttgagtcagcaccttttgcaagagttgcatcaaaaaattctgcaatatttttatcattagccaggaaaagaacatcttgcatgcttaagcccatctgctcatatcttctccgcttaatttctggaagctctggtaaagaattttttataccatcaacatattcttgagaaaggattactgctggaaggtctggttctggaaaatatcgataatcagcaagcccttcctttttcc

SEQ ID NO: 32424 - DNA, 356 bp, Glycine max
  Clone ID: PAT_MRT3847_129284C.1
aaaaacaatgccctcggattagaggagtttttaaaattttggggttattacatacatgccgacagaaaggaacggccaaaattttccttgcctggtcaaccattaattttccaaaaaggaaaaaaaaaaaacctttttccttggggtgggggtatattggggcccctgaatatttggacccaaacttctaaaaataatcctttgggtactatttttttactactactttttttccttttttctaccaaaaaattggtgtttttttgaaaattgaagcccgtttttgggacacataggggggggtcagggtcccgggtcaacaacacgctgggcttaagttttattataaaagggaa

SEQ ID NO: 32425 - DNA, 500 bp, Glycine max
  unsure (1)..(500): unsure at all n locations
  Clone ID: PAT_MRT3847_129285C.1
nggaagcaaaagggttttttgaacattaatgacgcttttgccgacacaagtgaaaaatgccattgtgggttatccaccacaaacaaaaagaacaattgttgttatgccggaagataaaaccgaaccaaaggtgtattttttccggcctgtctactgcacggcctaggggatcttttttaatccatacccgttgggcaccctttggtctttcgaacggtttaaggaaaaaaatgaccttggttaaaacccaccaaatttggttgaggtttttgccccccggcaacgaaaaaaaaaaaaaaaagcaaatgcccttcggcggaaaaccttggcacctccggcccattattggccttttatcttccccttaacatccaaggaaaggtttttggaggatggaaatttcccaatgagacttcttttgcttcaataactactgcttaaccgcttatgtgatgttatttgattgctttggaactgtgtggcaggatttttttttggaa

SEQ ID NO: 32426 - DNA, 489 bp, Glycine max
  Clone ID: PAT_MRT3847_129286C.1
tctcatttcacttctctctccaccaatgacttactttaattgacttcagaaatgggctttctccggcgacttttcggcgccaaaaaaccctccgattgcaaatccggcaagaaaagatggaccttcctcaaacacaccgtcagaaacaagtcactcccgccgccaccgataccccccgcactcaacactcactttgattcctcaactcccttggatgccaacaagcatgcaatcgccgtcgccgccgccaccgccgcagtagcagaagctgctctcgccgccgcccacgccgctgccgaggtagtcagactcacaagcggcggcgtcgccgccacaagtaccagctccagaaccgctgtcacggcggcgcgtgttggcaaccttgagaccgccgccgttaggatacaatcggcgttccgtggttacttggcaaggagggcattgagagcgcttaaagcattggtgaagttgcaagcattggttaggggc

SEQ ID NO: 32427 - DNA, 399 bp, Glycine max
  Clone ID: PAT_MRT3847_129287C.1
acggctgcgagaagacgacagaaggggaagagaagaagaaattaaatttaaactctgactaccttcttctccgttttctcggcccccattcattctcactgatatttcctctgtactaaagactaaagaaagacgaaacaatctctgtctctgtgtgcgtgcgtgcgtgttttcctctatctgtctgatagatagaataatatcccaaaccatcgaaaggaagcaacgaagaaaaaaaaaataaatgaaaagcgtagagaaccaaatactgctcccttttgtttgcatatccatgtgagagttctgacacattctcttcccctctcgctgcgtggcttgttcgccttggtggtttctactgagtcacaaaatcggtgagtgagcgagtgaactcaatgg

SEQ ID NO: 32428 - DNA, 802 bp, Glycine max
  Clone ID: PAT_MRT3847_129288C.1
cccacgcgtccgtacggctgcgagaagacgacagaaggggtttctagcaatcctctttttgtcaatagtgttgctaaaggtgtttagtttctgtaaatgcttttatgaccataattttttcattaaggttatcgaacttcatgcttgatagtatatgatctaaacaactttctcagtgacgattgtttcttgactcatgtcatgagttatgctggttccaagtttatgtgtaatcaatacttgggaatgcatttaacttatagtagttgagaatatttaaactgtgttaatgtggcatgaccatatcagaatatattgattttcatatttttcatactactgtctattctatgtgatccatcaaatacgttgattatacattctaacagcatatcctaaaacgaatttagtgattgatatgcctttttatgaaaactgacaaaggcatagatgatggcacttaagttttctttatccttgggtttaagtatgtaatacatttccatcggatacaatttttgtagtatggggacaattatcttgatcattaattatttttaaccagcatatgatcagctatcattgctccaatgttttaacaggtaaagtcatacccgcgtcgtgcctacagtattaacgattgctcatcaaccttcaatgaagtaggccttagcaaaaacaatgaagctttgtttctggagttgatttagtttcatctattttccttgaagtatcttgatcttttttatttttctgactttgtagtatcttgatatgtacaatatatagatttggccccccc

SEQ ID NO: 32429 - DNA, 383 bp, Glycine max
  Clone ID: PAT_MRT3847_129289C.1
cttttggatccctaatgtttctaaaatccgaaatcctaattccgttgggggaaaaaaattgttgggggggaagggagtttggttggaaaaggcaggggtcctgttttcggaatcgattggggaccgacgtacttttgcgtcggcggggggcaccacgaccgggtggaaatcatagccaacgatcagggtaccagaactaccccatcctacggggttttaaccgccccaaaccggttgatcggcgatgcggcgaaaaaccaggtccgtttgaacccaaccaacaccggttttgatgctaaccgttggatgggaaggcgtttttccgatgcataagtccagggggccatgaaatgtgggccgtccaaggggattccgggccctgt

SEQ ID NO: 32430 - DNA, 461 bp, Glycine max
  Clone ID: PAT_MRT3847_12928C.1
gttctcttccatgtaggctagcattgaagcatccattgtacctatggatgtgtttatctctgacctcttcattattgctactggtaacgtcacccattgtgaccaattacccacttgtgatctgttttgcaagtggtataaggtttatataactatcacttgcatcgtaggttcaaactctgataggttaggggcatgacatatgccttagtgaggaggcatacagtggtgtttgtacttacaaatagcttacaattaaactgaactgatgagaatcaaacctaaggccactttactgatactatatggtcctacaaattgagccaaccctcattcgccttattaactctttaatgttgagtaattcacatcactcctaaaagaacaaaatagatagctgaacacatcaaagaatttgtttaatatatatctcaactgggactcacattcagtgacatgaa

SEQ ID NO: 32431 - DNA, 1163 bp, Glycine max
  unsure (1)..(1163): unsure at all n locations
  Clone ID: PAT_MRT3847_129290C.1
acggctgcgaaagacgacagaaagggggatccagaaacgttgaaaacggaacaaacagggaatataagattttcattgggtgctgatcggaacaaacagggaatagaagagaggagaagatgggtttcataatggaatttgcggagaacttggtattaaagttgatggaagatccgaaggaaagggatcggaggttcagggagcacgtttatagagtgaaggacaggtgcgagaagacgaaggagatgtggagctaccctatgcgaccctatgggttttggacattcgaacgccacaattctcagcttgcttgggatgcacagattagccaagtggccgggaggagggacccttatgatgatctcctccaacatttctctaccccacctaagtgagtgttgctgaacttgccacaagcattatcggtgaaaaggatgaatttgtcgtaatttccccttgtaatatcctgtcttgttgcatgttgcagagattacaactggattgtgctgttatttcaaaaataaaggttccatataactatgctgttacagaagaattttttcctctccagaatttacattcttgcacaactgcacttcctggcaattattctgctttatcaatgtttcatgtcattatttagtatttacattgtttgtggatgattcatttctgtcgtgttgtatcctgtagaatgccatatttagaacctttaaatgtgttgaatagttcactgttagtttttcatagaatgcggataggtaggcagccttaaggtttgctacggaagtagatagtctatcattgtggtgacaatgttacactgtgtttgtttaaggggaatcctactttccaaagcacgttgaacggggaaccttctcactgtggattcacgttcaatgtgaaacaaacacagctttagtgttggatctttccattaatgtagtgcattgaattttgacacccatcctgtaaatttttattttaaccacaagtctatatgttgaacttctatttcctccaacttccgaanctttctttgtttcaccaagttgaccttgaaagnnatncctgtccaccaacttgtggtatcaacagtccggttcacagtggcagcacaagctnnnnnnccaatgtctgtcccttgtattgttatacatgcc

SEQ ID NO: 32432 - DNA, 713 bp, Glycine max
  Clone ID: PAT_MRT3847_129291C.1
cccacgcgtccgcccacgcgtccgttttcattgggtgctgatcggaacaacagggaatataagagagaaaaagatgggtttcataatggaattcgcggagaacttggtattgaagttgatggaggatccgaaggaaagggatcggaggttccgggagcacgtttatagagtgaaggacaggtgcgagaagacgaaggagatgtggagctaccctatgcgaccctatgggttttggactttcgaacgccacaattctcagcttgcttgggatgcacagattagccaagtggctgggaggagggacccttatgatgatatcctccaacatttctctaccccacctaagtgagtgttgctgaacttgccacaaacattgtaggtgaaaaaggatatgaacttggcgtaatttccccttgtaatatcctgtcttgttgcatgttgcatgttgcggagatcacaactggattgtactgttatttcaaaaataaaggttccatataactattctatcactattttgttgcattgttgctgttagagaagaattttttcctctccagaattcacattcttgcacaattgcacttcctggaaattattctgttttatcaatgtttcatctcattatttagtatttacatggtttgtgcctttgtggatgattaatttctgtcgtgttatagcttgtagaatgccatatttagaaccaaaaa

SEQ ID NO: 32433 - DNA, 448 bp, Glycine max
  Clone ID: PAT_MRT3847_129292C.1
ccccaaccacttgcccaggtgcatcatattccccagccccatctgacccccatttctttgtcccacctcactcactcaatcatccctggccaccctgccacctttctcgctagccatcccatccacatcattcccgcctcagccatccatcctgggcccttcacctttcaccctgtcccacatgctgccctctaccccaccctacttgctccacggcctgctgcagcagctgccactgcacttcaccttcacccactacttcaccccatcttctcaggtcaggacctgcaacatccccccagccatggcacgtgagttgggggatgggatcctaggtagggccaggggaggagacccataaatgttcccttgggggtgttgagccattaataccagcaagtagaagctgggatgggcagtgtctgacagccaaagaattgagttttgg

SEQ ID NO: 32434 - DNA, 343 bp, Glycine max
  Clone ID: PAT_MRT3847_129293C.1
tttccgccggcgacgccacccctccggcgaagacctcaatccctgcaaaggcttattgtctagcctgtaaccaatctcaccggtgcgattgcccaggagcttgctaccctaccagccttctcctcaattctaatgttgggccatctgcatgcttatgatacggtgtgaacccatcggcaaaatgacaccggtcagtactaatctcaatagtgttatacgcgaaggactatgagtacatttcatctccctgaggaaagtgaaaggcaatcaatggctagctacatgcacagggttactccgacgcggctttatgaacgtggatttgaaatcaatgtaataatgg

SEQ ID NO: 32435 - DNA, 523 bp, Glycine max
  Clone ID: PAT_MRT3847_129294C.1
gttattggtatcgtaactggctgggtggctcatcattaacttttggctggtgtgcatgtgtgtaatgaggtgctttgattagcttctacatgtgtgtttcaccgtttcctgagttgattcaaaggggaagctttagtgtttatcactaggtggtgacttttgatgctaaatgtaaaaatgtctctctagttgagttatgctatgacagctatgcagttgagttggtgcatataagagtgggcagctagttaaacatgttattcgtatttgattactgattgttcactggattgagatatctttatttatattctgtcaactatagtactgtattgtgcatgcttcatgatcatacctctagattggaatggttaatacatccaccaattcctacattattattcttgatgttgagatttctctacgaaacagtggttggaatattcttaggactggaggggacttcttcaaaacaaaacttattaaatgctatgatgtatctgagattgtttgctaatgtctt

SEQ ID NO: 32436 - DNA, 328 bp, Glycine max
  unsure (1)..(328): unsure at all n locations
  Clone ID: PAT_MRT3847_129295C.1
ccaaattacggggggggcccacnctttcgcccactcgttcgtacggcttgtagaagacgacatgatggtacggctgcgagaagacggaggggggtcttctgtgagaagacctccagaagggtacctctgctccaaaaccacaaaagggtactgctgctagaagactacataaaggtaccgttgctagaagactacagatgggtgcacccataatttttatcactagaagtgtcggatgcattattatttctaactaattattgcgcttaatattaatggtgaaaaagaaaagatttggcaaatttataaaattctttgagtttaacac

SEQ ID NO: 32437 - DNA, 593 bp, Glycine max
  Clone ID: PAT_MRT3847_129296C.1
gttctccatttctctcgtctttctagttcttcagaggatagagtgaacacaaactcatccagagatacatcttgatgatcaccgtcgatgctcagatctctccactccgcacgccacccgcggcacatctcatctcttgcgccgggagtacgcctcagaaccggagcctgagcgcaatatagccgctctacggcgccgccggagtgatccgtcatcctctctcacttcacgtgaagctcaatcccctcgtgtcgagtctctcgctttactatatctgacgcaactcccggagtcgccgcccatatcaaccacataagcaccagatatgatgtatggccataccaaggtgatgaagagcttggacaagctttgcagagtgtcaatggtgctataattccagctggtgaggacagactgcctgtaatgactcaagatgatagttttagcatctatggtggcagtgataggacgctgcgtactgctagtgctaattattgcccccatgcccgtgttaacatggtattgctatccggagaactccactgttcctattgctgctgaagcgttcactaaggcaagaacttatgatgaga

SEQ ID NO: 32438 - DNA, 1228 bp, Glycine max
  Clone ID: PAT_MRT3847_129297C.1
tggatcctctagagcggccgcttttttttttttttttttttttttttttttgggggggaagcacacatcatttgtagttactggaaaccctttctagggatcaataccaaaaggcacactttcctgttaacaatcattgcacacctctcgctcaaatccttcccactgaaatccaattgtcataatggattaacttaaatctaccaatacaatacaagatcatatcaatgtcaaacatcagtgtcagctccctgtgacttttttagctttgctacaagaacccacatgttggcaagctcattttccaggtatgcttctctttgctttgattcttcaattctcctttgaagctcggcttctttatgatccctatctaaaagagcagattcgtatgaaagttccctttctttactcgaggcgagttctctcttgatatcagagtttgacccaccctgatgatcatttcgtctaacatgactttctcttcgtgcatttcggactgttccagttccactatttctaagttgagcgggagaattctttggtgctgccagctcagctgataatctctcattctggttcatgagtttggcaacttcttctgacaatgccttaagctccactgcagcagctgaagctagccctttagcatatgaactctcttctgccagtttctgattcaaaagttctagctgttcttttgattctgttagttccgccaacttttgattcatcccttctatctcgcctgcctaattgtagggaacaataggcataatagctgctcttgcaaaagaatcttttcattggtattggttatcatggcactttccttgtcatggtgaggttcaccatggtagtctttggttacagagaaaggttgaggacttaagtttctcaactctaatgcatctgccagctgatgtttcagagagccaattgtttcttgaaggctttcacattcatggatcttctgactaagctgttgttgaattatatggttatctgctgttttgacctccagttcaaaggatttttcatttaactgtgtcatcagttcggtgagactaagtgatactcctgatttatccaacttatttttggcaatgaaagaatcagcaattttcctttccagcaaatctatttgctctttcttagacttaatttcatctttcaacctttccatctccacatgaatctgatacttctgaggatttcttgcagcttc

SEQ ID NO: 32439 - DNA, 199 bp, Glycine max
  Clone ID: PAT_MRT3847_129298C.1
cccacgcgtccgcttatttctctatttaaatttcaaaaccctgtccatttcaacaggtatgacaaattatcaaacgcggcctgatcttacttatctctctgacatgtgcagtcatctgcgtcagcaaaagtactcaaccattttttctcaaaacaatgatgctgtaccagcatcgctgaccgaaccaccaccgttaatg

SEQ ID NO: 32440 - DNA, 1226 bp, Glycine max
  Clone ID: PAT_MRT3847_129299C.1
aattcggctcgagctcgagccgaaaatccaggtaagcctcaggttcttatggtttactcaaatttggctcaggcttttgttaaccctcatacagcagaagttagtgagcagcttggacaacgtatatggggaatattacaaaagcaaatatttaaagcaaaggattatcccaggggtgatggagtccagttatccaatcttgaatctctgttggaaaaaagtttgaaactagcttcaaaaccattcaaaagacagaagtctgcatctaacctttcaaagcaatcagctgcctggaaccgacaaaaaatgatttcttcccttgcccaaacttcgaccttctggattttgaaaattattgattcaagaaattttgcagagtctgaactggagaggattgttctaattttccgtgaagtattggtggggtattttgacaagaagtctcaaatcaaatctggatttttgaaagaaataattcgaagacgaccatggattggacatgctatatttggctttattttagagagatgtggaagtgccaagtcagactttcgacgagtggaagcacttgaattggtaatggaaatattgaagtcactgtcaacagggaatagtgatgaacagaatgcatcgaaaaagattcttaagaacagtttggataaactttctcatctgttgaaagaattagtgactaatatgccaagtaaaccagcaaggcggacagaggtacagaagttttgtgttaaggccttggagattttgtctaagcttaacctcaccaagaattttgtgaaaactttggcacctgatactcaagctgcccttgaggcgcaacttggtgagcaattcattagtttgaagaagctggaaaaataaactacacaatttaaaatttgctgctacagcctgactaaagaagtttttgctgtatcacattgcttgcacactcgacagaacaaaacaagttggaaaatacagtgaaaaccagaaaagcaatcccccatgatactttaaatttattctgcttgcagtatgctgaaaacagtgctccgaacatccttgaggtgtttgcagtaagaatttttggtaaaacttcaagttattagttcttatttgtcttttggatatgctttgtttttgtaagctctattattgttacacatgatggattttgagttggtaaaaagggattaacttttatgttgcttaaaaaaaaaaataattta

SEQ ID NO: 32441 - DNA, 174 bp, Glycine max
  Clone ID: PAT_MRT3847_12929C.1
ctcgtgccgatcgattattgttataatactcgtactaaggcttgcccaagagagaagagccggtcataagacatgattctaagagacgcttcctacgtacgtcgagttgatcagagcataactaagaaactgggctcagagccgctatcagggacgctgaatgtcgcgaggatc

SEQ ID NO: 32442 - DNA, 354 bp, Glycine max
  Clone ID: PAT_MRT3847_1292C.1
gagagtgagtttgataattatggttttcccatgttgtcttgtgacatctcttgggtaggtgtccatcgttgcccaataatatatttttgttattatttgagctacatctggactccacaacgcaaaacctcagccctttgcctttgttccttcaacaaaatttttctttattacttgtgctattaaaatttagaattcctattatcgtggtagaatacctgttatttttcttaccagacatagtcaggtgtctgctttgtttggagtttggtagagaccgttacatgtctgggacataaaataccaagagtgagtctgataaatatgggtttcccatgttttatgataaaatct

SEQ ID NO: 32443 - DNA, 221 bp, Glycine max
  Clone ID: PAT_MRT3847_129300C.1
cgttcgcgtgggcggacgcgtgggcggacgcgtggggggagagaaagaaaagacgagagttgtggtgaggtttgtggggaggagaagtttctctctcaaggaatggggtggtggagaatgtaggagatatcattctggcgatggatgagagaacacaatgactccgcaaaacccgcgcgggataagctcccatgattcactgtgtttgacgagagaaagga

SEQ ID NO: 32444 - DNA, 219 bp, Glycine max
  Clone ID: PAT_MRT3847_129301C.1
gaaatatggacagaagatggctatggggaatccatgccctactgcatactacagatgcactatgggcgtaggttgtcctattggtaaaccagatcaaccgggtgctgatgatagaacaatcttggtgacaacatatgaaggcgcacataaccatccactgccgccagctggagtggtagatgccgtggacatcccatcaagagggtgcggttggatatg

SEQ ID NO: 32445 - DNA, 267 bp, Glycine max
  Clone ID: PAT_MRT3847_129302C.1
agagaggaataaacgacaacaatgacaatatgtaaaacaaaaagttctggcagcaaatcaaaatgtcaagatcccgatctgattctcatagatcgctgagcgaaaaaatgaaaaatttaaaaatgacctttcagcaaaagtggtttcattcggttataccctagtcaattaatgcggtaattaacttatggtatgatcctatcattctatggcaagggtgttcttctggaatcccatcaaagatctaatgcgtgtttaccaccctac

SEQ ID NO: 32446 - DNA, 759 bp, Glycine max
  unsure (1)..(759): unsure at all n locations
  Clone ID: PAT_MRT3847_129303C.1
ctgtcactgttttccaattttttgcatgtgagatatatcaaaccccaacaatttatttgggagtacaaatcccctaatttatgtctactcaaccattcaacagaaattccattaaggagtggaaatttatttcctttatctttttntgctgttgtataattgttattttttgaactatttaaacaatccttttttatgggatatatatttatttcacatagatttacttctggtttttccagtataatacttctgatctattttctacatttccccactcatcagataaggattgactcagtgaaccgtcccaatttttttctaaattcttgaattcccattcaattctgggaggtgtttaaatggaggttcctattcttttttggtgccccctgcattattgaccattggattcgacatcgagattaatctaacaatcaataatacttccacccagtctgaagttgctacaacaataatagacttccacaaaattctccttaatgatactgtaatatatatagagcataacttgcatgcatagttgttgggttttatatggatctctacagtgagtttgtatagatctagaggtaaatctaatggtgtgaaatgtgaataggtttgagattttgtttctctgaatttgtgtaacataatccatactgttctgttaaatgcttaatatttcttgtttgtaatcattgtttcatgctgcaggtcgactctagaggatccccgggtacagagctcgaattc

SEQ ID NO: 32447 - DNA, 264 bp, Glycine max
  Clone ID: PAT_MRT3847_129304C.1
ttcaggctaaaaaagggttggggttggggtttggccttaaaccccgaccgccacaaccgtaattgtttaaatcctggaacggggtctttttggctttctggccttttaattaggtttggttaatggatccatggccaaaaatgccttccagtaacttgtttttgaaggaaccaattaggatgtgctccatccttgagccatccaagcctagttttttttttgcaatgacaaaaattgttggtaccctgggacctaaatttaaat

SEQ ID NO: 32448 - DNA, 433 bp, Glycine max
  unsure (1)..(433): unsure at all n locations
  Clone ID: PAT_MRT3847_129305C.1
tacggcgcgagaagacgacagaaggggtgttaagattcatgcatgcttcagacctaaaagagaggataggattgggagataaaatagaactgaaaataggatatgtatccatagtgagaaaaggtgtgtgcaaagtgattgtttcaatcttctatataggctaacaaactagcttagcttctacccatcttttaacaaatttctaatcaattagatctctaataggtcccccaaacgggaaggggaacaatacaagtgtataggaaatcaaggtgaatatgtaataaaaaaattgtcaaaaatacttcgcctaagacgaatacaataacaaatcaaaagtcaacgggcaaaaaagtttaaccattaagttgaagccacaactcaaggcttaactacttaaccaaaactaaaactaataggcttaaacccanna

SEQ ID NO: 32449 - DNA, 945 bp, Glycine max
  Clone ID: PAT_MRT3847_129306C.1
tttgcgaagagtaagtcttaccctttgtattgaagttgccatcttttttagcttctcaactctgtaactgataccaaaattttctcacttctgcctccgtcacattctatgcagaccctccgaaccaaacctgagagaaagggtaaacaatctggaggtgatacttctttgtctgaagtgatactgtttggacaatttcctagtatttcactttactgtgtcattcatttctactccttcatttcattcagcaaacacagtaatggctcaacaggaagaagggtggcctttgggattgagattcttgaactcgagaattgagctgatgagaaatggttccgggtcagcctccttcagcactgtgctcactgcttctcacaccccttcgactgattcttcctcagatcttgacaccgagtctactggatcattcttccatgacgacagcattacacttggcagcctcattggtatctctagcttctttgaactctcaaggagatcaaccaggggaagaatgatggaaccctccaaggacaacaaaaggattcacaagctgaagccttggttgttttcactttgttcaaggctaagtactgatgcagtgattgggaatgatgcaccctctcttggccactaccttgaagctgagtcactaccttcaagctgagagaagaggtgcaagtacttacagaaggaaccaatttcctaccacttatggacccaatggtttctcccctattcaagactcaacctcactattagtggggagccaaattgatcctaacagagaaatggaagagtgatgaataaggaacatcaatagttttctcttgtttgtgtggatggataattcaacatgtgatgagcccttgttattgatttatatatcattcagaggtaatggagttctttatctgtttccggagattctcctgtttggta

SEQ ID NO: 32450 - DNA, 280 bp, Glycine max
  unsure (1)..(280): unsure at all n locations
  Clone ID: PAT_MRT3847_129307C.1
ccgccgaagaccgggcggaactacgggttgacccaaaaattcgggacgcgggggcgcgagcacagagaggggaacctcaaaaccggaaacaaaaggcaccgcaacccagaggaaagaaggcaaccaaaacaccagccaccncacaggggggcgaaccccggaagggaaagaaaaccaccgccccgggccggccacagaccnacgagaagcgaaagaccccagccacgcggcaagacacccgccgaacacccancccaggngacacaggaccccgcgccag

SEQ ID NO: 32451 - DNA, 341 bp, Glycine max
  Clone ID: PAT_MRT3847_129308C.1
ccttcacatgggccgggttaaattacaaatcattagcgcttaaacaagacactgccaaatccacagccctccttataggatggaattatcagaaccccaggaagggccacacaataaagctacaaacaagcaccttggggcggctaacgtcacgaaaccccctaactcaggacaaacatgaaagcaccagataaggccacaataacacagaagttatcatggtaataaacatacacggctcaaaactggatgtatacaaacctgataaagagcccttacaacaatccacaagtcatgagcccaaaacctccaaaactaaccttcagcagccccttgccttt

SEQ ID NO: 32452 - DNA, 433 bp, Glycine max
  Clone ID: PAT_MRT3847_129309C.1
cgtagtgcgagcataaagagccacgtcaccaataccatccatgtggccgaagaccaattccaacctgcggaggtcaacacagatctatatagcgggctgattaacatctaatgaaagtatctactatctcccggcagcaccatcacgttcattcatatcatacatgaccgtacgttcaacaacaaggaaaagaagccctccggcgtctagcttgctgcacagcgccagtcgcaactcgaccgagtctcggagattagtgcgtgccacatccagctctctcacaacgtcctagactgcagacgatggaacgtctaacgcaacctgacatctacacaaaacatggactagcttgagaagaacgtgaccacttacttgatgcctcccatgcaagcacatatcatggcggacatacatcatacgcagctccagatgg

SEQ ID NO: 32453 - DNA, 163 bp, Glycine max
  Clone ID: PAT_MRT3847_12930C.1
ggctcgagcctccagagattggacagctgaacattttggctaatctacgtatttcacggaataagctgctcgggttcattcctacataaattggaatgctgacaaatcgtaaggatattgatttggcaagggacgttacatctggtgctttccctgaaacaat

SEQ ID NO: 32454 - DNA, 396 bp, Glycine max
  Clone ID: PAT_MRT3847_129310C.1
cggactcgtgtttttgaatacaagctcgctctaaccatggagcattaattgtggtgcaaacgctaattcctaactagtcattaaagccgacgcacgagttcaggaaccaaaaggtagatgaaaccgcgaggggggccccaagaccctccggtgaggaacagattagctcggaggacatgaaacaggtttatactgaactacccggagcagtaagtttgctggctctagcaaggactgctgatggcagtcgggcaccaaattgtagatcatgcaggaccttagctactagggatccatcgtttaaggattcgaccggtgagcttaaacaagcgggtgcactcaacgatgtgagaacatgtcctctgaaggtggagaaggatcttaacttatatgtgc

SEQ ID NO: 32455 - DNA, 1210 bp, Glycine max
  Clone ID: PAT_MRT3847_129311C.1
ggctcgagatgtccttattttatgtttactgaataattggagagtagatagattgatgatttgagcgtgcatgggtgagatgataagcacgcaacgcaattaaaaagaattaatatgcaacgaatggatgtgtttgaagctggcctcatatatcaataatggatttgatctgattctggctcaacgttcatgacgatcaccacccactactccattccgggaagctctgggtatctggacatatacccagagaggaaagtctctgcctttcaaaacccttacattatgggcttcactgctgtcgctagcattggtggattgctctttggctacgacactggtgttatatctggagcccttctctatatcaaagatgattttccggaggtcaggcacagtaattttctccaggaaacaattgtcagcatggcagtggctggtgcaattgttggggcagcagcaggtggttggattaatgacgtttatgggagaaagaaggcaaccctcattgcagatgttatctttactctgggagcacttgtaatggctgtttccccagatccttatattctcataatgggccgtgttttggttggtttgggtgtgggtatagcttctgttactgctcctgtgtatattgcagaatcatcaccatcagaaataaggggagcattagtaggcataaatgtgcttatgataactggtggacaatttctttcctatctcataaatcttgctttcacacaggttcctgggacgtggcggtggatgttgggagtttccattgtgcctgcataagttcaatttttccttatgcttttacttcctataacccccgcctgcctcttaataagtagaattcagttgcttccaagtgggcgtgcatgtgttcattgttccacctgtgatttgaacttcatcactcctccttttgctccaatttcacatgattagtgtttctttttattgcccacatccattttctaatagaatcaacaattcaacacttcaagtcgtgaacatctctaaccccctcaatataaagatttaagaaaaagaaaataggcaaagcagagttcattatgaggagaaatgttatcatcttcctgtttcaaagttgagggtattatttcaatgattacccatattcttaatcaagcaggttcctgggacgtggcggtggatgttgggagtttcaggtgtgcctgca

SEQ ID NO: 32456 - DNA, 242 bp, Glycine max
  Clone ID: PAT_MRT3847_129312C.1
actagtttttgatccacagccgccgctaggagtcaagcctctgtccgtatctgctcgaggcatttcgtgaagctgacctgcctagctcgcttcccacatgttctaccatagagtcgtacgatcatgtatataaggtagtcgaaggatcattctgcggcggtgcatgtgctgcgtcacggtccaatattatcaccagcttctcaagaagattctgctcgactcatatgtcgtatgcggttgca

SEQ ID NO: 32457 - DNA, 1709 bp, Glycine max
  unsure (1)..(1709): unsure at all n locations
  Clone ID: PAT_MRT3847_129313C.1
aggaaggtccaccgaagctaaaggtgcttccacacgcagcagattttacctccataaacccttcgttcttcttcgtctccctttgcttctctcacttcccatgtctgagtggcttcgacgccttccctcgccagaatgctaactcatctccgccgcgcggctgccgcatgcggtggtgctacctccgaccacttcctcgctctcaggcagttcagctccgccgtggtcgccgtttcctccgtgtctgattccgatccaacacttccctcttcttccgattcacagagaaaagcatctagatggttgctatttctacctggggcaatcacatttggccttgggacttggcagattggtagaagagaagaaaagattaaaatgttggaatatcgagagaagaggttgcaaatggaaccattaaaattcagtagtgcttattcatcagatgaggaattagattctctggaatttaggaaggtggtgtgcaaaggatattttgatgataaaaaatcagtctatgtgggaccacgttcaagaagtatttcaggagtcactgaaaatggctactatattataacacctcttatgccagttcccaattgtcctgacagtgtaagcattccaattttagtcaacagagggtgggttccacgtagttggaaagacaaatttttagaggcttcacaagatgaagatttggaagatgctcttccttccccttctcacgttgatggaagtaaatcttggtggagattttggtctaaaaagcctgttattgaggatcaggttgcatctgttacacctatagaagttgttggcgtagttcgtggaagtgagaagccaagcatatttgtcccggcgaatgaccctgggtcttcccagtggttctatgttgatgttcctggcatagctcgtgcttgtggccttccagaaaataccatctattttgaagatactaacgaaaatgtgaatccaagtaatccttaccctgtgcccaaggatgtgaataccttgattcgaagttcagtcatgcctagggaccacctaaactatacattgacatggtattctctttctgcagcagttacatttatggcttttaagagacttagacagaaaaataagcggagatggcaaagtcggagatagcaaagtcattttgttgcctgttatagttgaaatttatggacacatactccctcatttggcatcttgatacatctatcctatctccttggagcattgtcttcccaatcttttcttcaaatctcagctttcgagcaactttagtcattcgagtgaagtcctccttgcaagttatcctcacctcaaaaacacttataaaatgaatgtggggtgatattttttgtgcaacaaaaccatgtttagaattttgatgtcaaggggatgaaaatgccattttttttgtctaaaaggtcatttttttgttgaaaaagcaactagtgttattagttatatttggattgtttgtaaggttcagaagttgtgacttgtgagtatactccaaatcttattgactcatggttattggttccactaggtcccgttcagagtggttgtgagtttcccgttttcaattgtgaaatgtaattttaaaaacaaaatgtgtttgaataaaatggggctgagttgattttgtgtttaaaacaacgaaaaaaaaaaaaaaaaaaaaaaaaaaacaannnnnn

SEQ ID NO: 32458 - DNA, 439 bp, Glycine max
  unsure (1)..(439): unsure at all n locations
  Clone ID: PAT_MRT3847_129314C.1
aagtcgccctcgccacgccgtcacgtnacagactncgcgcaaattgcgcgccttcgcagtgtcantttncttgncgnaacancncccgnnnatagccncacctgcgngcnanaaccaacacattttttttaatncttncttcttntctcatctcatttcgtgagnagcatgcagcagcaggnagcagcancnaatngttngngggngcatcctttncagccnacnctncaggtnggtgttcgnncgccncggtaaagcagactgngtggggcnggctngagnccngncaggaaacggcncgtgcgngccggaaagcaangnacgggcaggggggcaaagnctgcntggaaaccgggtttcgttgggcagcagccaagggtngtcnggcaggtgttngacttgnccaggtggggggaaacaacgttggcanttgnnttta

SEQ ID NO: 32459 - DNA, 249 bp, Glycine max
  Clone ID: PAT_MRT3847_129315C.1
agaaacttagaggagggaagctttatatgcctgattgtttctatttaatggggactgtagatcccactggacacttaaaaaagaatcaagtttgtattattcatgagaatagccaaattgttggggatgttctggtttatagaaatcctggtttacatttcggagacattcacaaaatggatgccacatatgtgaaggagttagagtcatatgttggacatagcaagtatggaatttttttcccacgtg

SEQ ID NO: 32460 - DNA, 202 bp, Glycine max
  Clone ID: PAT_MRT3847_129316C.1
ggagaaggaggggacagccctccaaaaaaagagagagagggcccgcacggaacacgcgctcgggacgggaatcgccgaggcacaacatcatggggggccggcaaggagaagggcgcacaccttatccaggtaaacgacacataaagggtggagtgagcacccaatcggaagtgctagtggtgaggccacagaagggcaaagg

SEQ ID NO: 32461 - DNA, 1262 bp, Glycine max
  Clone ID: PAT_MRT3847_129317C.1
aggccagaggcctctcctatgaaaattcactctgttcatgcttctcacattcttgcattataaatcgtgcgttcaggtcgggggggctggtcagattcaccaaggggatttggtggaaactctccatctcgacatatgacttcaatcttgtctaatgaagcaggtgtgaactctgaggaagacaacccgactgcaaatggtggtatttcagctgatgattgtgttgacggtaccattgagcaggaatgtgatgagatagctgattctccttccagtgagaaatctgaaatggaatacatcaatcaaataacaacaaaattggagaatttgttggttaaacccacgcgtccggagaggagttagatgaactaaagaggaaacacaaactagctgtctcagatcttttgatggaaattcctccagaaatgtgccagaaggtcctaaatatatgcaacctgcagatgcctgacagtgaaatggccaggcttgcccttcattaatctaaatgccactttgtgtggtttatggtagtagttcacttagaaagctcattttaggagtgaaatttagaagttgtgatcttgcttgttgcttggaactgttgatattttgggtttcataattcatgcataagagggtaaatttttaatggcacaagtgttcttggtataatatatgttgtcaagaggaattgcagctgggttaactagggactgggaattggggactggggagtcatctttgcaggagaaatctcgttacggcataacgtcccaagagcttggaggacttaatgctattatggcatttacctaaaaaacatggagttgaaacgagaaattagctttgagaggtctcaaggatggattatatgaatatcatttctcatatgtaaatagtatgatacaattcattaaactataggaaatatacacttgacgatatatttagctgtcgttcagtgaagttgtgatcttgcttgttgctcggaacttgtgcactgttgatattttgggtttcataattcatgcatgagagggtaattttttaatggcacgaggttcttggtatatatgttgtcaagaggaattgcaggtgggttaactgagaactggggagtcatagtcatctttgtaggagaaatctcattgagggacgacttaacgtcctaagaacttggaggacttaatgctatttctgcatttacccaaaaaacatggggttgaaatgagaaattagctttgagaggtcgcaagactgga

SEQ ID NO: 32462 - DNA, 459 bp, Glycine max
  Clone ID: PAT_MRT3847_129318C.1
tctaaattgaagagtaataaggctggaaacataagcagctgttgagaacctttactgccttttatacatagcaaaaaactgtgacccatcaatgtcagaatctatctcaaatgtaaatgactttacgtcttgaaatccaatttcatccagttccttttctaagctatatcaacatagccaactataaaactaatgcgcctgtcaattaattcttggtgtaatatgtaaatgatcggtgtcagaaattttcactgatcagtctcatccgtgtaagaattcagaattcctcttccaactcgtcccggaatgggtgttatggcaaaaagcaagaagaaaacaaaaggaggaatttgtcctatagaaattttatcatgataaaacttgtaacaccctttataagtttcagaagcttattcagacatttatagaatttatgaacaacctttctgaatgtctgct

SEQ ID NO: 32463 - DNA, 628 bp, Glycine max
  Clone ID: PAT_MRT3847_129319C.1
gggaaggagaccttctaagggtaattttcgaggccgtggtggtaaaactcgaggtgttgatcgcagtggaggatatgttagaggtaaccggaaagggtatgataacagaggcaatcaaactcaagcaccaaagagtattgtacgagggagaggaccccggaggtacgagcctactagtaagaacaatgattcagcatccctggtgcaaaataaacaatctgggaagcagccagagaaaacatcacatgctagttcgggaaaaacttttgctcctgtctctaattcagagcctgatcctgtgcctgctaagaaacaagtgtttgcatcaagtttgaattatgcatctccccccttttacccttcgagttcttccaacaaagatttaagtgtggcaccaaaaggggatgttcaaacgtgtggtacaggcaggaatgtttgctctggtgttgtgaatgatggttttttggttcaacagaacagtgcacttcttcggggaaagaatgtcgttgatcatgttagcatggagaagctgtatattgatgggcctggcgcaccatctgctggaaaggcttttaacaatatgcatattccaccacctggatcttctggagttaatgcttctcaatct

SEQ ID NO: 32464 - DNA, 389 bp, Glycine max
  Clone ID: PAT_MRT3847_12931C.1
tggatcattatccgaagccaactccttatccactgattcttacgtgcactcgccgaggggctcattctcaacagatacagctgcctgaaccgatcaagcaatggacttgtatctctcaagacagctgtggacgattgagcatagtgcaccttcactattttgtgggcatcgacagggctattgaggaaaggtcttctctaatctacacctacaactcactcaagatttgattgagaccgcattggacgatctgtgatgggtggatacaatcatggtgccaacctatgttgggggctcttgattcataactggtaacgatcttggcactgatattagatgacattgtgagacgagaagacccttgtctgactacccatggaatgaccatc

SEQ ID NO: 32465 - DNA, 259 bp, Glycine max
  Clone ID: PAT_MRT3847_129320C.1
attggtatataaaaaggacatcacttttcaaggaaaacggactactcgttgtttagacagatatggaccgccagaatctcaagggcaaatctgttaccgtgaaaaatttgcgctgcaacttcaacgatctggagcactaaaaacgcacggctgcattaagtcttgacggttcagtcagaagctttaccccaaacaaaatgtgtaacctgcccatacctctgtaaatgagggtctatgatgccaaggaccacctgggcct

SEQ ID NO: 32466 - DNA, 166 bp, Glycine max
  Clone ID: PAT_MRT3847_129321C.1
agagaagcttgacctatgcctgtgtcctaaggttcttgacatgaccgaaccacctcttgacaataactgccctcacttggctgaatggttcatagaggcgggccccatcatagttgatacaggcctacgaactatcgctaggtgacctattgtgaggtcaaccgca

SEQ ID NO: 32467 - DNA, 470 bp, Glycine max
  Clone ID: PAT_MRT3847_129322C.1
accagagccaaatcatttttttccctaccctgcctcttcattgcaggcaaaatcattgttttgtgtctgcaatggggattggcaattcaaagtcaaatgcagccgaaggagagaggttacctcccaaaatccgccctatgctcgttagccgatttgaggagttcagaaaacgtaggaatggagaaaccaccctctccaagaagaatctgttgaatgaagaggatgacaattctcaatcttcacacagaactgaagaagaaaataaggtttcttcttcaaaggagattgaaccacctaaagaggaaacggttgagcgagtaataaccgcagaaaaactgtccagagtggttccagtgcccaactctgaatgtgaaaatgtggaggagactcaccccaacaaagataacatagagcaggttatcaaatacatggatcccagccaagatgtatttaatcgtgctgttgagatg

SEQ ID NO: 32468 - DNA, 1100 bp, Glycine max
  Clone ID: PAT_MRT3847_129323C.1
accggtccggcagtcccggtcggcccgcgcgacccacgcgtgcggccacgcgtccggtacattctaaggaaactcctcagatcgacctcgaaaccagggggcggagactcttctcttggtcaaacctcaaatccctacacacaggactctctccttctcgtccccgactcgccggccctctcctcacccgccacgtgaccgctcattcaggtttggaccaatccatagccgaagagaaaaagagacaaggaccgtctagaattgatttcattgagtgtagcagcaaccaattccatttccagtttctgattcgtcaaacggacaaaggaagtgaaagggtttagggtgtgacctgagatcaacatgttgcggaggcttctctcttctcacctcaaaaccctagccgccaccgcttcttcttccactccccgatctgcttccgccgccgccagattcgccgctctctctcgctcctcccgctacttctcaacccagtccgaggatgctactgccatcaaaaagaaggttgaggatgtaatgccaatcgctactggtcacgagcgcgaggagcttcaggctgagctcgagggaaggaatattcttgaaatagaccatcccgaaggtccattcggcacgaaggaagcacctgctgttgtcaaatcttactatgataaaaggatagtcggatgcccaggaggtgaaggtgaggatgagcatgatgttgtctggttttggctggagaaagacaagccccacgaatgtccagtgtgcgcacagtattttgttcttgaagtggtaggacctggtggatcacccgatgggcatggcgatgatgatcaccattgattgcaatccttcaattaaatctggaataaattctggaaagatggagagacattgtttagaatacactctggcctttcaaaatcctgtggcctatgtttgattttgatttgtctataccttgttgtgttgcaacttttgagctagaaagtttatgcgattatttgaacgcaggatgctcatttgcttgagctaccaattctgttagacaatgttttgtgcattgtgaaataattgatagaacttgacgatttttt

SEQ ID NO: 32469 - DNA, 956 bp, Glycine max
  Clone ID: PAT_MRT3847_129324C.1
gtttcagcgttccacgcgttgggtttggcccaatccatagccgaagaagagaaaaaagagacaaggaccgtcttgagttaatttgattcagtgtagcagccagcagccataagcaacgcaacaattccatttccagtttctgattcgtcacgtcagacaaaggaaggggttagggtgtgacctgagatcaaaatgttgcggaggcttctctcttctcacctcaaaaccctagcctcctccgccgccgccgccgccaccgccactccccgatctgcttccgcctccgccagattcgccgctctctctcgctcctgcctctacttctcaacccaatccgaggatgctactgcgatcaaaaagaaggttgaggacataatgccaatcgctactggccacgagcgcgaggagcttcaggctgagctcgagggaaggaatattcttgaaatagaccatcccgaaggtccattcggcacaaaggaagcacctgctgttgtcaaatcttactatgataaaaggatagtcggatgcccaggaggtgaaggtgaggatgagcatgatgttgtctggttttggctggagaaagacaagccccatgaatgtccagtgtgcgcacagtattttgttcttgaagtggtaggacctggtggaccacccgatggacatggtgatgatgatcaccattgattgcatccttcaattaaatctggaataaattctggaaagatggagagacattgtttagcatacactctggcctctcaaaatcctgtggcctaagtttgattttgatttgtctataccttattgtgtcacaacttttgagatagaaagtttatgcgattatttgaacgcaggatgctcatttgcttgagctacaattctgttagactatgtttttgtgcgttgtgaaataattaatagaacttgacgattctttaactggttttgatttctga

SEQ ID NO: 32470 - DNA, 818 bp, Glycine max
  unsure (1)..(818): unsure at all n locations
  Clone ID: PAT_MRT3847_129325C.1
gccgaagagaaaaagagacaaggaccgtcttgaattgatttcattgagtgtagcagcaaccaattccatttccagtttctgattcgtcaaacggacaaaggaagtgaaagggtttagggtgtgacctgagatcaacatgttgcggaggcttctctcttctcacctcaaaaccctagccgccaccgcttcttcttccactccccgatctgcttccgccgccgccagatttgccgctctctctcgctcctcccgctacttctcaacccagtccgaggatgctactgccatcaaaaagaaggttgaggatgtaatgccaatcgctactggtcacgagcgcgaggagcttcaggctgagctcgagggaaggaatattcttgaaatagaccatcccgaaggtccattcggcacgaaggaagcacctgctgttgtcaaatcttactatgataaaaggatagtcggatgcccaggaggtgaaggtggtgagtaccagaatattccttgtttctcttaatgtcttcttgcatgtgaccttcttcccagggtgatgaaaaaggctagaattcttggttatggtgtttatgagggggtgaacgacttgttttgatttcagaggatgagcatgatgttgtctggttttggctggagaaagacaagccccacgaatgtccagtgtgcgcacagtattttgttgtaagttcataatgacttttagaatagcttctactgttacagtgtttttgtggggagagaatcaatgaatcattggttagtatggcttgttctgatacttttgacagttgntggagttgaatgccaag

SEQ ID NO: 32471 - DNA, 170 bp, Glycine max
  Clone ID: PAT_MRT3847_129326C.1
cccgccactactcctctgaccgatggcgccgcgtctcttgtcatgcttccgcaacaagcacgccggcgggtgcagccaccacgacgagggcatgcggcgcatcatcggatgtgtcggctgctgtggtgaccgaatgagcagtattggggtgtgttctgcgtgtggatgtt

SEQ ID NO: 32472 - DNA, 621 bp, Glycine max
  unsure (1)..(621): unsure at all n locations
  Clone ID: PAT_MRT3847_129327C.1
ttgccggccaatttgccgtgctacatgtgtagcagtaccgcctgcttgggggggggggggggtgagaaaatggtcggagaaaggaaagctaatggaaaatagtttgtactactaaaccaaagccatgaaaatttgagactgctggcgcaaaggtcaaagagtgtacatgtggtggattagtaaaataaaaaatacgatgtagtaaaaataaatactaagcaaaaggcattattcttcagtaacaattgacggggcaaacggatcctgatagcaaagtcctacaaatggaaaaagagaatggaaataaaatattgaacatgtgctaaccagaaaatgatgagaaaccacgaattatcagcagcagtatagcgctgactaaaaggctttaaagctaagtatggtggtggcctactccttggccgcattggcctgttccgccccgtgggtggtgtaatatgtggcagcatgttcatacttatacgggcatctagcgtttgtatactaaaatcattaaccccaccagatgtacacaaacgggtaattattagccctggccggccaagtagtggaattagattgctagtattaggtggtaaaaagggccctgntggtgtaactgtt

SEQ ID NO: 32473 - DNA, 409 bp, Glycine max
  Clone ID: PAT_MRT3847_129328C.1
cattgatggttttttgttttattgagttcaacaaaaacccacgtaaaatgttgcttagccacgttcaaaaaaaaaagaaaaaaaccattaaaaaaggggcccccccttgaaaaaaagaaggaattaacccaggggggggggccggtcacaaatattattattaaactccgatgcgcccaccacaaaaaagatggatcaccaacgacgagctggggggatgcacacaccaacgagcgataaaacccaggtatggagagcgggacctcccccaaacgaaattttaaaaagcgataaaaaaacgaccccccaaagattttgtttatccaaccacagaaagttgggggccccccccccgcaaacaaaaaaaatggggaaaaaaaacctttttgttggtggggggggacccccc

SEQ ID NO: 32474 - DNA, 279 bp, Glycine max
  Clone ID: PAT_MRT3847_129329C.1
gaaaagaaaaaaaacccctcaacaaaatcttttgaaaaagggggtttttaaaattatgagagatccaacctaaatttacaaaagcgaatgtttttacactacaaaacgcatgtttataactcctaaaccaatctgtttccacgaggacacttctactaattgatgctaacccatgaaagaccaagtaattccacctccaccataccaaacgcgaaaccagcataacttgggcttaccttaacattgctagttaaaggacctgaaaacacttagcacact

SEQ ID NO: 32475 - DNA, 366 bp, Glycine max
  Clone ID: PAT_MRT3847_12932C.1
acgctcggaatctggctcgagctctagccgactccactagaggtaggagtctaggacactcgctcactagcctaacggcgcgtgacggacagtgtactcagtcccgatttgtggtacttatagaatcgattgtgaaggttgagagtatcttagcagctacgcgctggagagcatcatggcccagactcggagaggtccaattcatgcgcgtaactcatatggtgggccgtccaatagacatggaacacggataccagaacagggacatgccataccttaaagaacgatttgcattgcagctacgactggacgttatcgtaattgtctcgattcatgtagccgatcccacttggtggtacagagctt

SEQ ID NO: 32476 - DNA, 195 bp, Glycine max
  unsure (1)..(195): unsure at all n locations
  Clone ID: PAT_MRT3847_129330C.1
ggngnnagaaaatgagcanagcacgcgtacgtnaagcgcgggaatncgggctcggagagaacgancangagcnnganatgcnccncnctaagcanacnggtcnccccnctcccaangtctgcnngcaacctcntncnccagngncncagttagtncacgcagcgntcccncagnagggaaacgnnnanggganan

SEQ ID NO: 32477 - DNA, 381 bp, Glycine max
  Clone ID: PAT_MRT3847_129331C.1
ggcccccccttttaaaatttaaacaggggtttttatttccaggcttggccccaatgccaacaggttctaaaaaaaaaaaagagccttcctgaatttattaaaaggctcagtctttaaaaagcgggggcctcttttttccttccccatttggggggggttatttgatgagggggaggcgggcaaaaaaccctcccattaaatcccattgaacttttccaagggggaggacttttccatgggggggggaaaggctggacaaactgttgctcaaacaaaaattcttcctcccaaggcccccggttaattggggcaaaacccgtgccaggggcctgcaacagtttcgtttttatgggaacaaaagtctccatttttttatttggg

SEQ ID NO: 32478 - DNA, 402 bp, Glycine max
  Clone ID: PAT_MRT3847_129332C.1
agggcagatgctgaaaaacggtcgagtgttccacaagggacctacaatctttgtagaattgatattcgcacacagtgatggaagaatcttagtggccggaacaggggattggattcaactgatcgtaattctcacattttgtgactcattgacaattcttgagtgcacgcaaggtgcacaaatggtccagattggggcctctgacaactacccgactcataatgagtgggaggagcgaactgggtcaattccttttcatatgcagcacgactgaagatttgttttgagacattaaaggggatctaatcctagcctcattgctggagattgagctgcccaagcctcatatgttgtcctaaacatgatgtcgaaatgcaagggatccctgtgggcatgataaac

SEQ ID NO: 32479 - DNA, 328 bp, Glycine max
  Clone ID: PAT_MRT3847_129333C.1
aggggggcaaaggagaaccagagagacaatcatttccaacaaaggcacttgccggaaacttattcttgggaagctgaccacaaagatggttatagctaacattcaacttctcaaggccaacaagacggtgtggaaccttcccaaagacccaattacgagacaaatccaaaaacttaaacctcagcccaaagcttaacttccccaaataaaactagaacttgttcccggaagaccaaaaacccaccaaatactcagtactattaaccaacccaattgcaccccctgaaaattcatgccgcgaaatgtcaataaaatcatagaaaatggt

SEQ ID NO: 32480 - DNA, 664 bp, Glycine max
  Clone ID: PAT_MRT3847_129334C.1
attgcatttgcagaaatgtcagttgcgggataaaaagagcgttgccgctttgttttctgtgtgtagggttgttagggagattgttattcaggactgctggggattggataatagcatcttcagttttgcaatgatttgcaggcgggtaaagttgttatacgtagaagggtgctcattgctaacaacagaaggtttggagtgtgtgattcattcgtggaaggagcttcagagcctcagagtagtgacatgtaagaatataaaggacagtgagatctctcctgcgcttgcaaccttgtttaccactctcaaggagttgagatggagcccagataccaaatcacttcttccatccggtgttatgggaaagaaaggtgataaatttttcaaaagggcacgataactaaatcatatctaggccattatcttagaatcagattattttcactgacatcagtggaaattgtatcaatttatttgtaatcactttataacggttaacttagatgttgacagtgcaagtttgttcttttcttttgttatcttccattactccaaggaagaagcctagagatgtaataataaataatataaaagtcttaagcagttcactcgttgttgaaaaaaaaaaaaaaaaaaaaaaaaaaaaaaaaaaaaaaaaaaaaaa

SEQ ID NO: 32481 - DNA, 1707 bp, Glycine max
  unsure (1)..(1707): unsure at all n locations
  Clone ID: PAT_MRT3847_129335C.1
cactgctttctctctgtctattccgttcaaagcgttgcgtagaacagagaaaaagaaagtaacaatttcttaagagagaaaacccgaagaagagtcatcggcttcaatcttcgacgccttaaccgtcgacgacggacattacgctgcacccttcgcctctgacacctcctcacgctacggcgactacgacactttctcctccgaacatctcctagtcgtcctctccgccgacgattcgtcgccggaggtcttcggattcagtgatccagatccaccctccgcccccgctgcatttgagcgagtgcactagtacgagtccggatttgtctcagtaaacggttgcggcgagccagctttcgtatccaatggacaggcgcatccggcgccggaagaagtggatcccgaggacggtgacgcacttcgtgattggccccgtcagaaggtccttcggcgtgaggagaaggagaataggggaaggagaaatgaaactgaagattagttaggagagaaggatttaactggaaaggttaggagaagaaagggaatttaatgagttggagtatttaagtggaaaatatagaaaaggaggaagatatacatgggtaatccaaacaaattacacaaaagagaatgagacaaagtaatggaaggccaatgaggagatcattcacagagaggtacccaaaactaataggaaaagaagcaaagaggataagaatagtaaggctcccaacaacggaagtacaagacgcaaaaacgatcagaaccagaaaccatcaaaggcggaggccgatattgttgaagctgaacacacccaccgcctgctcacatgattgcccctcctcattcacctgctatagaggcaaaagatgggcaaactggaaaagactgaaaagaacccgcatccacagccaatggctctgcaccagaaacacggaatggaaacaaaacataaagaatacaaccaataataacggtactgcagatttaccccagaaagaagccccaacaccccctcaggagatgtcttctcaaaaactcccgcctttcaagcatacttaagctctcatcatcttgtgggattacttttgccaccataatttctttaaggatccatttgccatgctattagtctttatcgcccttttggtttgcatttatttttcaaataagatttttatgtagcatttctgattcttttactttatagtatgactcttattacttcgtatttgcatgggtttcaatccgccttcttattggagagtcgggatttgcgcatggtattcttcttgacaagcaaatgctgcttgccagctctcctacgcactattttgcctcgtccggtcaccctaaaccgctttgcagatgccttgtgggttttcatttcgtagcccttagcggataaaatggtgagaggtctcgggcgagggcttagagggaggggggaaagaagtgcgcagagcttttgctgaagaatttgagtagagatgttgggttaggaattgagttggattttttggtcggcactttatttggaaaatcgaggtgtagcataaggtaaaagctccacggaaaaggatatgaaattggaaatccatatgttcatgggtttaatacatcatttgaaaataagagtatttttttttccattaagacagaaaaaaaaaaaacgtgtgtgtagttctcaaaaaaaaaaaaaaaana

SEQ ID NO: 32482 - DNA, 764 bp, Glycine max
  Clone ID: PAT_MRT3847_129336C.1
gaagacgacagaagattgacagcacagcacaacgttgcacctcaaaatagcaatggcagcgaaaacttcctctgaaactgaaaaagagtgttcctcctcacagtcactgaaaatttcaaaggatttaaactttcgacgtgtttctgagaccttagatctgttcagagcgatggggaccaatattatcgcaccggaaaatagcaacacgcatggcttcttcgacggcttccttcggagtttcataaagctcgatcacatccaacgcggtcgaatcgcctgcacccttctcgtcaaaggccccatctgtaatggttttggaacacttcatggaggggctattgggtcctttgttgtgattttgtctactgcttgtgctagaaccgtaactgctgagaacaaggaactttttctcggggaaattagcatgtcttacctctctggaactctaataaatgaagaagtgctagttaatgcctccgtggtgaaaagtggaagaaaattgactgtagttgcacttgagtttaaactgaagaaaactgggaatttactttatactactcatgctaccttctataacatgccagttgccagtttatgaatgtttagatctttggtggaagttgatcttcagttctatttattattgtattaatgtttgtcaaagcaaaatcttttatttttaattcattattatccactgttaattcaatctttcctgttttctatactgttttgctctgaatgccagctcatgagttgggaag

SEQ ID NO: 32483 - DNA, 177 bp, Glycine max
  Clone ID: PAT_MRT3847_129337C.1
gagtcccatccgggctctatcatacgataccgacactggttttgcggcacttccaatgtcagtcacctgctcttcagagactctcttccacactcgtcaacttgcgcaggctgcattacagactctccgaagccaccttcacaggcagtctgctcactatgcgctcttaagagtctc

SEQ ID NO: 32484 - DNA, 213 bp, Glycine max
  Clone ID: PAT_MRT3847_129338C.1
gggcccatgcgagacagggaggacgaatgtgcttcttgggtcaacaaacaattgatgttaccgaggtacttatactacccctaaaggaaccttgggactgtggactttggacaggaatttgtctgactcttcccaagaatctcagcgattgttacttctgtttaaaggaatcaacagactgccacttggggaagagaacgatcttgtctaaaa

SEQ ID NO: 32485 - DNA, 341 bp, Glycine max
  Clone ID: PAT_MRT3847_129339C.1
ggaattctccaaaatagaacaacttacactgaagtaacacatttgactcggaaattgatccatgtagtaatggcaagcttaggtgtagcatgtgtggtcatcgaagtgcatcggctgtgatcaggtgcatcattgatgatgcaagtcgtgtcatgcaatcatgtttctgtgaccctatcaccgtgcctatcctacctgacgcagggtgcagatgttccagaatcatgatgtaccagagtgatgaccattcagggttctgtcaccatcagctttgacaatcacagcgtgtgcaaatgtcttcagcaagctgtgaataactatggcatcacagacgattacac

SEQ ID NO: 32486 - DNA, 696 bp, Glycine max
  unsure (1)..(696): unsure at all n locations
  Clone ID: PAT_MRT3847_12933C.1
ccacgcgtccgcatcgatccttcttcagaaatcaaaatccttcttcgttaaggaagacccagaagcagagggtacaccacatataatccaattttcatcgtcattgatgcacacttaccccacccttctcttttttctttgttctatttaaataaataaaaaaattgaaaccttaaattcctagctgtcttcaatatcgtaaaactcactctgcaatcatcgattttgttttcctgtgatttagggtttgattctgatcgaaacccgcgccatggccatgttcgattccatcttcaacaaaggttttaaggctgccaaatggtactgtttgtttgtttatttatttatttattttctgtataaaataatctggggtttaatttttcttcttgcaattgtatatttttttatgctttgaaatgaatttaatactgtgcatcaattggcctggttgaactatttgggatggtttatgctgaattttccctttactttatttgctaagtaactgggtatttttttttcttagtttaattgatcacatatgcatttcagtttgatttaaacgataatgtttattgcaatagctcatctggacaaaattgntctatttttatttttttatcgntatttatttggttgtaagtgattnttttaccaatgttcatactnttcagtaaaacattgctgaagctg

SEQ ID NO: 32487 - DNA, 447 bp, Glycine max
  Clone ID: PAT_MRT3847_129340C.1
ggcaatctcttcttccattccatgttcttcttctttcacttcatgtttcagcttcagccactttgagttgagagagagaaaattaagcaagtgcaagtgtaaccaagctcaaaattcagctccaaaatatgcttcttagctttggtcttggatttaagcaagcatgaccatttggaaaattcaacaattcctgaaataacacagcaaaggttcacagatctgtgaggtgtgggagaacaactaacacaggctttgtttcttttccctttctatgctccagactttgacaccttctgcaaaacccgatccaacaatgtttaaagtaacgatgccttttaacctcttttaatttatgttaaagaataacaactgtaattctccaaactactactgtgccttaataatgaacaaccaaccttcttgtggcgtgtgtggcttctaatgaga

SEQ ID NO: 32488 - DNA, 415 bp, Glycine max
  Clone ID: PAT_MRT3847_129341C.1
aattcggctcgaggccagcgcgcctctaacttgaagaatacacacctcaaatgtctattactaataattgaccaaaagaacctatagggccagtcttgtgggacaatgcggctcccggtttttaactagttaaaggaagcaaatcatgaatatggaagatagacatcacatgaaattctttttatgagtttctgtcgaaagtcctctatttataggaatgcactaggtatttggtgctgaatagattgtggacacgtgaacgctgtaggtgctttcacattatatactgctagtgctgaaactgtccggagcaccattctgagtctgagatatgcacactgtgagctgttacatgtttaccattttttattagtgtccaaagctttatttttaaaattttattatacaaattttt

SEQ ID NO: 32489 - DNA, 341 bp, Glycine max
  unsure (1)..(341): unsure at all n locations
  Clone ID: PAT_MRT3847_129342C.1
tttttgccaaaaaaaacgcactctggagaagtctgcacnacaaaaatgaacttgagatgaactttgatccattgttaaaaacactcataaaaaaggcaacccatctgtccatggatcgaggtacactcacgcacaaacgaaggaaggcttcacacacctgctcttacttaaaattccgctttaaaagaaaatctgccatctttcccctgattagaaatttcctgaataaaaatatctccaacactcatgcaattttcacaaggaaattaaaatttctcagggactgtagattgcaaaagcctgggaaccaacatattcaagagccttaaaaatggatctgg

SEQ ID NO: 32490 - DNA, 482 bp, Glycine max
  Clone ID: PAT_MRT3847_129343C.1
gcatgtattattgactgtgttttgtttaaattattaaaacaaataactatactataaacataaagttagttcaagcctcagatcataaccctaatggcacgctttaaaaatctatatgttaatagatagtgatttttttataataaatattaattgttaatttttattaataagagaattaaacctgtcacgtatttttctttttttttatcactcaattacttttatatctccatattaataaataatgactttatctttgtccatataatttttatttaataaaatttaaattgtcgatataagtggaataaatttattccaataatatgatgtatcatactattatgttatctttttttttattattcttggacagtataacaaaaagaaaaagacaagattcaagtgagacgcacctgatatgtatatttttttttttgcaacatttattacgtcaaatttataatatttgcttcaaa

SEQ ID NO: 32491 - DNA, 353 bp, Glycine max
  Clone ID: PAT_MRT3847_129344C.1
agaggacgcggggtttaaccgggaaattccggcccggaccctaacggcttacaatttttccctatagaaaggcgaacaaaagcggggcaaaaaaatggccaaaaagtgttaccggggaaaaatttttcccccctaaaaagcccaaaaaaaatacgacccgaaaaaaaaaagctaaaaccctgggggaacaaaagagggaccactcaaaatttaatggcggtggccccactgccaaataaaaaacaaaaaaacccttttagacaagtgaaaaaaaaaaacccccaacgcggggggaaagggtttttgactaatgggcccaaagggtttttttctttaaaaaaagaaacgggcaa

SEQ ID NO: 32492 - DNA, 1304 bp, Glycine max
  Clone ID: PAT_MRT3847_129345C.1
ctgggattttgaaccggtgactgctccatttttcatctgtccacctccattctttagatccaagagaccaagacaacctggaatgcctgatgatgaattgtctgattttgataacattttcaagcggacaatgccctggcttggtgatgatatgtgcatgaaggatccccaaggtctccctggccttagcctagctcaatggatgaacatgcagcaaaatcctgcactggctaactcacttcagccaaattatgcaccttccttatctggatctattttgcaaaatattcctggagctgatatttctcgccagctgggattttctgctccacaaatttctcagtcagacaatgtagccttaaatactcagaggcttcttcagactgctcaacaattggatcaccttcagaagctaccatctacttctagcacattgggaacagtcctgctgccacagcaacagttgggtgatatcactcaacaaccgaggcagaacttggcaaatcaaactatccctcagggtcaagttcagtcccaactcttgcatccccagaacatggtccaaaccaacaatattcttcagcagcagcaaccatccattcaaaaccatcaactacatagaagcctctctcagaacccatcacagcagcagacaactattggtcagaatcaaccgcaaaatttgatccagtcccctatgcctgatcatgttcaacaattacagatgtctgacaatcagattcagttgcagttgttacagaagcttcaacaacaaaaacaaacgctattggctcaacaaactgcattgcagcagcctactcaacttactcaaatccaggatcagcaaagacagcttttagataaaacacataacttgtctagagcactaacacctggtcaagtactggaaattcctcatattattcagaattcactgcccgaggctaattctatctcaaatcagatgacaaaggccaattgccagagcaatattcaattctctcagcagcccaagcttcagcagcagcaacaacctggcatggtttctgaaatgcctggccacatggcacttctccctactgctacaactaaccaactttctgctggtggcagtagtatagtgactggagcaggtggtgcagggcagtctgtaattacagatgatgttccatctcgctccacctcaccttctacaaataactgtaccaatgcacttccacaattgataaattcacgattcccgagaagcacaatggtaggggatgacatggcgcactctgctgccacaatcttgagttcaagtg

SEQ ID NO: 32493 - DNA, 669 bp, Glycine max
  Clone ID: PAT_MRT3847_129346C.1
cggaaattcggcctcgaaaaacaaaacttcatttctaactctcaatgaaaaaaaatagcttgttcacacccatcctattttttcacctcatatatacaaatatatataacatggcttctaccttctcccgaagcctaacacttgtaagcttttaaattgtccgtttgtgcctgccggtaacttaaaccaagaatttcagcttaagtggggaaatggtcgtgctaaaatcctccacaacgaaaatcttctaactctcccccttgaaaaggccccttgccttggccttccattccaaaaccgattccttatttgggcaagaattacctgccgctcaagcttcgttcctggaaacctctgctggcaattgtcaccgccaataatctgtcttcaaaaggatccacttgggatgagatttgccttcgaattcttggggaatctgaatggcgatccttccattctcaaccccaatgtgttcaaccaaggcaagggcaacaaaaaacaacaattctttctctggtttgacccaacttgcaatttccccacttattcaattctttggaatccccaacgcattgttttttctgtggatggcacccccatcagggaattcaagaaatttgaatcaatagaagttccttttccaaaaaccaaccgatgaagatatactca

SEQ ID NO: 32494 - DNA, 399 bp, Glycine max
  Clone ID: PAT_MRT3847_129347C.1
gtccgaccggctgcaagaagccgccagagggggttacctattccattaaagggctggacctttaaaatgggattattatttctggggacccttaataatccagggtttaaaagttcccttggactttgtttagatatcataatatttctagtcaatcaaatatggcttgtggaaggaaaccaaccacagtctagtttcaaggcctcctatgaaacagaaaatagattccctacttttctctgacattgcatgagtgaaccttggtgcaacggtaaggttgctgccttgtgacctagtgctcatggattcaaatcctacagacagcctctcagcttacgagggtggagctgagtatatctaccctcctgagacctcactagtagtgagcctcgtgttggg

SEQ ID NO: 32495 - DNA, 122 bp, Glycine max
  unsure (1)..(122): unsure at all n locations
  Clone ID: PAT_MRT3847_129348C.1
angngctcngcncnttcactcctcctctnataccttctggctccnncctccggtgaaagagggtgagaagngnagttagcaagcaatgttggtttcctgttgggagttgggaccctgcattc

SEQ ID NO: 32496 - DNA, 800 bp, Glycine max
  Clone ID: PAT_MRT3847_129349C.1
cttgatgcctgcatgaggtgcaaaaaaatctgccaacagttgtctcaaccaactggacccaacttcggtaattcttttattctgtatacgagtatatcattctattgataacatgaaatgctaaacttccaaactttaaacatgtaattttctttgtgcagtgcttttttcctcagaatttgatcaaccatgttgaaactccattgtttctactcaatgcagcttatgatgcatggcaggtaatattaatgaaaaacactgtttctcttgtaattttatgtcaataatgtgcatagttatatgcttgcaagcttgtatatctttatttgtcctcaaagtgttatcatatggatctcatggtttcttgtttgactaatatgttgtctacgattttctggtttcaaattgttctagtagcaattttttctatttctcttttttcttttgtacaagaaaaataaatttaattttgacttttgccaacacccaatccagtaaaagccttggcccagcagtcacattgaattcaaccatcattgagtaaactagttttgaatgtcagtgattttttatgtctaagcaaaagtccatagggcaagcaaagcaggaatcatattcactataattatggatgttgatcccgtttatagctgctgcaaccacattatcactgaattctttatgctatggactaaatctctcttgtttgttttcattaggtccaagaaagtttggccccacattcagcagatccccatggctcttggaatgattgtaaatcaaatcatgcacgctgtaac

SEQ ID NO: 32497 - DNA, 596 bp, Glycine max
  unsure (1)..(596): unsure at all n locations
  Clone ID: PAT_MRT3847_12934C.1
tacggctgcgagaagacgacagaagggggagaggtgcaggttgaaaatgcttttatccagtaccatgattctctctaattctccaattgcatccccttcactaccaacttcaacgggtgccaagttggaaactttttccctgaaaaatgatggggttatcagaattagaggagctactgcttcttcagtggcacccagaatccgaaaaacagcaacatgttctgtatcgaaagatggtaatgcctctgttgagactgatgtacctttccctgctgattactctgagcttctggaacaagccagagtagctgcagatttggctataaaggataacagacagctaatggagattgagtttcccacagctggactcgggtctggcctgtgatggggtacgtggaattggaatgactgtatgagatgactgagagcatgcaattgattcgtgaattttgtgaccgcttcattagttcagagaaagccacacgaacaagaatattttttccagaggctagcgaagttgactntgccagacaatcagttnttagtggatgttcttttaagttggactatttgacanagccttcattctttga

SEQ ID NO: 32498 - DNA, 246 bp, Glycine max
  Clone ID: PAT_MRT3847_129350C.1
aacaaacacgacatacgtattactcacaatcatatgactcttaataatcatcgcccaacattcacattaccggtaatttttaaatcatcggtcgaacaacacaactaatcatacctatcaaaatcacttaatatcacaaaaacatatacatccacactacaaatctcaataccacataaacaacacaatcaactcatacttccaaatcatccaatctaccctttataccaacaataccaaatgcaa

SEQ ID NO: 32499 - DNA, 319 bp, Glycine max
  unsure (1)..(319): unsure at all n locations
  Clone ID: PAT_MRT3847_129351C.1
agctaaagaataaatttgttaatcctgtggttgctccacaattcaaattaagcattcagccactcacaatttaccatgcccccattccagaattatttttgtgaaactaagcaaagaatcaacagcaattataaaatagaacttacttcatggtatttaacttgcacatttaggaaagtaaacagaggcgatgaaacatggacaactgaggagttggttgatcccatatttgagttaggaaaaagtaaaggatttgtaaaaggaccaacaatgcgcatgccaactgatgatttggttgtgacgcctatgtcanntcgga

SEQ ID NO: 32500 - DNA, 268 bp, Glycine max
  Clone ID: PAT_MRT3847_129352C.1
ggctcgagcactctcttacatatggcatgtctgttttctgtgtcggatgtccatgtgggacctggggccatctggctgaacgtgatgacacattgcattgcctttcatccggcctgtgtggcaagctattgtctacctgagggcattgtcttcttgcctggacttgcctgtatatggtgcgcgagggtagaggttgaccaccccgcctaaattcaggccacaacttccacctccgctgatcaggagaggtggctgtggcgcttgttgc

SEQ ID NO: 32501 - DNA, 493 bp, Glycine max
  Clone ID: PAT_MRT3847_129353C.1
actcgaagtaaatgagataaggctgaaagaggcttccaagctgagggaaaatgaggcatatggaagcgatcaaaatagaaagaaatttaaagatgtttatggagaaggaaatagacttcaagaagcaggtgacaacaaagggattcagaaagttatgaatcaaaccccaatgcaagaacagattaatgggatgttgaatgaggctcaaaggaaaaaagtcactgagggaacatcaagccaaacattagcaatggaaggaagtgtgtatgtatcaaatgagaatagtcacctggagcaatctgagaatatggagcaagatgtaggtggaatggaaaaagataagggattgaacaaagcttttgtcatggagaggaatgaagaagagggaaacatgaagaatgctaaagcaactgatgagaccgaggaaattgagagtgaagaagatcttgcagctcaatcaacctccattcatgaagaatttattggaaaactg

SEQ ID NO: 32502 - DNA, 470 bp, Glycine max
  Clone ID: PAT_MRT3847_129354C.1
ggacactccaaaagaatttttcttattattgtacaaatctaattcttattttacagatgttcattgaagaaattttagagctggtagagctccacccagtgaggcattttatagtaggccttcctggaataagtggcttatcaacagagcagagaaagaggcttaccatagctgttgaattggttgcaaatccttccattatttttatggatgagccaacaactggtcttgatgctagagaattttggggaccgaagtgggagtttagttttcgtaatggttctgaaggcataatactcacccttgaaatacatcttgacttcagctgctattgatgaagagaggtggacaagtgatatatggtggtcctcttggtcgaaattctcagaatcttattgagtactttgaggtaaacctcaaacattataatgtataaattctagaattaatatgataccagttatcccact

SEQ ID NO: 32503 - DNA, 401 bp, Glycine max
  unsure (1)..(401): unsure at all n locations
  Clone ID: PAT_MRT3847_129355C.1
tccctttccacgacctctctactccaaacccccctttttttttttttttttttttttatatttttttttcaaaccaataactttctataaaaaccagggctcttttttcaaaaaaacctttattcctacaatttatcaaaaaacccaattcaatttttcaaaataanatttttactaaaacttaaattttcaaaacttcatttttatatctccccccttctaaactaaatttatatttaaactcattattttcttaaatatccaaaacccacccaaaatttccccattacttatttttcttttcaaataaaaatttctctcttttataaactacctcatttacatctaaacctccaaaaccccaatttcttttacccactcccccctaaatttttctcatt

SEQ ID NO: 32504 - DNA, 383 bp, Glycine max
  Clone ID: PAT_MRT3847_129356C.1
cgggcacctgagatcttaaaatttaaaacttttcgccctttcggtaaaccaaaaattcattataagggcgcccccgttgagacaaacaaaaattttttttggtgtgtgcaacacaacggggataaaaaacctgcagattctaataaggccacactgtgcaaaaaagcattgccggtgtttattattatttcggaaacccccagcacccctggggctattatttaaagcgtggacccatgaacctttggggaataaatttttttccgcccccacagggtgaccctaaacccccagaatcccaggtgcaaaattttgttcccttgtatttggggggcttgacattttcacagaccttgaagattttgagcttcaccgggcctttc

SEQ ID NO: 32505 - DNA, 478 bp, Glycine max
  Clone ID: PAT_MRT3847_129357C.1
aaatcgcactcggcgttacagacagcacagagatgccatgaagagaggtcgggatccctgcatctgctatacggcattgaccgcttgcggagccggcggcggccccggcatagaaataggcaccaactaaggcctcactaccaatcgatcttacacaccgttaagtaccgaggatcctagcaatggcagtaagggtacatatgcaattacagagcagatacctccagcgtgtgtggattcatgacaagaaatataaacaaaagtgcaacgtgcacgcacaaaaatggcagatacggctaatgctcatctcaagaggcttagatgccatcatcatggagatgagctagaagaccagcgagctattaagactctagcacatgagataacggacttaataaagaagtccgagaacagactgcggagactttctgctactgggccttctgaagatgacaatgtgatgaaaaatgtgcagcgc

SEQ ID NO: 32506 - DNA, 156 bp, Glycine max
  unsure (1)..(156): unsure at all n locations
  Clone ID: PAT_MRT3847_129358C.1
tttactgttttgtttttttttttttttttcgcgcgcaagccggcaattatttcacatctccgttacggacttcacccccagcctaactttgtacaaaaacgaccctttatgcnacatcttgaaaaaccctaactcatactggcctgacagcctcat

SEQ ID NO: 32507 - DNA, 449 bp, Glycine max
  Clone ID: PAT_MRT3847_129359C.1
gggggcggggggggcgggggggggcacaacaatgataccccacagatgactttgatatattggctgatttcatgtttaaattcacatttgtgtctttatataattttatatctaggtctatgccacatcatatgaatcaagccactatcaggttcttgtgttgccatgttcaaatcatgttgtgcagtgttcctcccatgtctgggtctgtttttctttctagatgagataataggataatcaaacaaagcattaccgtaaaaagcatttggtagctgcttccattgcatagaacaaatgtacctcagcatttataatgtatgagaaaagaatacaaagaagccaatcaccttaaacttaagggtattcttgaggaaaccagtgactagatcacgatttgcatgcatccttacaccattccaactggagtatgaaaccatgactgtaga

SEQ ID NO: 32508 - DNA, 293 bp, Glycine max
  Clone ID: PAT_MRT3847_12935C.1
aagccacgcgtgcacacaaaactctcagagaactggttttgcatactaacctccttaataaaccaacggaacgttcacacacctagctcgatcatctaattcactcaaccatcattccatcaaacttggtagactaggctagcgactctctcttaacggactgtcaactaaccatcctacagaataattgcaaactgttcatagatcaaacataaaaacacatattctcacataactaatcaatgcatacatactcttcatatcgcctttattaatatgcaacttcttacact

SEQ ID NO: 32509 - DNA, 262 bp, Glycine max
  Clone ID: PAT_MRT3847_129360C.1
cagcagcgtacacttggctctctccgaacacctgctacaccctgctggacctcatccttgaactctactacttcgtttctggtctctacgcctcctctaccgagtaccgccacaacgccgcctcgcgtgacttcgagcgtcagactgagcgtctgcgataccctgttcatatccgtgaggtcaccgttgaagaactcaacgtctacgacggctccgatcccgagtgtcctctcctcatggcgatctagggccagatctatga

SEQ ID NO: 32510 - DNA, 258 bp, Glycine max
  unsure (1)..(258): unsure at all n locations
  Clone ID: PAT_MRT3847_129361C.1
cccaaaactacaaatcaatccagggtgtttttttctgcacttctcatattgcttccggaatggaagtaattgaagcaatttcggaagtacagaaagcaattgccatcaattaaactgcatcctaaaaatggtaaaacgnaacagntcntttacccnntanccntttnnnggntggnnnnngantgantaangcttatgcngttttcttctggatngtatgagggaaacctgaagaaataaactaaaaggatacactca

SEQ ID NO: 32511 - DNA, 336 bp, Glycine max
  Clone ID: PAT_MRT3847_129362C.1
aaaacaaagtgggcttgatcaagggcgatggggtggttaaatctataaatggataaaacattgggtttgggggttgaaccccccccaaatttgaaacgaatctcgtgacatgtgcaagctcgggtcataataaagtgtaaagagaaatacatgacaactgcgtgcggtcccacagaatatatgggaattggtaaaagctaggatatgtgaataggattctcattttactatcagatttttcctcgctaaaaaaaatgggtgaccacatcctgggtacgagaagggaggagaaaggggcctttattttctacaatgtgcactacattgggagggggc

SEQ ID NO: 32512 - DNA, 427 bp, Glycine max
  Clone ID: PAT_MRT3847_129363C.1
gtcgggtaaaattcattaatctgactaaagagcgcgtctacgctgaacacctgaacacaactttaaccctcgttgtcgaatctagtgcgttgcttcaaccattgaaccctactggctgctctctttaggaggtttgctagcgccactcctatcccatccaattcctatcacaccaatctccgcctttccttcaccgccatcgccgacatttccggtggagtctccttccttttctaccattcctctccctactttgctcatacacaagaagcagatcacgtgtaaagtaaaaacatcttactcgctccagataaatgggtcgagtttaagtttcacgatactgttagggttagtcacaatacccagctattcaggttttcatttgatcccactcaaaaattgtgtctggatattgcttcttgcatcc

SEQ ID NO: 32513 - DNA, 265 bp, Glycine max
  unsure (1)..(265): unsure at all n locations
  Clone ID: PAT_MRT3847_129364C.1
ccggcgcgcgaggggaccaggaaaaagaaagcaccggggacgcagccgcccgaccaagaagagagcgcgcccgcacaaaaggcgaaancaaggcccggcggggccaacacgaaagccgaggaggaagacaagacgaaagaagaacacgacagcccgacgacgaacgcgcgggggaacaaacgaaccgcgaagacaggcagacagggacgaaagaagaacaggagcaccgaggggcggagcagaaagaggagcaagaagacacgag

SEQ ID NO: 32514 - DNA, 2099 bp, Glycine max
  Clone ID: PAT_MRT3847_129365C.1
atagcgtccgcgcgtggtattggtctttgccgcactataaaatggcagctctacggttgcgaggaacggaagaagggggatggagacagacaaaggtgaagctcaggctcaggattggagaggcagaccctccaaccctgccaaacacggtggaatgattcccgctgcttttgttcttgggttgcaagcttttgagataatggcaatagccgcagtggggaacaatctgataacctacgtgacgagtgagatgcacttccctttgtccaaggctgccaacctagtcactaactttgttgggaccatctttctcctcgccctcctcggcggctatctttccgactcttacctcggcagcttctggaccatgctcatctttggtttcgttgaactttccggtttcatattgctttctgtccaagctcatgttcctcagttgaagccacccccatgcaatatcaacgatttaggagaacagtgctcagaagcaaagggcatgaagaccatgatattcttcgtagccctgtacttggtggcattaggtagtggttgtgtcaagccaaacatggttgcttacggaggcgaccaattcgaccaagacaaccccaagcaattaaagaagctctctacctacttcaacgctgcatattttgcattctctttgggagaacttgtgagcctgaccattcttgtttgggtacaaactcattccggaatggatgtgggcttcggggtatccgcggctgtaatggcaatgggattgataagcttgatatgtggcactctatattacaggaacaagcccccacaaggcagtattttaactcccattgctcaagttcttgtggctgcaattttcaaaagaaacctgcttcttccatctaaccctcaaatgcttcatggaacccaaaacaatcttattcatactgataaattcaggttgggttgtctctaatttctttctttccaacacatacaaaccacttaactaaacttgatctgcatgcaggttcttggacaaggcttgtatcagagtggaacaagagggaaatcaggaaagcgcgtggagattatgcagtgttgcgcaagttgagcaagtgaagatattgctatcggtcattccgatattctcgtgcaccatcgttttcaacaccatcttagcacaactgcagacattctcagtccaacaagggagggcaatggatacccatctcaccaaatcctttaatatccctcctgcgtcgcttcagtcgattccttacattttgctcatcgttttagtccctctctatgacaccttctttgtcccctttgccagaaagttcaccggccatgagtctggaatcccacctttgcgccgaataggctttggtctttttctagctaccttttccatggttgcagctgctctgttggagaaaaagagaagggacgaagctgtgaatcatgacaaagttttgtccatcttttggataaccccacaatacttgatctttggcttgtcagagatgtttacagccattggccttcttgagttcttctacaaacagtccttgaaagggatgcaagcattcttgacagccatcacatattgctcctactcctttggcttttacttgagcacacttttggtttctttggtcaataagatcacttcaacttcttcttcagctgctggctggcttcacaacaacaaccttaaccaggataggcttgatcttttctattggttactggctgtcttaagcttcctcaacttcctcaactatctcttttggtccagacgctattctcatgctccttccgccctacccccacctaatactaaggaacatcatcacaatattccatagacatctatactcttttcagattattaatttacagttactgtaaagaattatatcaagatgtcgtatcgcccgggatctatcgagtagctagcattatatattgcagttataagcttaatcttaattaattcgcccggtaccatatgcatggaagcgtaaattttatttgtttaattataaagtataagaagaaaaattaattatgatgttgatgaataaaaaaaaaaaaaaagataaaaccccaca

SEQ ID NO: 32515 - DNA, 217 bp, Glycine max
  Clone ID: PAT_MRT3847_129366C.1
aaaaaggcaggggtcggggcttaagtaggaagctcaaatttctacaaaaaatccaacctacctttgtttcaaattaacgttagttgctcatccgagcgaaaaagactatcccctcctacataataaaattcatgctaaaacctttggctgaaacaaattctatgggcataagaccacaactgtttatcagacatatatttattatgacggttattgc

SEQ ID NO: 32516 - DNA, 312 bp, Glycine max
  Clone ID: PAT_MRT3847_129367C.1
gtttcatattttcctatccttccacaaaattaactatacggtaaattatattacatcagtttgcattctgctgccatttcactcttcgctgccttctttcgttaacataattaaattacttattatcacaacattctaaacttactgacttccacctactatttacctcttctacctcataattaattccttactcatacctacattcttaccacctttccctatattcagtcctattataccttgacataatcatcctcatatctgattcctatattaaattggtatcctctcactaatccacacatcata

SEQ ID NO: 32517 - DNA, 421 bp, Glycine max
  Clone ID: PAT_MRT3847_129368C.1
cccacgcgtccgcccacgcgtccggttgaaaactaagaacaaagaaatggcttccgcaacggtctcctccacagctggtaccgccggcaaccgtgccggtgccggcatggaggctacattcaccggcctcaaatgcaagggtggcttccccacgaggaagaccaacaatgacattacctacattggtagcaacggtggaagaggacaatgcatgcaggtgtggacaccaattggcaacaagaagtgtgagactatttcctacttgccagacctggacgatgcccaattggcacaagaagttgaataccttctaaggaaaggatggattcctcgcttggaattcgagatggagcacggtttcgtgtaccgtgagcacaacaggtcacctggatactatgatggacactactggaccatgtgg

SEQ ID NO: 32518 - DNA, 258 bp, Glycine max
  Clone ID: PAT_MRT3847_129369C.1
ccatttcacaagccaaagtgccaaatccatctttcaactttcccttctgtcttcactttcagcttcccattgttcccatttcaacactctaagcacacaaaaaacaaacctttttcacttcctctgcaaaaacccagaattctcagacaaattctgacttctggggtgtggttcaaattttcacctgaaacagaaagtctcattttttaaaacatgagtgcaagtgacgacacatggggtgaattggcacaattgaga

SEQ ID NO: 32519 - DNA, 492 bp, Glycine max
  unsure (1)..(492): unsure at all n locations
  Clone ID: PAT_MRT3847_12936C.1
cttgggtggacactattaagtcaaagaaatacttaaatgtttttgtgttgtttgagaaatgtaaatttgtttggagcaacgatacttgtggtcatttagcttgttattttcagtctgcacctgtctggcactggggcaccttgtagtgggttttgtgtcccaaacaataatgaagtaattttgattctaccactattattggtctatgtaatggtccagtctgacacttacaacctcccttccaattttctatacatttataccgttgtgggctgagtttcttctagggttctagaaatatttnttatgcttgttttaaaataatattagaatgtgatattcgttattcagccgtttgcttttaagtggagagttagtcatcagcatacttctttgcaattgtttactgttaagtggagttgaattacattgcagtttgctaatataatttgcgatccttgaaaaattcatatgggataggcttaattacga

SEQ ID NO: 32520 - DNA, 342 bp, Glycine max
  Clone ID: PAT_MRT3847_129370C.1
ggctcgagccttgactctggcggtcatcgttacttatcctggacgaagcagatgaccttgaacatcttgacctgaactaccaactctgttgcatagcagctctaagaaaacatcaatatcatcgccggccatagacagcacaggttagtagtagacgctgtccaacgtgcggtaacgttcagcggactgcaacttgaggactaccgcacaggagatgcctacagcatacggagtgtgattaccatgtgagctatcactacatcaaagtataggcacgcacaacttagatatgaacccgactggccagaatatactcgtaaatgatgatcgctgagacaccgt

SEQ ID NO: 32521 - DNA, 385 bp, Glycine max
  Clone ID: PAT_MRT3847_129371C.1
gagcttacaaatcattatggcagtatgggcatacagcattacactgcacatattaaggttggatatgagaacaggtggcacaattttgatgacagccacatatgactcataagggaatatgaggttaacacttgatgctgtctatgcgctatcgtacatgagggtgatgaatgactatgccggtgctagcaatggggctttatcgcgttatgttggtagtggtatgtataaagtatatgtcaagaacatacgtggtgttttcacagaagctgttgataataggtacgcgaaccattttaaatgtatgccgtaatatatggattttattcccattactggttgagacggcccaagcgtgttgatgccttagtgtctctcgttgaaa

SEQ ID NO: 32522 - DNA, 319 bp, Glycine max
  Clone ID: PAT_MRT3847_129372C.1
ggctcgagcaagaacttaaaggaggttgttctcaacacatgggagaagttaattctcagggatcgggcgtgtttctctggtaagttatcatttgaacccaaatcagttgagagagagaagctcgacaaggtgggatactctatcattggaaacgcttgtagaccactgcagtgtctcatatagaggctaccatgcgactttgtattatatattatttaactatgtatacaacacatacttcacctgcccaagcttaaaaaattatttagttctcctgggcctacaggatacatgtgaaaaaattgcagtgaaacccttt

SEQ ID NO: 32523 - DNA, 1371 bp, Glycine max
  Clone ID: PAT_MRT3847_129373C.1
gaaaatcctgaggataaaaaggaaacttagaaaagagagtacatatacaatacaagacaacttcacacacacaacactttcctctctctctctctctctctctagggttccaagtttgaacttgaaagtgttgaactttctctagctttttcacaaatttggttgcacttgcaactgaggcaggaaagagggatcaccagggggcacgagaggaggaagaggaaagagaagaaaaaacaagaaaagtggagaaaggggtaggtgttgtacagaaatagaaattaaaaaattgagtgaaaaattaaaagggaaatttttttagaagaagagtgatagggatatggggaggggaagagtggagttgaagaggatagagaacaagataaacaggcaagtcacttttgcaaagaggagaaatgggcttctcaagaaagcctatgagctatctgttctctgtgatgctgaggttgccctcatcatcttctccaaccgaggcaagctttatgagttctgtagcagctctagcatgctcaaaacacttgaaaggtaccagaaatgcagctatggtgctgtggaagttagcaaacctgccaaagagctcgagagcagctaccgtgaatacttgaagctgaaagcaagatttgaatcacttcaaaggacccaaagaaaccttttaggggaagacttaggcccactgaatatcaaagaacttgagcatcttgaacggcaattggattcatctctaaagcaagtgaggtccacaaagacacaattcatgctggaccagttatctgatcttcaaaccaaggagcagatgttagtagaagcaaacagatccttgacagtgaagctggaagaaatcaattcaagaaaccactacaggcaatcatgggaagctggtgatcaaagtatgccatatggtggtggtggtccagagaattctcactctcattctcactctcagggcttcttccaaccattggaatgcaaccctacactacatattggtcctgattacaggtacaatgctgtagcttcagatcagataactgccacaactcaacctcaacaagtgagtggctttattccagggtggatgctttgaactaattaggctcagtgcattcaggtggagacataaaaaagcaaacaccttacaaaagggcaaaagccaaaaatgcatcttggtgttggcaaggtgtaaatgcaaccctgcttctacagttattttggtgtataagaaactgatgttgtgacttgttcaaacttttgaacttttagccatagacatatatggcaatttataacattaggtatcttttaaaggatccctttttattattaaatatctgaacgaccgatttcaatttt

SEQ ID NO: 32524 - DNA, 932 bp, Glycine max
  Clone ID: PAT_MRT3847_129374C.1
aaagaactccaaccctaagctgcactccatttttttctggtggagatggaaaatcctgaggataaaaaggaaacttagaaaagagagtacatatacaatacaagacaacttcacacacacaacactttcctctctctctctctctctctctagggttccgagtttgaagttgaaagtgttgaactatctctagctagcttttcacaaatttggttgcacttgcaactgaggcaggaaagaggggcacgagaggaggaagaggaaagagaagaaaaaccaagaaaagtggagaaagggataggtgttgtacagaaatagaaattaaaattgagtgaaaattaaagagaagaaggagtgatagggagatatgggtaggggaagagtggagttgaagaggatagagaacaagataaacaggcaagttacgtttgcaaagaggagaaatgggcttctcaagaaagcctatgagctatctgttctctgtgatgctgaggttgccctcatcatcttctccaaccgtggcaagctttatgagttctgtagcagctctaggtatgcagtgtgtgttgatccttttttttctgtttcttctctttgtgagatactgaaaatcactttttctttgttgacctatgagatctacttgctccattattttatattttatttttttggtgcctttctttggatttgtttaatttgttagcttcaacaattaaggacaaaattatttagtgactcctcattttttatatttattattatgtgaacttgtggctttttgtaagaagccctatatgtgcttcattgctccattagaatagtaagagttcatttctaatttgatcttttttgtaagggatggtagatttatcagatctagtaatatggcacatgatctggtggatatctaatatttaaaaaaaagggcg

SEQ ID NO: 32525 - DNA, 252 bp, Glycine max
  unsure (1)..(252): unsure at all n locations
  Clone ID: PAT_MRT3847_129375C.1
ggctcgagttaaaatataanaaatataattaactctttttcaagtgcaacaagaacacannatagggaaattttaatagaaagtggtgaaaaactatttccctgtttgaaactatgaaaaaacaaaagaaaggcccattcgaaggaactatgcaatctctttttttttggccatatccttaatttggcctaacaaattaacccccaaacccccatttgccaaatggccttgccttgttttgtttcttcaaaa

SEQ ID NO: 32526 - DNA, 291 bp, Glycine max
  unsure (1)..(291): unsure at all n locations
  Clone ID: PAT_MRT3847_129376C.1
ggaaaaacatggcgcctggcaacccaactggaaaaaggcatgtgtcattggagcgagcggatttatggccgctctgttnatcaagcacttgcttgaaaagggttatgctgtcaatgcctcagttagagacgcatgaaatactagaaagtgcctgacctttggggactgcgaagtttgggcgaattgaacataggtggagcagattgaactggtcgacgagatcgtgatgctgctataggannncgtgaagttncgttgnagcttggtgcacgtgtgaactttgcttctgaa

SEQ ID NO: 32527 - DNA, 503 bp, Glycine max
  Clone ID: PAT_MRT3847_129377C.1
tgcagctttgcaaacagcttttccattcatattttcagcattgaaattttctggaagaaaatagtcagttaaaggatcccaagttgatttgtctaatccataaggagcaataaccatcttgcccctatgctgtcatattacctatgaacatttaaagtggctccagttcatgactcaaattatgaacaattacgtgctccggatagatgagatgacattattacaactctattcgaatagacaactccaccctgtttgacaaacgtatccctgaaaaggggcccaacaatggctgtcccccaattatgtagatgcaacacatcaggctgcttcccacattttacaatatagtccaatgatgcccggcaaaaataggagaacctttcaaaatcatctgggtatccatatatcatctcacggctgaaaaatgatgaatagtactttggctctatcaaagtcactccaatgccaaaaacaacactgccacacaccagtccaaaatc

SEQ ID NO: 32528 - DNA, 492 bp, Glycine max
  Clone ID: PAT_MRT3847_129378C.1
gttccataaatatttttttttttttttttttggaaaaaaacccaaatttaaaaaaacgggaattttaacccccaaagaaaaaaacccaaaaaactggaaaaaacattttttcccattaacttttaaacaaaaaaaaaaattttaaaaaatgaattttttttcgggcgtttaaaagccaaaaccgaaaagggttttgcccaatttaaggggtaaaaaaaaaagcccttttgctttttcggccgaataaaaaacttttaattaaaaaaaaggccaaaacccggggaaagggggatttcgtattaggcccctttaacaatatttgatcaaaaaaccactaaaatgggaggatcgggtaaaaggaggggtttaatagtaaattaaaggggggtatcccggttttccaaaaataaggggaaaacccgggaaaaaaacatttggcaaaaggccccaaaaaggtcaagaacccaaaaaaggccccctggaagggctttt

SEQ ID NO: 32529 - DNA, 651 bp, Glycine max
  Clone ID: PAT_MRT3847_129379C.1
gtttcagcagattttcccaacttgactcaaattggcatggtagaggggcatgaagggaattatgggatattggagccaaataaaatggggtcaggaagagacttctcccttccttcactagaaagtagaagcattgaaagcaatagtgtcccaattgatgtgaaaagccataacaaccacttcaattatggttccttcaagcacactgataagattcagggctccaaagtggaggacttgatcgggtttggaaatcatggccaaggggaaaatttaaaaatgggagagtgggatttggagaatttaatgcaagacataacctcttttcctttccttgatttttaagttgattaagtgcccttctttggaattcccttcctcattttggatctctcacttttccctttcctctctatcacttttcctcacacatatctgccacatacccttttttttgctcaaggtgtctcgatcgagagtaagatactaatccctcgagctaatttctcaagaaatggaaattcattaagagatttatctctcaaacaaatatttttctatacatgtggctctaggaaatacccaccacatacatatatagctatatacaaaagacaacacaaagctcaccttaggaaatgttaggcacca

SEQ ID NO: 32530 - DNA, 317 bp, Glycine max
  Clone ID: PAT_MRT3847_12937C.1
cccacacattacaccactgcacaatttcttgaatcagtgttcattgcacattatcacagaaatgggtgatgagaacacggacgcaggacggtcatcagggaccacacatgcaaagaatgaataagagtaaaaggatgaagagcccctcataatcatactcaacgtggatatgcactgcaaagctcgtgcatggaacgttgcacaagcattaaaaggatttgaaggagtctatgaggcgactgcatatagcaaggctagcaaagtcgtactgaaaggaaaggcatcagaccccataaacgtgtgttagagactactca

SEQ ID NO: 32531 - DNA, 886 bp, Glycine max
  Clone ID: PAT_MRT3847_129380C.1
gcgagtgagaatcaaatacaagtaccctataaaaccctaaaaatccattagggttttctcgttcgctcttcgcacaccacactgatggcgtgcacaatcgacttccgctgtctcgacgagggttttggcggcaaaacctacaagcgcaagagagagcagcagtcgcagcctcagcacgacgccgccgccgatgacgtcatcgacggcgcctctctgatggacaccgacgacgcactcccgccgccggcgaagcgatcggcgctaccatcgtcggagaacccggacaagccggcgttcggtcatccgagctacgacggcgtgatcgccgggagggtgtcggggcggaagtggaagcaagtgcggcagcggagggcgtcggcggcgcaggttagccggaaggggacgacgttcgagcagagggagagggagaaggtgataaagaaggcgtacaaggagaggatgatggagctgaaggaggagattcggttgaacaaggtcgagaagaggaagaagaaagaggagagggagaagaaaaagcaggagaatatcatcagatctggaaccaagttccaaaagattacaaaccctaatactttgaagaagatcgccaaatccaagcagaggaagcagcttagggttgttcctgatgaattggttaggaaatagtatgttttgtttttttatctttttcaattcggtttttatatattgctttttggtggaaaattttgtagtattgagatttcaattgatgattagtatacaagtttctgtggtaactgatagttgtttgcttttgagctccctcaggtttcaattaaggatgtaaaattttcacatttaatctatagaaatcgcaaaattccgtcatggttgctccctcctt

SEQ ID NO: 32532 - DNA, 849 bp, Glycine max
  Clone ID: PAT_MRT3847_129381C.1
tctatttacttgattccaatttccttatatgtatccattgaaattgtaaaggttcttcaaagcgtgttcatcaaccaagatgtgcacatgtattatgaggaaactgacaagccggcacatgctcgtacatcaaatatgaatgaagaacttggtcaagttgatactatactttcagataagacaggaactttgacttgcaattctatggaattcattaagtgttctatagctggggttgcttatggacaaagagttacagaagttgagagagctctatctgggagacatgaatcacatccaggccaagtgttggaaaagatcagtgaatcaaagtcatccattaaagggtttaactttatggatgaaagggtcatgaatggaaattggatcaaagaacccaatgccaatgtaatccagaatttcctacagttgctggctgtatgccatactgcaatacctgaagttgatgaagaaacaggtaaggtttcatatgaagctgaatcaccagatgaggcagcttttgtgatagcagccagggaacttggatttgaattttatgaaaggacacatacaactatttcactgcatgaattggaccccatatcaggccagaaaatcaacaggtcctacaaacttttgaatatattagagtttaccagtgcaagaaagcggatgtctgtaattgtgagagatgcggagggaaaactattgctacttagcaaaggggctgacagtgtaatgtttgaacgaattgcaaagaatggaagggattttgaagagaaaacaagcagcacattagtgaatatgctgattctggtttgaggaccttgatacttgcatatcgggaac

SEQ ID NO: 32533 - DNA, 1915 bp, Glycine max
  Clone ID: PAT_MRT3847_129382C.1
cgagaagacgacagaagggggctgttgctcttcctaaaacccagaaccagatctagggtttattttccttttcttctcggatttgaacaagttttgcgtcttcaaaggaaataggatgggagaattgaaggacactgaggcttacgaggaagagctcatcgactacgaagaagaagaagaaaaagctcccgattccgctaaacccgttactgaatctggcaagaagggttatgttggcatccatagttcgggatttcgagacttcctgttgaaaccagagcttcttcgagccattgtggattcaggatttgagcatccttcagaaggtaatcactactagcatattaatacgtcacgaaaattggttggtaaacctttacattaaaaggatctggcagatcatatatacttactgaggattcgtccactacaattttgtttgcttcttcattagtgcaacatgaatgcatccctcaagcaatcttaggaatggatgtcatttgccaagcgaaatctgggatgggaaagactgctgtttttgttttgtctacacttcagcaagttgatcctgttcctggtcaagttgcagctcttgttctttgccacaccaagagaactggcttatcagatttgccacgaatttgagaggttcagcacatatcttcctgatataaaggctgctgttttctatggtggtgtcaacatcaaggttcacaaagaattgctcaagaatgaatgcccacacattgttgttggaacacctgggaggattcttgctctggctagagataaggaccttggtttaaagaacgtgaggcattttatacttgatgagtgtgacaagatgctcgaatcacttgatatgagaagagatgtgcaagagatcttcaaactgactccccatgataagcaagtgatgatgttttcagctacactcagtaaagagatccgaccagtttgcaagaaatttatgcaagatcccatggaaatttatgtcgacgatgaggccaaattgactcttcatggtcttgtccagcactatatcaaattgcaagagacagaaaagaatcgtaagctgaatgatcttcttgatgctctggatttcaaccaagtagttatttttgtcaaaagtgtcagcagagctgccgagttgaacaagttgcttgtggagtgtaacttcccatctatctgcatacattctgcaatgtcacaggaagagagattgaaacggtacaagggcttcaaagaagggaagcaaaggattctcgtggcaacagatttagttggaagggggattgacatagaacgtgttaatatagttattaactatgacatgcctgattctgctgatacttacttgcacagggtgggaagagctggcagatttggcacgaagggacttgcaattactttcgtgtcctctactgctgactctgaggttcttaatcaggtgcaatctaggtttgaggttgacataaaggagcttcctgaacaaattgacacttcaacatatatgccaaactgatgacgctttggaactattaggaggcagatctcgaaggatctttgcggattggggaatggtgtggttggcaactcatcaatttgagtgcttagatactatttaacaaaagatgttattgtttaaattgtgagattggccctatttgaatgactccctttttgagactcagcagatgtatttgtagaatacatagtcagtgtagcttataaatgtattgttatttgttaatcatcggttcgttgaacatttgcagcagtgttaaatcatcgattcatttaacattttaagtagcagcaattggtatcgctctgcttgaataaaggctctaattgctttattttgtctaagggttgcaggaaaaaaaaaaaaaaaaaaaaaaaaaaaaaaaac

SEQ ID NO: 32534 - DNA, 255 bp, Glycine max
  Clone ID: PAT_MRT3847_129383C.1
cccacagcgtgcgcaccaggatgcacattctgaattgtgaatctagcaagcagagcttttgtcaattttctattgaccttctcggtggaagaattgtaaacggacactagctggagatacgggacacacttatgcaaaattcttcaattagaaacttgcgagaggagtggttcaacaaggcctggtatggtaagatgtggctatgtgacagctggaatctgaatgtcgactatggggcgccatgtgtcatatgac

SEQ ID NO: 32535 - DNA, 461 bp, Glycine max
  Clone ID: PAT_MRT3847_129384C.1
gcggcggaatcccacctgggattctgctaatacgaggaaagcaatggaacctccagacgcaccgctacatggggctcctcaccaccttcgtcgcctacgcgtgctaccacgcgtcaagaaaacccaccggaatagtcaagagcgtcttatgccccgaacacaaaggaacctcgcaaggctggagcccattcaacggtcacgatggaacgtcgaagctgggcgaaatcgacgtggcgttcttagcgtgttactctatcgggatgtacgtggcggggcacttaggagataccctcgaccttcgcttgttcctggcaaccggaatggtcggtagcgggatattcgtatcactcttcggaatgggatacttctggaacatacactcttttttgttctacctttcaatgcaaatgattgctggcatgtttcaagccacggggtggccttcggttgtggcggttatc

SEQ ID NO: 32536 - DNA, 534 bp, Glycine max
  Clone ID: PAT_MRT3847_129385C.1
ggcccccccaggggaaagggaattttttggttaattgggaaacaaaaaataatttttttttaacaaaaatttttttaaaaaaaattttaccaaagtttaaactcccctggcttgggccccttttgggaaattttaaattttagctacaaaaaaaaaaaaaagttttttatgtttcaggggcattttttaaaaaaaaaattactggtttttgggaaaaaaattagggggcctagcattacaggaggggttaattttttggaaaaaaaaaccatgggctgataccaaacaaaaattttaccaaaacagttttttatcgaaaaattttacattaccctttacaatttggcttacccccctaatgccaaacatacaaaattggggcttggtttgtttattaaaaaggggggctaaccataccggagggcccccctccaaggggtgatcaaggcaattatccacaattttgggtttccaaaataaagaaaaggttcatttgggttgaaaccaaaattggtttttttcacatccccaaaa

SEQ ID NO: 32537 - DNA, 1421 bp, Glycine max
  Clone ID: PAT_MRT3847_129386C.1
cggctgcgagcgacagaagggtacggctgcgagaagacgacagaagggtacggctgcgagaagacgacagaaatcggagactacagcagattcaaggaacatgcttagaaaactgccaagcccacccatattctctcaaaactttcaaccatgaactgaacaacaacaacaacaacaacagggccacccgtacagacccacctccaaagagatcatttttattaccaattttccgatttcacagagaaaattctttgtgggcatctcttcaaaaatgtcaagcttccccaacacggtggcggaaggccgcaggtccggcaaggcaccggaaaaatccaccttttctcagacttgcagcctcttgagccagttcttgaaggagaaacgtgcttctgctgattccacccttggaattggtggaaaaatggaacctaaagcgaataccaaggctttgttaggaagcttgcaaaactctgatggggccttaaagctaagcgcttctgccatggaatttcttccccagcttgtggaaaacccctgcattaagaagtctaggtcaccgggacctgaatctccccaattgacaatattctatgccggaaaaatgttggtatttgatgcctttccgccggagaaggcgacagaggtcatggagatggccaccaagttggcctcgaacaactccggcactgaagaaagtccccctagccttccggttaccactgaaaaattggctgtgtccaagatgcctcaaacaaacacatcctcagaaacccctaagcccggaaaccaaggggttggttcagatatgaggtacccaaggagagcttcacttctaaaatttcttgagaaaagaaaagaaagggtcaatgctagagggccataccaaatgaacaatctcaagccagaaggaagcagttcaggtggtgaacctgaagatcagtgttccaaacagtttgaccttaacttttagtggtttagttcattgtgaatttaggatatacatgctctggtcaaccaaaaagcacctaacttatatgattgttggcctttcgaagattactgtggccttcatacgtatttcataagatatatatatatttgtatgtattattatttcatcaattaggtcctcctcttcggaccaaaccagagataaatttagctttattaccgagatcgattaaattcagagaatttaaagtactttgtgtgcattatttggatcatttttagtgaatacaagtgttttttacatttgatcctgctatattatttgctttgtatcgtacgggtgaaaatcttcatttcttcagtctttttctattaatttctattaattttgttctagattataagcagaatttatggttactcacggggtttgtaaattcaactatttattaaaaatatatagaatt

SEQ ID NO: 32538 - DNA, 314 bp, Glycine max
  Clone ID: PAT_MRT3847_129387C.1
gtgtgtcacctcatcagaagcctgttttcctaaccgttttttggacacacccacatcccaccgttgtgtgccctcttaaaacgacggcggaagcacgaagcattcgttacacttgaaggactttctacaaaacaaaacctaacatatgaataacaacaccctatgtaccaccatttacttctcaccaaccaaatacaataaaaaccaaaatccaccaaacaccaacaaaaacgtggattattctgaaaccactcagaaacccaagggaactagtaatcctcaaactttcaccaatagaataaacttcaagccca

SEQ ID NO: 32539 - DNA, 1198 bp, Glycine max
  Clone ID: PAT_MRT3847_129388C.1
cagaccatatcagattcaaggaacatgatttagaaaactgccaagcccacccatattcattctctcaaaacttccaaccatgaactgaagcaccacacatacccacttcctccaaagacatcatttttattaccaatcttccaatttcagagaaaattctttgtgggcatctcttaattaaaaaaatgtcaagcttccccaacacggtggcggaaggccgcaggtccagcaaggcaccggaaaaatccactttttctcagacttgcagcctcttgagccagttcttgaaggagaaacgtgcttctgctgattccacctttcgaattggtgggaaaatggaacccatagcgagtaccaagggtttgttaggaagcctgcaaaactctgatggggctttgaaactaagcgcttctgccatggaatttcttccccagcttgtggaaaacccctgcattaagaagtctagatcacagggacctgaaactccccaattgacaatattctatgctggaaaaatgttggtgtttgatgccttttcgccggagaaggcgacggaggtcatggagatggccaccaagttggcctcggacaactccggcaccgaagaaagtccccctagtgctccggttgccactgaaaaattggctgtgtccaaagtgccccaaacaaacacattctcagaaacccctaaggcaggaaaccaaggggttggttcagatatgaggtacccaaggagagcttcacttctaaaatttcttgagaaaagaaaagaaagggtcaatgctagggggccataccaaattaacaaccacaagccagaaggaagcagttcggggggtgaacctgaagattcccaacagtttgaccttaacttgtagtggtttagctcatcgtgaatttaggatatacaggctctggtcaaccaaaagcttctaacttatatgattgtaggccttcggaagattactgtggccttcatacgtattttataagatatatattcgtatgtattattatttcatcaattaggtcctcctctttggaccaaaccagacatacatttagttttattactgagatcgattagtttcagagaatttttagtactttgtctgcattattttcatcatttttagtgaatacaagccctttttacacctgaaaaaaaaaaaaaaaaaactcgagactagttctctcc

SEQ ID NO: 32540 - DNA, 441 bp, Glycine max
  Clone ID: PAT_MRT3847_129389C.1
aaaagttggtagcatttgggatggaaaaaagggcttgtccaggagaacccatggctatgcaaagcgtcagctttactttaggattgttgattcaatgttttgactggaaaagagttagtgaggaaaaacttgatatgacagagaataattggatcaccttatcaaggttgattccgttggaggccatgtgcaaagctcgcccacttgccactaaaatttgaagtttgtaatatatagtatttttatttggtaaacttgggtgatcgagaatctaattacttatagttacagtgtgtaagtgattgtcttatacgtgttaaaattaaaaaatatttattgtatgtcggcaaggccaattgtagaattgggtgtgcattatatcaatattgtatgcatcctgcatccataatttcttgaataaatttccttacgttttattcc

SEQ ID NO: 32541 - DNA, 135 bp, Glycine max
  Clone ID: PAT_MRT3847_12938C.1
ggcgaatctgatttttaattttacagttagtatgtgaaaccctgaaggtacaaagaacctgaatttgggacttaactcgaaatgtcctataactaaaatgatggtgtcctgataatgttgtggttttcatttaga

SEQ ID NO: 32542 - DNA, 440 bp, Glycine max
  Clone ID: PAT_MRT3847_129390C.1
tttcgagccgaatcggctcgagttctctcaaaacttccaaccatgctctgaagcaccacagctacccacttcctccaaagacctcatttttattaccaatcttccaatttcagagaaaattctttgtgggcatctcttaattaaaaaaatgtcaagcttccccaacacggtggcggaaggccgcaggtccagcaaggcaccggaaaaatccactttttctcagacttgcagcctcttgagccagttcttgaaggagaaacgtgcttctgctgattccacctttcgaattggtgggaaaatggaacccatagatcacagggacctgaaactccccaattgacaatattctatgctggaaaaatgttggtgtttgatgccttttcgccggagaaggcgactgaggtcatggagatggccaccaagttggcctcggacaactc

SEQ ID NO: 32543 - DNA, 342 bp, Glycine max
  unsure (1)..(342): unsure at all n locations
  Clone ID: PAT_MRT3847_129391C.1
acagggaaacttcaggactcgtgtaaatgttctagaactcatccaaaagagaacttgcttatgaccttaagaataacatctcttacttacctttatttcttaaggagaggacactgtntcttatgagaacgggccccagttcaatttatgggtgaaacttacattgacatgggccataaagtgaatcatcaccattactctttattctttcgctctgggaatatcggccataccttatacttctacctcaaaaatgaccatcatcttgtagggtccgccttagttatttgcctaacttagatttttttgaatgtaacaggtcaatgcccccaccacaagctc

SEQ ID NO: 32544 - DNA, 914 bp, Glycine max
  unsure (1)..(914): unsure at all n locations
  Clone ID: PAT_MRT3847_129392C.1
gattcaaggaacatgcttagaaaactgccaagcccacccatattctctcaaaactttcaaccatgaactgaacaacaacaacagggccacccgtacagacccacctccaaagagatcatttttattaccaattttccgatttcacagagaaaattctttgtgggcatctcttcaaaaatgtcaagcttccccaacacggtggcggaaggccgcatgtccggcaaggcaccggaaaaatccaccttttctcagacttgcagcctcttgagccagttcttgaaggagaaacgtgcttctgctgattccacccttggaattggtggaaaaatggaacctaaaggtataaccttttatttatttatttatttatttatttatattatttccccttgtggaatattattattattagccttgttcaccaagtttttattatgtgatgtgttcaccatccaatttttgttgtgggtaggctttgtgtcaacaattgatggtttggtgagggaaattatttttgtgttgctagctcaattgcataggaatatctagaaagtttgtgaaattgcttgtgacgaagaattgctgctgggggtgttgtttgtttggatttggaaattccaagcgaataccaagggctttgttaggaagcttgcaaaactctgatggggccttaaagctaagcgcttctgccattggaatttcttccccagcttgtggaaaacccctgcattaagaagtctaggtcaccgggacctgaatctccccaattgacaatattctatgccggaaaaatgttggtatttgatgcctttccgccggagaaggcgacagaggtcatggagaatggccaccaagttggcctcgaacaactcncgcactgaagaaagtccccctagccttnncgttaccactga

SEQ ID NO: 32545 - DNA, 257 bp, Glycine max
  Clone ID: PAT_MRT3847_129393C.1
actaactccagagtgtccacagaaccatacgagtgtttctcggattcagaaaaagagctatgttggtgatggttaattaatgaatgaagaatggcaaaaaaagctgtgttttttcttcttccccacagagctttttcttcctcaaccacagaaacccccaccctttactccttccttcagccctcagtctttgctctcaccaaaaaacaacaccaacccaattcagagccttctccaaagtccccaactttactctc

SEQ ID NO: 32546 - DNA, 298 bp, Glycine max
  unsure (1)..(298): unsure at all n locations
  Clone ID: PAT_MRT3847_129394C.1
ataggatgtctttcaaccgatatnnaatttgctatatatatagactttccctctgacaactgaagggaacataactgagtgtgtcccctggggctatcaactatcccattacaactgcattgcttatctatagatacatacaacatcgctcatgctaagtcatatacgattactnttnnnnattaactcatttactatatggggcattttggggtgtctggggccttagccttctctttccttgnncctcctcctggaggaacaggggctaaccctcttgctgccctatgtaccaaga

SEQ ID NO: 32547 - DNA, 342 bp, Glycine max
  unsure (1)..(342): unsure at all n locations
  Clone ID: PAT_MRT3847_129395C.1
aacgcgnancganagangaggnagcgnccananagngtagcgnatgnannannnnagggcgcatgcngagntacannggacacggtagcagggtngtgaaacanggngganactgccagctangctntgnangcgngagncgntncgcancannncgatcntganaagagngncnggnnntgcggnggcacncggncnnagtctnnagtncgagaganncccggnnngnagatnccggggagnatcgagancnagagnnnnatnaancaggagagaaggcatnncagcnnccagcngagctangcngnncgnnccaggngnagagnaganngtggggggcgc

SEQ ID NO: 32548 - DNA, 272 bp, Glycine max
  Clone ID: PAT_MRT3847_129396C.1
aaaaaaagcacatgtcacctttgagtatgtgtcactcctaattatgcgtgcgacggttccaaccaaaacggtgttctatgccattaggaaaacctctactatgctctatcttttcttagggggagccttagccccggtatttctcgaagagactgtatcagaaggttaccatacatgtggagataaacgcgctgtatcttattgcagtgagctaaaatcttttcaggggtcacaattgttactttcctcagtaagcgacaattgaccctttt

SEQ ID NO: 32549 - DNA, 440 bp, Glycine max
  Clone ID: PAT_MRT3847_129397C.1
cgcgtgcgtgaagctcggacattcgtgctcgaggaatcgcacaaagtttttttttttatcctattatatatacatatgtctacacattagtgtctcttcgagtccgacggaaaagagagcaagggcggcaccccgcaccgatatggcagaggtgcattgcgagggcaagaactacaaaggggtccgaatgagaaaatggggcaaatggggatgcctaataagactacccaacaggcgtcagaggatttggacgggatcctacaacaccgccgagacggccgcgcgtggctaacacgcggtaatgctctggtcacgtggccgaagcgcccagtttaatttccccgactacccacccgacatggccggtggtacgctcatgacgccgaaacaaagacagatggccgccgaacaattcgccaacacggggccccaccagggac

SEQ ID NO: 32550 - DNA, 306 bp, Glycine max
  Clone ID: PAT_MRT3847_129398C.1
aaattaaaatttaaaacttttatttttttctttattttccctccctccaaaccaaagggaccataaaggggggttggaaaaaaagtggaatctaacatcaacaaattggccaaaggaaaaatacaatatatagcgggctttgaaatttttatttaaaaaaaaaaatttttcagttaaagggggatccaacgcatattaaaaccctaactccttccgttttgaattgggttaaaacaattttattattctttcataccgacacataaccggggtcagtttacataaacggaataagcggacgcgggg

SEQ ID NO: 32551 - DNA, 225 bp, Glycine max
  unsure (1)..(225): unsure at all n locations
  Clone ID: PAT_MRT3847_129399C.1
accgaacaagacttcttaaattataaaattgtactaacattatatgctaggattaatagacgtggccaagaattagcccacatttaaaccttggaacaatgataatcccgaaaaaaaattactttaccttaagtctgaccttgcttgttttacctttattcttaaaaggcgtgggattcagaaatcgcctgaagagggaataaaagtaatncctggggcgggctt

SEQ ID NO: 32552 - DNA, 257 bp, Glycine max
  unsure (1)..(257): unsure at all n locations
  Clone ID: PAT_MRT3847_12939C.1
taacacacatgnanggaaccaggttttgaatcacctgcgttagtaggtccttgagactaccgtgatctgtaataatggagaagggacggctaatcatgtattgaggccacttctttacctatgaagttatcacaagcaatacacgcacatacgtcaactcgcgtgggagctatagggtaaatggttaacttaataaagggagtgagatgccctcgatgtgagagaactgattgaacaacagcctcaataacttaaga

SEQ ID NO: 32553 - DNA, 435 bp, Glycine max
  Clone ID: PAT_MRT3847_1293C.1
caaacacatgccatggcaccagcgtcaacgtgtatgaacttcaacctgtcaacaccattcaagggtctctctttatctgcttgttcatcattcttcggtggacagtagtggttctattcgcacagctcctgtctcggtggagcacttgacgcagcactaccctctgaccatagagaacactcacaagacgggggcgggcatcaccaagaacggacgcgactcgcagggcaagcgcctctgattcaagacttacggtgaccactgtcgcaagcccggatacatcatcggtctccagcgcggaacctagtctcatgcaggaaagactgtgtcgctggtcatagactatcccatgatctccttgattgatggacttgtaaaccctgagaaatattgacctgacatgacataggtgagtgattaccctacagaagtaca

SEQ ID NO: 32554 - DNA, 202 bp, Glycine max
  Clone ID: PAT_MRT3847_129400C.1
cttagtcttgacccataatggaacatcttctaggaagagagacacttgcagaactatattccttaatatgagaaacacatgcacaccctcgtgggatattcaaacttttactgccaatgactaccgagaggaagagaagacctactgatggctgctacaactacctttcgagagaaacaaagagctccacatttgtcaactg

SEQ ID NO: 32555 - DNA, 371 bp, Glycine max
  Clone ID: PAT_MRT3847_129401C.1
aggggggcggctcgcgtatatatatttatatactacatatttctttcgggatacacgagatatttgagcggcaacttttggagaggggggaaggcaaaaatctaaacattttatgccctttcgtaagctacccaagtcaaaaccctcttataatgcctattttcataagaacaccttctatattcactcaatttgatattattttcccagacggtaaatacccttcaccatgtaattcttacatatataacatcttccctccaccttacttttattaggtttcaattctaaaaggacttcacatagtactctatctctcaagaatgcatctcatacttttgcgaatatattacagaccttgggcccttttg

SEQ ID NO: 32556 - DNA, 411 bp, Glycine max
  Clone ID: PAT_MRT3847_129402C.1
atacccgggtttacccacgcgcccgcgacgatatttcacaatggcgcagggcgaggccaacacagttcgtgtcttggaaaacccttgggatcatttgccgcaccatcccactaaaaaaggaccaagagctgtacactgcggcgtgtggcgcaagaagaaacacatacgccggaaatgctgcgaggaatagagaggcgtactacaacctgcgagctggagctgacgaccggtgctacccaaaaagaatacggggtggacagagagcttgggaactaccccttctacctaggaagccgcccttcgtctactggccagggactaccactaatacaaggcacgaccgatgatcggaccgcctaaggcgactcatggtcattcccgtgtttaaaggagagaggggaatcccatcaa

SEQ ID NO: 32557 - DNA, 195 bp, Glycine max
  unsure (1)..(195): unsure at all n locations
  Clone ID: PAT_MRT3847_129403C.1
tccatttcttttctctcatattctaatctccaagatgaaagcttcacaagaaaagagaggaggtcctttccncttcctccccacaaacttctaaaaactccattactctctccactatctaattatccatttaacgatctataatacctttacacttcaaaaacttatgaatctcatcatcacattccatatttt

SEQ ID NO: 32558 - DNA, 643 bp, Glycine max
  Clone ID: PAT_MRT3847_129404C.1
cacctctcctgggtcacgctacccctttctgctctacttgtacctttcaagttgcaaaagtgaaagcatggcaccgacattcctatttaccttagagtcggtgaacgagggacaccctgacaagctctgcgaccaaatctccgatgctgccctcgacgctcgcctcgagcaggacccagacagcaaagttgcctgcgaaacatgcaccaaacccaactaggacatggtcttcgagagaactcacgaccaaggccaacgttgactacgagaagatagtgctgtgacacctgcaagaacatccgcttcgctcaaatgatgtgggactgcatgccgacaactgcaatgtcctcgacaacattgagcagcagagccctgatatagctaagggtgtacacgggcaacttaccaaaaaacctgatcaaataggggctggcgaccacggccacatgttctgctatgccactgatgaaacccctgaattgataccattgagccatgttcttgcaacagaactcggcgcttacctcaccagacgttgcaagaacagtacctgcccttggctgagtcctgatgggaagaccctaatgaccgatgagtattacaacgactatggtgacagggctgctattcctgtacacaccga

SEQ ID NO: 32559 - DNA, 520 bp, Glycine max
  Clone ID: PAT_MRT3847_129405C.1
ttggggggggggggggggtaaaacagttaggctattcacagcacgttgagatctggatggcataagagataagataaaatacgagtaacacaagcagagtaaatgtaatcgcataaaagcctgggtcggatgggctgattgcgccaatagagaaaacgaaaacaatgagagaaaggaagttactgcaccaatttaaaaaggtacagtgcccttaaaataaagaccaaaaatgcacgaaaaaaaagtgtttgtagggctgaggatctgctgcgcctacaccgccccctgtggaatgtcaggggtgagttgggtgggttctaagatttaaatggaatagatggggcaatttgggaggggtgttataaaacaaaaggtcattacaattggaaacaaggagcggggaccgtggttggaggtggtaaggtagcacctgttcactggtgtgagcggaacaataaagcaaacaaaccaaaacgatgcaagctaatactataatctaccatatatatagtaggccgca

SEQ ID NO: 32560 - DNA, 406 bp, Glycine max
  unsure (1)..(406): unsure at all n locations
  Clone ID: PAT_MRT3847_129406C.1
atgaaatgcgagagagagcagtgaggcttaaaattgccatccataggtccatggatgaaggtggggtttcttgcatggaaattgattgtttcatggctcatatcactaaatagctttatcaagtgatattagtgtggttccttgttgaatatgacagaatttaacagttcatggagttaatgcaaaataggtttggcaagtaaatacacacatatttttgtttctcgagacattatcttgcgaagtttctgggatcaatatgctaagccattttgcagaattcttatctttgtattttagaacaatcctactttggtgtcaataattgtttatagacatgcaaattaaagttttgaattaatacatataatcaaagacttcaaacaatattgaagatnnnaaaaaa

SEQ ID NO: 32561 - DNA, 564 bp, Glycine max
  Clone ID: PAT_MRT3847_129407C.1
ggatggcgatgctttcgcttctgttgtgtcttcgtcctctccgaccactcttcctcggtcaagcccgtcggcctcattgcactctcgttgcctacgacaaggccacctccgtcgcagagcaagaccatcacaagaaagtcctctgtaaaatctgagagctgagtgtttttagatctgaaatctgagtttttttattttagatctgagatctgcggagcaccgtgcgactctccctccgccaactacgtcctcctccaccagaccacaacttcttcaccgacgactgcgacaacgacttcctctccggcggcgacggcggctgctccttctccgcctcctcgctggcgacaactcccacccccaccaccaccaccactaccaggccaacaacctccctgcgccactgccactcttctacttctttcatttttcctctccctgttcatcgcatttttctgggttttttatgttcaagatttgtttttcttttgcttgtgtgtgttttttctgagtatgccttcgattattgttattttttaaattgttttggttctgttttttccc

SEQ ID NO: 32562 - DNA, 163 bp, Glycine max
  Clone ID: PAT_MRT3847_129408C.1
gaaaatggtgtgacaaaggttccacggatgttctattttgaacacctttattctcagggatggtttagccccagaatcaaattcaaacggggctttccccttcataaaccttactggcattaatgattacccctttttggaaaattcctgtgggggaaaaggt

SEQ ID NO: 32563 - DNA, 317 bp, Glycine max
  unsure (1)..(317): unsure at all n locations
  Clone ID: PAT_MRT3847_129409C.1
aaagaacacaagaggcttcttgctcgaaaatcaattattgagaaaaggaaagaagaacaagaacgacagcttcgtgaaatggaacgggaggaggagtggaagaggctaagactgctgaaaataactgaagaagcggaacaaagaaggcttgccactgagtttgagcagaggaaaaatcagaggatcctcagggagatagaggagagagaaaatgaagaagcacaagcattactccaggaagctgaaaagcgtattaaaaaaaaaaaaaaaaaaaaaaaaaaaaaaaaaaaaaaaaaaaaaaaaaaaaaaaaanaaaa

SEQ ID NO: 32564 - DNA, 367 bp, Glycine max
  Clone ID: PAT_MRT3847_12940C.1
ggagatatggtaacggttataaagcacagcatctaaactgagataacccgtcggggcatgttcaacagggagtgaatgatcttgggcaatcgaccgggtgtcttgaaactctatatcgactctactattgaactggtgaaagactcaaagtaaggaaagcttgtgcttgacgatggtggaaaaatctctgatgggacatgggaattttgccccaatgatgtttatagacctcctatggatgagggtttatgtccacagattctatcacctaaagatttgcctgtgacaagtcgtatgtgcaaaaatagcgacatgtgacatgatgcaatgcttagcagttaaagataaaacctttgatgactatatt

SEQ ID NO: 32565 - DNA, 479 bp, Glycine max
  Clone ID: PAT_MRT3847_129410C.1
aaaatgtacccttttgatcggattgtagcaccattctgaacatagaattgtgaacaaggatagaatatatttttaaatacattctcatggaattgttactagagacttttaagggaattgaagtctataatgtatcacaaaacatgatatgttatcataatatacacattggacagatttttaaatatcttgctcgggttgaacttgatcattcgagtgtctgctctaatacaatattttagatatggacatgaatatagggatcatgtgcaatgtaaacttatagaatttgattataaaaaaccagtttaaaattgcatattggagaattgaacttgattaatgtgtaataggcatacattatgtattaggacagatctatgcattagattgttatggagtgacaagaatttgtatttggtaaatacgataatggtatatgtggtcttgaatatgaacttaaagtgattgatatgcac

SEQ ID NO: 32566 - DNA, 413 bp, Glycine max
  Clone ID: PAT_MRT3847_129411C.1
tcgatttgtaatcaaggaacactaacagaagaagacatggcagtggaggtggcagtgtctccttatccaccaccttattgtttcatggactttaacttcgatagcaactgttcctacgcttacatcactgcaccgtgcagcccccaacgctctggcaacttactcttcagtgctcccaccagccccactctcagacactgctctgtttccactcccaacaccacccaagacgagttacaattctgacttcagatggtcatctccagaggcctttcctttgcgacgtggaactatttctgggcggaaagagaaaagctctcatacctcttttcacttcagctagctgaagaagagagaaaaggggtatccattaatcacccaccttcacaacaactaaagtgaggcaaggaaag

SEQ ID NO: 32567 - DNA, 157 bp, Glycine max
  Clone ID: PAT_MRT3847_129412C.1
gcgcgtttcgtcgaagggtaaagcaacttacgctgcgccgcttgggagtcccaccaggcgaagccaggtgtccgtctcgccaacagcgctggcgaatccccttcaaaaacagactcctccgaaaaaagttttaaaacagcccccttttagaaattag

SEQ ID NO: 32568 - DNA, 1735 bp, Glycine max
  Clone ID: PAT_MRT3847_129413C.1
gtaaaaattaaaacgttcgcttgaaatgtgcaacgaaagtcatacaccaattggggcaataatgggtttccacatagcaagtaataattacttggatattcagacaaactcacaatttaacataaattactaagcctattaaacaaagtttaagagcagaagtacaaccaaagaaacgaaaggggggggagacaggttagagtgagaaacattgcataacagtttccaaaacgcaaactaatttcatctaatacgacggatgacaaaatctgatcaaaggagctcagcaacatttgaaggcagctcctcaacttgcacgttgtaaaacttctggatgtcaaacagcattttctcgtcatcctttgtgacaaagttgatcgcaacacccttccttccgaacctcccactacgaccaatacgatggagatagttctcaggctgtgttgggagatcaaaatttataactagagacacttgttggacatcaataccacgagccaaaagatcagtggttatcaagacacgggaagacccagaacggaattcacgcataataatgtccctggtattctggtccatgtctccgtgggttgctgagactgtgtggtcacggcttctcatcttgtcagtcaaccaatcaactttccttctggtgttaacaaaaatgacactctgagtgatagctaatgtctcataaagatcgcagagtgtgtccagcttccattcctccttttcaacattgacataaaattgcttaataccctccaaggtgagctcatcacgcttcacaaggatcctcacaggtttgttcataaacttcctggtgatctcaagggcctcaggaggcattgtggcagagaaaactcccacttgaatcttagatggaagcagctgaaatatatcgtagatctgatccttgaaacctcgggaaagcatttcatcagcctcatccaatacaaacatcttgatgtggtctggctgaagtgactgtcggcgcagcatatcaaacacacgaccaggggtaccaaccacaacatgaacaccactagatagaatgcgctggtcctcacgcacactggtacctcccacacaagcatgaaccttcacacctagataatctccaagtgctcgcataaccttctcaatctgctgagcaagctcacgagttggtgctaaaaccaaggcctggcattgcgtcaagctatagtcaagttgctgcagaataccagagcagaaagtagccgtcttcccagttccagactgagcctgctgaataacatcaagtcccttgcagaagggaactatccccctttgctgaatggcagatggcttctcaaaaccatatgcgtaaattcccctgagaagattttcctgcaaacccatagcgtcaaaactatcataaacctcgtcataggatgtgaagaagtcctgtccatcagatgaaagtaagtcactcattttagaatcatattgacgagcatcgaactgtgacccctcaggtgcaagtccagccatgacttcagttgagatgatggatagggaaaagaagcgttgttctgttgtgaaggaagatgagttagggtttcccgaactcctcggatctacgccgcggagtcgagaaaaagataacgaagagcgtttcgctggtgccgaacgcagagagagggaagcgagtatgtgtgcccccttctgtcgtaatctcgccgccgtacggacgcgtgggcggacgcgagaa

SEQ ID NO: 32569 - DNA, 1084 bp, Glycine max
  Clone ID: PAT_MRT3847_129414C.1
ggatgggtattgggccgcgtttggtagagaagagaagaacttcttgtatggttattataaataataaattggcgcggttgttgttcccgccacgcgtgtggcatcttcggcgggcgcaatggagcaagagaattacaaaatcaaggcagtgaatttgcttcgaagcagaatctgtgatcccaaattcatcttcatcaatgaatctccagaaagcaaccacagcaagctgaaattcatgatatcgagttcggtgacggaggcgtgcaacaattctattcttcttctcggtccccgcggctctggcaagaatgcggttttggaacttgtcattcaagatttgctgcaagaatatccggactcgatctcagtgatgaggttgaacgggcttttacatagtgatgacatctctgcgttcaaggaaatagctaggcagttatgcatggagcatcaattgctattctcaaaagcggcatcatttgatgacaactcccaatttatggtggccatgctaaaggaatgtggattagcacataaaacaataatttttgttttggatgagtttgacctgtttgctcagggtaaacagagattactctatagcttgctagatgcaatgcaatcaataacatcacaggctgttgtacttggcattagttgccgtctggatgcagatcagctgttggagaaaagggtacgatctcgtttttcacatagaaagctgttgttcctaccaccttcaatagaagattcacaaaagttactgatgcacatgctgacattaccaattgattcaagctttccacatgcttatgctgttgaatttaacagaaaggtccaaaatattatagaagatagaaggttcaaagaaaccctcaataaatatttaaatgttgactcctctgtcaaacatttgctgaggttcctattctgtgcagtctctcatatggatttgcagactgggttcctgtctcgggagaactttgaaattgcatttacaagtatccagaggcagcccaaactggaatgtttaagaaattgctccattttagaactccaaattttggtttgcatgaagagattggaa

SEQ ID NO: 32570 - DNA, 210 bp, Glycine max
  Clone ID: PAT_MRT3847_129415C.1
gtatagaaacaaagtgttttcctccaaacccgttttaaaaaaaccaggggggcgggattttaaaaaagattttccccctaggaaaccccatcaaaaaatttttcaacccggtttttttaaggcccctcttatcccgcgaaaatataggggtgctccctgaatcctgaaaggcgcccctttcgtaaaaagcgcaacctccttatttaattg

SEQ ID NO: 32571 - DNA, 433 bp, Glycine max
  unsure (1)..(433): unsure at all n locations
  Clone ID: PAT_MRT3847_129416C.1
aaaaaaangcggggccattcatatttttttttataaaaatcagggggattgttcaacaagttgacttttatgtccaaattccaatgttcaataaaataaatctttaagcaaaattttgctaaaaagatttaaatgaatgaattcctccaaacccctttgaccaataaaatgaattggggcctaagttcaacaaaaacctccacaatcctccgacccaattgcccaaaaaaatggaaaaatgtcagggcttcgggcaatatatacaacctgggcctggtgaataatcttttttttcccaaagcaaaacagggtgttcatcccccgggggaagacataatagaccccatccaatctttttttcaaaaatggtttttggcaaacaaaaagcccgtgggccctgccatttttaagggggattacccttggttcccaa

SEQ ID NO: 32572 - DNA, 481 bp, Glycine max
  Clone ID: PAT_MRT3847_129417C.1
ttttttttttttttttttttttttttttttttttttttttttttttttttttttttttttttttttttttttttttgggaaaaagccaaaagcaatcccttttcaaaaaacccttttcccttatggggaaaaaaggaaaccgtttatgaggcttggagcattaataaagccgcttataaaatatcccgatttttgggaaattagggggtccaaacaaacaaggtaatcaaacaatttggaaagaaaatttttttttctgggcttggaaaaaaataacccccctaatcccggggcaagggaaccttatttaaaagacatgggggggccttgacaggggcccaaaatttttggggaaactgggatgggaacccgaaaaacttggtgcaaaaagggggcttcaagaccttgggggagcccccccataaaaaggtccccaaggttgggggcttaagggtgctgaaaaacctcgtattttgggggg

SEQ ID NO: 32573 - DNA, 1128 bp, Glycine max
  Clone ID: PAT_MRT3847_129418C.1
cccacgcgtccgcccacgcgtccgacggctgcgagaagacgacagaagggggcagtttcaaattttcttttccttcactttcccgagaaaaaaataacacttttcactttcttcactacgttctcacttcgatatggctcgtacgaagcaaaccgctcgcaagtccaccggtggcaaggcgccacgtaagcagctcgccaccaaggccgctcggaagtccgctccggcgaccggaggagtgaagaagccccaccgcttcaggccgggaaccgtggcgctgagggaaatcagaaagtaccagaagagcaccgagcttctcatcaggaagcttccatttcagaggctcgtgagagaaatcgcgcaggatttcaagaccgatttgcgtttccagagcagcgctgtttccgcgcttcaggaggctgctgaggcttacctcgttgggttgttcgaggacactaacctctgcgcgattcatgctaagagggttaccattatgcccaaggatatccagcttgcacgcaggatcagaggcgagagggcttagaaacaaggttgagaggtttgggtgttaggtgcttagggttagggttctggtcttgaaggatgtgtttgggagtttggttgtaggaatcctctccatctgtgtgtttatgtggaatgtgaaatgtgaatctctttgcttttgtaattatattgtgttactatgaggagttaatgaaaatgctatggttattgaagaaaaaaaaaaaaaaaaaaaaaaaaaaagcggccgatttaaaggaggaaaaatcaactattctaagagctacatagcagtgtgcgcttgttactaagatgtgaatggtcttgaaggacttgatcccggagaaattaaaactattctaagagtgacaatcaacatagcagtttgcgtgctttttatgtgtaaaattgcacttttttttcctttgcattctctaaaagagaagcattcaatagtttggagtttcttagcaggatgtttctgtttgtcccggtcgtcggtgacattgtaaatctcgcagtttgtcatgagattatgggacttgggtcctttttgaaagaaacgaatgattcaatgaaaccgcttgtggattttattgccctggc

SEQ ID NO: 32574 - DNA, 405 bp, Glycine max
  Clone ID: PAT_MRT3847_129419C.1
aaggcgggaaacccaacctggcacttacctttatcggctgggggtttaacataggctacaggacctttgttttttatttggaaggcgtaggtgccctgaaattgtcacttgttaagccgttggtattgggacaattgtttttgccatttaaagtgttccatttaattcaggagataatattctgggttgcaaacatcaattaagtggtgaaggtcctattgtaaattttacaatttttccaggccgtgaccaaagtttgaactaatgaaggattgaatgcctaattatgcatagggttgtcccatatcaaaggttatatgtggacactttcattaacctgggtgggctaatgttatttttgatgggccgagcctagtgtgaggagtttgattcatggggtaatga

SEQ ID NO: 32575 - DNA, 226 bp, Glycine max
  Clone ID: PAT_MRT3847_12941C.1
tcccactcctcatgctccctactactacaaatgccctccaccaccaacggcgcatcctccaccttaccactatagaagccctgcaccaccttctccatctcctgctgcaccatggcatgacacatcaccacctgctgcttccccagctcccggtcccaagtacatttacaaatcacctccacctgcagtttacatatatgcttgcccacctgcacctatctacaag

SEQ ID NO: 32576 - DNA, 882 bp, Glycine max
  unsure (1)..(882): unsure at all n locations
  Clone ID: PAT_MRT3847_129420C.1
gtgcggcgctcagggccgggccgggacaccttcgaattttcttttccttcactttcccgagaaaaaaaaaacactctttcactttcttgactacggtctcacttcgacatggctcgtactaagcaaactgctcgcaagtccaccggcggcaaggcgccacgtaagcagttggcgaccaaggccgcccggaagtccgctcccgcgaccggaggagtgaagaagccccaccgcttcaggccgggaaccgtggcgctgagggaaatcagaaagtatcagaagagcaccgagcttctcatcaggaagcttccgtttcagagactcgtgagggaaatcgcgcaggacttcaagaccgatttgcgttttcagagtagcgccgtttctgcgcttcaggaagctgctgaggcctacctcgttgggttgttcgaggacactaacctttgcgcgattcatgcaaagagggttaccattatgcctaaggatattcagcttgctcgcaggatcagaggcgagagggcttaggttggttagggttctgattttgaaggaggcgagacggcttagaaaaagaatcatctatctatgtgcttatgtgggcatgtgaaacgtgaatctgtttgcttttgtaattatctcgtgtttcttagacaagttaattaaaatgctatgttggttctcggagaaaaaaaaaaaaaaaaaaaaaaaagcggccagagttgttgttaagttttaaagaaattggtttcggagaaattttgtttattttaaaaattaagggattgtgagacttttatgtttaactataatgtatttgtgattagagaaataaagattgttgtaaagcctataaatataacagcgttgattnttttntttatgnaaaaa

SEQ ID NO: 32577 - DNA, 689 bp, Glycine max
  Clone ID: PAT_MRT3847_129421C.1
cccacgcgtccgtacggctgcgagaagacgacagaagggtaatgagtgtcatcatcaaaaagggggagaatgtgaatcatgcaggttttgatgatgtcgaaaaaaattcacttgataatgattgtcatcatcaaaaaaggggagaatgtgaatgcatgaatacatgattttgatgatgccaaagaagaatcaaacaaggttgcttcaaaggataagcattgcttcaaaattaatgcaaggttgcttcaacaaacaaagccttgcttcaagattaactcaagatcaagccttgcctcaaaataaagtgtttccaagacatcaaggctctggtaattgattaccaggcagtgtaatcgattaccagaagacaattttgaaaattagcttttaaaaatgggggttttgaatttgaattttgaatcatgcaatcgattaccaaatgtttgtaattgattaccagcaatgacacttcagaaaacactttgaaaagtcatgacccttcaaaatataaccgtgtaatcgattacctcgattaccagtgaagaatttcagaaaaagttttttgaaaagacacatattttcaaactattttgaaaatgcacaaagggcctatatatgtgtgtgtctgacttcgaaaaacaagagagagattctaagagaactcaatttccaaatgctcttccaacaac

SEQ ID NO: 32578 - DNA, 641 bp, Glycine max
  Clone ID: PAT_MRT3847_129422C.1
cacgcgtccgcttgataccccatctggtgagacggatgcatttattgtattaaaggaggccacgggctatgtctgatgccttgataaacaatgtaaactgcttaggagctcactacctttggagcctaccacccataattaagcatggtgtgctatccattcatcgcatgaggagtataaggggtataccatggttgctgactgatgaactatagtaatggctgaaaccaatggagcaaatctgtgaaatcccttccacattactactatgcctaaatcgcacaaagaacccaatcattacaattgaatgatgtgataacctttaccacctcacaggctgatagagtttgtaaactagcatgagtacgatcatgatcattcatctagaatgcatcataggacctatatatatccatatatacatggttatatcattatacaaaaaactatattcaagaagctgcaccacacctgttagattttaaacctgtgatggggctaatctttcactctccatatgcacccttaactaacgtacctcatgccggcgatactctgctgatcttaactaaactctacgtgcctactgagctcatgctctgattaacttagagtgctcaaagcaagcctacgctctgtat

SEQ ID NO: 32579 - DNA, 360 bp, Glycine max
  Clone ID: PAT_MRT3847_129423C.1
ctctcacacaagaatattaatcttcaaatatggaaccaacatgcggggatacttcactcgatcttaacgttgatgcttctactatgcacatggatggggctttggtagaagagttgcgtcgtctaagttgtgagaacaagaggttgacccacttgtgtgagaactacatggctctgcaaaagcaactgagccaattgatcaacacgaattttgatcagcaattagactacccaattgaatcttcacgcaagagaaaagctgccgagagtgatcaatgttgtaccaacaaatttgttggtgttagtaataataatgctgagtgcagctccatcatcactgaggattcattcaaaaagtaca

SEQ ID NO: 32580 - DNA, 546 bp, Glycine max
  Clone ID: PAT_MRT3847_129424C.1
cccacgcgtccgctgtcttgattttttttccacttcgaatctctctaagatcacttttatttgtgttggttgtgttacctattatttggattggtttctaaaactgacaagttggggttgtttttttcctttgaaatacaatctctaactttggttgctcttgttctctttcttctccccctacccttttttataatcattatcaaatataaaatagcaattaagatattaatagtacaatagctgcatcataaatatctaaattattgaattttggtggatttttttcatgtagtagttacttaagtagttaagttattccatttttatgttaaaatacactttttatttttagtaggagcttacgattcatgttatgattccacaatttacaatttttcacccccttaaacttaagttgggtcttgatcttgacaaccttggttattataattggtgaaaatcgttagtttgtaaccaaagctgattaggactgggggttttcgttttggtcagtttcagaagttcctgtgtttggttttttaa

SEQ ID NO: 32581 - DNA, 325 bp, Glycine max
  Clone ID: PAT_MRT3847_129425C.1
ttttgttaccactgtccacacacagcaaaaagggggcctaacgtttgcgaacgggggtggccacaaccaagatagtagtgcgaatctaaagatgcctacgctttctaatttgccagcacttgatgatgctgtgggttggcacaatccactccagcctgtaattacactggttgtgcttaacattatttggatttcaaagactaattgaaaccataggatcaagcctggaggaacaaagagagagagtggatggaaaaagaaatcgctcctataatgactgcgtactgggagaagggtgagttcccatttaatgtcatcccaaagt

SEQ ID NO: 32582 - DNA, 265 bp, Glycine max
  Clone ID: PAT_MRT3847_129426C.1
atgaaagtgtgtggaaagtgaggaagcatgttgagagatctttaatcttcattccaaggtgttattattattatttcattctctatccatatgtcacactacataattatgtacaactactatatcattttaactttttcgcggaaaaggaaaaaaatcttgaaaattcaccccaataaaaaccgtaaaattttggaaagagaatatgcactaagtggaacttttttttttccttatgtgtgtacttgtgttttatagatatgga

SEQ ID NO: 32583 - DNA, 367 bp, Glycine max
  Clone ID: PAT_MRT3847_129427C.1
ccaccaccaaattatacggggccattcttataaagaaccagttttcctggtacttttcccaaaaagaaacttaaggtaaggtttaattttgacagacccttaaatagtcctttcccaccgttgaaaaacaaacaggcccacatttcaatcctttttccctgtgaccaaatccaaaaaaggaaccttttaaaactttaggtttttttgtggccagattttattccacggtttaaaaaaaagggcataatatttttttgtttcattcttcaatcagcaccttcgggaaataaacctcttttggattctcccttccgaataaaggaaggtggatgtttaaatcggggggtttaactagcattaaaatagc

SEQ ID NO: 32584 - DNA, 336 bp, Glycine max
  Clone ID: PAT_MRT3847_129428C.1
gtctgaagcatggcttcatgcatggcaccttcgtcgcggatgctgggccaacctgaagacctctatagctctcagagaagcacatacgatgtgtatactgtgcgttataagccctccaaatgcctccacatagagcccaaatccaggacttggcgtgccctccgcgtcgctttggctgcacacgggcaagtgcctctgactgtgcacgacacggaggaggacgacggttatgatgggtccaacgacagcttggccgacaccaggaccaacaccaccaccgagcctaagaaaggcacggtcgcgttgcctcttaagagggacaggacgagatctaag

SEQ ID NO: 32585 - DNA, 321 bp, Glycine max
  Clone ID: PAT_MRT3847_129429C.1
ggcacaagtgagtttgttgatcgagattgctagatgcaatgtgatgaaaatgaatgtccttgttttctgcgttgctacacttttggtagcatggtaatgccatgcgtacgagatgtgccctctccgaatgaacactggctatggtgaccgtacaccggacgtgtaatgcgcaagttagatgcttgctgtggaagcatacagtatctttggctttgagaccagtcctgaagagtacgttgaagcagtacatgaatacatccatggcgaacaatatagatcagactcaaagatagttcaccaacaagcttacttttatgccat

SEQ ID NO: 32586 - DNA, 233 bp, Glycine max
  Clone ID: PAT_MRT3847_12942C.1
gggaaataagagggggccgaattgcctgagaacaaacacaaaaagaccatcctgggcacccaaaaaaaaaaaacgcacatcagccgatcacaccacacgtccggtacacccaaacccaacataccatatttgccccccgaatcacaacaattccaaagaccacacctcctaggccacctactatagaccaaaacccaaaacgtttgtcccaaaaaaaaacacccaaacactct

SEQ ID NO: 32587 - DNA, 221 bp, Glycine max
  Clone ID: PAT_MRT3847_129430C.1
ttgccgtttcgctttgctctcttcttaattctaatcaatcagtgcatgcaccttctttccgaattccgattatttaatcgcaatgttcatgttcctgattctttttttggtttggaatttttgctctgattttgatttctgatagatattacagtgtgctactcagatctggtgctgcgtgttgtgattttttttcttcctttttttgtgtttaattgatt

SEQ ID NO: 32588 - DNA, 123 bp, Glycine max
  Clone ID: PAT_MRT3847_129431C.1
atagaatctccttatggttggtagctatggtgtcagtggtcatttgggaacaatgtcaaagacatgggacccattgccattgtcactataatgatatagtgattttggtgtccacacaacata

SEQ ID NO: 32589 - DNA, 261 bp, Glycine max
  Clone ID: PAT_MRT3847_129432C.1
tagtctgaatccgttggcattcattcacatactgatagatatggcgcaagaacaagagttcagaacaagcaccccacttccaaagtgtgatgcctatttcgaaaccacacaatccagaaagaagctaccgctgtcactgcaggagacctggacagatgcatgtgcaaagattcctggttcttctattcctgcagtgcctagcggagaagtaattgaaattctagcagacacacccgttggtgaagcaggtaagattctatc

SEQ ID NO: 32590 - DNA, 411 bp, Glycine max
  Clone ID: PAT_MRT3847_129433C.1
gtcatcaatcatcatatcaccatacttgctttaaaaaaaaccatatcaccatacttgaccacacaaaaaaaagtatatcatcaaactcgctcatgacattaaagatacccataagggttgaataaagatattgtctcatcaaataataaacgataaatatttttcgtagcaaaaaggatcggaacacattctcagtgtttcgtatgtatagcatttaaaagttacaagttaggaccgtagatgaacaaaaatcaaaaatcgtaaattatagaactacattagaaaattaccattcaagaatgagagtggaactgcattcagaagaaatccttgattttgttatcaagcaccaaagaacaaagcacattgtacgcctcttccgtaggatggaaactgtcccagaatatgtag

SEQ ID NO: 32591 - DNA, 412 bp, Glycine max
  unsure (1)..(412): unsure at all n locations
  Clone ID: PAT_MRT3847_129434C.1
tttaaaagaaaaattccaccttgcaactattaatatgaancaaagaagaggggttttggtatttcggccaaaacatccagactcacaaaaggtacttcctgagtccaatctatgacagaaacaatcacaaaactcaacaccaattttataaaaaccaaaccactcggaatgatcacgtagcaaaaggcaaactccaacatatataaatataactctttatgtacccaaaaaaatcaatccacaacccatctggccccgtgatgtacataaaaccacccatttcaaaaacccaagacgctccaaacacactctatttaccaatgctggacctagccagaaccaaagacattttcttgaccccgaacagattgactgtgaaactggaggaccttattcactatactgataaacc

SEQ ID NO: 32592 - DNA, 346 bp, Glycine max
  Clone ID: PAT_MRT3847_129435C.1
gctaaaaacagttttaccatgtcttctccaagcaagcgtcgagagatggtctcgaggaaactgccgatgagtgactacaaagcggtgatgcttaatgacggactgctactctctatgtgcatttccatggacccattgagagtccttatcatggacgcgtgcggaaagagagggttgagctgacaaatgcttattcttataaactcccttccatagggtttatcaatgagatctatcacccaaatgtccatgagactgcaagatcagtctgtgttgatgccatcaatcctacctggagccccatgtaagaacttgacgatgtgatggaggtgtttctaccacaact

SEQ ID NO: 32593 - DNA, 163 bp, Glycine max
  Clone ID: PAT_MRT3847_129436C.1
gtaatacataagtgcttagagagagagagagatagaggtcaggcgatgacagaggtagcatgaggtgcggtgaaaacagatcgactgcggtcccacagacggtaagcgcaacatgacaatggatgctactgtacagtataagatacaccgaagttgtggaatc

SEQ ID NO: 32594 - DNA, 178 bp, Glycine max
  Clone ID: PAT_MRT3847_129437C.1
attaaaaatcacatttatcacaattggagtttaaaataattaaattataaggagacccatacaaagatttctcataaaacataactggaaactagattccactaacataactaaaaaagtctgtgctcaaaaactgagctttttcttgaaaaaacattaattcctcttttaatggcca

SEQ ID NO: 32595 - DNA, 335 bp, Glycine max
  Clone ID: PAT_MRT3847_129438C.1
ctcttttttttttttttataaaaaacaaagggaatgtttttaaaatctgagacgggcttgcaaagccaaccagatgcacctgactgggattgacccacattacctatagggaatctatctcttgctgagctgctatagttaaacaatgaatgaagtaaaattagaaaactgtaagggagtagactaccactttaaggtacttatttgactaaataagaattcaatgtacccatttatgcgttttgtggcacaatttgatgccttactggcacatgggatggtagtgccattgccccaaactccatgtactgatgacaggcaaactctgaaaaaca

SEQ ID NO: 32596 - DNA, 408 bp, Glycine max
  unsure (1)..(408): unsure at all n locations
  Clone ID: PAT_MRT3847_129439C.1
ccgacacgcgcgtcaatgggtttcctttgggtctccttcttacanntttacttgattacatncccctccgtgtcatggggaccaatggtgctcgaagcttctgtgttccatggctcagtggctctaannactcatctccagaacacccattttctcacatactattcatcgccncnctaccaccannccatgtgccatatatatctatcgtcgacccacgcccttcgcgtggtatacccgcttccgatacccccataccgtggtctgacccgtgtttcgcgccgccttccgcgcctcgagaaccctcatcgacccgaatctctcgacgtccgcgccacgtgtgcctcaccgtcccgtggattttaaaggtcttgcgcttttagannaatgggagggtgcttggcttct

SEQ ID NO: 32597 - DNA, 351 bp, Glycine max
  unsure (1)..(351): unsure at all n locations
  Clone ID: PAT_MRT3847_12943C.1
cggcgcgacgccacgcgtccggcctacttattttgagaaatgcgccatgggtgttttcagcacgcaaanancaacggaggggacaatctgacggctaggggggcactcctcganataggaaagggtgtccgtagaactagtccaaccgggaagataattttcgtgagaaacccgatcaaaaattttattcagggaatcaagcttggtactaatgcgctccgtctgagctgagacaggaatatgggactcaagaagaaagatacatccctattcagggcccacaaatgtgaacctaaggcagagactcctaagacaagtactttcaaaagaaagacttcctttcaaaaacag

SEQ ID NO: 32598 - DNA, 498 bp, Glycine max
  Clone ID: PAT_MRT3847_129440C.1
cgatctatacggttgcttttctccacccggaacccacgaaccgcatcttgcgggcacacaatatgtccctatacagcgaaacctaacagcgggaggtgagcatgggaagagccgtggccggcctaaaaacgttacacaatcacctagtcctacgggatcaaaaccggaaacacaacttgtccccatgccgggcacgaaggagggcactaactataattaacagacagaaccgcaacggccgaacggcaagcgataacaaacaacatcgcaaaagttaaatgaatcaaggaccgcacatcaaggggcaccatcctcaaaggtgcgccatggtatcggtagtaagcaccgctgatgactgggagccaaagcatgtccataaccgccatatgcatgaagataggcaatgggagctgccggctaagaccctgcaacaggcgaagccggctcgtgtgaataagcaacataaggatatgccgggggacttcttgctgacgacat

SEQ ID NO: 32599 - DNA, 438 bp, Glycine max
  Clone ID: PAT_MRT3847_129441C.1
aaaacctattttgaccatgaaacagtgttgtttagggctgttgaggatcaatttgggatttgtcccctcctttattgaatcagaaccgaaaatccttctttctccgtcagttgcaggcactcttttatgaagtggcacccattgttctcctttctgacaaacacccaccctttactggcaacatttccagcatttttctggccaactgttacagttcttgtctttttggccatccctgacctctgctgattctgtgcctctccatttttcttggtcttccctgacctttgtgacaattttctagaaaacctgccactgtttccagtcaaatgtaacccttgcttccttgctctattttgtccctgtgttctgatttttaatcgatataaaacaggcccttaatcatactgttttgttctctctaagttttacccttta

SEQ ID NO: 32600 - DNA, 417 bp, Glycine max
  Clone ID: PAT_MRT3847_129442C.1
ggcaaaatagtataattgccagcattggaaagtaacttattaatcttacaaatcaaaactacgaagagttattcctataatgtattaactgtatattcatttcaaattattttaagaaaatatttttttacagttgtcttgagaatattcttatatcctaacaatatcgagtatccaataactttttctatcctaaagaattactaggtttgtatttcatagcatatctataaagaaaattatcatccttcaaataaataaataaatagcacatctaaggatgctctagtagccttaagaagcatttttgtaagatcctttaaattagaaagataaagggaagtcaaaaaaattttcattaaaatcccaatttaaagttttatagaattcatacatttgaatttaccttacccttac

SEQ ID NO: 32601 - DNA, 1066 bp, Glycine max
  Clone ID: PAT_MRT3847_129443C.1
aattcggctcgaggcagtacattgaggatgttaagaagtgtctgaactacattaaagatggagaaagctatgagttatgcctcacaactcagataaggaaacctattgaggaattgaattctcttggactttatctgcatttgagagaaaggaatccggcaccttatgctgcttggcttaatttttcaaaggagaatctgagtatttgctgttcttctcctgagaggttcctgcagttggataggaagaatatactagaagataagcccatcaagggtacgatagctcgtggtgctaccaaagaggaaaatgagctactcaaattaaaattacagttcagcgaaaaggatcaggctgaaaacttgatgattgttgaccttctaaggaatgaccttggccgtgtttgtgatcctggatctgttcatgtgccacgtctcatggatgtggaatcatatgcaactgttcacacaatggtgagtactattcgtgggaagaagcggtcagatgtcagtgctgtagactgtgtcaaagctgcatttcctggtggttcaatgacaggtgcacctaagttgagatcaatggaacttcttgattctattgaaagttgttctcgaggtatctactcaggctgtattggatttttctcatataatcaagcatttgatctaaatattgtgataagaacagtcattgtacacgagggtgaagcttcaataggagctggaggggcaattgttgctctgtcaaaccctgaagacgagtatgaagagatggttttgaagacaaaagccccaacaagggctgtgatgcattttgcttagagctcataagccaaagaaatagcttttttctttcatagaatagtaaggagtgttgtagtgtagcaaggcttaattgttttagggttagaagtcagttggttttttttttcacacaggagggttcctttcaatttttagaagcatagatggtttgtattagtaatatttatgcatagatggttttaatttaattactttttgtatttttaatcaataatttatttttcaaattttcataattaatt

SEQ ID NO: 32602 - DNA, 153 bp, Glycine max
  Clone ID: PAT_MRT3847_129444C.1
cattaacatagagaataaggatgccgctcaagtttgctggacgagtcactgtcggttcccttctcctatgtgacgctatgtctctcggtcacatcactggggccgaggatccctacaggttcttcagctggaacgtcacttatggttacattt

SEQ ID NO: 32603 - DNA, 291 bp, Glycine max
  Clone ID: PAT_MRT3847_129445C.1
tacggctgcaagaagacgacagaagggggaagcaaaaattgataacccaaagtgcttctctcctctgtctcttgctctctcttgctatacttttggctagtcgctatgctgcaagtggcactccaagaagcgcagtgccaagccaccatgtcacaacattcagcagaagtctcgcacttccagtttactcgctggcattggtccttctgcttaccaggccgaagtagcagcatgtgtagatgggagaggaccaagcatatgggacacctacactagacagcatactgaaaa

SEQ ID NO: 32604 - DNA, 315 bp, Glycine max
  Clone ID: PAT_MRT3847_129446C.1
tagagggctcatgcaagttctctctctctctctctctctaacacggagtgatggctgtgcagctgtgggaaaccctgaaggaagccatctgttcctacactggcttcgatacttacaccttcttcacggagctggcgcttctagttgacggtgactacgttatgacggatctttttggctccttcgacgatcaccatcacctcgaccgacacatgtaggaggaagaggagatgtcgcctgtgcgcctcccggttcagctaaggagagatcacgatggaggagctcatggcctacgactgcaccgatcccgagaag

SEQ ID NO: 32605 - DNA, 636 bp, Glycine max
  Clone ID: PAT_MRT3847_129447C.1
ggctcgagcgcttattaactagaccgccattcaccattatttttgcctcttgcattgcatggaaaccctcaaaattattctgaggatttgatgcacttgtggtatagggttccacttccaaccatgttagccccagagaataaaaaccttgccctagtggatgttgtcagtgaggccataaccaaagatccttctctcaaagcagcattgttttcagccatttcctcactcactgaagatcctgatcagaagaacaacatcaataaccaaagccaacttagtaagagtagtggtggttatgacccttgttctaaggtgcctgcaataataccacctattcagccttacactacagttgatttagaggtttttttttagaggattttgattttaaataatctaaaggcaaatgtggtaaatttgctagaggaagaggtaattatatatatatatgtgtgtctaggaggtaaatgttttatcatattctacggtcactccaaggaagacttccttcttaatacactggttttcgttagtcttactttgtaaaataagttaatgaacatattaaagttttggcttttggtcttgtatttaaatatacagtaagcctaagagtaataaaaaaaaaaaaaa

SEQ ID NO: 32606 - DNA, 502 bp, Glycine max
  Clone ID: PAT_MRT3847_129448C.1
gggtggcgggacgcggtggaggagatgttggagtggctgtcgccggtggcgcaggacacgatgcggtggcaggtggagaggagcatggagacggggaggtttgaggcgaagacgacggcgttgctgctgcagacgctgcattactccgacttggagaaggcggaggcggccattgtggaggtgttggtggggttgagttgcatatattggtgtgagagaaggtgaatttagaatggagaaattttattacatggattaagaacacacatgtttatgatcaggactaattaatgtgcgctaacacctattaaaaaattatgactacgaatgaagtttgaaactaggtataagtatggttttaaattgagttcaagtactagtaaggacttgtgttatagcgctatggatgaagtttgaaatttagagtaagggaaaacgatgcatggaaatgatataatagttatacaaggattttaatttggagcccctttgattgatttta

SEQ ID NO: 32607 - DNA, 1715 bp, Glycine max
  Clone ID: PAT_MRT3847_129449C.1
tatatatgtctgtaactagaaaaaaataatatcgaaataaactatacaagtgaagagtaattttcaccttactgtacaaaatcataaaatcatttgaccgaagtttttcacaaaaaaattgccaactgagactacgcacaaacgagagtcataactgaacacttttttctacatgtacagcataatatataattctcctttctttctgtctaaaaaagaaaacgtttttttttctatatcaactttctgtcaaaaaaaatcactgtactccatattacgattatttctaaactgtgaaataaaaaattatatgaatggatttagctaaaaactagatttaagaatacgaactagtccttgaacaactgctcccatggctgtgtacaaaaagtgtagaatttgccttgcctttgtctcccttcaccaactcttgcaaaagaatgatttgtagaaagttatttgttttgtcacggtcttgaaagctcccaaatgaacaacaaacatgtaaatatgtagatgagaaaattggtggacaaagcgttagatttggactctataaccatttctgggagataaccttctaatccaatgttataaactggggtaccatcaggataataaaggccatagtttctctcagaaacaggaccaggcttcaaattctcattgaaaagtgcaaagacaaaaatatcaattggaacagatggattagcaggagtgccttgcttctgctctatcctcttcaataaattactattatatatttctgcattctggggtgtggctccaacctcatcagggtcacccttagaaggccaaccagtttctgaaatcctgacttcaacatcggtatgtcccagcgctttgatggcggcgtagacagcatcaatctgagcatacaacatgttatcataatgcaaattggtgtttggatcagtggccccttgatttggctgaaatagcacatagttcaaggagatttggtttggattgtccttgtatgcaaaaaagggatatgcattaatgaggaagggtgatttgatttgagcatgaaagctaaggaggggttgaatgtattgtatcagatcttgcctgaatgccccagatgaaggaggaaaagaattggctaaaatgttgaaagaatgagcagtcgtaacagtaacttgttgtgctagtcctagattaacaagggcattatacacactttgcattgctgggagaagatttgctgtgagctgtgtatcattgtagttgaatacctcatttcctacagtgatgcaagtgattctggtttgtgaaatgtaaggctgaacatgctgttgaacccagctctgagccttagaagggtctctcatgctctgcagatactcgttccctagtcctatgatgaattccacatctgaattggagaatgcagatagaacatttggatcagcatcatagagtttgattctggatacattcagagattttattagaacagccacacgagatggagatggaaggttgttggctatttgcccgtagttgattccaaaattaaggccacggctttgcacaaacaaatctgaaacagtgagaagcagtaatagcaaggtgaagaagaaagaagaggttgccattgctgatctgatgttcttgggcataaccgccaaccaagaccaccacgcttccagcctgaaggtccaagcccacgcgtccgcggacgcgtgaga

SEQ ID NO: 32608 - DNA, 635 bp, Glycine max
  Clone ID: PAT_MRT3847_12944C.1
aggatgaattggaagcagaacttgaagagttggagggtgctgaattggaagaacagcttcttcagcctgcaactacagctccagctgctccagtgcatgttcccgctgggcggcaacccactcaccctgtgtcttcgaagcccactgctgaggaagatgaattggcggctttgcaggctgagatggcactttgagcaagtcccttttctcagctgtgacactattgatttatgctatctattcattaatctgttctagtttgttggtattgcaattaaggtggcagttgagtgaatttgtgtgtgcaccagtttcatgttaattatcaacctttgcacagttgagttcacttgtataataatagtttggaatgaattccctaaagttgcttgtcaggaaaagtttgccgatcttattttaagcagtttttattgattttgcagcgggctttggttaggccagacctttgctggcattttttgtgtgcatgatgggtggcttcaatgaggaattgtaacccctattacgtggattcctactcgcttatctgtgaaattattgagctggccagaggatgtatataaaaggtgaaaaaaaaaggatcataaaagtcgttcaaaacttatttactatta

SEQ ID NO: 32609 - DNA, 1414 bp, Glycine max
  Clone ID: PAT_MRT3847_129450C.1
ggagagacacgtgagatagctcagtggcatggcgtgacaatcattgaggaataagcgaccgagatcttatcaactatggtggagttaccaagcatcaaggtaaaaaccacaaatcataatcagtcataggttcggcgacttctcgatattattttttctgacagagccaccgacagagccggcggttcccgtggcggtttgagaatggacgtcaagtacaacctgaagaaccccgcgggtgatagcggattcctccaggagggttaaggtagatgcagtccaaccccttccccgacgatttcatgagcctccctctcgaggaaaatatatttgagtggcaatttgcgattagagggcctcgtgatacggaatttgagggtggtatttatcatggaaggatccagttgccttcagagtatccattcaaacccccttccttcatgatgtagacacctaatggtcgtctcgagtcacagaccaagatttgcgtgagcatagcaaatcatccccctgagcattcccaaccatcatggagcgtgaggactgcattagacacactgattgagttgatgcctatggatgtgaaaggtgcataagcgcctcttaaactacgggacacctgagaggcatacgctgatcaatgagatacacgagtatccggtaagcaaggcaccttcggttacgccacaagctgattgatgagatacacgagtacatgctaagcaaggcaccacctgttcctcaacctagtgccacagaggcttctgaagagaaccccagaaatgaagaggccgagacacaggtcaattcaccaaatcccgagtccttacctgcaggagagggtattacagatcaagaagttgatggaattgtggaagaacaagaagtcatccttgcaaaccctgcaggagttgaagtttcaagggaggttcaaccaagtgtttcaaggaatgaagtgctccaaaagtcagacacaagggctcagaatcctaagccagagacgagggttcagaaacatgatgatcggttgttcacgttggcagctattggactcactattgcaattgtggtccttttgctcaaaaaattcctcaaatctacacaacatggggcacttttctcggatggatcttaagacgttttgttgctgatgttggtttctgagattaaaaacttcttggcctttatgcagtaaatagaaatatagagctcttctaaactcaaatctcaaagaagcattttttttttttttaatttgattgtacttttattacactatttgtaattatggtaatatatatgtgctcctgcaataaattgaggaggagcatggcctttgttattaaaaaaaaaaaaaataaaaaaaaacacgaaataaatcctcaattgttccaaacttccaatgatatttgca

SEQ ID NO: 32610 - DNA, 1318 bp, Glycine max
  Clone ID: PAT_MRT3847_129451C.1
aaatacataatgaaatgaaaaaaggtcgttggagtctactcctgatcccattagaataaaaaggtgttggaatagagggaagaacgtggaaagtggttgacgaagaagacgaagaagaagaatggagaagtcagggaagagagtgttgcttacctccaacggcgacgacatttctcaaggcattgccttccatttggtgaagcaagggtgcaggttggttttgctgggagatcagaattccctgcggagcatcgcgaacaaaatcatggattccctctccctcgcagacagaggcaccgtgcaggtcgttggattggacatggaggatcaaagcgaatcgactttccatcattccgtggataaagcgtgccagattttggggaaattggatgcgtttgtcaactgctacgcttacgaaggaaaaatgcaagatcatcttgagttagctgagagtgagttcaagaaaatagtgaagattaattttatggctgcgtggtttctattaaaagctgttgggccgaaagatgcgggagttcaacaccgggggctccatcgtctttttaacctccatagttggtgctgaaagggggctttatccaggtgctgccgcctcggcctctgccttggctggagtgcagcagttagttagggcttcggctttggagatagggaagtaccaggtcagagttaatgcaatttctcgtggcctgcacctgcatgatgaattcccattatccgtgggaaaggaaagggcagaaaaatttgtgaaggatgcagcaccacttgagagatggcttgatgttaagaatgatctggcttctacagtcatctacctaatcagtgatggatcacgctacatgactggaacaaccatatatgttgatggggcacagtctataaccaggcctcggatgcgatcctttatgtgatttttcctcacatgctggcagtcactgaaaggatttttttgcaaggaatgatcgatctgccatacacttctgtttcatcattgtcccacatttcttaaaacgaaaatcacattcgatgggcttacttgcaatgtttggcatctaatattataatttatttgtatgttaaggggctgttttgttaaccaagtttgtggagaagatataagaatctagtttatgtattaatatttgtgtaagaagagagatagaggatgcatctagtgagagaaattttttagtcaaaaataaacattgattattaggttttataataaattattaagattaaaatacaaaaaaaaaaaaaaaaaattcctgcggccgcgaattcttcctggtgccgaatt

SEQ ID NO: 32611 - DNA, 202 bp, Glycine max
  Clone ID: PAT_MRT3847_129452C.1
gacttgtaacccaacacatttgactccttgtgttccggcaattaattcaagctctgcaccttggagtgcttgatgccataagctgaaggatcacaagccatgctggtgtggctacctcaaaaaccctagcttgaagcagtatgttaactctcctaatgccaaaaaatccgctagtacttgtggtattgcctatccaacttgt

SEQ ID NO: 32612 - DNA, 772 bp, Glycine max
  unsure (1)..(772): unsure at all n locations
  Clone ID: PAT_MRT3847_129453C.1
ggctcgagactgaatgtaaatggcaaaggcacatcaaatagtgctagggagcaattgggggatcagaaacatttttcagtctcttgtggccatcttaaccactattctagttgtcgctgccatttatctaacacaggagggagaacaatggtctaatgaaaggaacaagttacattcattatcaaaatgtaacttgttttctggcaagtgggtttttgataatgaatcatatccactctacaaggagcatcagtgcacgttcatgtctgatcaattggcttgtgagaagtttggaaggaaggatctaagctaccagaattggaggtggaagccccaccaatgtgacttacccaggttcaatgccacagcattgcttgaaaggctaaaggaacaagaggatggtgtttgtgggggattctctcaaccgaggccagtgggtttcaatggtttgccttgttgaatcttctgttcccccaactctcaaatccatgcggactattgcaaatgggtcactcaacatttttaaggccgaagaatacaatgcaacaatcgagttctattgggccccattgctggtagaatcaaactcggatgaccctgtgaacatagggtagcagaaaggactgtgagggtgcaggccatagagaagcatgctaggtactggactgatgcagactntctggtcttcaacactttcctctggtggaagaggcgcgcaatgaatgtgctgtggggttcatttggagatccaatgggaaagcaaaagggtagg

SEQ ID NO: 32613 - DNA, 256 bp, Glycine max
  Clone ID: PAT_MRT3847_129454C.1
ctacacctatcatgtctagagaatactgtcatattgcacaaaactttaacttctcctactctactcaaatctaattattagctaactcacatcaaaaatttacctcccaatgacaatagacattatatatattcaatgcaatcacaatcttctgttcaacatttacagaatcattatatctaacttaatcaacaccaattcatatactgcctctaatcatacatcatgttaccttctcaacttacatatgtctgat

SEQ ID NO: 32614 - DNA, 405 bp, Glycine max
  Clone ID: PAT_MRT3847_129455C.1
tccattcccatcaaacaacaatcccaaaacctttcaaattaagagcatctatattctgggataatatataaagggaaaagctagaatggccctcctcaaacacctcctcctctcattcaccatgatcatcatttcttttgttgcttgttatagcactttgcaagaggacccacctagtagtatatatgttgatcattcaccttctattgacgatggtgggacagtcaagaacttgatcgagcaaagcacaaatgttttgagcttaaacaggtttgacaagcgtaattcgcttaaaaaggttagtgtcaatgattatggagctaaagggaatggtgatactgatgacacagaggctttcaagaaagcttgtgatgtagtatgttcttctggggaagcaattcttgt

SEQ ID NO: 32615 - DNA, 247 bp, Glycine max
  Clone ID: PAT_MRT3847_129456C.1
tccgggcatatgcctactgatactactttagcattataactctcgatggcgtatctcaccgattgacttttttatgaatatatgcagcatggacctgattacccttgcaaaggtacaccaggcactcctcgagcataagcatgctggaccgtgctcaccttggctcactagaagtgtcgatgccaactgtggatttcgttttatgagatgaagtattatctcgaggacctcaatcatctcatgagct

SEQ ID NO: 32616 - DNA, 524 bp, Glycine max
  Clone ID: PAT_MRT3847_129457C.1
tctgaacataaatgaactgagaggagattcacattacaggttgcatgtgcacacatctcccacagtaggacaccattaattaaaggccaaattctttaacccgagaaagtcatacataatttgcccccaaaccatgaaagtcagacataatttccccccaaaccacgaaagttcccaacaataaaacttgtcacaaccttcagaaatattttgatttgttacttgctgggtcacgagctagattgtagaagtaccatccaagataacttacaagaaaaaccaaacaagaaaccatgctacaggatagatcaaccaagcaaccccatttctaaaacccttgttataagatgatatgaagaaacaatctgttgtagtgttaatcccattaggacaattgcagacaaacgagttataggctccaccatacccacacacaccatggctcctttcacacgcatcacacgagccaggatagtcatttgtgacactgaacttgtatttgagtgctattccatagttccact

SEQ ID NO: 32617 - DNA, 601 bp, Glycine max
  Clone ID: PAT_MRT3847_129458C.1
cccacgcgtccgacttgtcaggtttctcagatggaagagggattggaagagaaaagactccatgttaaggaattacaaaagcaatctaagaaactggaggatgcagtgatcaatgcaaagaaaaactcttcatatcgtcagatgcagttgatgaagctgcataaatgttttctgcaagtaaaagattgcacagaaagactaaaaactaccgaaaaagaacttcaggctctaattgtgacagcaatgtcagagattgatggtgatgaattaaaggatagacaactaacaaatggaagtcttgatggtagattgtaatatatctttcggaggttcagattttgttattgatgcttaaaatggttttagcatagaataccttaatgttatatggagaagaaaaaaaggctggataaattctctttttatttttccttttcgattccactccagtctctactaaatagcattaatagagttttgtttatactgtgaagttgttggtaaacattgtaacttcatgtgtcataaattttcactagagaaaacaagctgactttttgaactccactggattgaattgcatgacctgacgtttctgacc

SEQ ID NO: 32618 - DNA, 399 bp, Glycine max
  unsure (1)..(399): unsure at all n locations
  Clone ID: PAT_MRT3847_129459C.1
ctcaaattgaactggtagctgaaacaccattggttctgccaggtgaagaagccatcctatctattgaaagtaggggttgaatctgacgggtggatgcagataacaatgtcatctcttgggaganattcgcggtccctcggcccgctcacgaaggttttgaggtgaagaggaagggtgacagggagttcccggcgcagattcggttggagatgaattacatgctggagaagtttatgctgtcccccgcgttgagagaggtgcttggtgttcaggttgacacgcgggcgaggattgtttccgcaatctggcattatgtgaaggcgaggaaattgcagatcccgaatgatccttcgttctttcactgcgatcaggctctgcagagggtgtttggggaggata

SEQ ID NO: 32619 - DNA, 596 bp, Glycine max
  Clone ID: PAT_MRT3847_12945C.1
ccacgcgtccgctgcaggatcactgatgataccttttttgtccttacgtcgtacctttctctatatctctgtctttgtacacctgacccaatctcttactatttacactaggatgttaaagaccacctcctagcccgtcggctctcttttgtatgatgttttcgacattcagagccgaaagttctgtatccgaaaatggctacagatgagggggaccttgtccgaaacctataaacctatgagacgggcttgaaggtgacacgcccagaaccatacttgcctgcggtgggttcgagagaacagcttttaactcgagacaccatcttcagcgatcttgagttgcccaaggacctcctgcagatggggtcatagatgaagcccttccgcgactttggctacgactagcttaataagaaaccagtgtctgacaccgcgacaagtgctgtagctgttagcgatacgttggggaaaggacgaccacgcggtttactcagcacagtaagtatctactatgtccattccagaatttatcttcaacagactgtgtgatccttactcatctggtgcaggcctagcccgtgggaaccgtattagac

SEQ ID NO: 32620 - DNA, 343 bp, Glycine max
  Clone ID: PAT_MRT3847_129460C.1
ctaattacatttctaatctcattctccttctgttcaaacactctcatgggtactcactctagtctactatgcattctcagctcgattttgtttttttttttttaatttcttaacctcttaatccatcgttttctattttttttttcttgagcagcatcagataagaagattaggatcggcatcaacggatttggaaggattggccgtttggtggccagggttgcccttcaaaggaatgatgttgaacttgttgctgtcaacgatcctttcatcaccactgattacatgacatacatgttcaagtacgacaccgttcatggccagtggaagcattttgatgtga

SEQ ID NO: 32621 - DNA, 298 bp, Glycine max
  unsure (1)..(298): unsure at all n locations
  Clone ID: PAT_MRT3847_129461C.1
cagncgcacgcacncnnacgnaancncgnaatncggctcgagataanaaganncacnannacaaacannnccnnnnncacaaaanaacaaaacannnnnaaacaacnanaccnccacacnaaagccangncaancacaancnaaanaanaaananacaanaaaaacacaanccncaancacacaacacannacnnnncacnaanacacnncaagaacnaaacanacnacnnannannccaaaannaacaacannanncaancnananncngnacacaannnnaccncgcacnancaaa

SEQ ID NO: 32622 - DNA, 666 bp, Glycine max
  Clone ID: PAT_MRT3847_129462C.1
aacacagactctgatccctagatgcctaggcactcttccgtctgccgaagcagagctcatgtcaagctaacgcagacgccgtcgcctccgaaagcgaacctctccaagacgatccccttcgcgaaagccgatacatcggactacgaaggcacccctgcgaagcagcggaacctcctactccccgaaatgcaaatgaaggacacgcgcaccgtcacctagtacaacatgcataaatgagctgacgatacacctcaggatcccgcgccctcttctcgccactgagatgatcatcatgagctacgccactgcctctaccaagcatcattgacattgacgagaatggatagctcagtatgcttactgactacgaggacgacgaggatgaactcgagcttacgattcgatgaggaagtcggcctcaactgccgataagcggatgccagttgcctgacgtggaacgatcactgtcgacggccgctacggctgctatggcggatggacctacgtgcaccctgaaggatattgcttacatagaactagctattgtagctgacaatctgaaggttctatttaatgaaagatgctcaatgaaagccatgacagtgtgttgttcgagaacagccttatgcattacagattctagtctgactagtcttaacaatggtg

SEQ ID NO: 32623 - DNA, 626 bp, Glycine max
  Clone ID: PAT_MRT3847_129463C.1
gtgctggttgatggtaaccgttgctcggtcgtttgacttgggacatggtgggtcttctggctctcctgccgagcgctctgcgctcgggtctccagtgcctgctgtccgccttggctgcctgggagggcggggagcttgctgctcatccctcccctcccatcccttccgagatgcagaatgtcatggcattggaccaagaatggagtgctccgggttatcactggacactggagaatggagacagctgaagttgcccgtggagcatggtacaaggtcacagtgacaggatctacaatctagatttgccagcgtataaaatggtagaactttatatggagggcaatgaacaattctcttcaactaggttcattattttggtagagaaaaagttgcaagataactactctgtcctcgatgttatttcgggggcagcttcccctccaaagtcttcgtttcccgtcccaatgctgcctgtcccggctgtttagttatgcttttgttattgtcaggggggccctggttctttttttaggagatagggcggggggtctttatctgcgtggcaggtcgagtcgtaataagggaacttagcctatatgaacttccgaaatttgagattctacggg

SEQ ID NO: 32624 - DNA, 352 bp, Glycine max
  Clone ID: PAT_MRT3847_129464C.1
cccacgcgtgcgcccacgcgttcttttggctggcgaatcaacaccacattcacctgagctttctgtgaggattccaaagcatggcttcccttgccgcatccactgctgctgcttaccttggcatgacagaaatgcttggaaaccccatcaacctcagtggagccacaaggacaactacatacgcctctagccctgacttcttcaagactgtagctcttttctgcaaaaagaaggctgcacctacaaaaaaagctgcacactgctgctcctgccaatgatgagcttgccaagcggcatggtcctgacagactgatcttcttgcctgagggtctcttggaccgagctgagatcc

SEQ ID NO: 32625 - DNA, 216 bp, Glycine max
  unsure (1)..(216): unsure at all n locations
  Clone ID: PAT_MRT3847_129465C.1
ttggggttgttcttgataatatgtgccactcggcaggccaantgaaggatgctctacgtgtaaaccctttctatattgtgctctaacattaggctctatcattcatgctcgtcatgatatgcacaggatgagataaattacaatgtttatagtttgttgaaagatgaaagcttgattccgtttcttacagatcgtagcatcttgaagcaagtgtca

SEQ ID NO: 32626 - DNA, 394 bp, Glycine max
  Clone ID: PAT_MRT3847_129466C.1
cgcattcgtaggataaccgttgcacggtggctactgttctgctggtggctacacgcatgatgcatagccatgacgcatgatgccatcctgagtattgcactcttagggataggagatgcgctttgtgcataggcagtacactgtcatagcacccttggcaaggactagcctatctgacatggcttgtgcttgctacttagggcttatcgtgcatatgataaataccgtttgagaatgaggatatgttgccataagaatacaggtgagcaagggttagagtgatcgatgaccacacacctgagcgatgccgaactgagatctctgctgagcgtgagggcagtacctcaggatcgagctggacagtttctgggtggacaaagggtcctaaagcttt

SEQ ID NO: 32627 - DNA, 559 bp, Glycine max
  Clone ID: PAT_MRT3847_129467C.1
ggctcgagctcgagccgaatcggctcgagcaagagtggaaaagggagcttagactttcattcaagcctcaactccaggtgggatcgacagaagtgcggtcacacccgcaacggccgaaagtgcgagagccgaacggttgtggatatagaacggggcgttagccacggttctaggttgttagtccttcagtcgttccttcatcgctagaaacaagctaaatggagagattcctaaagatattaaatttccacctcaactggagagactagatatgcaatcaaattccttgaagggtgtgctcactgactatcatttcgctaatatgtctaagttagaccacttggagttatctgacaactctttagtgaccttggcatttagccaaaattgggtcccaccatttcagttgcgcttcataggattgcgatcttgcaagctaggtccagtatttcccaaatggttggagacacataatcaatttcagggtattgacatttcaaatgctggaatagcagatatggttccaaagtggtttgggctaatttagcattccgagaat

SEQ ID NO: 32628 - DNA, 285 bp, Glycine max
  Clone ID: PAT_MRT3847_129468C.1
gcgcccacgcgtgcgtgctgctgcaagaagacgacagaaggggcttctagcactcctctttttagcaatagagctgctgaaggtgtttactgtctgtgcatgcttgaccgaacctaattcattaaggtaaggcgaaccttatttttggcgggatatgatctgaactacactccctgtgacagagagcgactggactcaggcccagggcatggctggtgccaggctcctgtgttatgaggactcggaactgcgggaatgcctttagctgatgagaaggtgaaaact

SEQ ID NO: 32629 - DNA, 207 bp, Glycine max
  Clone ID: PAT_MRT3847_129469C.1
gcagcatatataattaaagacaaacctggttgtcacatctccaattttgtaccatctgaatattgacacgttagagcaacagaacatactaagtacaaacctacgccttcaataatgcaaaaggaattggtctttttagcaatgatattaacagataccaactaccaatggaatcaataccacatggtgcaatgatgaatgtgacta

SEQ ID NO: 32630 - DNA, 357 bp, Glycine max
  Clone ID: PAT_MRT3847_12946C.1
aaaaggaaataattttctattaagaattaaaataatgcacacagaacagctatctgactacttgctcataaaccaccgacggaaaggagacccaaactattgctgtctcttactcacacgtagtgaggcaatttatcaccgccacggagaacatttacaggggataaacactgcgacttactcagcgtcagggatgcggctaattacgcttggaaataggccctgtctacaatggcctgttatgggtacttatacctgtcgtcgagacagaccagatcacttctggtgaccagaacatgctttggacgatcaccctatcagtgcagataacgtatgtaaacacatgagctgtcaaga

SEQ ID NO: 32631 - DNA, 424 bp, Glycine max
  Clone ID: PAT_MRT3847_129470C.1
gccacacgtccgccttatcttttggaccatcataggggctggggaaccagtaccgggcagtgccaatgcccattcacatctggcgccatggaacacttatggaccaattgcatgaacgaagcgccaatcgttgcttcaacacacctctctgcagattccacaaccccagccttcgtggcccaaccataaagtctatactgtacgtcagagatgacctagactagtcccacattttcatggatagatgcgcacgcaaaatcaagcgcccgactgaggcactccagagagatagcggcatgtacagcttgatccctctccgaacatggtggcctcgcttatacctactataccagaataggttgagatgaagcaaaatacccaaccctgtctgcttagagcgagagctgggacgggctcttccgac

SEQ ID NO: 32632 - DNA, 690 bp, Glycine max
  Clone ID: PAT_MRT3847_129471C.1
ctctactctgagaagggtgatgagaaatatcgatgcagtgagactggctaccgaattccattcaaatgtttagagattaaagattcaacaaaggatgcaaagaaaacaaagtctcaaaaaggtcggttgtctttggaaatttctgatggtattgcagaatctcataaagtgtcacatgtcgctggagagatcaatccttcacaatcacatagaagattagtggacgattcatcgtcttcagataatagttcacaggcttacatcacttacagaagctgtataaccccagttaatgaagagaagttgtcggtgcttaattttgagggggtggtgatttttttcttactaatcagtggatcaatcatatacttgagaaaaaagaaggtcgcatccatgtctggttatgtagcaggaaggggtcagaacaactctcgattttgaaattgaagcctaatgaatgatgacatttttactccatattgattgtaatagggtaaatgttggtatttagtggcctccttttgtatttttgtagtttttactcaattaattgcattttgaagccatataatttgggtcaattttggctaatttattggaacagaggatttttaggttatttttttcaacaagtcagaacttttcttgtacaagtattttatatatttttttattcttcaaaaatggtgt

SEQ ID NO: 32633 - DNA, 276 bp, Glycine max
  Clone ID: PAT_MRT3847_129472C.1
acggaaaaacacaacattggggaaccaattctgttgaaacaagatagaaactctttccatcggcacaacatttaagcttccagaacatctacacagtttggccacagggtggtggactagctactggagccatgaacataagagggctgactgtgcacaaaatttcaagattcatcacagtttgcaaaaccttagattggcgaccaactgacgtatgggcagtatgacttgacgcaggatgaatacctgagggattattttcactaggccactaca

SEQ ID NO: 32634 - DNA, 1169 bp, Glycine max
  Clone ID: PAT_MRT3847_129473C.1
catctccacaaaaaggctcaagcggctcgagaggaaagacactgagtaagcaatgaaatttccaaattctcaattgtttcttccattcttgttgttgttgttcttcgcgataactccctttcgcggttcagggcagcaaacggattggaacagcgaagagactcaacatggaaatggggttcgccgcagagttcttctgagtttcaaagagaagccctcaggaagtaacgttacctttgaatgtactccttcgggtccttgtgtgccctgtctctactctgagaagggtgatgagaaatatcgatgcagtgagactggctaccgaattccattcaaatgtttagagattaaagattcaacgaaggatgcaaagaaaacaaagtctcaaaaaggtcggttgtctttggaaatttctgatggtattgcagaatctcataaagtgtcacatgtcgctggagaaatcaatccttcacaatcacatagaagattagtggatgattcattgtcttcagataatagttcacaggcttatatcacttatagaagctgtataaccccagttaatgaagaaaagttgtcattgcttaactttgaggggttggtgatttttttgttactaatcagtggatcaatcatatacttgagaaaaaaaaaggctgcatccatgtctggttatgtagcaggaaggggtcaaaacaactctcgattctgaaattgacgcctaatgaatgatgacatttgtactccatattgattgtaatatagccctaatgttggtatttagtggtctcctttgtatttttgtagtgatttaaatgtagtatagttttactggcctacggcatcttttgctcttatcaagtcatggatggaccacgttagtcattattatttattgtattttgaggccatatagtttgggtcaattttggctaatttattggaagataggatttttaggattttatttttttcatcaaatcagaacttgtcttgtataagtattttatatttatttttatgtcttctcaaatgttattgtcaagatttttttgttgttgcgtccctggcccgcttcccgctggcaacctggtagggccgctggaataatggatggcccatgctccgggaaacgggggatggcgatttgggggttgttcgctttctcg

SEQ ID NO: 32635 - DNA, 420 bp, Glycine max
  Clone ID: PAT_MRT3847_129474C.1
tacggctgcgagaagacgacagaagggatattgcaattattataaaagttatttttaatagtggactataaaaatgaggcttttatttatatttttaaggcacttattgattaatttcaagaggaaatccacaatgctataattcttaaattattttttatgaaggaaaatgtttttctatatatgtgtgtgtgcaagaaaatcaggtagtcactatgtctgaaaaaaagtagaagtcaatagtatagataatgtgatgtttctgaccaaattaattagtcatggatttagaattttttgatttcaaaattcatatttttattattattttggtaaagctgcaacgcttttaaagtctatcctaggtttggtaaaaaagaaaaaaaatgagaaaggaaagaaaattttaaatttaaatcg

SEQ ID NO: 32636 - DNA, 185 bp, Glycine max
  Clone ID: PAT_MRT3847_129475C.1
aactccagcgatcacactacaggatccaatcttacttacgcgtaccttcaacatcatagggctggtcttcctcaacctcagtgcgattcaatgtccatcataatacaacatcgagactctgaaaacccagacgttacacaacttaatctccttgcagaacacactcctttagccatctatcttat

SEQ ID NO: 32637 - DNA, 536 bp, Glycine max
  Clone ID: PAT_MRT3847_129476C.1
ggggggaaaaaaacccccataaacgggacccaacccttgatcttggccaaacggtttttttttttttaggaagccccccaaatttcaataggcccccccccaaaaaaaagggagggaaaaccattcaagttaagggatggagggccccctttttgcccacctttcccctattttaaagtaaacccccccaaaaaaaaataaaaaaaaaggggcctacaccttcaaatttataagaaaacttccgccctttaattggggggggctccaaaaaacggggaagggaggagcttccaaggccccctacttgggcccccgaatccccaaaactacccaattgggggttagccctaaccaccccttgccctttgcaaaaatttaattgccaaaaggggggggagagaccagtaagtttgaaaacctgaccctttttttatagggatggccatttatttggccccaacaaaaaaaagcttttcctgataaaatggcccaactgaatttcctgctgcagttgagggggtaaaggggttttgaaa

SEQ ID NO: 32638 - DNA, 638 bp, Glycine max
  Clone ID: PAT_MRT3847_129477C.1
acattgtgcgcgaattacccatttcagaagcgtcagagacagcacactaggaatcagggatgggagtatcgacttcctgttatgtggtcttgctctttgcgctctaagctcgtgttatgaatttcacatttacagcgtgcatgtccatacctgtgaccttagcctcactaccctcttcgccagaaaacattatccgaggcagtaccatactgaagatcctgaacatcgacgtgtcattctaacagctaatttctaccgattcacgtcttcgggactgcccactcacactttattcagattgtaaggtctagccatctatactatgctttgctcaccaatatggccattattctgatgtaagctttccttttttcatctccccatccccatacttttcccaagttaaggcctctgagctcccattgagaattgatagcctccagaggagggtcatcttgtgtgatcttttaagagaatggatcgcgtgagacatgcttgatgggaacattgggtcctggttgctgctactaaacaaaggtcagatgtaattattgagcaccgggaattcagtggaggtgtatacaggatgaaaattgacttggctcaaattaaaaacaagcatatcggtccatgcaccg

SEQ ID NO: 32639 - DNA, 269 bp, Glycine max
  Clone ID: PAT_MRT3847_129478C.1
aagtagtattccaagacaaggacaagataaagttgttctttacctgtatcaagaccggcaactatcacatggccttagaaatggcaagagagtgggaagagctagcttatgcacgggatgaaaataaggacacagctttgcatctcttggctctaaatcaaaaccctttggattcttgttgtcattgttcaacaattaaagatcccatccagatcaaccctgacatgaaaaaacatgtgatgtttcaattggttaattttctgtggaaa

SEQ ID NO: 32640 - DNA, 474 bp, Glycine max
  Clone ID: PAT_MRT3847_129479C.1
agtctgaccggctcttccggtaaactcaaccgggaagtgactatgaggccaatggggtgccctccttctgcctctttcaaggttgaagccaagaagggagagtggttacctggcttggcctccccaacttacctcaatggcactcttcctggtgacaatggatttgaccctctgggactagctgaggacccagagaacttgaggtggtacgttcaagccgagcttgtgaatggacgttgggccatgttgggattcatagttcaacacaacgtgacaggcaaaggaccatttgagaacctattgcagcacctctctgacccgtggcacaacaccatcatcaatacaattcgtggctactaagtttgtatccaatgacatggataagcctgtgtccttctcgtgtaatcctgaatggatgaattttgagagtgatttgggcatgattgttatgatccgtctattttcatgtacaga

SEQ ID NO: 32641 - DNA, 524 bp, Glycine max
  Clone ID: PAT_MRT3847_12947C.1
cacatggcctatcctgtacattgaatacctcctctttcaccgtggatgttgcagcagcaaaagatgactgtgatttgatcttgaggaatggattacccattatcaataaatccatcgattgccaacctacaagagaggcatctagtggatcaagcttgaatctctcttccgagagattatgcttttgtatatcggtttttcagcaaatccctgggacactgttggtgaaaggttcattacaagacaggaatagcacattatcgggagcattctcgatgattttccaaaaactagaggaagctttgcgggataaattttgtactaaatgagtttagggttttgattatttgatttattgtttgggacagtgactgtatatgaaatgggatgttgagaagttcttcagtgctaatttgtggactaatgatttatacaaagcaagtagtgattattattttgttcaaaaaacctttaagaaacattcagttggtttgaaattgtacttagtgggagctgaattttag

SEQ ID NO: 32642 - DNA, 930 bp, Glycine max
  Clone ID: PAT_MRT3847_129480C.1
gatttttatcccaattttgcggaagaaattctgacccttttctacagcgactctgtaagactgatctacaacatagaacgagcactgatgagtaaccctccgaatttcaccaagctagatggttacatgcttcaattcaagggtagttgctcaagcatcggagcaaagaaggtgaaaaatgaatgtaccagattcagtgaatattgcgcagcagaaaactttgagggatgcttcaggactttccaacaaatcaatgtagagtatacgactttgaagaagaagctcgagacttactttcagttggtaaggggaagctgctcaaattaaacaatatacacatagcacatggctgctgatatgatgatatcctttttgaggtcgttccagcataccagctgatcaccattcgagcagatctacgtattatgcatacaatatacagtaacagaatataatgatatttatacatcatttttttacaccattattacacaattttctttgaatagaaagaaaaaacacacacatttcattacaaaaataaggtcatatcccaatagacaaaatggtggagcaattattaattagacttgttcttattaatataatttttgcctaataaaagttatttttattataaaatattataaatttgtactaaaaatataatgtattacaccacttggccaaccatagtataatatatagcattgatgctatgcattattatttaatgccaataaaactatttatttttaagtatatatttatttgttaatatatatccttagtatatcataattattatataatacaatatttatattaacattgtattttgtatgacaataattatattaacagaacaagtctgactactatcatgttgtatctgttatgacgtggaattgtttgtgttctaatccaact

SEQ ID NO: 32643 - DNA, 337 bp, Glycine max
  Clone ID: PAT_MRT3847_129481C.1
aggcgggatgcctttttggcaaatgaagcttttaaaatgtggccttaaaccaatggggtcattttggaaatggtttccactggatcttaactggccctcttaagggcaaaccaggcttttaaggcccgtttaaaaaggtccttggaggaaaacgttgcctataatactaaaggggccatccgcaggctatgggttcctttggggggcccattccgttttgggggggttggggtgaccatgccattggcaaaatttggggctaaacggtttaaccagaggattgcaaagaaggcctccaccgccagggccctgatcaggattttgtcaccagggggta

SEQ ID NO: 32644 - DNA, 1126 bp, Glycine max
  Clone ID: PAT_MRT3847_129482C.1
tacggctgcgagaagacgacagaaggggaccacactcttattgttttcttcatatcttccttgtcactgcccgtgtgtcgccgccatggccaccgtcaccacccaagcctccgccgcaattttccggccatgtacctcgaaatcgaggtttttgaccggctcttccggtaaacttaaccgggaagtgactatgcggccaatggggtgcccttctcctgcctctttcaaggttgaagccaagaagggagagtggttacctggcttggcctccccaacttacctcaatggcactcttcctggtgacaatggatttgaccctctggggctagctgaggacccagagaacttgaggtggtacgttcaagccgagcttgtgaatggacgttgggccatgttgggtgttgcaggaatgttgcttcctgaggttttcaccaagtttggaatcatcaatgcccctcaatggtatgatgctgggaaatcggagtactttgcatcttcctcaaccctcttcgtgatcgagttcatcttgttccactacgtcgagatccggagatggcaggacatcaagaaccctggctgtgtcaaccaagaccccatcttcaagcaatacagcttgcccccacatgagtgtggataccctggtagtgtgttcaaccccttgaactttgcacctactttggaggccaaggagaaggaacttgccaatgggagattggctatgttggcattcttgggattcatagttcaacacaacgtgacaggcaaaggaccatttgagaacctcttgcagcacctctctgacccgtggcacaacaccatcatcaatacaattcgtggctactaagtttgtatccaatgacatggataagcctgtgtccttctcgtgtaatcctgaatggatgaattttgagagtgatttgggcgtgattgttgtgatccatctattttcatgtacagaggaactacgatggttttatattgttatttagactgtccatcaatcagtaatcaagcatgatactttctaaaaatttcatcaaaattctaatacaatatatccaaagtatatatgtaaaatttgcttccattttcttacaaatttcaaatttacaacttggatcaccaa

SEQ ID NO: 32645 - DNA, 352 bp, Glycine max
  Clone ID: PAT_MRT3847_129483C.1
gaagcaaaactttgatttctatctatgaagaaaagggaacgggacagcatttatgtaataccccgaccattttcccgcaaagggtaaaacgcgttacagacaaaacacaaagtgtttctgggctggaggaaaccatgaccggctgaagaacagccaaaatttacactattaaggcatacaagttaatgaaccttctaagccaggaaatccaattaccatacttgctttcgtgcttaagcccatataaaaaagcgcatccttgaacataggacagtgacctgtctaaagggatctgggaaggacaaaatcggcactcaaggcagggaaatgcccgggatctctaatggatgga

SEQ ID NO: 32646 - DNA, 356 bp, Glycine max
  Clone ID: PAT_MRT3847_129484C.1
agaggcagaagatagggtagtacactagctgttgccgatgttgaggatccagcgagtggccaggatgagaaagttgccaggctaatgagaacagggaagccaacagactcgctaaaggaccactttgatgaggaataggtagagaaaatagattacgactgcgctcattgttaagcaatgttacctcttacaaagagataaacacatccactgcagctgacaatggaaggaaaggaaagctagactatccggtaaaagagcaattatgactcagttgagaaagataataacattgtcaatggaacaagcgccactgatgagttgacataggccaatggtgttaggccttatggaag

SEQ ID NO: 32647 - DNA, 795 bp, Glycine max
  Clone ID: PAT_MRT3847_129485C.1
gttcaaggcacacacacattggtgtttccaccaaatacagtgagcaaagttagctgaaaattaaaacatggtttccgccaccgtggattccgattttgcattcttggaatctgttcaacaatacctacttggacatgattccatcaatctcatgtctgaaacccaccaagctgcatctcatgatccattttcagaccctaataaatgtgatggtgattcagggaacattgctttccgaagtgaggatgcaacggctgtggtagcgcgtgatcatgcgccaccaacatggaagcattacagaggggtgaggcgtagaccgtggggaaagtttgcggccgagattagggatccaaagaagaacggagctagggtttggcttggcacgtatgataccgaagagaaggccgctttggcatatgacaaagccgctttcaaaatgcgaggccaaaaggccaagctgaattttcctcatcttattgattccgacaattccgatgaattgtcggagccagtaatgatgacaacttccaagcgaagtttgttagaaatttcatcaccgtcgtcctcgtgttcagatgatagctcagaatcacaagggacaaagaggaggaagagcctggctgaactactgaataaattagccaagaatagaagccaagtcaaggtggaatgttgaagtggctagaggaatatgcatgttgtacaatttgatcaatcattaatatgagacttcaacgattgtaatgtaatctggtgttcatagaattaatgcaattttgttcccaaaaaaaaaaa

SEQ ID NO: 32648 - DNA, 369 bp, Glycine max
  Clone ID: PAT_MRT3847_129486C.1
gacgaagaacctgatgatggaactgagccttttcacccagagattttgttaatcacagtattgtttcatgttggggggcagttcaaactgccctgcagacgtcagttaatgaagtgaatatgcctttctctgataatatacctgtaatcactatgacaggtgaacaccgtaaagcaccgcacggcgatactagcaaagaacgtataataatgcacttcggttctcatccatctgtatgagacaccacagctagtcagaagaggaatcattcgaccaagaaggtgaagctgtactggtacatatcacgcaacccatacaaaacgtactcctatacatgaatcactgatgaactgacacatcatctgactg

SEQ ID NO: 32649 - DNA, 613 bp, Glycine max
  unsure (1)..(613): unsure at all n locations
  Clone ID: PAT_MRT3847_129487C.1
caaagtcaagcctttcacttttgagtttcaagagaaaaaatatcactgaaaaaaaatccatcttaactcaatcctcaaaattccctttcccattacttttccttcaacaatggacctctctcatcatcttgctcgccatcatgccctctaactctaactaacaatcttctacctcatggccatggatgagtatgaatgtcatgagatggtccacgtggcagttggcaagtccctcaagaaagccgccactttgcttcaatggtgttttacccatttcagcaaaccacagattttcttacttcatgttcaccaaccttctactatgatccccacactgttggggaaattgccagcatcccaagctagtcctgaagtggtgtctgcttatagaatagaagaaaaagaagacaccaagaggcttttggagaagtacttgagcctttgccgtgctgctaaggttaaggcaagcagtgtcattggtgaagctgatcaagtccagaaagggattgttgacttggttactgtgcataatgtcatgaagcttgttattggagcaataccangtaattgcatgataatcaagatgaattccagccgagcagattatgctgcc

SEQ ID NO: 32650 - DNA, 338 bp, Glycine max
  Clone ID: PAT_MRT3847_129488C.1
cccacgcgtccgcccacgcgtccgaaatgattattgatagtgaatacgtgatatctcacaaggcctatgcaagggtcgtattgcttgagaaccacgagcgatgtctactacggcccaaccatagcgataagcgtatccaacttcttagccaccgtcacgctgcgtcccttcgaccagattatcctgcaacctaacacccttcaccatctaattcatttctcatcgctcactcaattggccaacaagttgagctcccaatgttactatggaagaatgcgattgcttatggctacttgcaatgtcttctacacgtattgaacacagaacgccattgatct

SEQ ID NO: 32651 - DNA, 564 bp, Glycine max
  Clone ID: PAT_MRT3847_129489C.1
ttacaataattccactttcacattcagtacaataaagcgcttgaccgcactgcatctgtgccctgagactattatcacaaaatatttaacttttcaaccacccccgacgaggacctaagccaaataaacatgagttgtccattgatcatacccttctaaacgagaaacaccacttttaaagctttagggtcatgtaaaacgctgatgatcgtactcataatgcgacataataatcgcgcttttgcctctcaatctgtctttttatttgtctggcatacacgaggacgggggagatgaaatgaccgacctacgggcccatcgaacggcccagatggaaatgatcaaattctccgaagcttttgcgatttgatcaccgggatggcacgtgcaatctcctctcttgccactgtcttgaaattgaacccggacgcgtgctcctccgggaacctgcgggccccgaagaacgtgagtccggaactgcacttgaacccggtaagtcacacgcgctgccgacacgtggcacaccggttggggtgcgcaaccgaacctgagtttatggaaata

SEQ ID NO: 32652 - DNA, 207 bp, Glycine max
  Clone ID: PAT_MRT3847_12948C.1
ttgactttagaagcatgaggaaggaagatgagtttgggggcatcaaagattgctattaagtataatctgtatcctcacccagaaagtgagttttacgcggagacattctgtgactattccatacagctttcaacctctcagctatctcttgaatacaatgcgtatcgtcctgaatctacctatatctatgatctcgttctttcatcc

SEQ ID NO: 32653 - DNA, 133 bp, Glycine max
  Clone ID: PAT_MRT3847_129490C.1
gtgcaccaaatattgtttgttaaatgctgcattaccaatgggcggagggaactatttggcgtgggggtatccatatacacatttccaaacaatctacattttttgatcttctcttatcatttccacaatattt

SEQ ID NO: 32654 - DNA, 173 bp, Glycine max
  Clone ID: PAT_MRT3847_129491C.1
tattaaaaaacaaaccaagcattagaaacacaaaatgattatttatggggcggggggctacgcttcaacctaggaggactcgaaagaaatcacacgaagggatacaagggaaattctgtcgaaggcgagcacaaagatcaaacatgtttttggaaaaagcagtcatattctat

SEQ ID NO: 32655 - DNA, 496 bp, Glycine max
  Clone ID: PAT_MRT3847_129492C.1
tatcatatcatagcaaccttaacttgacaacatattcctacgatcacttttcaaatggaagcgttttacacaactctctcctcccctgcttccacgtctgttctcaattttcaggtaccactcttatgtctttggaagaaattctaagctcgctatttattgtttgatcacttttacactcaacttgcatgaatttgctaagccaagattaaagaaattatctgatttaatccttttattcttattgttcagtggttatctgggaagttcattgaatgtcttttctgaatttcttattttgaaattgaattgcaactgatatctggactagaagcatttgtattgatatcttataatgatattatccttttattcttatttttcagtggtttatctgggaagttcattaaatgtcttttctgaatttggttgaatttcaaaatatgaagttgaattgtaactaatatatggactggaagcatttgtatcccttatt

SEQ ID NO: 32656 - DNA, 573 bp, Glycine max
  Clone ID: PAT_MRT3847_129493C.1
gagagagagagagagagagagagagagagagagagagagagagagagagagagagagagagagagagagagagagagagagagagagagagagagagagagagagagagagagagagagagagagagagagagagagagagagagagagagagagagagatttcaggttctcgtctcttgggcaccattcctcagtccatttcaccgcaaactgtttggaatcgtatggcaacagtgagaacaccattgatttttgattctagccagcagagcttttgtcaattttctattgaccttctcggtggaggaattttagtggacaaaactgtatattggatcgcgcttatacgagattctccgattagtatcttgttgagagtttctgcttggaagataggctgtcttatgctcaagattgtgatgtctgtgaatgcgcccatccacatgagtgattgggcctctttggtactcgtgtttttatctatcggcatctgtacagcgcattttgatgcatgttagtggacaaaatctgagccacattcctgggaattgatcttcccaatagatgtatgt

SEQ ID NO: 32657 - DNA, 765 bp, Glycine max
  Clone ID: PAT_MRT3847_129494C.1
ccggccgggggttgaacggttcctcgtggcattggtgaaggacaagaaagctgaggggataaggaaatcaattgatgagggttcattggacttcatgcaggaaatgggacatcacagatgaaattccaaccccactttagacaaaaattctttaggcattctgcgcttcctaacaacaaaaggaacctttctgtgaggagttaccagtcaagccctaatgctaagaagagatttgcttcaggactggtacaagtaaaggtttcaagaagatcaagctctagttccttttccatatcatcattttcatcacctagatcaacggataataagcaaaagggtttttgtgttgacaatgatgttgctggaccatcttgctcaagtcaccaaaatgataaatctacaaattcagggaagagagcttctgttagcaaaaagctaaggggccattatttctgtttctccaaagcctcagtgaacaaggagcaagaaagctattgttacaaggatcatgatgtttttgtgaatggcttaattggatgaatacttgcttatttctgaacagggctattgtcaaatacagaagaggaaaaggtgctgcatcaatgcaaaactacactgtagggatttgagggcgtctagtgcattcattgtttgcaagtttttttagatagtaagtgatgaattaagatttgttcaccctcaaatctacttgttaattgaagattcccttgttaaaaaaaaaaaaaaaaaaaaaaaaaaaaaaaa

SEQ ID NO: 32658 - DNA, 181 bp, Glycine max
  unsure (1)..(181): unsure at all n locations
  Clone ID: PAT_MRT3847_129495C.1
atccctacgcgagcgaacgagtcgggngattccgaaagaaagngnttnganncgaggagataccgcaatgatgaacaatggtctgtaccgagggatctgcaaagatctatcaattccccgccgggggccgcgcggatctcggaggtcacccctaccctgaggcccaccttcctgacgaacg

SEQ ID NO: 32659 - DNA, 402 bp, Glycine max
  Clone ID: PAT_MRT3847_129496C.1
atgtgtatcgattttatcctggaaaatcattagtgacccaaattaaatactctttaaaaatactaattaaaatgggtaaaggattaaaatatttatttagaattttgagatactattcaatatgttaaagaaaaatctaaattagattaaataatttttttcagatatcggattgcatccaaaactgttatagagcaagcttcttttcttatctaaatagtactctctttttcttgccaaacttaaaaagattattttaacataaagaaatctcgtaggatgttaatttgtctcattctaccgacactttacattggcaaaacgctgcaatgttacacctcaccacaactgcattgcatttgcagcaccactttgaaatttgtgcaaggagacaaacacgta

SEQ ID NO: 32660 - DNA, 488 bp, Glycine max
  Clone ID: PAT_MRT3847_129497C.1
cgaacataagactaggaattggcccgagcttcctcagtagtgtcatttacgcttctcttctatgcaccaactatgcctaacgcctaaggtcttgttcgacatgaccatcggcggacaatctgctggccgtatcttgatgagactctacgccgacgtcactccccgcacctgtcgagaacttacgcggcgcttggcaccggagagaagggcgtagggcggagcggcatgcccctccactacaagggctcgtccttccaccgagtgagcccaagcttcatgtgtcaaggtggcgacttcaccgccggaaacggaaccggcggcgagtcgatttatggcgcccagttcgccgacgagaacttcgtgaagaaacgcaccggccccggcatactctacctggcgaacgccggtcccagaaccaacggatctcatgtcttgattggccccgacaagacagagtggctggacggaaagcatgtcctgtccggaca

SEQ ID NO: 32661 - DNA, 226 bp, Glycine max
  Clone ID: PAT_MRT3847_129498C.1
gaaaacatatagaaacttcttttaaagggattaaagtatctcttccaaaaacaaagtatcgcatgcccagatacaaccggagagggagagttttctgtgcccgtttacaaacagaggtgatcccagatacccatctactgtatactgcgtatagggaccaatcttctttctctctttacagaaacatagataccctgtcccgagatacaaggaaggatgtactccc

SEQ ID NO: 32662 - DNA, 1474 bp, Glycine max
  Clone ID: PAT_MRT3847_129499C.1
taaaatagcaaaaaggtagtccaaaaaagatggatatctactgcgagaagagatcgaacgaacgacatcgaagccaaaagaacaaaaatgagcatcggaacaacactttcaacaacaccacaccactctttccactccaacaccccaaccagtttcctcaacaccgtttccccaatccaattcctctctttccgcaatcacactcacaatctcagagtcctctgtttctcttcgaatccgtcgcagccgccgccggtggtggtggtgggctccgccaacgccgacatctacgtggagatcgaccgtctcccgcgcgagggcgagaccctcgcggcgaagtccggccaaaccctcgccggcggcaagggcgccaaccaggccacgtgctccgccatgctctcctacccgacctacttcgtcggacaggtcggcaacgacgcctatggaacccttctcgccgacgcgcttcgtggcggtggggttcgcctcgacaacctggccgtggtggcgtccgcgcccacaggtcacgccgttgtgatgctccaatccaacggccagaactccatcatcatcattgggggttccaacatgagcggctggccaagtacactgccacgtcagcatttggacctcgtggcgcaagctggcattgttctgctgcagagggagatccctgatgctgtcaacgttcaagtcgcacaggctgcaaggaatgctggcgtgccagtagtgtttgatgcggggggcatggatgggccccttccaccacaattattgaattttgttgatattctgagtcctaatgaaactgaacttgctcgccttaccggaatgccaacagaaagttttgaagagattgcacaggctgctttgaaatgccatgaattgggagttaagcaagttcttgtgaaacttggggaaaaaggatctgccctttttgtagaaggagaaaaaccaattcagcagcctgccatacttgctaaaacagtcgttgatactactggtgccggtgatacttttactgctgcttttgctgtggccttggttgagggcaagtccaaaaaggaatgcctcagatttgctgctgctgcggcttgtctttgtgttcaagtgaagggagcctctcctagcatgcctgataggaaatctgttttggatcttcttatttgtcaatgagaatactcccaaaaggaaatacaaatcagtgaagattttgaaacgcattaggaacaggaacagaataacttatggcagagagaaagaccctggaaaatggcagcaagtaaagcaaaagcccttttacagagcatttttgcaagaaggatttttcagcataatagcttgttgtcattgtaataagattaggccaagcacttaccctttggcaatagaaagaaaatgaagagaagataaaatataatgttttacatgtttaagagaagaagcaaagcaagaaaataaggaacttcctctt

SEQ ID NO: 32663 - DNA, 1539 bp, Glycine max
  Clone ID: PAT_MRT3847_12949C.1
gtcatgcaatatgtgagtcaccctctctctctatattgcatgctctaatccaactatttataccatcaaccctagcctcttcatccattcatcaatattttcttctcatcgcttaatttattccaccaagaatggccacttcattttctgccaactctcccaatattgcagcaaacaagaaggagatagcagcaacagagaagaatcagtaatcatgaagagaagtagcagagcgggtgaaaagaaaacaggaggagccaaagttgcaagactcttgctagtgaatcaagcactagctactctagccttctttggagttggagtgaacttggtcctgttcctaaccagagttcttggtcaagacaatgtgaatgccgctaataatgtgagcaagtggataggaactgtttatatgttttcattgatcggagcatttctgagtgattcatactggggtcgatacttaacctgcacggtctttcaacttgttttcgttctgggcttagcactgtcctcattgtcatcttggcgtttcttgatcaacccagttggttgtggtgatggccatactctttgtaaaccctcatcaattggagacgagatattttacttgtccatatatctagtggcttttggttatgggggccaccaacccaccttagcaacatttggtgcggaccaatatgatgagaaaaatccaaaagagaagagttcaaaagtggctttcttctgttacttttactttgcgctcaatgtcggttctttgttctccaacactgtactagtctactatgaggatacagggatgtggacaatgggtttcttggtatcattggtctctgctgtcatagccttcttggctttcttattgggaactccaagatataggtatgtcaagccatgtggaaacccagttgtgagggttgcacaggtattcactgctgtttttagaaaatggaaggtgtctccagcaaaggcagaagaactctatgaggtcgatggtccacaatctgcaataaaaggcagtagaaagattcgccacaccgatgattttgaattcatggacaaggcagcaacaatcaaagagacggctcgacatagtccaaagaatccatggcggctttgcactgtgactcaagtggaggaagccaaatgtgtgttaagaatgttaccagtttggctatgcaccattatatactcatttgtgtttacacaaatggcttctctttttgttgagcaaggggatgtcatgaactcctacataggaagttttcatttgccagcagcagataagaacctcacaaccattataagccagtccttaaaaagaaaaaaaaacaatttttgaaaaaaatgggtttgtttccttttaagtttttatatgcagttcttggcgtcatgtttgataaaactgtttgtggtatgtatttggatagggaaaaaaaagaataataagaaactgtgatcatcttgtactttttcttggatgtcataatttataatttatataggaaatgaaatgtgtccaaagattatact

SEQ ID NO: 32664 - DNA, 642 bp, Glycine max
  Clone ID: PAT_MRT3847_1294C.1
caaattggtactccaaagctattttccttgggtacctgactgttgttgaggactgttttttttttttatctgtattgatttaacatttcaaaagatgattttcttttcccgtaaaaagtagatcatcttttgaaatgttaaatcaatacagataaaaagatgatctactttttacgggaaaagaaaatggccaaaattcttttcaatatttctctctttctccctctcacccaaaatggccaaacacattataaatacagcagtaattataaatactgtagtcaatgccataaaaagagtagctactagctagctggggtttagtcctgctacactagtgagtggtgactacagctgtgcaacacgtgtttgtctgacacttttaagttttaccgaatctttgatacattaataaaatggagaaagaaaaaaaatatatttgaaatttaaataagaacattttaaaatcatatttctctctgtattttccatttcctaaaaaatagttataactaattattaaaaaattaacagctaaacttaaatatatgactatatacagaaaacaaatcacacaattgttaaaatttattctcaactagtatacatttttaatgaacgattaaaatatttcctcattta

SEQ ID NO: 32665 - DNA, 321 bp, Glycine max
  Clone ID: PAT_MRT3847_129500C.1
ggcatccttagactgcacggtgtagcaccctgcggacccaatcgtggcaatggaagccgagggctgtcacaacgccgttcatgctgattcggaaggacagcacatctatcgacgctatcgcgggctctaagctcaatacatctacgcaccctaagccaagtaggtccatccatactgcactgatcaaagcctatgcgcaacggcgtacgcttgtgctcgcagtagaggcattgaggtaggtggctgcttaggctacgataccgaagatgctagctcacaatgcagtgttcaatgcacattgaaagaacaggaggcatgctt

SEQ ID NO: 32666 - DNA, 250 bp, Glycine max
  Clone ID: PAT_MRT3847_129501C.1
aattcgcgcgggaagtctacgaaatttcattttattgtcattcttaccttagggggtggtgtagattacattctgttaaagatctcttacttttcaaatttctaatgacttgctacttagctcactaattatatgatttacttatatatagttaggtattttgcaccttaactctcatatagatattaaatttactaatattatacttgcatacatctatatatgtgctataggccttaatttgactaca

SEQ ID NO: 32667 - DNA, 1015 bp, Glycine max
  Clone ID: PAT_MRT3847_129502C.1
ccggatgatcatcaataggtgttttcatttgggattcaaactcaccatggtggacgccttcaaactttgcatcttccttcttgcgtcgatctgtgctttcctagtcttttctaatccagtgctgtgtagtgataaggaggacagtgtattcaagggaatcaacagctacaggcaaacacggagcctggtacccctgagccaagtttcgaaggcaacatgtttggctgatgaagttgcagaagaaatagagaagatgccctgtgaaaacgtgaaccaatactacccttcatctgttcctggtagtgggaacctcaaaatcccaaacttgcagaagcacataaataaatgtgacattaacttcaacaccaccactgatggggtcattctccccgtttgtgtctccaagctggaaccaaccattgtgctctctaattacactcattctgatcgttacgcacagtttctcaacaattccaagtacactggagcagggcttggttctgaggatgattggatggttcttgttctcaccaccaacactaccactggaagtttctctgctgctgcaacttctgttcgtgcttatgctgcttctgtggacttcttgctctttgtttcgttgtttgtgctcatcaactaccttgattgagtgttttgctctttcttctgagcttcattttgtggacactttagtttcattccccccttctcttttgtgtaaatctagaccgaagtgaacttaattaggagttaatttgtgggaagttaacttgttgctgcaacttctgttcgtgctaatgctgcttctgtggagttcttgctctttgttttgctgcttgtgctcatcaactaccttgattgagtgcttatgtctttcttctaatagcttcattgtgtggagtgcggacactttcgtttcattccttctcttgtataaatgtagtgcgaagtgaacttaattaggagttaatctgtgtgctattaaatttgttatttatctcaaaaaacccaaaaa

SEQ ID NO: 32668 - DNA, 630 bp, Glycine max
  Clone ID: PAT_MRT3847_129503C.1
gcataatagcatctctctgaaactttttgtggtcactggtgatatttcagttgcattgaagagttattgttagatgagatctttgtagtaagatgaaattagggtgtccctgtccttattaatgcaaccaatgaatgatatgagaaaacacatttggcctttgacttagtgttcataattgttgattcacaatgtttctctatggtttagggtgttctatgaggtgaagcaattttctggtctttaggcttgttatgacattaatacagagatacagaaaattcttattaattcaagatataatatggcctagatatgttaacaaattaaaaaaaaaataatacttcacatggatgcgcaatatttgtagatgatgatcatttctcatcatcacatagtgggataaggcctttgttgttgttgatgatcatgtatcgttaatgcataattatattaggcagatgatgatcacaatcttcaaaaacaatatttgtgatcatagcaaagaaccatagttagatttttttttttcaactgcctatatcaaaatatgttctttctcccatgaacatgttactatattcgtattgtttcgtaggacatgttagattgtcacagaaagcatcatta

SEQ ID NO: 32669 - DNA, 415 bp, Glycine max
  Clone ID: PAT_MRT3847_129504C.1
aattcggctcgagctcgagccggcattttcagaggaacaatggcgggtgcgggcgtcgacgtgctagttcttcgtgtttgctctttatgtccttcttcctcttgagagcttccctgctgaatcattggagaaagagttcacactcacattggatcactgtaacttttacgacactgttaacaagcacgatttcatagatgtccagatctactctgcatggagtggccactgtgtgaagcttgctccccagtatgagagagctgactctatcttgagtagtcgtgatccttcagttgttttcactaaaaaagatgccaatgaggagtagaacaaagactttgcatatgaatatgatgagaggggatacccaacaatgaacattctgagaaatgggggaacgaatgttcaggaatac

SEQ ID NO: 32670 - DNA, 103 bp, Glycine max
  Clone ID: PAT_MRT3847_129505C.1
aggtaaagctgccacacgacaagatccaggcatagctgcgcgtgcatgagacatcggtactcttctaaaatgtcaacaaaatgcaactgacgggacatcatta

SEQ ID NO: 32671 - DNA, 218 bp, Glycine max
  unsure (1)..(218): unsure at all n locations
  Clone ID: PAT_MRT3847_129506C.1
tcctctagagctgccgcttgggttttttcttttttttttttttttaacacgaagaggcttcattattattattatatcaataccacaagcgtgaaacacgttcacaggactatttattctgctacggcaaatatttgtgttcgcaggaaacaccctggcgcttcaattaaaggactttttcacngggtcgcacttgcaatacaaaaagcaaattcaaa

SEQ ID NO: 32672 - DNA, 322 bp, Glycine max
  unsure (1)..(322): unsure at all n locations
  Clone ID: PAT_MRT3847_129507C.1
atatttctttcttatgctcttaaacttttcattatgcaagatgaatattttgaggttgataattctgcaatcaaacatgatgggttctttgtaaatagggggaaattggaacgcatgtaagtttttctgttttaaaaaatctactttgaatattacattttgttcttttcaaaccacacatgtttaaagcaaatcatagaaaggtttctttgaaacttattttatttgttgatcccttttcatttctgagggtggtctcttgntatcattttattgtatttgctgttaaataacatctttttagctggctcaaattattcat

SEQ ID NO: 32673 - DNA, 391 bp, Glycine max
  unsure (1)..(391): unsure at all n locations
  Clone ID: PAT_MRT3847_129508C.1
ggggccgcgcgcgtccgtacggctgcgagaagacgacagaagggggcagccaaagaaaagaaaatcctcaattttgggggcgggcaaacactcccgcgcggcctctcgaaaattctcaggttgcgagagaaaatctgaatcatggcggggcaagcgtgtggcgacgatcaccttctgggggacatcgaaggtgaccacctcgctcgcgctgctatcatcggccaagacgggagcggttgggctcanaggaccgacttccctcaggtcaaacctggggagataactggcatcatgaatgactgtaatgaggctggatcacttgctccaactggattggatctcgggggcaccaaatatatgggcatccagggggaacccggtgctgtcattc

SEQ ID NO: 32674 - DNA, 521 bp, Glycine max
  Clone ID: PAT_MRT3847_129509C.1
cgttgttacttaaatctataatttgatttccaaccatgaaggggatcaagagcctccaaatcaatcgtcaaagtagaaagggagcacattcaaccctggtcaatgggttttgaaacactgtaaaaacaaacttgtacaaaagcatacaattgttaaccaaccaaacgaccactttacaatgtatagtttgttcaacgaaaatacttttcaattttaacacatttttttttatttgacacatgccttgctgctgtgagcagtttttgaagtttgtagggaaaaaaacattgctttatactttcattaagcatctttgggctcatcggaagcattatgatacaccttatgctcctcctccggcacagggggaagctccaccggttccccaacctggacaacaagaccaccagcaccggtaccgttaccgttaccgttatcgttctcctgggggtagcgcacaaccacaacgggacacacgcaatggggcacgcagtaatcactaacactcccgagccttccct

SEQ ID NO: 32675 - DNA, 2586 bp, Glycine max
  Clone ID: PAT_MRT3847_12950C.1
tccgcacctgttcaagatattatttctctctctaaagtcgatcgccctctctctctctctctctaaaaacctttaaaatccctggaatctgtattgcgtgattgacatttggtcacgatctcccctaacggaagaagctagggttcggattgatttctctgctcataataataataatctgatttgctttttggaaaataattttgctatggcaaactggagagaacgagatttgtttcacatcgacgagatcgatcccgtggacgcgtcgaacggcgaagatttcgacgattcttcgtcggtagacagtgctacttccgatggttcgaggacgcaggttggacttacggagcgtttgacggatattctcgttgacgagcgcgacggcgatctgttgattcagcagactaatagagaggaccggttgctgtggtggctacgtgctctcgatatcgcaagatttgcgcgcttaccccattaatgtgtgatccaattgttcatgtcccagtgattgacgtgtgctcttcaggtcagggctatcttgtgagtgctggccctgcaatgtcacctagcattccaccattgcatcgcgagatgcttctgcgtgccgcttgtttcgttccgcgtcgggaagatcaacaaggaagggactcgcttcagccctatagcgaataggggtaacttgacactcgtactactgccaagttctgatcttcgtctctcattcattggggatgatggtagaacagagagattattcacccttaccaacaaatcccaatgctctgctgttgtggttgatgaaatcccaactgatagttctggccgatcgttccttgtaaggactccagatagcagagctttttatttctggtgctctgaaaagtctaagcttttgggaattgaattgcttggaaagatgaaggatttgctcaagaggaaaccatccattgttgagctgagtggcattagcaagtcacgacttgactgctttgcaactcagcttcgggcttttcttgtggggacaacaggaggcagtagtcatgatagttcagtttgtgcttcaacatctgctaattccatgtcttgctctaatgttgcttctgaaagttcgcacccttcatcttcaaaatttccccgatctcgaaacattggaggtcagacagcaaagggagatacaacactttaccagagtattcttagtccaagatcaagttcttttaaagaggttccaccaagaaacttgtcttctcacaggattgcagccagggagaaaattaagcgtcgtggtgacaatcatcagccaacggttgacaccttgacaaatgattcaacacacattttggatttatcttcaacttctgatcatgacaaagcatcagaagttaccaaaactcttgcattttcaccaagttttctgggatcacttggaaagcttggtggtgttccatcaagcctggggctgagtggggaggtccctcccattgtgtcacccattttttctccctattattgttggtgtcccccaggtatttctacctgtccttccattgcagcagttacgcaatccccaaactcatctattgaaacactgcctttcccctcaggtgcctctttattagccaatcctctatcggttaacttgttggatccagtacaacctctcggtacttccatggactttcctccttttttgcctgatccactggtcagaatgtccttgccaacatctcagcagattcccacattcacaccattaatgtgtgatccaattgttcatgtcccagtgattgacgtgtgctcttcaggtcagggctatcttgtgagtgctggccctgcaatgtcacctagcattccaccattgcatccaaaccttgtgaagccattgattcctgaatctgatgctgtggtgaagggtgcaagagagactctaagattgctacttagtggttcaagccagggtaaccaacagatgatgagggacactctgcctgcaattttaactaatccagacgaaaatcaaaacaatatccttgtggctggaagtcgtggtctttacactggaaccagagatattaatgctattgcaaacagcattgctgctatgggattagtatcactgtctggggtatccaaggtagacagtggagtctattcggagctatgtgaaaactatgggaatttggaagcagtgaaaaattccaacgattcaggtggtggtgcctttttggatgatgagggcggatcttctttggattcgaagcagtagtgtagtgatgaatgcaattgtttttctttttttatttatgtagatctcttttgtttagcaaatgtagatatgcgctgtagcacttttgaatggttttaaagttaaaatttcaccattcaagccttgatcccacgtaggaggatgcattgatgattctttgttgattagatatttggaatgtggctgaatcagattttggctagctgtatatccgatttcagtgcatgcaaaggtaaattggtatggaacaatatggcattgtccggtttcctttttttttttttgataggctaaatgaatattattcgaaaaacacc

SEQ ID NO: 32676 - DNA, 1467 bp, Glycine max
  Clone ID: PAT_MRT3847_129510C.1
gcaaagaaacggggaaattgttttatttgaagacatccgagacaaatggtaaaatgtttgtgattctccgtcatcatccaactttccttcaacattaattgtgttgaaataagtgtgagatgaagtatgcacaacaaattgtaccaggcattcacgggaagcaagacagtaaaataaaactttcgttgtttcttaaatctataatttgatttccaaccatgaagtggatcaagagcctccaaatcaatcgtcaaagtagaaaggtagcacattcaaccctggtcactgggtattgaaacagtgtagaaacaaacttgtacaaaagcatacaaatgctaaccaaccaaacagccactttacaatgtatagtttgtccaacgaagatacttatcaattctaacacattcttcttcatttgatacatgccttgctgccgtgagcagtttctgaagttagtagggaaatagacattgctctatactttcattaagcatctctgtgctcatcggaagcatcatgatacacctcatgctcttcctccggcacaggcggaagctccaccggttccccaacctgcacaacaagaccaccagcaccgttaccgtcacctttaccgttatcgttctcctcggggtaacgcacaaccacaacgggacacacgcaatggtgcacgcagtaatcactaacactcccgagcctccccttcgcggctcgcttcgacgcgccgaagccgcagctccccatgatgacggtgctgagcccgagccgctccacctccaagcagagcctctccttcatgtcgtggtccttcacaatgtagatcttgaacggtatctgcgcctccaccagcggctgcgccaggtcgctcgctttcgtcgacgtgaagttgtcgaagtcgtcctccagcttccgccgcgactcctcgtcgcctcctccgccgtcatcggcgtcctccgccgcgctcagatccacggagccccagtccgcgccgtagaggacgctcgtgggacgcacgtgcaggaggatcacggcgtcgcccggtcgcaggtagttctgcaccgcccagcgtaccgcgtaggcactctcgtcgctcagatcgaccgcgatcgcgattttccgctgcgaactggatgtgagcgcgaaccgtggggagaacgtcggaaccggaggctccagttccgcccgaaccggcgattgcgggttcatgttcagcaacttacggttttggtaaccggagagaaaaggttatataggtcaatgcgaaagtgatcaaactattttaggagtctgaagattgatatatagtcactcacggttctcacggatcaaagacacttttgatgagaggtttctagaaattaacgaatttgttagctttttccttcactgtcttcaagcgtcagcactcgtctttctttgaaactggaaaagctcgagccgaatcggctcgagctctagccgaattcc

SEQ ID NO: 32677 - DNA, 1277 bp, Glycine max
  Clone ID: PAT_MRT3847_129511C.1
cagtaaaataaaactttcgttgtttcttaaatctataattgatttccaatcaggatcaagagcctccaaatcaatcgtcaaagtagaaaggtagcatattcaaccctgtcactgggtattgaaacagtgtagaaacaaacttgtacaaaagcatacaaatgctaaccaaccaaacagccactttacaatgtatagtttgtccaacgaagatacttatcaattctaacacattcttcttcatttgatacatgccttgctgccgtgagcagtttctgaagttagtagggaaatagacattgctctatactttcattaagcatctgttcacaaaccaaaaataagcaagttaaataagaagaaactaatcaacctgtaacaatatactcccaagtgatagataaaatcctacaaggtttgggttatttcataatctgatggcttctaaagaacaaaaatattgcattttttattcttttttgtaatcactatgggaaacaccattccaacaggtagcatgtcaatctagaacttaacatgaaaaatgaaaataaatatccatcttttggtttgttatttccttttgcaaagatctcactctagtaactgtttccaccaaaacctctcaaatccaacattagccttagtgtgtatctgggaattggtgaaatttgcctactctagggtatggccagcctatacaagtgttccccacacctagaggtagttatctcccaattgcaaagcattgtgggatgagtggggagcatatagtggataattgtgaagtttgctaagtgcatatcatgggtaagtgttcaaccacggctcagtttagtagcttcagcttttaacttcaagaattaacttgtagcagtcatatacagaaaagaatataaacataagtgttatgcacgttatggatatggatttagacaaacgcttgaatgcaacacttaacaagtgataggagttggattgagccttaggtcgacaactataaaaccatttaaaattagagtaaactacatgcaaaacttgacttcaaaaatcaatgataactatctggcctttctacaaacacttccgatgaaatacacatttacaagtttgaattcagaattagacttctgatgcatgacaaagggttcaatctttatttctgttaaaaagctaggtagctgtttgggctattgcagattaatactgttcatgcttttgaagcacaagtatcatcaatgctatagcagcacagatacactttataggctggctcgtgc

SEQ ID NO: 32678 - DNA, 395 bp, Glycine max
  Clone ID: PAT_MRT3847_129512C.1
tttatttcaataatcctttacaatttactattttataaacctatcacaggggaatttcccaacgattcacatacacaaaaactctgaaacacactacataaaatttcactttttcttacaaaataacctacacttttatttaaaaaaacacaccttatctccttccttttttttagaaacaacaccagtaaaaccatcaagaaaatttgtttataaatttatcccaacttttgtcccctaaaaacaccctgcatacccaaacgacaaaactttttttattaatgcacatacaatattaataccctttttaactcttttcttgcaccataactatatatttcaacaaattttctttttccaaaacaaaacatttttatttttaaaccatctatttc

SEQ ID NO: 32679 - DNA, 272 bp, Glycine max
  Clone ID: PAT_MRT3847_129513C.1
aagcggaggggatttcaaaagttgaaaatttgtgcatatcacacatatgtatacaggaaaaattttccaagattcatttttgtactgagccaatgccatagtagaaggggggtacagaaaatattttttaaaattcggggaggatgtgtgtaacttcaccggatgagaatgaaaacttggtttgagagcatgtatgcataaaggcaagattatctttggtatatgatggccactgtgttgaacgtagcttataaaactgttttgccttttga

SEQ ID NO: 32680 - DNA, 230 bp, Glycine max
  Clone ID: PAT_MRT3847_129514C.1
attaacacttccgtagttcaatatctggaagcccttcacactctctcgtgcttccctttgcttgctactcttgtcgaatgcatgctttgctattagctgccagtcaagctcatcgagtgcgaactcaataaccttaacgcgttcgaaactgaccaccgcgttgagtccgcagtggtttgagtcgtacatggagctctcgacaccctgagctgctatgtgccggtgtcact

SEQ ID NO: 32681 - DNA, 140 bp, Glycine max
  unsure (1)..(140): unsure at all n locations
  Clone ID: PAT_MRT3847_129515C.1
cgacgtcncttcgctccctccgacggcgagnnctacatcaatgtccnaaaggggaagatcattccccggctangagatnagcntcantctcacttggcanggnnaggccanagacagcctgggancntcncttctcaagg

SEQ ID NO: 32682 - DNA, 1027 bp, Glycine max
  Clone ID: PAT_MRT3847_129516C.1
gtaatgctggggagcaattgacctcagagcaagtggaatctggtcatcctcctgatactgctggaccttacagagttcttcttaagcatcatgaatcagatgggaaaaatgaaccaacaaattgggagaattcagagacaaccaatgcaacacatgttgatggcaggggtcaaccaagaatgactgtttgggagaatgagcagagatcaaattacagaaagaatgaggaaagggatttcaggacaagtactcgtggtgaagtttcttctcggtcttcagaaaatcaaatatctagttcttctgtcatgaaggcaaaatttcccgaaagttcaggaaacataaaaaaatctgatgatatttctgcaaggaaattggatggtgttgcctctgatatgctagaaatccccttaaaaccatctgctccaaaagatgccaccctgattcaaaagatagagggtttaaatgcaaaagccagggataattcatctgctagaattagagaggagcaaaggaataaaattcatgccagtaatgctcctataaaccatgtggaaaatgcagttggtgcagatgttgtgtttccagcaagaacccatgccacagaaatcataaatcctgcccatcatgaaatgggcgctgctggtgcagaaaagaattctgaatccttatctttcagtggaacagccacatccaggcaagctgctcatggaatgcacggtagaggcatccatcgtaacaaaggaagatcaaacaatcaagatgctgatggttggcgaaagaaatctgtggttgaagattcttcagcctcatctggtgcacagttggaagcatctaatgttcttgtgggtgaacataaaatacctgttcagacctacaataggtctggatcctttaataaagccaggcacattggagaatctgttcagaccaggtctgatcctctgacagccaggccagcgtgccaaaatgaaagagttagccaagcaaccgactaagccactgcaggaagaggaggaggaaaggataa

SEQ ID NO: 32683 - DNA, 380 bp, Glycine max
  unsure (1)..(380): unsure at all n locations
  Clone ID: PAT_MRT3847_129517C.1
agagatcggaagtggaggggaaaaaagtagaggtgttgaagttggtttaaaagctcaactgccataaccaatcaatgggaaatgaaaagagttggagtagttagcgttggtattttgtgtgtgttgtgacctctgtagaactagacatgttaagctctgcaagtggcatctgaaacaaattaacttaatatgttctcacttctcacacaaagttggctgttttttttgcttatatctttagtcagctcgcaaatgtcatatcaaatcattctttattgagtattangtaggctgcttgggtggataaccggatcctaatagtagttccctctttactttatatcctttctctgcttttacaatatattctttagattata

SEQ ID NO: 32684 - DNA, 602 bp, Glycine max
  unsure (1)..(602): unsure at all n locations
  Clone ID: PAT_MRT3847_129518C.1
gcacgaggaattctggaagaatcttgggcttatgacaatcattgatctttctgataaccacttaactggagggataccccaaagtataacaaaacttgtggcattaattggcttaaatctttctggaaataatctcacaggattcattccgaacgacattggtcacatgaaaatgctggaaacctttgacttgtccagaaaccatctccatggtcgaatgccaaaaagtttttcaaatttgagttttctcagttatatgaacttgtctttcaataacttatctggaaaaattacagtaagcactcaactacaaagttttactgccgcttcatatgcagggaacattgggctttgtggcccaccacttacaaacctatgctcagaggatgtggtcccaccatatggaataattgataaaagtgacagcaatgaagatgagcatgaacttgtagacattgggttttacatcagtcttgggttgggatttagtgctggatnttgtggtgtttgtggaactttaattataaaaagttcatggagacatgcctatttccagttctttaaccacataaatgattggatatatgtaacaatcattatct

SEQ ID NO: 32685 - DNA, 485 bp, Glycine max
  unsure (1)..(485): unsure at all n locations
  Clone ID: PAT_MRT3847_129519C.1
ggttgttcaaggctactaaacgcccttactacttagattacattgacaaaaacatttataatctgaaaaactttgctgaatttggatgggactcaaaggacgctggcatcaacgtgctcgtctctaagcttctaattaatagtagctctaattctaagcctttcatcctcaataatgcggacaagtttgtctgttctgtgctacctgaatcgccttcagtatcggtctcatactctccagcccggctcctatgggggggtggggggagtaacttgcagcatgcaacancaatctcatttctgtttctgggttatgctggctatttgaaaaagacgaataaagagattgactgtggcggaaaaagttttgcttctcccaggcgatttaaacaaatagcaagaggccaggtggatttcctactaggaagcaatccagggataatgccatactgggaaggatacggggcaaaattatctgaaaaaatc

SEQ ID NO: 32686 - DNA, 1021 bp, Glycine max
  Clone ID: PAT_MRT3847_12951C.1
ggggaggtccttcccgggatgtcacccgttttttctccttactattgttggtgtcccccaggggtttctacctgtccttccattgcagcggttacgcaattccccaactcatctattgaaacattgccttttccctcaggtgcctctttattacccaatcctctatcggctaacttgttagatccagtacatcctcttagtacttccatggactttcctccttttttccctgatccactggtgagaatgtccttgccatctcagcagattcccactttcacaccattaatgtgtgatccaattgttcatgtcccagtgattgacgtgtgctcttcaggtcagggctatcttgtgagtgctggccctgcaatgtcacctagcattccaccattgcatccaaaccttgtgaagccattgattcctgaatctgatgctgtggtgaagggtgcaagagagactctacgattgctacttagtggttcaagccagggtaaccaacagatgatgagggacactctgccagcaattttaactaatccagacgaaaagcaaaacaacatccttgtggctggcagtcgtggtctttacaccggaaccagagatattaatgctattgcaaacagcattgctgctatgggattagtatcactgtctggggtggctcgagctcgagccgaatcggctcgagagctatgtgaaaactatgggaatttggaagcagtgaaaaattctaatgattcaggtggtgccattttggatgatgagggcgggtcttttgattctaagcagtagtgtagtgatgagtgcaattatgttttttttttttttttttgatgtagatctcttttgtccagcaaatgtagatatgtgctgtggcacttttgaatggtttttaagttaaaatttcaccattcaaagccttgatgattctttcttgattagatatttggaatgtggctgaatcagattttggctagctgtatatccgttttcagtgtatgtagtggtaaattggtatggg

SEQ ID NO: 32687 - DNA, 271 bp, Glycine max
  Clone ID: PAT_MRT3847_129520C.1
ggctcgagattagagagactctgtacagatattaaccctattttacaatgctgaaacaatgcataaccatacagatttgttaggcctgaatataggcgggcaacttgtggtgcgaactgtgatggatctatcatgggatgcaactcgacggactgacgacaactgactcccgctttggagcagccaaaaaggccttcggcaccttcttcagcgaatccagatctggggcgcacgcttccagcgctggattccgagatctatgagtcaccgt

SEQ ID NO: 32688 - DNA, 352 bp, Glycine max
  Clone ID: PAT_MRT3847_129521C.1
ggggggaccaaaataatgaaaaataccaaaaataccccccacccaaacagataaaataaccccttttttcactccaaccacaaatttgaggaaaagcgcccctacttaggtatactactacccaagggggccccccaagttgataacctaaaaatccaaaaataaggtggccaacaaaaaaaaataaagttttaaaatctcaaaaaaacagctaccgggaaggggaaaaaacccccaaagaagcagacaccttaaaaagggaagacttggtaaaaacatgaaaaaaacccacatttttaaacctaacggtgccggaaagggcccacattattggacatccccaacgttaaaa

SEQ ID NO: 32689 - DNA, 260 bp, Glycine max
  Clone ID: PAT_MRT3847_129522C.1
caaaattttggaattcagaccacagttgtttgagctgaagcaccttaaagctctttccctattcaaatgctttgaatcacaacacaggcatcaagctaccatccccaatgcaaactgggaaaagcttgctggcagcttagaatcacttgagtttagatcaaacagaggtctcattggaaaaattccttcaagttttggtgccctcaagaaccttcagtcactagtactattagaaaatggtttaacaggtaaaatccaca

SEQ ID NO: 32690 - DNA, 176 bp, Glycine max
  Clone ID: PAT_MRT3847_129523C.1
aaatataaaactacatatttttggctgaggggaaataatggtgatgccatatacaatttacatatgtgagttttggactctacagaatgtgaacatttactggcaacaatttacctatgtggaccttctcacttagggtgtatttggtatgggggggaggaattatattcaagggg

SEQ ID NO: 32691 - DNA, 212 bp, Glycine max
  Clone ID: PAT_MRT3847_129524C.1
gaagccattaatttccagggccagcataactaagtgactgtaggggacctggaaaacttcatataaaattgcgttgcttattgaaggaggttatagggaaaccacggcactggttatgaacattggataaggtagcaaagatgagattcctgggttgggacaacttaaggatgcaagatactccgggggaaacagggcgattgttcctcaat

SEQ ID NO: 32692 - DNA, 622 bp, Glycine max
  Clone ID: PAT_MRT3847_129525C.1
cacgcgtccgctggcgtctgcatgccatgtaaggttttttgcaacatgtccattaataaacaattgcttaaactttggtattattggaacataccaacacacctttgctagacgactgttgtttgcaattacatcaacactgcattccccatcgttcactttgtaccctaataccccacatgtggggcaattacacttttctacaaactcatttctatacaaaatggaatcattagggcatgcatggattttctagtactccattcccaccggacataaaaaaatttcacctcgtagtgattttttggcaacgtgttatcttcaggaagcatttttttcaataacactagaaattcagtgaagcttttgtcactccacccaaatcgtgccttcaagttgaccaaagctaacaccgatgacaaccttgtgaaagttgtgcaccctgaatacaaaggctttttagaatcattttctattttctcatacaaaggtgcatgtgtttgctgaaaactatcttgcccaaggtcacaaatcatgtcttctatacaatgtcctgatgtcttcatcaaccaactgagtttgaggggcagttggcatgtctggcaattcaccatgtcatatc

SEQ ID NO: 32693 - DNA, 257 bp, Glycine max
  Clone ID: PAT_MRT3847_129526C.1
gcaccgtcgtcttcatttcgcagccatcttctgcgccacagcataataacctgagcagtatagaagagtttagtagaatagaataggtagcaagattaggaaagagagaaggcgaagaagatccggtgattcttcacggtccgatgatgatgcggaaagccgtgatttgtcctctcaggagagacgccggagagacggtcacctcggccaccatcgattgtggcggggacggagcaggcaggactcagatagttcct

SEQ ID NO: 32694 - DNA, 836 bp, Glycine max
  unsure (1)..(836): unsure at all n locations
  Clone ID: PAT_MRT3847_129527C.1
aattcggctcgagggaggacagaagggcttgacccggtttacgctcaagctgttcagatgaaggagagggatccggtcaccgggaagatgaggattgtcaatccacagagcagtaggcttgtgtgggaaacttatttgactgaattcaagtccttggggaaagttgcagtgaggctaatattccttcacgcaacctcgtgtggcttcaaatgcaattggtcattgtggagatgggtttgtgcacaaggccaccattccagaactgcactcaacaaggtgcagaagttgatatttattgcagctcattccaaacttgagagaagggatttttccagtgatcaagataaggatgcagagctgtttaccttggcaaatggtgaggatgatgtgttaaacgacgttcttgttgatacatcctcagtgtaacattttttttttttttgccctcttttttttattatttttgggttaattaatcagttaggaattttaattttttaggatttattgaattctttccactaccctcttctttttcatgtcttcttccatcctcctttttttattcactccctttgcattttgaacactcactggaaggactttgagcaattctccatcttttaccctgacatgatcgttaagttgttaaatacgggaaagcgggaaagattataacgccagaactggaaggatgttgtagaaattttattcctcttgtagtttgagataaataagatttgtaaaggggaagtttttatcgattctcctttgattttttaaaaaaaaaaaaaaaaaaaaaaaaaaaaaaaaaaaaaaaaaaaaannancncccc

SEQ ID NO: 32695 - DNA, 713 bp, Glycine max
  Clone ID: PAT_MRT3847_129528C.1
atattcactcaccattttctcttttctcttcctctgagaacaaaaaaggggaagagacacaaaagaagaaagtgtgagtgagggaggcagaatctgaataataataataataataaatagctgcgtgttcaatgagagccacagaaaatcaataatgggagtagtttctgaaggaaacggcgacgttttaccatggctgaaatcgatgccggtggcgccggagtaccggccgagcgccgcggagtttcaagatcctataagttacatattcaagatcgagaaggaagcttccaagtacggaatctgcaaaatcatccctcccttcccaccttcttccaggaagaccgcaatcgccaacctcaaccgctcactcgcggaggccggctccacattcaccacgcgccagcagcagatcgggttctgcccccgcaggcccaggcccgtccagcgtcccgtctggcagagcggcgatcgctacaccttcaccgagttcgagtccaaggccaagtccttcgagaagacatacctcaaacgccactccaagaagggctcgggctccggctcgggcctgggcccgttggagacggaaacactgttctggaaagccacgctggacaaacccttctccgtggaatacgctaatgacatgcctggctcggcgttttctccgaaatgccggcgcacaggggatcccagctcactggcggacactc

SEQ ID NO: 32696 - DNA, 231 bp, Glycine max
  Clone ID: PAT_MRT3847_129529C.1
acgaggctcaatcctacgccgccgatttttcacattgcattggagcatgaccaaaaacgaaggcttgtgaactgatgactgtatttacatctgcgctggaaggaatatatgttatggctctgaacctgacatattgtgccttgtctgatgtatgcgaatgcgacttttctgtcactcgctttataccaaactaactaggagggaccttatttgatgaatgatggtatatca

SEQ ID NO: 32697 - DNA, 753 bp, Glycine max
  unsure (1)..(753): unsure at all n locations
  Clone ID: PAT_MRT3847_12952C.1
caccctacggaagaactagggttcggattgatttctctgctcataataataatanatctgatttgcttttcggaaaaataattttgctatggcaaactggagagaacgagatttgtttcacatcgacgagatcgatcccgtggacgcgtcgaacggcgaagatttcgacgattcttcgtcggtagacagtgctacttccgatggttcgaggacgcaggttggacttacggagcgtttgacggatattctcgttgacgagcgcgacggcgatctgttgattcagcagactaatagagaggaccggttgttgtggtggcttcaggctctcgatatgcaagttatgggagcgtgtcgcgccgacgagcggttgaagcccttgctgaagatgaacgcttcctgcggcgtcgcggaagatcctctactggctcaattgactcagcattttgagccatctgaagttggaatattagcgagatgcttctgcgtgccgcttgtttcgttccgcgtcgggaagatcaacaaggaagggactcgcttctgccctacctcgaataggtaactgggcgtattctagtatgatctctgaattaagaggaagtaaaggggtaacttgacactcgtactactgccaagttctgatcttcgtctctcattcattgnggatgatggtagaacagagagattattcacccttaccaacaaatcccaatgctctgctgttgtggttgatgaaatcccactgatagttctggc

SEQ ID NO: 32698 - DNA, 1225 bp, Glycine max
  Clone ID: PAT_MRT3847_129530C.1
gagggttgcattaaaattgttggcatggacactaggatttcttggttaagaaatgaaatttgattacacacgcagcatagaagtgcagagcacacgcgtccgcccacgcgtccgtgaaaacggtatccatcaatcaatcagcagggaagaaaaagaaaggaaggagcgatgtggttaacagcgaaacccattcgacaactatgcttcccactcccaatctcagtcccaaacaagttctgcaattgcagcttatccataacagcaacaaccaacaccaacaccaacgccgaaattactactactctcactcaaactcctaagccaaagccgaaccctaagtcgacgttgaagaagcgaaagaggtaccggaagctatatcccggagagaccaccggcatcaccgaagagatgaggttcgtcgccatgagactccgcaccaacgacaccgtttctcaacaagaacaccaatcgcattccgacgcgtggcaggcctccatggaaggcttcctctcttacctcgtcgacagccacctcatcttcgccaccctccaacgcatcgtcgacgaatccgacaacgtttcctatgcatacatgaggaaaactgggttggaaagatcagaagggctgttgaaggatctgaaatggttggaggaagaaggaaatatgattccgactcctggttctccagggcttacatatgccaaatatttggaggaactcgcagagataagcgcacccttgtttctctcccatttctacaatatctatttttctcatatagctgctggtcaggtcattggaaagaaggtttctgaagagctcttggaaggcaaggagttggagttttacaaatgggaaggagatgtacctgacttgttgaaagatgttcgtgataagctcaacatgctttcagagcattggtctcgagatgaaaagaatagatgtttaaaagaaactacaaaggcattccggtatatgggacaaattgttcgtctaattgtctcataaatagacatttgttcttttttttttgttaacaacactgccgtctttgatggtaagctttctaatatttccttttcttcctatagcttctctaatttgtggcttttaattgatggaggggtatccctaactttgtaaagttcgatacattcttgagagaatatttgtttgatttacttttatgccttatcagagaaaaaaaaaaaaaaaaaaagattac

SEQ ID NO: 32699 - DNA, 295 bp, Glycine max
  unsure (1)..(295): unsure at all n locations
  Clone ID: PAT_MRT3847_129531C.1
gttcctcattttgcaagcnttctttggnttcacaccatttttctattgacttcatcncaatataagagancattngtgtcggtangatcaccaccatattcnttnggncttcctgctggtnatttctangtttcgttcaatttggctttgaatttnctgctgcaaaccttanctaactgcaaagcnttggattacngantctaacnttacnggccacagtttgcctggttnaacnggagctcggtttttaactggtcntggantcaaggatngcccntaaaggccaattgggttg

SEQ ID NO: 32700 - DNA, 178 bp, Glycine max
  Clone ID: PAT_MRT3847_129532C.1
gcctgcgctcccggtggagattgccagggatccaatcttggctggcacagtatacgatcaggggctctcacatacacaaggatctcaagcgagctggaattacgaatggatctgattccatggatgagattgagcctctacagactgcctcacttatctagcatcagccgttgggttc

SEQ ID NO: 32701 - DNA, 305 bp, Glycine max
  Clone ID: PAT_MRT3847_129533C.1
cctactagtacttccaaccaaccgcaaacatgggtgggggatttttaaaaccggagggatgggcaaccgtaacatgggtcccagaatcactcaattaatgactactttagtgtctacgatttcttatgggaacgaaaataactctctgtagtggccacaaacttcatgactcatcaagtcacacactcggaggtgaattgtctttcacactcctatattatttaaaacccactgtcagatttaaactacatctgcgtgtgtgacagaactctgatctgttgcatgttcaggccgctgcaatcttg

SEQ ID NO: 32702 - DNA, 350 bp, Glycine max
  Clone ID: PAT_MRT3847_129534C.1
gctatacatccgaagcggtacagatatttttttcatcgtttaatgagcggttacacagtatgatttgaaccgagaaacaactattaatatacagcaaaggttctgaagttatcctgtaacaaaagagtacacgcttagaccgaacacagacatatttcttggaaaaaacaaaatgaaaggaaaaaaactttctaatatcatcggtgtgagtgcaaaagccactggaccctaatgagttcggactatggagaacatgcatgaaatctggtgaggcgtgagcgggctgataatgcgacacgagcagcttatgtagcggatccatgcaaagttgcacgtgcatgcgcttcata

SEQ ID NO: 32703 - DNA, 965 bp, Glycine max
  Clone ID: PAT_MRT3847_129535C.1
ccgggttcgacccacgccgttcgtgtgaaaattttggttgagcaagagccttctctttgttccgttccgcgaccatgtctcatgagacatgcccttccgtaaagaacttccttcttttggattctgatgggaaacgtgtcgcagtcaaatacttctctgaagactgggcaacgaatagtgccaaggaaaattttgagaaagttgtcttcaacaagactcagaagaccaatgcccgcacagaagcggaaatagcaatgtttgagaataacattgttgtttacaagtttgtccaagatcttcacttctttgttaccggtggtgattatgaaaatgagcttatcttagccacagttctgcaggcattttttgattctgtgggccttctgctcaggttgtggtcttacataaacaatttatatatgttccatgttcaagggtgtttttaatctatcactattaacacagtagtccttgatgattttactgtcttttcccctctagaggcaatgtggacaagaaggaagcactagagaacttggatctcattctattgtgcatagatgaaattgttgatggcggtatcattcttgaaactgatccaaatgttatagcggggaaagttgctagtaatagtatagattctggagctcctttgtctgaacagacactaagtcaagcattggccacagccagggaacatcttgcaaggtcccttcttaaatgattcaaatggcatttgacagaggaggaaacttgtcttttagcttttcgtatagacgtttataagaatcaaattgcattctcgaacattcgaacctggatgatggtgttatttgcgctgtgaaagttaactttgacatgcttatacgggctattttggcactaccttatgacgatttgttcatttaattacccattaaatttcagtatagtggcatattgcgtatgttccacaagtttataat

SEQ ID NO: 32704 - DNA, 589 bp, Glycine max
  Clone ID: PAT_MRT3847_129536C.1
cggtctcttgggaaaattcttccaaagaagattgtaaatatgagttctcctctcatccatgaaatcaaagggcaagcatttcggttcttgaaggagaagattaaaactgcaaggctagcgctcacagatgttacaccagtacagttaatgacagaagaagccacaaatgagaatccatggccaccagacacgcgttccacaagtataatagcacgagctgccttcgaagtggatgaatatgagagaatcatagagattttgcatcacaggttgttgaaattcgataaagggtattggagagcctcatacaaggctcttattttactggaacatctactaactcatggacctaaaagagtatccgaggagtttcaatgtgatatagatgttattgaagagattggacaatttcagttcattgatgaaaaagggttcaactggggtttgagagtttgaaaattatcagaaagaatattaaagctcttaagaaacaaggattttttcacagaagaaagagcaagagcacgtaatctttctcatgcaatcaaaggttttggaagttttaaccaacgaagctcagcaatagatg

SEQ ID NO: 32705 - DNA, 513 bp, Glycine max
  Clone ID: PAT_MRT3847_129537C.1
gtacttgctaaataaacttagtcttgtcatgcaaatggtatatcttaaaaaatgttttgaaatatgtgtatttggaactaagcttcaatgcgtgtgtgtattatctcgacataatctcgtagaaaatcaagtgagggaaatttagtttttgccaaaaaaaaaaaaaaaaaaaaaaaaaaaaaaaaaaaaaaaaaccccaaaaaaaaaaaaaaaaaaaaaaaaaaaaaaaaaaaaaaaaaaaaaagggggcggcccttaaagagagagccattcttttgtccccatgcttgcaaacgtattttttcttttttagggcctctttattaaaatcaattgcccggggggccccccctttaatagtaaaaaacccttgggggggccaaaaaaattaacctttttatatttgcccctttaaaaaaattgctgaggcgcggttgagccccccccaggggggtaatccccgtgggttccccctttttattggttgggggacccccccctttttcgcccctt

SEQ ID NO: 32706 - DNA, 259 bp, Glycine max
  Clone ID: PAT_MRT3847_129538C.1
caaggacaagaaggatcaagaggagggcgagaaacaggatagcaaggttgaagtttctgctagggatattgatataccagaaataaacaaagaaggtgaaaaagaagatccaggaaaggatggtgggaaggaaccgaaacgacagaagaaaaaagaagacaaagaccagaaggagaagaagaaaaaagttactggaaaggacaagaccaaggatcctagccctctgaagccaaagcttgcaaaaattaacggaaaaata

SEQ ID NO: 32707 - DNA, 863 bp, Glycine max
  Clone ID: PAT_MRT3847_129539C.1
ccacgcgtccggcagaagaggaggaccccatatctgtaactttgagagcggagattactgagttcagctcaggtgctgttctctctgttctttctgccccctactctactcactttccattttccaattcccaatccatataccctccaaggttttttttttttttttacttaatgtgatccgttacttttgcccttttcagtttcaatttctggggtttgtgggttacccggttttatgggttgttggcgtgtaaagttgtgatttttaggttatatttgggaatttgctatctggggttgtggtttttggaattgatggtatctgggtttctagggattgattgattggtagagatagagatagatggggttgggtggtgagaatggcaaggtggtggagtcttgggatgtgtgtaaatcaaaaggtgggaggaagaagaagaagaaaggggatgcagaagaagtggaagaaggggctgaggctgaggctgggtgttgggttaggttgaggtttattgggagctgcatttcttcaagatccaaggttgatacctcagtcagtgccagtggcatcagtactcattatgctgaaagtaaatcaactaatgatactagtagagaccaaccaacagctccagcagtctcttctacaaccactagtaatgcagaaagcaattcgtccacttccaagcttgaagaagagcttaaaattgcttccaggctgcgaaagttctctttcaatgatctcaagtcagcaacaagaaattttcggcctgagagttttcttggtgaacgtgggtttggttgtgttttcaaggcgtggatcgaagaaaatggaactgctccagtgaaacctggcac

SEQ ID NO: 32708 - DNA, 846 bp, Glycine max
  Clone ID: PAT_MRT3847_12953C.1
ggctcgagatcgctcatcaatccttatccagaatccttaattatacttctcatactcatttataaatagtgcccaaaaagcctcatctcaacctacacgcattatacgcccttcttcttcattcataccccttatcaaatctccacacatatatattatgtccaccgatctctctgtcattctccctcgcgttctcattgtctctagacgaagcgttcgcaaaaacaagttcgttgatttcgttggtgagtatcaccttgatcttatagtagggtatggcgcggtgcccgtgattgttcctcgtgtttccggggtgcacatgttgttggatagctttgagccaatccacggcgtgcttctgtgtgaaggagaagacattgatccttcttgttacgaacaagataccgcgggtctttcagaagaggaagtggaagagattagaaggcttcatgcaagtgacacggccattgacaaagagaaagactcaattgagttgagcctcgccaagctatgcctcgagaggaacattccctatttgggaatctgcaggggctcacagatccttaatgttgcatgtgggggtaccctttatcaggacataggaaaagagctttcgattaagtgccctgagggccaaagggctatgcacataaactatgatgattatgatgggcataggcacgatgtggaagtggttgaaaacacccctttgcatcattggtttaaggattctttggaagagggaaaatggatatttgtgtgaatagtagccaccatatcaaagtgaagagattggcacatcgttttgtgccaatggcctttgcacctgatggtttgattgaaggg

SEQ ID NO: 32709 - DNA, 269 bp, Glycine max
  Clone ID: PAT_MRT3847_129540C.1
cctttccttttttttttttttcagccatacatccttattttaaccattatgaatataagcttcttcatggaccacaaatggatcctataaacaacacaaacagggttgactatttcgattaacacgatcccttggaaaattattattatcactctgggttattaaatacactagcacctgaaaccacattactcaagattccaaacttgataaacaaaaaagcttagggaggctcctagattttaggcttattctatgggcccttgaat

SEQ ID NO: 32710 - DNA, 329 bp, Glycine max
  Clone ID: PAT_MRT3847_129541C.1
gaattaccggtgcgccgacgcgtacgtccagcatccgatacttctccttttgccgtgaacgggatttgtcacaaaacagggtcgggaaattgtgctgggaagcttctcaaatttcttgtgtgacctgacaccagcagctgatgtaacaattactggacctgttcggaaagaaatgcttattccaaaagattctaatgcccccattattatttttcgaaccctaacctggatttccccatttcgctcatttttataaaaaattttctttctgaaacaccaagattacaacttcaatggtttggcatagctctttttggatgttcctacaa

SEQ ID NO: 32711 - DNA, 267 bp, Glycine max
  Clone ID: PAT_MRT3847_129542C.1
tgaacaggtatcttcggagtcgagtcgatatcacagtacgagacgaccacaataatacgaaggttgatacatcgccgaagatgtgaacgggacagcttcggcgcggtagcgcgccagcaaccgacttaaagatgcaaaggctattcagacctcggtggattactatagaattactaccaaatgcaaagggcatgaatgtaattttatctgggctgatgtccgtacctataaataggtaaacagtacccccgtactgttcacgctgac

SEQ ID NO: 32712 - DNA, 263 bp, Glycine max
  Clone ID: PAT_MRT3847_129543C.1
gtgctcctcttgttgtcttgtgcctttttttcttgcggtgcggtgttcttgtctcttggccgtttggccgctctggctgcctttgctgggccttctgtttgcgtcgctgcgggcgttccgttgttcggccgcctcccgtctgtcgtcgtgtgctgttggctcttgcccggtgtcgttgtcttgggcgctcttttctgctctgggtcgatctgagttctccctcgtcctggggcttcgccgctctggcggcgtggggggctttg

SEQ ID NO: 32713 - DNA, 1480 bp, Glycine max
  Clone ID: PAT_MRT3847_129544C.1
tccagctgcgagaagccgtcagaagcggaacaattaattttcaaacacaagatctctctccatcttccccgtcctcttctacctacttctccttttgtgcaacttgccttgtacaacaacacttctatatcctttgtgttgtgttgcccactctaaaaaagtgagagagagagagagagagagagagagaggacaacatcccaccatttgtggctgccctctattttagtccctagccttaatcatgccatcaggtgctaagaagaggaaagctgccaagaaaaagaaggaaaaggaaactgaaattaacaccaaccacccttcaaccaccaaccctcaaggcaatgatgaggtgaagtctcaagatgagaaagggagtgatggtggttcaccaacacatggtgaacatgatcttgcattcaatgaagaggaggaggagagggacccttcagctgctcaaccatctcatgctgctgctgcttccaaggactttgaagaagtccctggtgatgctaataggattgatgaaacagaaggaggtaaagaaggtattgttgtgatagagtgggatatgaaatctgagggttctgagagcaaagatgtgagtgttggacatgttgagtccgccaaggaatctgataatgggaatgcgaatgggaactccagcagttcaagttcaagttcaagttcaagtgatgaaattggaaccttaaagaactcaaaggatgagtcccataattcagtaaatgagacggttgcatttgatgagttggttaaatccatggactctttgcacgccaaaatggcgtcgattactgaaaatgtgctggctgaggagactggtgatttggttgcggaatcttctgctgctccagttaaagcagaggcctctgtacctgaggtacaaagcgttgataatgatgataaagaacattcctcctttgatgagaatgttagaacaataagtttggaggaacctaagccaagggaatttgacagtgaagtatcagcatcagtgtctcagagtcctatccccgaatctattattggtgcagaacatgttaaagattctgatactccagaatgctctgataatcagccgcctttagcatcagttccacctgtggtgcgaaagacttcctggttgagttgctgtggactgtttgatgttctgtcaggctccaacagataagttcagaaatacaagcacgattgaggatatcatctgatggatcagatttgtgtaaacgtaggacttcatcgagaaaattttgtgatattttaatgtagatttcttgttaagattttccaaagaataatgggcagagacccaactacataattcatgaggtttatcaaaggtttgttgttgaagtatttgtgttagcaacagtttcagctaaatatacccgagtctttaaaactgttcgaattacaaaaaaaaaaaactgaaattattataagtctcttagttctgctt

SEQ ID NO: 32714 - DNA, 362 bp, Glycine max
  Clone ID: PAT_MRT3847_129545C.1
acttcaacaacaaacctttgataaacctcatgaattatgtagttgggtctctgcccattattctttggaaaatcttaacaagaaatctacattaaaatatcacaaaattttctcgatgaagtcctacgtttacacaaatctgatccatcagatgatatcctcaatcgtgcttgtatttctcatgccactagaaactatcaagaccaaacaaaatatctgaacttatctgttggagcctgacagaacatcaaacagtccacagcaactcaaccaggaagtctttcgcaccacaggtggaactgatgctaaaggcggctgattatcagagcattctggagtatcagaatctttaacctcgagcc

SEQ ID NO: 32715 - DNA, 215 bp, Glycine max
  Clone ID: PAT_MRT3847_129546C.1
aatctatgctgcacatgtgcacaactgattaggtgaattatacttataatattatccttctggttgtgcgtaatcgatgacgcctgtcttctctaatacagcaatgatataagcttcatcagcatactgatgcataataccgtaatagtaagaattttttttttgacatgatgctacttgatagaaacttgcactacagtacacagtttagaagt

SEQ ID NO: 32716 - DNA, 857 bp, Glycine max
  unsure (1)..(857): unsure at all n locations
  Clone ID: PAT_MRT3847_129547C.1
ggggcgaagcatggcctcatggccacccaaacctacagtgcgtttgtgtgtgcgtgcgagggcgatggcctcggccccatgtgattgctggccccggccttcttcttcttcttcttcttccattgaacatgtctggaacgacatcaaactcgcctctctctccaattcctccgttgacttagacttgaacaacaacaactcactctgtctccgtttcttctttccttaaccaacctctttccacttttctcactctcacttctacttcctcttcctcctctgtctttcacaaacatgaccactctcttctctctgtctccgaccccaacaccctgcaagatcaacgccatacgcgtgtgatcaagaatcgagaatccgcggttcggtccagagccagaaaacaggcttatagaaaaggcttggaagttgaaatttcccgtttaacggaagagaattccagactaaaaagacaattgaaagagttgcagcgctgtttgtgctcctctcacactcccagaatggccgctccgtgtagaacctcttcatctccattttgagaaggaaaggaacccgtgaatatggcatgactcttgcatgttttcaactttcaaatgtttgtgaaagaaacacaaggattataaatggattgaattttaatagggttttttttttgaggaagagttttgataaccctggttttgtagttttgactaagtttgtctagtagttgggatttgagtaattaacatggaatcttaaatttaagcttcgttaccattattgtatatattaaaaaaaaactggctgctttctgttagcaagactaataaannnnnnnnnnnnnnnnnnnnnnnnnn

SEQ ID NO: 32717 - DNA, 358 bp, Glycine max
  Clone ID: PAT_MRT3847_129548C.1
acggctgcgagaagacgacagaagggttagttgggtttgtaccaagtttattgggtttatacaatttattttacatttaattctctaaaaatgagctggaatttttaaaaagatattctcttaacaacctagcagaaaacacttgtatgtaagtgttgtaaacttccttccatcgagtgtgataaataaataaaaaacagaaaataagtcatacttactaaaatatatattaatatttttgaacaataataaaatcatgatatgtttattttgagaatattgaaacctaaatatttaaatcatttgtttaaacttaaatgatatttttgtaagaaatcacgacaatgaaaatcctatg

SEQ ID NO: 32718 - DNA, 412 bp, Glycine max
  Clone ID: PAT_MRT3847_129549C.1
ggaattcggcacgaggcctagccacatgcactcttatttcacttttctcaatgtggaacttgacaaggatagaagttctactttgcaacatattgtccccagaggcacctcaactttctctggcttcttataattggtttaaagtattcattgcaatgctggtgggcaactttttataccctatatctacaattcattctcattttactcagtctatcaattggtctggcattatataccatttgaaagatggaaaaatcaacaagatacatagaataccaagaaggcaggatgtggctccagttttcactgacttgggaggaaaacatttgtatggaaagaaagggatgcctaccaagggctcattccttagttctttgtccaaacatttgttccaatggcatcaacctaa

SEQ ID NO: 32719 - DNA, 302 bp, Glycine max
  Clone ID: PAT_MRT3847_12954C.1
taaaagaacaaataacaatcaagaaaaactcaagttatctataaccaataaatgcgacaaataaaaaggctttacaaaatataacataccacaagcgtggggaaagtaacaactccaattcaatccataaatagaataaacatcaaacgcaggggccctccccatctcataaccccattccccggacaattatttccccccgtttttcctggccttcaaaaatttccccaggatttccctctttaagaccttggaattcaaccagctaaaatctttccccgggaaaaaattttttcccccca

SEQ ID NO: 32720 - DNA, 585 bp, Glycine max
  Clone ID: PAT_MRT3847_129550C.1
atcaaccttagtattttctttttgctggttattgtaaggaatgagattttattactacagtcagaacttgacgagtggaagaatcgagcgaatttcgcaagagaaaaattccaaagcctcaagagagaatcaaattaccaggtaattaataggcgataagaattgagggctgtccaagcaattgagacactttagtacaacatttccttcttttttctttttacagttgcttgtgttgaagaatgaaaaggaatcaatagcagaggctgaaactagagctcgcaatgtgattcacagtttacataaaaagctaaaccacttgcaagttttggatttgactatttgaatttccagtacttgatagatgtgccattttttgagtatctcgctacttggttcacagtttacataaaaagctaaaccacttgcagaatgtagtgcaagaaagcattgcagagaagagaaagctagaagaagatatacaaagtttagagagtgaatgtgctgacctgaagaaacaactgcaagaagagcataaatatgctcaacgccttacaatggaatctgacaagagtcgtgaggctg

SEQ ID NO: 32721 - DNA, 353 bp, Glycine max
  Clone ID: PAT_MRT3847_129551C.1
aaaaatactgcataaatataatcaagcccataagcatgagttttaagtgcccaggaaactgaacccggggatcagactaaaggggcacgccgattcactgggatcctatgaaggaaaaaaatttgatactagcctataagggaaaccggttccgacccaatagggatattaaccttaacccaaaattgggaacccaaggcttttaattggatggcctggttaaacccacaacatgaatattagcctcaaaaaataaaattaccaaaacctatgcgggttttttcctccccaccccattggacaaagccggttttcccccccccgaaaggaaattttttttcttttgggagaaa

SEQ ID NO: 32722 - DNA, 430 bp, Glycine max
  unsure (1)..(430): unsure at all n locations
  Clone ID: PAT_MRT3847_129552C.1
gggggggaactgagaatctctttaatttatcattggaccctacaaacaatgagaaacgaaaatgggtatacttttatggcaactaaactccaaggggcatgagttgaggtcctccaagggaaaaaaacctgaaaaaaaaaaaaatactataagcccatttcaatctggccgaacaaaggtatgtttgctacccatttccgggattttggcctgctaaaaacccactggagcactggtaaccttggggggggcaacaaaaacttttgctgcaactgtggggggagcaacaacgggaacaacaaatccccgggttgttggataaaggaggcacccggttggattgaaaactgctctgagcttcaattggttgggggggctgctgctgcttcttctncaacatttgagatctaacttgggcaagcaatgggtt

SEQ ID NO: 32723 - DNA, 237 bp, Glycine max
  Clone ID: PAT_MRT3847_129553C.1
tctccagcctggtagatctggatcatcgctcgatgcatgacatctttgtatgatggtccatatgatggccactagctgattacgagcactgcttatggagagcccttgatgcgccatgcgttgctcatgcagatcttatccttatgatgagatcaactacgtagcattaaatttatccatatcctgagaaatcgtggaccaatgggtctttccaaatgttatgtggaactaagaaac

SEQ ID NO: 32724 - DNA, 398 bp, Glycine max
  Clone ID: PAT_MRT3847_129554C.1
tttcactagaaagcaacgcgttgcttaccaccatatgcaagaattgggagttgcaataatactggatacgaaaaagttgactcctaatacaacacaaatcttattataatactagtaatttgcattgaatattaacatcctatataacatgtcacgaaacatcattgtatcaactcatttctctactatctggccacaatcttcgatcactaccggttcagatgtcctgccacttcctgaacccactttctccatctcctccacaacgctgtatccatcaacaacttttccaaacacaacatgtttcccatcaagccatggtgtctttgcagtacatatgaagaactgagaaccattagtatggggtccagcatttgccatggagagaataccaggac

SEQ ID NO: 32725 - DNA, 355 bp, Glycine max
  Clone ID: PAT_MRT3847_129555C.1
ggacaggactacaggggcactaattcaagattctgtttgcagggccctgccaggttagttccgagtggcaaagcgcaacaggagtggaggggatcaatgcaggagataaccacaaaccgcggagccgtgagcaaacggacccaacctactcctgagcaaatatttaaaagaataaggaccagcttagtcgcaagctaacacacattgatcatcactatctgtgccagatgcattaaccatggcaggccctttatgcatatccggaacaggacctgtatgatgtaccaaattaacgatgaattcgtattctcctgctcccagaacattaagtttgacattacttccatgatgcaga

SEQ ID NO: 32726 - DNA, 229 bp, Glycine max
  Clone ID: PAT_MRT3847_129556C.1
ggcaaatcgcctctatcaatttcaaagacttgacttgcaagtttgacaagccttttgtaacagaagtgatcacacctggtaaatatattatattgacattttgtagaacttcactgcagtttcgatgaatcttggcactgaagttttgtgtagtatgcaatagttatcgtgtatgctatatacaattgatgattaatttatgaaactttactaaaaaaaaaaaaaaaaa

SEQ ID NO: 32727 - DNA, 370 bp, Glycine max
  Clone ID: PAT_MRT3847_129557C.1
ttggccacgcgtacggattggggtgcatcggatgatgccaatgctggaaatgacaaacaaattgttggtttccatgttgctggaagcaaagggagactgggatatgctacattgataccatatgttgagccagttgtgcaagctcaaagtgctgaagtttactttgacttctccactgcggagggtgatagtgaagagggagaagatcatattggggaataggaatatggagcatatgctgcactggctacaacatctaattacactgcaactccaaaggaatgatatctggatctacctggcgacagaattactagggagtatactacaacgagtgagagattggttggtacagaacatgagggatatg

SEQ ID NO: 32728 - DNA, 399 bp, Glycine max
  Clone ID: PAT_MRT3847_129558C.1
aaaagaactttcacaaagattttatgcctgttacatagaacacgccgggttcttccttaggaaagaatgaaatgtatacctcacgatgatatgaacctataccgttgggatgcatccgaactttcaccctgcctccaccaaaagctaaccgataaactggccgtcaaataccgcacataatgcccccattttggcggggtatatcaacagatgggccttcctctgaatgcgcgcatacaaataccaggtcttgctccttacaaaacttcttttcatgacatataatctaaatcaacctggctggagttgtgcatcatggggccagattggggggaaagttcctctaatgcagaccaaaagtctggcctaaagtctttctttccaaccaccagacctaga

SEQ ID NO: 32729 - DNA, 469 bp, Glycine max
  Clone ID: PAT_MRT3847_129559C.1
cggacgcgtgggcggacgcgtgggcggacgcgtgggcggtctcgtgttggactccggcgatggtgtcacccacaccgtgcccatctacgagggttacgccctgccccacgccatccttcgtttggacttggccggccgtgacctcactgactacctgatgaagatcctcactgagcgtggttactccttcgtgaccacggccgagcgtgagatcgtccgtgacatcaaagagaagttgtgctacgtggcactcgacttcgagcaggaaatggccactgccgcctcctcctcctcgctggagaagagctacgaactgcccgacggtcaagtgatcaccgtcggcaacgagcgctttcgttgccccgaggcgctgttccagccgtcctttatcggcatggagtcggccggcatccacgagttcacctacaactcgatcatgaaatgcgacatcgacatccgtatggacctg

SEQ ID NO: 32730 - DNA, 2017 bp, Glycine max
  Clone ID: PAT_MRT3847_12955C.1
aattcggctctacgcgttcgagagagtagagattagatagagagaagaagaagaaaaggatattcctcttcaccctttttgattctcaaacccaaacactgcatttgcaggggtttatctttatctagaaccagcatcagagtcaaatccacttcactctttgaagttcctcttcactctacagcgacttcttccttttttgagttttcaccaggagtgttcttaaagtagttagaggatcctttgatcgagatggctcaattgctatcctcttcttgctccttgactgtctgctctagaaataaaccttacttaaaaccctttgacaaatgttcaacaccgttttctatgaaggttgcttgcaataattccaaatctccatttagaaggcttttcttgcaagaacagaagcctagaaaagattctctagtagtacatgctgctgcagtttcaactagccagggaaccccagttcaaactagctctagcgacccttttaaacaacagcgagtcatggtcattggtggagatggatactgtggttgggcaactgccctccacctttctaacaagggttatgaggttgccattgttgacagccttgttcggcgcctttttgatcaccagcttggactggattctctaacaccaatttcttccatccagaatcgccttcagtgttggaaatctctcactggaaaaactattgagctctacatcggtgacatatgtgattttgagttcttatctgaaaccttcaagtcatttgagcctgatgctgttgtccactttggggaacagcggtctgctccctactctatgatagaccggtcaagagctgtgtatacccagcaaaacaatgttattgggacactgaatgtgctctttgccataaaagagttcagagagcaatgtcatctggtgaagcttgggaccatgggtgaatatgggacacccaatatagatattgaggaaggctatattaccattactcacaatggaaggacagacactttgccatatcccaagcaagctagctcattctaccatctaagcaaggtacatgattcacataacatagctttcacttgcaaagcttgggggattcgagcaactgatctgaaccaaggagttgtatatggggtcagaacagatgagactgcaatgcatgaagagctgtataacaggtttgattacgatggaatatttggaactgcattgaatcggttctgtgttcaggctgctgttggtcatccacttactgtatatggtaaaggaggccagactaggggcttccttgacataagagatacagttcaatgtgtcgagcttgccatcgcaaaccctgcaaagcctggggagttccgagtcttcaaccaattcactgagcagttttcagtgaatcaacttgccaaccttgttacaaaagcgggtgagaagctgggcattgaggtgaaaactatcaatgttcctaacccgagagtcgaggcagaagagcattactacaattgcaagaacactaaacttgttgatctgggactgagaccacactttctttcagactctctccttgattcactgctcaattttgctgttcagtacaaagatcgtgttgacacaaaacaaattatgcctagtgtgtcttggaagaaaattggggttaaaacaaaaactgttacagcctaagaagatgggggtacatggctgctggtataaccgtgtatcctgcgtgatgtattgttaggttatgctgcattgccgtgaatatttaaaatttctgtattataggactttttttcttacaatccatctttgtgaccctccttatgtagagtagatttttgtgcttcaacttttccacaagatccatgttcaaacctaggtacttgttttttttgttcagtgttgagcatttggaagtatattgtaggcacgtaatatcaatgtattttgtcaaataagcaacatgtgaatatggcaaccaatgatggtaattttatatttttaatacattttt

SEQ ID NO: 32731 - DNA, 339 bp, Glycine max
  Clone ID: PAT_MRT3847_129560C.1
tgaaaaaaaaaaaataatataaaaaaaaaataaataaataaaaagaaagagtgaaaataaaataaaaaaagaaaaaaaaaaaaaaaaaaaaaaaaaaaataaacaaaaataaaaaacaaaaaaaaaaaaaaataaaaaatggggggggccccccacttaggtacctcccacccccggaaataatttggggcgggggctttggggggggcaaactttcccttataggggggtttttgaatcctggcgaaaaccagggaaaagcggtttgcgtgttgaaaaatttttcgcttccaaaatcactaacaaaattagcccggaaattaaaatggtgaaagccgg

SEQ ID NO: 32732 - DNA, 319 bp, Glycine max
  unsure (1)..(319): unsure at all n locations
  Clone ID: PAT_MRT3847_129561C.1
ccaaaggtttgggaggccccaattttttaaaaaccaaagggggtgttttttgccctgaaanaatttttgctcaaaaggtgggacccatcttgggagcaccataaatttaagaaatttctttccaagaaaaaattttgccgggccaacccttcttaggggggttcacaagggcttcctttgccttgttaatgggaggggcttttatccctggaccactttaaaaaaccccaaggtgttggggccttttcacccccggggccccaagggttcatttgtggcccaagaaactcaccaccctcttatcttcatacacattggg

SEQ ID NO: 32733 - DNA, 347 bp, Glycine max
  Clone ID: PAT_MRT3847_129562C.1
accacgcgtacgcccacgcatccatctggataaccgtttactgtcctatatcttcagccagacacctatctgtctacagcgaacatggtctgcacacctattatgtcaccttgactacttatattgctctctgatgaatagacatattcaaccctacgattgtgtatcatcatttaggagaaatttatacagctctcatattaggcagatctctcttatgaatattctcgtacatcaaggatcatactacaccgccatctacaaattctcgctcatctggacatctaatcattaatttatactgcgagattgaactttatccacaccattgcaaaacattttgacat

SEQ ID NO: 32734 - DNA, 207 bp, Glycine max
  unsure (1)..(207): unsure at all n locations
  Clone ID: PAT_MRT3847_129563C.1
agctaacttcacgtacaaatttcatacaagnnnnnaactcataataacacttaattaataataataaatcaaccacaagttattgctatatttagtaaacagcagcttcttaatgttaacaaactttcaacagaacttccttgaatgattggaaatacctaagcatgccacttcgcttcttggcattaacttgaaaaagacatggtt

SEQ ID NO: 32735 - DNA, 334 bp, Glycine max
  Clone ID: PAT_MRT3847_129564C.1
ggtaccggtccggaaataattggttggacgagcttttttgtccgcggccgcccacccaacaacacgggggggttttatattgtactatccatttagacggatcccaaattacccaggagttgggagatgaatcacgttaaaatttgacccaaaaaagatcagcaatcattcatacaagctccaagatatagcttccaggagaaagaaagttattaacaggtaacccgaagctacggggaaaattcactcccaaacagctcagacaactcctccaaatttccatttcaatttgacatgctatatagcatacacctccacactatagtcacttgat

SEQ ID NO: 32736 - DNA, 1600 bp, Glycine max
  Clone ID: PAT_MRT3847_129565C.1
ggctcgaggagaaaaaaaaaatttcttttaataaaagaaaactcaaaattgaatcgataaatcgccatgaatcccaaaatcctcttcgtgtttgctcttcttctgaatctcgtatccaattcgttccaaaaccctaaccctaaaacccctaaatcaacgccgtcgcaggctcacgtggagctcgtcaactacggcttacccgtcggtcttctccccgccaccacggtctcgggctacgccgtgaaccgtacctccggcgagtttaccgtcaagctcagcggcgcgtgcaagatcacgctcccgccggacaactacgtcgccacctattccgacaccatcaccgggaagatcgtgaagggaaaaatcgcggaactcgagggaattagggttcgcgcgttcttcaagtggtggtccatcaccggaatccgctcctccggcgacgacatcgtcttcgaggtcggcatggtcacggcgaagtatccatcgaagaatttcgacgatagccccgcgtgcgagggccagcactcttcttcgtgaaaagggttttagctacttattcgcagccttcgtgttatgtaatgagatagcatccatccagtgtccactaagtgcagattgtgttattacaagggtaatagtacttttacttcatcatatttatgccataagacgaatctactttgatgttcatacactcgttggacccgtgaataaggccattttgtacgtttcttatttaatattctctgttgtagtagtatggccatgtaaatatcaacgttgggaaaaaagggagatatttacatggccatactactacaacagagaatattaaataagaaacgtccaaagtggccttattcaggggtaatatgaacattaaagtggattcgtcgtggcataaatacgatgatgtaaaagtaatactatccttgtaatattacattacacacaatctgcacttagtggacactggatggatgctatatcattacataacacacgaaggctgcgaataagtagctaatacccttttcacgaagaagagtgctggccctcgcacgcggggctatcgtcgaaattcttcgatggatacttcgccgtgaccataccgacctcgaagacgatatcatcgccggaggagcggattccggtgatggaccaccacttgaagaacgcgcgaaccctaatcccctcgagttcagcgattttccccttcacgatcttccctgtgatggtgtcggaataggtggcgacgtagttgtccggcgggagcgtgatcttgcacgcgccgccgagcttgacggtaaagtcaccggaggtacggttcacggcgtagcccaagacggtggtggcggggagaagaccggcgggtaagccgtggttgatgagctccacgtgagcctgcgatgacgttgatttgggggttttagggttagggttttggaacgaattggatacgagattcagaagcagagcaaacacgaagaggattttgggattcatggcgatttttcgtttcgattctaagttttttttattaaaagaaattattttcctctggtcatgtatccccttctgtcgtcttctcgcagccgta

SEQ ID NO: 32737 - DNA, 2042 bp, Glycine max
  Clone ID: PAT_MRT3847_129566C.1
tacggctgcgagaagacgacagaagggtatggctgcgagaagacgacagaaggggacagcgccgcctcatctcttctgctctctcattacgctctttcctccgatctcaggtgttgtttaagcttcctgtgttggcttggtatccttgcaagttcttctgtagcagattccaaggtgaaggtgtcacgttaaagtttctttcatgtttgaacaggctactatccatttgggagcaactgagctgcttggattgtatttttcttcttctagaaaaaattacagaccctcaccacccagacttagttgtatgaacggttggccaccttccattatccttgaaggagattgttcaaggatacaggttaccttagaggctgaaatcacagctgcgtataatttgaattccagcatttgctgcctctgaatatctctggaactttgtaagtcaacaaacatggctttacagaacattggtgctgcaaacagtgatgatgccttctacaggtataagatgcctaggatgattaccaaaattgagggcagaggtaatggcatcaaaactaatgttgtcaatatggttgacattgcaaaggcactggcaaggcctgcgtcttacacgaccaagtattttggttgtgagcttggggcccagtcaaaatttgatgagaagaccggcacttctcacgtcaatggagcacacgatactgctaagcttgctggccttcttgagaacttcattaagaaatatgtccagtgttatggttgtggaaatcctgaaactgagatcataattactaagaatcaaatgatccagctgaaatgcgcagcttgtggttttgtgtctgatgttgatatgagagacaagctgactaccttcatcattaagaaccctccagaagttaagaaaggatccaaagacaagaaggccatgaggagagctgagaaggagagactgaaggaaggtgaattagctgatgaggaacagaagaaagtgaagaaagaggttaagaagaaaggctcttcatcttctaaggatggcactaaatccacctcttcaaagaagaaagcaagtggctctgatgaagaccgcacttcacctactcacagtcaaattgatgagaaagaggaggctctagatgaggatgatgacgatgatgtgcaatggcagacagatacgtcacttgatgctgctcgtcaacgtatccaagaacaattaagtgctgtgacagctgatatggttatgctttctacagatgaaccagagaagaaaaaagaagcaagtaatggaaatgatggttctcagaatggtaactcaatgcactgcaggaccttggttggtgaagtgaaagcaaatttgaagaaaggtgttggagcaaatgaattgctgtcgcaacttgcagcacatcctgtacctgctcaagaaaagatgagtgctctggttgaagctttgttcgagggaactgagaaaggttttgctaaagaagctgataaaaagaagaactacttttctgttgctgttgcggatgagggatcccagccgttgttgcttcatgctattgaagagttttcttgcaagtctacttcaaatgctttgaaggaggttgccctggttctaaaggcactctacgatgctgatgtgttagaggaagaacacatagtgcagtggtatcaaaagggactgaagggtgataacaagaactctaggatttggaagaatgctcaacctttcattgattggcttcagaatgcagaatcagaaaccgaggaagaataatttgtcctacattctccgttacttatgtttgcttgcttgtgttatgtcctttatttccaattaagggtcttgttggccccatgtgttgttcaactactatacttgctaaaaacttggtgtgaggggtgcatggttgctggactagtatagcatgtacgcgtcagtgagttttgtgttgtgttgttctaatgtattttggtttttggttggtgatgattatgttttctgttttaataaaacgtgtcttgataatataatgctgtttttc

SEQ ID NO: 32738 - DNA, 2168 bp, Glycine max
  Clone ID: PAT_MRT3847_129567C.1
cggtccggattcccgggtcgacccacgcgtccggcacagcacagcgcagcgccgcctcaacatctcaactttcccttcgatctcattctcaggtgttgttgaagcttcctgtgttggcttggtatccctgcaagttctgctgtagcagattccaaggtgaaggtgtcacgttaaagtttctttcatgtttgaacaggctactatccatttgggagcaactgagctgcttggagagtatttttcttcctctaggaaaaattacagaccctcaccacagagacttagttgtatgaacggttggccaccttccattatccttgaaggagattgttcaaggatacagactacctttgaggttgaaattgcggctgcatataatttgaattccagcattttctgcctctgaatatctctggaactttgtaagtcaacaaacatggctttacagaacattggtgctgcaaacagtgatgatgccttctacaggtataagatgcctaagatgattaccaaaattgagggcagaggtaatggcatcaaaactaatgttgtcaatatggttgacattgcaaaggcattggcaaggcctgcgtcttacacgaccaagtattttggttgtgaacttggggcccagtcgaaatttgatgagaagaccggaacttctcacgtcaatggagcacatgatactactaagcttgctggccttcttgagaacttcattaagaaatatgtccagtgttatggttgtggaaatcctgaaactgagatcataatcactaagaaccaaatgatccagctgaaatgcgctgcttgtggttttatgtctgatgttgatatgagagacaagctgactaccttcatcattaagaaccctccagaagttaagaaaggatccaaagacaagaaggccatgaggagagctgagaaggagagacagaaggaaggtgaattagctgatgaggaacagaagaaagtgaagaaagaggttaagaagaaaggctcttcatcttctaaggatggcactgctaaatcaacctcttctaagaaaaaagcaagtggctctgatgaagaccgcacttcacctactcacagtcaaattgacgagaaagaggaggctccagatgaagatgatgacgacgacgtgcaatggctgacagatacatcacttgatgctgctcgtcaacgtatccaagaacagttaagtgctgtgacagctgatatggttatgctttctacagatgaaccagagaagaagaaaaaaacagtaagtaacggaaatggtggttctcacaatggtaactcaatgcactacgggaccctggttggtgaagtgaaagcaaatttgaagaaaggtgttggggcaaatgaattgctgtcccatcttgcagcacttcctgcacctgctcaagaaaagatgagtgcactggttgaagctctatttgatggaattgataaaggttttgctaaagaagctgataagaagaagaactactttgctgctgctgttgccgaggagggatcccagctgttattgcttcatgctattgaagaattttcttgcaagtctacttccaatgctttaaaggaggttgccctggttctaaaggcattctacgatgctgatgtgttggaggaagagcacatagtgcagtggtatcaaaagggactgaagggcgataacaagaactctaagatttggaagaatgctcaacctttcattgattggcttcagagtgcagaatcagaaaccgaggaagaataattttcccatattctccgtttcttatgtttgcttgcttttgtcatgtcctttatttccaataaaagggtcttgttggccccatgcgttgtggaactactatacttgtctgaagggtgtatgcttgctggactagtatagcatgtatgcgtcagtgagttttgtgatgtgtggttctaatgtattttggttattggttgtttatgattatgttttatattttaataaaacgtgtcttgataatattatgctgttttctattcatgatttttcaaacatgtggttgatacgaacatcctctagctgcgtagggaattactataagacagattacaatgtcttttttcttatacccctattagttttgctggattgtttgggaaggttttgattggggaggcttccgaca

SEQ ID NO: 32739 - DNA, 131 bp, Glycine max
  Clone ID: PAT_MRT3847_129568C.1
aataaccgatcgacccactcatacgactaattgtccttatccttattgatttacattattgccaaatcaatccaattctacgagttgaacacattatccaacattcctactctatattaacacactttact

SEQ ID NO: 32740 - DNA, 2203 bp, Glycine max
  Clone ID: PAT_MRT3847_129569C.1
tctgctgcgagaagacgacagaaggggacagcgcagagccgcctcaacatctgaaacagactctatccctaatccctatcttcttctctgctctctccgcacgctttggctcctctgatctcagtttctggttttgaattgtaggtgttgttggcttggtatccgtgcaagttctgctgtagccgatttgaaggtgaaggtgtcaccttaaagtttctttcatgtttgatcaggctactatccatttgggagcaactgagctgcttggagagtatttttcttcttctagaaaaaattacagaccctcatcccagagagttagctgtatgcattgcgagacatatcagaaattcattcagttttctggttgcggttggccaccttccattatacttgagggagattcttcaagggcacaagctaccttagaggctgaaattgcggctgcgtataatttgaattctggcatttgctgcatctgaatatctctgaaactttgtaagtcaacatggctttacagaacattggtgctgcaaacagtgatgatgccttctacaggtataagatgcctaggatgattaccaaaattgagggcagaggtaacggcatcaaaactaatggtggcaatatgggttgatattgccaaggcattggcaaggcctgcgtcttacacgaccaagtattttggttgtgaacttggggcccagtcaaaatttgatgagaagaccggcacttctcacgtcaatggagcacatgatactgttaagcttgctggccttcttgagaacttcattaagaaatatgttcagtgttatggttgtggaaatcctgaaactgagatcataatcactaagaaccaaatgatccagctgaaatgcgctgcttgtggttttgtgtctgatgttgatatgagagacaagctgactaccttcatcattaagaaccctccagaggttaagaaaggatccaaagacaagaaggccatgaggagagctgagaaggagagactgaaggaaggtgaaatggctgatgaggaacagaagaaagtgaagaaagaggttaagaagaaaggctcttcatcttcaaaagatggcactgctaaatccacctcttcaaagaagaaagcaagtggctctgatgaagaccgcacttcacctactcacagtcaaattgatgagaaagaggaggctccagatgaagatgatggtgatgatgacgtgcaatggctgacagatacatcacttgatgctgctcgtcaacgtatccaagaacagttaagtgctgtgacagctgatatggttatgctttctacagatgaaccagagaagaagaaaaaagcagcaagtaacggaaatggcggttctcagaatggtaactcaatgcactatgggaccctggttggggaagtgaaagctaatttgaagaaaggtattggagcgaatgaattgctgtcccatctttcagcacatcctgcacctgctcaagaaaagatgagtgctctggttgaagctctattcgagggaactgagaaaggttttgctaaagaagctgataagaagaagaactactttgctgctgctgttgccgaagagggatcccagctgttattgcttcatgctattgaagaattttcttgcaagtctacttccaatgctttgaaggaggttgccctggttctaaaggcactctatgatgctgatgtgttggaggaagagcacatagtgcagtggtatcaaaagggactgaagggcgataacaagaactctaagattttgaagaatgctcaacctttcattgattggcttcagagtgcagaatcagaaaccgaggaagaataatttttcctacattctccgttacttatgtttacttgattgtgtcatgttctttatttccaataaaggttattgtaggccccatgtgttgttgaactactatactgtgcgaatggtgcatgcttgctggaccagtatgtatgcctcagtgcgttttgtgatgtgcggttctaatgtaattttgtttttggttgttgatgattatgttatatgttgtcttgataatataatagtagtactgcttttctgttgtgtctaatcatgattgtttaatcatgtggttgatatgaacatcctctagctgcgtcgggaattactataagagtttgcaaaaaaaaaaaaaaaaatgaaaaccacgagcggccgcc

SEQ ID NO: 32741 - DNA, 313 bp, Glycine max
  Clone ID: PAT_MRT3847_12956C.1
gaaggaacgaattaagaatattggaagagttatgttgcgtcgccaactcatcggaaaaatttgaatttctggaaaaaaaaaaaagaagccattattaccaaccaccagcgccaccagggccaaagttaaaagttccggtcctgttttaaggaccccacagcaccgttaaacgttcggttttggttttgcaaagaccagaccaaaaaaccggaccaccattacaaacaccattttttccaaatgtgctcgttctcgggttcaaaccacattttttctcttcatatacactttctctctcctcctcttttttttt

SEQ ID NO: 32742 - DNA, 338 bp, Glycine max
  Clone ID: PAT_MRT3847_129570C.1
aagaaaagaggccaaattgggaccaaatgggggtttcctttgccccttgtgacaagaaaaaatcatggggagggaaacatggggggaaagaccgtatcccggggggggatcacaccatatacaaagggggagccttaaattacaggggaagggggggggggggagacacaaaaaaaaccgggggggcatgacgctcactgggggggggggagtcgattaagactgcaaaggcccctgcataaatgaatacggcaagggggggggagagcccccctgcgaatggggacgcccgttggattaaaggggggggggggacacccgccccactgattggggaa

SEQ ID NO: 32743 - DNA, 169 bp, Glycine max
  Clone ID: PAT_MRT3847_129571C.1
ccattctttcgtggacgcgtggtttgactcttgggcggactcttggtcggactcttgggcggacgcttgtcggactcttgggtggaagcgataaaacccaagcgttcgcccacgcgttcgcccacgcgtccgcccacgcgttcgcccacgctttcgcccacccttccgg

SEQ ID NO: 32744 - DNA, 562 bp, Glycine max
  unsure (1)..(562): unsure at all n locations
  Clone ID: PAT_MRT3847_129572C.1
tatctcgatcgaactgtccaaggtcctgtcactaaacgggtggttgggtgtgctgtgggcttggtgtgcatatagggccgcattggcgacactcgcggggcctaccaaccgccgagcctcaaccatcggcaccggctgcactcgcctgttggtgtgcccaaccatgattaccatttggtaatactattatggtagcaacttgcacactgtataaccgccggttggggatcccgtgtgtagcgtgcaaggtaggcttatgggctgtggttgtgataggatgcgctgtatangtagacccgatacgtattacatgcattgtaaccaaaagccgcaaagtgcgccgccccagccataggtgccatagcgtagcccttgggcccctagcagtggtagttggcgtgatgctatgctgcccagtgtaccccagtataggaatttagtccgcatagggccctgcaggggcctgtctaccgcgtgggcagttcacttgagcgatagcccctgtagctggacgctgagtgcccacgccgggccagaactgggttaaacgtgatggaatacg

SEQ ID NO: 32745 - DNA, 393 bp, Glycine max
  Clone ID: PAT_MRT3847_129573C.1
ggctcgagggggtgtatgaggtggccgtggctaccgattgatctggaaatgctcaatctataacgatgattaaccttaatagagatgctcttagagaatctattttatgaatcatggctgacactcatggtacagaacacgaacatagtggtgactcatcagctctgcaaagagcgctggaaacggtgactccctgaaggacgagccgaatagtgcgttggttgcggtgcctaatattgttcgtctcatgatgaacatctgcctgactggagatgcccaacacgttgaatatgctgctacagaatagacaggactacatggatgctgaggcctagcagatgcttaccatatcgctggattggtgattggagctgcctctcattatggtgcttt

SEQ ID NO: 32746 - DNA, 240 bp, Glycine max
  unsure (1)..(240): unsure at all n locations
  Clone ID: PAT_MRT3847_129574C.1
tgtgagtaaacttatcatatatatgttgatgtgaatggtacaaatattttgacacaaattttagtctagtctctgacgtaaacatggagacaacaatatccaaaaaaaaaaaaggaggtgaacatgtggcagtatgaaacctttttattcacggggggtaaganaagaaagagagcagagcaagatccaaactaggaatttggatttgactaagagcgcttcatacagccaatcccctta

SEQ ID NO: 32747 - DNA, 318 bp, Glycine max
  unsure (1)..(318): unsure at all n locations
  Clone ID: PAT_MRT3847_129575C.1
gctgcgagaagacgacagaaggggttcttagtacatgatagattatactgtaaagttaaccagaaaacttattcttataagctaaaaagagcttattttttaaatttcaccaaacttgttaaaataagtttaaaaataactaataagagtcttcataaacagagataagctccctataaattcttccaaaaacctctgagaaatgtacatgcttgggcttttggatccagtcaaattcatgacttaaaaaacgaacttaccctgcattccttcatttacagaacagtcagaacttcgacactatcccccgatccccna

SEQ ID NO: 32748 - DNA, 800 bp, Glycine max
  Clone ID: PAT_MRT3847_129576C.1
ttaaaaatatttaatagtattcaaacaggccatctcctgttgcgcgtttcttttctcttttgtcattacgaaacatgcttggatatttcaattgtcaatgcagatcatggtttttgtttgagtttaattagcattcaactgcattgaatcatttttatttttaattttttagtctgattgcttggttcaaattatattgggctactgctactgacaaaagttggcataaaaacgaagatatttgctgtcaggctattaggtcacctgcacagtcagagtcttctgatatgccgccagtgatccaatggccagtgcaaaggtgtgcctagtgtcggttactcttataatactattcttaagtgatctgaattctttttggaggtttggtgtctttcacttttccaggtagttggattagataacattgtgctttcagtactttgatgatgcctggagagatattttggatgaattggaattcggtggctaatgtggtagattgtcttacattgttttttaactgatttgtaattttaagtgaaatgcaccgtgatttgttctatgcaactcatttggggtataggccatattaggtataatattttttgttgttgagaactgatgattcccttatgattggtgcagaaacgtcatgactaaatttgcttttatgattttgttcttaatattgtatttattatttctccctggaggcttggtatgttccattgatgagcaaaagtgtaccaagtgaatttttcagactgcccaagggatttagtttgccaagatattttgct

SEQ ID NO: 32749 - DNA, 137 bp, Glycine max
  Clone ID: PAT_MRT3847_129577C.1
gtcggtctggaaccattcaattgtgggatcttacgagcggattgggtgaaagacgctttcagcacccaaaaggagtggacacaaaaatgcagtgggtgccatgtgggaaatagatacgggagtggaagatgcacaca

SEQ ID NO: 32750 - DNA, 188 bp, Glycine max
  Clone ID: PAT_MRT3847_129578C.1
gggttttcctttttttgttcttaaaggagcgtagttgcgctcgttaaatataaaaattggtgaggtgatacaagaggaaaagattgttccagcaaacaaataatagttcataacaacatcgcttgacactttgaattcatgctttacgtatcttaccatacaaggggtgtgcaggatactataataaa

SEQ ID NO: 32751 - DNA, 984 bp, Glycine max
  Clone ID: PAT_MRT3847_129579C.1
cgttgaatagaacaaaatcatgttctaagtttctttagttctggtctccaactttggattgtttgttccaacgacgatgctgtccctttaacacatttgaattctacgcaatttttttaaaaaaaatgcgaaggctgctcgggaagatttctgggttcttgagcaatcgaactatggtgggagtggacaaaacagggaacaaatacttcaccagaaatgaagaggttgatggtatcgtgaaagagaaaagatgggtgatatttaaaggagaggaggatcctacctctatcccagttgaatggatatgttggctgaatgggcagcgtaaaaaggctccaactccagaggaaatgatggaattggaagcaagacgtgaacgtgttagacagaatgttgctcttctcaagaaagaagaagaagaaagaataaccaaagaaggaagcaaaggcaaacgtgtcagcactggaaaagtcagtggtccagacttgaaaagttttattcagcaattcccagtttcttcagaaggttagtgcgttgaagaaccacctagcgcatcgggtgggctaaggagtcctcaaaaaagatgagtctgagtcttcagagccaactggatctggtgcatcttttagaccaggaacttggcaacctccaacttgagctttcattacaaccaagggccttgctgagcttgtattacccatgcgctgttttgaaaaatccatgcgtgatatatatttctccctcaagaattttgatataattcatgtgttatcaagtttctagaaatcttaattcattgataaacctttttgcttaaagaatatggccaataagacaacctgctttatgcatttgcaatgagtttgcttgctgtagtgagtaaaggggatgtttggtttggttgttttctattttcattttcactgaaaatagaaaatggaggcccacatgtgtcagttttgttaacctttcagctcattaaga

SEQ ID NO: 32752 - DNA, 248 bp, Glycine max
  Clone ID: PAT_MRT3847_12957C.1
gcaaaacgcaagatacattacatgcgtttcgtttacaggagagcattccctttatctggggctcttcaccaagcccatattttaaaactctgaaacgttatttaggtttgtgacgcttacttactggggacgacactggtgccttaggcccccgcgttagttgtggtcacgtacagtaaggggatcggtgcggggctgcacgggcccgctctcatatgcaatggcctggaccttgtttctaaacatca

SEQ ID NO: 32753 - DNA, 271 bp, Glycine max
  unsure (1)..(271): unsure at all n locations
  Clone ID: PAT_MRT3847_129580C.1
ttgtattagcaatagttatttattgggcttcggactgttgttattgacagtgacactcatgttcatgtctttgaagtgaacatgtctttcgtgtagtttaggtgacattcagctgtgtctatggacaacaatagtaatgtctatgcacacatttcattttgtcacataacctctttttattattattgaaacttanctcgagtgtcaaccaatgataagggagcaaaacgngtgcatgtgcacatgtgaattattctccccaaaacaataa

SEQ ID NO: 32754 - DNA, 500 bp, Glycine max
  Clone ID: PAT_MRT3847_129581C.1
tatttttttttttttttttttgttatggttggggtgttttttgacacatttttttcttatatgaaagggtcgccaccaaaaaacaaacttgaaggttgtctgggaagtgcatatacaggtgagagcacaccttccctcctttgagactggcctccacgggaggaacccaaaccaagatccccatagtttatggattgcccaaggattatagttacaaccgcggatactccttttataccacaaaaaactcctgaaagtccataaaagacgaaggggtggtttaggcccccattgaaaaggggccttccctttattacactcaccccaaaacacgttgttttatagggtggagcataaatcccctgctctttggaaaaagaagcccaggagagaggccagacgggctaagcgggcccattggggcggcactgaaaggggatggcctatacaagccttgtcccatttaaaaggtcttcaatgggacccccaatgggtggggc

SEQ ID NO: 32755 - DNA, 324 bp, Glycine max
  Clone ID: PAT_MRT3847_129582C.1
ccaatatcttgtacacgccccctttggtggttgccctgcgcaagttgtcttatggttaagaacacaaggaatacgtgtcgctgataactaaataatggtggatgtgcttcaatcatgggctgaagaactaagcggcctgtgcaactacatgatgtagaaaatcgtctgttgaacataagctgatgtttaatgaccatcgtcgtgtaagtgtgcatatgtaccatatgtggagggacatagtgaaacccctagggtgctagatatattgtaggaaggagaaagattggggaagaatgttataatgggaccttctagctgcaacga

SEQ ID NO: 32756 - DNA, 424 bp, Glycine max
  Clone ID: PAT_MRT3847_129583C.1
aatagaagatttagtattattggaaataaaaggacctccactcatgtaacactcaaatggaagattcctttcgctgtcttaatttggaagagatacgagagatatttcacctgcccatttatccggaataaatcaattaatttattaattattaattaaaacaatgacaagccaagcatgaaagggagttcatcgttgttaaggatattctacgcctccatgtgctatcctttattcccatctcttttagataatattttgtgcttaaccatacaggagtaataaagtgagaaggttaaggcagggtacatgtgggattagtctttcatcgagagaggtcttcctttttgtcaagaatcattaaagaaaatgtgagacttacataaaataataattttaataaaccttaaccaataaaaagatc

SEQ ID NO: 32757 - DNA, 290 bp, Glycine max
  unsure (1)..(290): unsure at all n locations
  Clone ID: PAT_MRT3847_129584C.1
aataccgcccgtcctgatatactaaagatcatatctctattacatatatactattacctcctattcattctttacatcactaacttcaactccttccgcggcggactctctttcattagccataccttcatcattatccacttcatactcaccttcttctccttcatcattttacacnaactccatattcttcctcttcttttcatccctatctttactcctattttatatttttctatggaaccaataaattcatccactctcatgttttaaatctctcattccataaa

SEQ ID NO: 32758 - DNA, 394 bp, Glycine max
  Clone ID: PAT_MRT3847_129585C.1
cccagaaatagtattaaatattataagcagagattcataattaaaattagccgaactttatacagaagcgaccaattcccaaactttaaaaaaaaaaaaaaaaaggatttttcctggagcttaacacacccataaaaggtccaaaacacttgaacttgttgaagggcaggacatgaccactttattctaaggaggttggtttaacacaaaacaccagagggcccgaaaaccatcacagacataatacataggtttttagctacacattaatagttaatcattattccaaataaagggctatttttgtttgaagcttgctttccaaacacctaatttgcaagtgcaggggttgcaggagcattttggtccaaattggcagccatggttttaaggg

SEQ ID NO: 32759 - DNA, 308 bp, Glycine max
  Clone ID: PAT_MRT3847_129586C.1
ggcaccaccactgacctgggacagtgaatcgacaatgccgtcttctgtctcgtggggcatcctcctgctggcaggcctgtgctgcctggtccctgtctccctggctgaggatccccagggagatgctgcccagaagacagatacatcccaccatgatcaggatcacccaaccttcaacaagatcacccccaacctggctgagttcgccttcagcctataccgccagctggcacaccagtccaacagcaccaatatcttcttctccccagtgagcatcgctacagcctttgcaatgctctccctgggga

SEQ ID NO: 32760 - DNA, 979 bp, Glycine max
  unsure (1)..(979): unsure at all n locations
  Clone ID: PAT_MRT3847_129587C.1
cagattttcttactatgtctactatcaagtattagagattgggaataggttgagctatttgtccaaagtttgacgtactgacgttccgagagaaattgggctttaggtggccgctttttttttttttatgtccagaaagtatcatttttatattattatttaatttaaattttataataattatcttaaaataacataaaaaatgatttattgatcgatagtataaaaactactattagaattgcattatccatttttataaaataaatttttgcataatccatacttatgaaactttattatttaatccctaaaaaagcagttgattgcatgggttgttcaacttgtcaactgttgaattaggaacactaggttattgtaagatgacctgttctccatcaatgcgcttctacagatgtcactcatctctttcacctttttttggatctcatcagcacccttcatcagcgacctcacgccattcagcacttcttctgcccgcaccagatccccacccaccctataatctaccctaatctccaccgctaatcccaattccctaaccatttgaaacgcgttcatttgttgctcagcgtacaccggccacgtggcaatcggtacaccatgccacaagctctctaatatcgagttccaaccacaatgcgacacgaaaccccctacggccttgtgggccaacaccaccgcttgtgggacccacccacacaccaaacccatctcagccgttcgttcaagaaatccatctggtagcacgtccttggggtttgtgtaatctctcgggtcttccaattgggccttcggaggctcccgcaaagcccataagaatctaacattagccatttcaagcccagttgcaatctcctccacctgnnntnnntttaagcttcccatgctcccgaagcagannaaaaccactgangacacnnnctnnngatcaagccactccataattcgcttnnat

SEQ ID NO: 32761 - DNA, 501 bp, Glycine max
  Clone ID: PAT_MRT3847_129588C.1
gaccacttatattagtcttgatgaattaattaattgtttcttatatatataggaccaaaggtagtattatgtggatgcttttaatgttatgtttgaattacttaggagtaaattttcaatttacttgctgtaaattttctaattaatatatttttttattgatttattaactttatacataagtaaagtgcggattgtggatgcaggcatgagtatatagatactcaataggtacatgcatggagattaaagttgctacttgcacatgtgtggagcaagatgcatgcatttttttaaaatgtgaatatgggaacagatactataagaccctaccattaccatccctagccctactccatgcatttctcaccataattttataatcatcatgagtacaccagacaacttcaaatctaaaaggcctatccccaatagcttaagggaattcctcacatccataattttaaaacctagactgaatcagtcgatttgacctggacc

SEQ ID NO: 32762 - DNA, 535 bp, Glycine max
  Clone ID: PAT_MRT3847_129589C.1
gaatatgaagttgtttgttttctttgttgctgcagtagttttggtagcatggccatgccatggcgcaagctaccaaaggttccctctccgaatgaaaactggctatggtgagcgttcttcggaagtaaaatacacaagttttaagcttgctataaaagcacacaacatcctatcctttaaaaccattcctaaaaactacgttgaaccaacaaacaactacattaataaccaacaatttatatcagactctaaaacacttaaccaacaatctttcttttatactactaaactctaagtccatcacaacaacatatttatattctacatatataacaccatactctctaatatcccatactatcaaaaacatctatatcagataaaataatgtaataaaaccttatatgatcaataagttaacataaacgactcaccagcatatgcatacactcttacaaattactacaatctattttctctgaacttcaatattatattcttatcaacaatatatcttgacgcaatatccgtcaca

SEQ ID NO: 32763 - DNA, 169 bp, Glycine max
  Clone ID: PAT_MRT3847_12958C.1
gcaatttcagtattagttttgacccaatctctttccattccggacacaagtcatcttacttcaagctgaatccttagatactggcaagactcatacctgtgctaccctgaacttgactggatctggaccggaacctgcatctctcaaagcatgcatctttgtgagcagc

SEQ ID NO: 32764 - DNA, 719 bp, Glycine max
  Clone ID: PAT_MRT3847_129590C.1
gggcaatgtattccttggcacaaagcaaagtgaacaacaggatgtggggttctatgaaaggtggtggaaataatgatgataatgatgatggactaagaactttgaacattagccaatgcacagcactcaccccttctgctgtgcaagctgtgtgtgactcatgcccttccctccacacctgttctggaagacactcactcatcatgagtggttgtctgaatctgacttctgtgcattgtgcttgtgctggccaagcacaccgtgctttcactctcccacatgcagctcattgagctaaggggttggcaaggttttaaatatcagtcgtggtcgcgttgtgatttcgtggtcgcgttgtgatttcgtcacaatcgtggacaagtgcggccaatatggttccaattgcagttgcatggcagtcgcatacaggtaaaaaatcttgatgttgcagacggatatttaaaaccttgggggttggtgatgcataaagacactttgaggaagttcccttgaagggtttgatagttttaggtgtcttgttgataagtttaagttgaatgctgcatcatgtcatgttgattctagaacagcttgagcttggtgcttgagttttcttttggtctctgactttcatgtgaagggtcagaatattttggatgtaaaaatggctctgaatttattttgtgacatggacttttatataatgggatgtttatgcc

SEQ ID NO: 32765 - DNA, 375 bp, Glycine max
  Clone ID: PAT_MRT3847_129591C.1
ttgggctgatttatgtgcttgcatatgtgccagaagattcttgaagatgctctaaagcgaggacaaggtccccctcctagggtgccggctccgcaggaataatgcctcaatacctgtccctctatacatccatctcccctgcactactcacctcaaactagcctccgccgctagagatccacaaatctacagccctaagcgccttcggcgtctacaccggccctaacagaaagatcgcacaacgcaaggcactatcaaccgcaaactaattaaccttcgcgatacttaacgctataactacaccggatcgataggtcacataaacgaaaagcgtcccgggctactcagtaccaatccacatctgacaatcgctac

SEQ ID NO: 32766 - DNA, 636 bp, Glycine max
  Clone ID: PAT_MRT3847_129592C.1
ggctttcgtcgattctgaggtaaaagaaagtaaagagaaagagagagagagagagagagagagagtcataatcataagtcatacctgatttccattctctctgagagacagtgcgagattggcataatggcgaaaaaagccgttttgatcggaataaactacccgggaacaaaggcggagctgaaaggatgcataaacgacgtgtggaggatgcaccgctgcctcatcgatcgatacggtttctccgaagacgacatcaccgttttgatcgacacggacgaatcctacacggagcccacggggaaaaacattcggtcagcgctgaccagactcatacgatcggcgaggccgggggacgtgctgttcgtgcattacagcggacatggcacgcgcctccccgcggaaaccggagaggatgatgacactggctttgatgaatgcattgttccttctgatatgaacctcatcactgatgatgacttcagagaatttgtagatggggtccctagagaatgtaagctcacaatagtatcagattcttgccatagtggtggcctaattgatggagctaaggagcagataggaactagcacaaagggagaagggcaacaacattctggttctggttctggcttt

SEQ ID NO: 32767 - DNA, 654 bp, Glycine max
  unsure (1)..(654): unsure at all n locations
  Clone ID: PAT_MRT3847_129593C.1
gctatnnnnatctctgcgcagaacactgtgttttttttgtgcttttttctcgtgctttttccccattgggttttacactaccccccactctcttttataccaaaaacacctttttttatatcttctatatattcacactcattttctaaaatgtgaaaaaatataatacacagcacatctaaccccccttaaaattctgtgctaaaagagagtgatatatctctaagagaacacctgtgagcgccagacactccaagagttataatatgtataccccttgacacactttctttttttgctcttttctctctcactctcaacagagtatttcacaatgtgacccagagatttcgctataacacgccccaaagggcactttagaacatttcacactttctcagggtgctcgtgatgtgttatacacacagtgctctgaagaccccgcgcatatgaaaaagacacgtgccgtggtgtgacactgtgtcnngtggcatatatatatagtggtgctcactcttcagagtgcanaccacacaaacacgtgattccnnacacagcgagaagatctctttttatncacgtgtatagagtatatntgacagtgttttgtggnnnactctttcnnntgtgctcaccnnnaggtgnncccgcgct

SEQ ID NO: 32768 - DNA, 731 bp, Glycine max
  unsure (1)..(731): unsure at all n locations
  Clone ID: PAT_MRT3847_129594C.1
gtctctataaaacccaaaactcaaccccacccagaaacagaaccctcttcttctacctctcgcgtccgctccagattcttccccttccatggatgctttgaacttcctcaaattctggagaaacgccaccatgagcacaacctccgaaccccaccttgttgttgaaaccgacaccgaatccgacgaagacgactcattcttcgacttggagctcacgccactcgatttcgacaacaaagaaaacaacaccaacaccaccacaaccaaaaacgacgacgacccaaaacaaacgacaacaagcgaactcaaaagtcttggctccaaagacaacttactcagcaaaacagacaatggcgttcagcgtaaaacaccacttcccctgtctcctccttccgaacctatctccaaacgtaaggtcctcccaatcgaacctatctccaaacctcagtcccccattgcgcttctcaggtccgccccgagcttcagaatcttcatgttccgaaagcgaaacagaacacctccacaacagaaaacagagcactctgttaacgaagcaaaagtctttgcggtgaagctcagcgtcgacgatttttcgttcctctcccgcgctcagcagggacaacagcacgagaagctttgggagcagggttcggnggtttgagctacgaggaagaaccgagccggnaagcggttntcgaagggaggtgtgnncgggagtacctgaagctgat

SEQ ID NO: 32769 - DNA, 1336 bp, Glycine max
  Clone ID: PAT_MRT3847_129595C.1
cccacgcgtccctcgagccgttcaagtgtagaactagaaggtaaagaagcaattgacgtgagcggccatccatggtttcgcttcatccacatacactaacactagcgtgccctttgtccgtttcctcttcatcctcccgttttctcagatgctccgtaaattctgccccgaagcgaagaagaagcagcttcattactgcttcgtggcaagagctcgcgggagttttactattctccgcgattcctttcactgccgtgaaagctatagctaatagtccgctaggggagtcgcttcagaggaaaatggaggagagaaagacatttgctgtagaaaactcgtctacattcaaggccttagccggcaaggcccgaaaggagagcttttggtatggagaagatcggcctcgttggcttggtcctatttcatatgaatacccatcatatcttactggggaactgcccggggattacggctttgacattgctgggcttggccaggatcctgtggcactgcagaaatacttcaactttgagatattgcatgctcggtgggctatgcttgcatccgtcggtgctctgattcctgaaatattagacctattgggagcctttcactttgtagaaccagtgtggtggcgtgttggatattcaaagctcaagggagatactctagattaccttggtatccaaggtcttcactttgctggaagtcagggagtggtcgtgattgctatttgccaagcactccttatggttggacctgaatatgctagatattgtgggatcgaggcattggagcctcttggaatatatctgcctggtgatataaattatcctggaggagctttgtttgatcccttgaatctgtccaacgatcctgaagcttttgaagagctgaaggtaaaagaaataaaaaatggacgcttggcaatggttgcctggttaggcttttacgtgcaggcagcactgacgggcaaaggtcctgtacagaatcttattgatcacatctctgatcctttccacaacaacttgctgggctccctcaacttcattaaagtggtcatgtaatatcagaaaggaatctacatccattcggttgctcttttctacgttttgctgagggaattctggtaagaacggtatagccatcagccatgtacccttcgcattctattgtcaaatctctataaaagaaactattcttaagaattactactaattatgtcattctattcctaaaaacaccacaattacgtcactcaatcctaattctagaccaatttcaataaaaaaaaaaaaaaaaaaaaaaaaaaaaaaaaaaaaaaaaaaaaaaaaaa

SEQ ID NO: 32770 - DNA, 664 bp, Glycine max
  Clone ID: PAT_MRT3847_129596C.1
cggacgcgtgggcggacgcgtgggctgccccgaagcgaagaagaagcagcttcattactgcttcgtggcaagaggtccgtgctatcccattccatttcgtagtttctactatttcccattgtttcatttcattcgatgattatgctccgattgaagcagctcgcgggagttttactattctccgcgattcctttcactgccgtgaaagctatagctaatagtccgctaggggagtcgcttcagaggaaaatggaggagagaaagacatttgctgtagaaaactcgtctacattcaaggccttagccggcaaggcccgaaaggagagcttttggtatggagaagatcggcctcgttggcttggtcctatttcatatgaatacccatcatatcttactggggaactgcccggggattacggctttgacattgctgggcttggccaggatcctgtggcactgcagaaatacttcaactttgagatattgcatgctcggtgggctatgcttgcatccgtcggtgctctgattcctgaaatattagacctattgggagcctttcactttgtagaaccagtgtggtggcgtgttggatattcaaagctcaagggagatactctagattaccttggtatccaaggtcttcactttgctggaagtcagggag

SEQ ID NO: 32771 - DNA, 397 bp, Glycine max
  Clone ID: PAT_MRT3847_129597C.1
ggctcgagggagaacgtttcaggggaagttgaattcaaccatgtggactttgtgtacccatcaaggccagacagtgttattctgaatgatttctgcctaaagattccagcagggaaaacagtggctttggttggagggagtggctctggaaaatccactgtgatatcacttttgcagaggttttatgacccaattgagggagagatatttcttgatggtgtggccattcacaagttgcaactcaagtggttgaggtctcaaatgggtttggtcagccaagagcctgcactgtttgcaactagcattaaagagaatatactttttggaagagaagatgccactcaagaagaggttgtggaggcagcaaaagcttccaatgctcataatttcatttcac

SEQ ID NO: 32772 - DNA, 295 bp, Glycine max
  Clone ID: PAT_MRT3847_129598C.1
gacttttggaaggagctgtaaattctatgtctactttaccaagcactagtgtgagcggttttccataagttgcaacatggtgtgcccactcctaagcatatatgcttaactcaatattgcacatggcagaagcccatgcagaaacatcggccgatgtagtttactggaagatgaagctcccaccacatgaatgcctaaagccattccgggtatgctctgacccatattaggcaggcgacaaaaccagctctgtggccgtaggaaaggggagcgtcaccgttcacgcagggagaac

SEQ ID NO: 32773 - DNA, 1483 bp, Glycine max
  Clone ID: PAT_MRT3847_129599C.1
agcagggacaccacgagccgcagaccggcgcgtcccggccaagtcggtgctcggaaatcggctcaagacggggcttgggcgcgtggcgctacagccagaactggtgccgctgggcgtggtgctaaggctggcgctaccggtagggttaactccgggacgcgagcgtcgacgactaccgggaagaagggtggtgctgcttcttctggaaaggctagcaagacagatactgctgctgcagctgtaactaatggtgatgctgaagatggtaagtcaaagaagcttcaatatgaaggtcctgatcctgaattggctgcaatgcttgaaagggacgtgttagaaacctctcctggagtcagatgggatgatgttgcagggcttactgaagcaaaaaggcttctagaagaagctgttgttcttcccttgtggatgcctgaatatttccagggaatcaggagaccgtggaaaggtgtcctcatgtttggacctccaggaactgggaagacacttcttgctaaagcagttgctactgaatgtgggaccactttctttaatgtatcttctgctactttagcttctaaatggcgtggggagagtgagcgcatggtgaggtgtttgtttgatcttgcaagagcatatgcaccaagcacaatattcattgatgaaattgattctctatgcaattctaggggggcttctggtgagcatgaatcgtccagaagggtgaagtctgaacttctagttcaggttgatggtgtaagcaatagtgccacaaatgaggatggtagccgtaaaatagtaatggttttggccgctactaacttcccttgggatatagatgaggcactaaggagaaggctggaaaagcgtatatatatccctcttccaaattttgagagtcgtaaagaactgatccgcatcaatttgaagactgttgaggtggcacctgatgtcaatatagacgaagtggctcgccggacagagggatatagtggagatgatttgacaaatgtctgtcgcgatgcttccttgaatggtatgaggcgcaagatagcaggaaagactcgtgatgaaatcaagaacatgtccaaggatgatatttcaaaggatcctgttgccaagtgtgattttgaagaagctttgagaaaggtccaacgaagtgtttctcaggctgacattgaacgccatgagaagtggtttaccgaatttggatcagcataaagactgggacacatcaacaacggtagttctgtttttgtgtttgtgctactactttatttcttttctccaatgggtgggtggtttgtatctgttgtttgttgatatttcattcgtttgctgatgcgattcattgtagttttatgatgttggagggatcttcaattgttaatttgtatctgcaaccattgaatattgatgtaatttagtctgacatgatttcaaagctgttatcatctcttaatatactttgtcatatttgtagcca

SEQ ID NO: 32774 - DNA, 710 bp, Glycine max
  Clone ID: PAT_MRT3847_12959C.1
ttttgctttttttaccactcctctattatagttacacatttcagataaacaatattaataagaatcagttacagaaactttaacgctaatatgccacaactataaatacaacatgaatactacaacagttagaatgatcttcagaaaaggatttgtgatggcattagatttctagcaggaaatctagtcactagtcagctatgatgtaaaagtcatcggcttcactatctgaacgtatacctgattatacaaatcgatccaatggacacctcctataattaccatgaaaagtcgtgttcttgtatctgttccgatcacaagcacaacttctgcatctcacatgtgtgaaactgaatatcttctttctcagcatacaagcacaggtttggtggcattctatcactacaatttgcgaacagttagttcccaaattttgtgccaccagaaacaaacgacaacgcagaaagcaagatagtttttgactcattcatataaattcattttgaacttcagccacaatgaaagcaaggcaagtggagacagactttggagctcacatacctaacctagattgcaatgggcagacaacttccatgtacagtataggaaggagaaatgttgtcaagatgtgaggtaaacaaaacttgacagcctctaaggaaactaccatatcagagaggagaacttctaagtatttctcgaactgttgc

SEQ ID NO: 32775 - DNA, 389 bp, Glycine max
  Clone ID: PAT_MRT3847_1295C.1
actttctctgcctcgagaaggagaaacttgaaacattttgaacctctccttccttccttctccatgtttcacccaatggagcaaagcgccaaacgctcccagtactctctgctccacttctcgtttcttcaactgcaccacctcaaaagatccatgctttctctactcttctccctacccacatcatttttcgctctctttcttctcctccttttatcttacaacgctttcaccgtcttctctgtccatgtccctaaatccccaaccaccaccaccctctccaactccaagttctcttcttccctcaattcacctctcttcaagaacccccacttgccccttcttcaaaactccactgaaagcttttcctttcaactattcagaggcct

SEQ ID NO: 32776 - DNA, 116 bp, Glycine max
  Clone ID: PAT_MRT3847_129600C.1
ctcgagccggtcaaaatgacgtcgactgaaccgcaagatatcgaaaaacttcaagagcagatccacaaaggcacagaactgactaaaacgtatcttgctctactcaaagaaaagtt

SEQ ID NO: 32777 - DNA, 239 bp, Glycine max
  unsure (1)..(239): unsure at all n locations
  Clone ID: PAT_MRT3847_129601C.1
nggatatgaagncctacgctgcgggggcgcggggatcgcctcctgcggcagttttccccattgcactagccacgggttcacggcggcctttattgcggctgttgaagactaggatgtgggggcccttcccggtagcgtggttcgcgatctgtgtggtaggactgctgcgcagaacatgggggggggcttggtccgcagggtgcgccgcctcaccacgtgcacaaaattaatcctatgat

SEQ ID NO: 32778 - DNA, 956 bp, Glycine max
  Clone ID: PAT_MRT3847_129602C.1
gttttgtgtatattttacaaacatagaatcaacataatgtttcgtacatctttaaggacgaaaaacaggaagggatagggtcggatccaagcgcgtaaacaggggtcttggccccctcccttgagaccctttatatatatgagcagaaaagaaaaagaaaaaaaaaacattaatggtggaaaataaataagaaaaatgaggtgttgagttgatatttgtttaattttcttttggtagtggatcttatctctagttttacacaaattttaatcataataaacatctttttgaaactcattatttattaaaaattaaatatttaaataattatgaaaaaaaatctcacctttgatacatttcttcttccatccttcggagggaggagacagaggtctggaaacttttttggatgtgtattagccaacatggatgcataaaaagtatgcttcaattcttctcaacagaacatagatgaagtggtggaaatgatatatcagaagtcagttatggatcaaaactatgatggaaaaatatctctgtccttctatgattggtgtttacgttaattcttgaatacacacaaggatttaatgagtaagggtacccgttgtactccaccatctaatacattttaccctataaaaaaaaaggatataactaagagcaagatactcttatattattccaatgtgttattatatctttttctatgctccttgttgcaggtgtggtgcagctagctgaggagagttattcttcacatgctttgtttccaatctcaccaagtctggcgacttccaaaccttaagcggaacgaatagttattcataatattagaacgggatacacgggaatgatatatatctgcaaatttacgcaactatggatattatagtatcctgctttgtcttgcacatatcatatatataattgttactatgtataattttttaagt

SEQ ID NO: 32779 - DNA, 367 bp, Glycine max
  Clone ID: PAT_MRT3847_129603C.1
atatttttttttttgtttaatttttcattttggtgtttttttaaaccttttccgttatcaaacctaagagggaatgatgcatgaaatgaaaactttgttcaaggtttattacaacagaacaaaataaacgtacacacccgccgtaccataatgtaacaaaagtacggttgataccgccagaccaggaaaaaaaaaaaatcacgggggggccaaaactcaatgaaatcaaacgccgcggaatttaagagcctgccaaagaaaaaagacaagccaagatattcttattgatcactccactgggcgggggggggaatcaaaagcctaataaatatagggactcaaaattgtcaacccaccgctgagaccc

SEQ ID NO: 32780 - DNA, 480 bp, Glycine max
  unsure (1)..(480): unsure at all n locations
  Clone ID: PAT_MRT3847_129604C.1
tttttttttttttttttttttttttttttttttttttttttttttttttttttttttttaaggccaaaatcaaaaaaatttttaaacccaaggcttccctaattttggaggttaaaacaaccaaaattcaggcattatttggagggaaaaaagacccaaaacaaaaagagggggggttttaccccttttggccccgcctaacccccaaaaatataaaaaaaaatttggttttgggtggaattgggggggagcccaaaaaaaaaaaaccttttagggcaattttttggtttccttttaaaacccggggggggggggaaggtttctttttttaacgggccctttcaaattcctaaggggggggggggttggatcatccaaaaatttaattttaacggggggcattgggctttgggacccnagccaacccaaaattttgacaaaaggggggggtttccccgggaactccttcctgtggcaaaa

SEQ ID NO: 32781 - DNA, 388 bp, Glycine max
  Clone ID: PAT_MRT3847_129605C.1
gcacgtcgaggggttgacactggccactccaactgagacatatgggctagatatctactacaggacctcctggctcactctcgattagaaagcttactccataagcgcttggcatcaatacccatcgcgctattgacagaacgacctgattgatcatcctgatggtatggctcacagagagaaccactagaaaggcagggggtccctcttactagactatctctggcgccaggatcattacgcatattcgggcggcgccgacatagacgacctcggctagctccgctatgccaatggctgcggagacaatgccttatccatactgttctcactccgggcgacgccgacatgcagggcttgctgcatagagcagagagcgctacttacg

SEQ ID NO: 32782 - DNA, 319 bp, Glycine max
  Clone ID: PAT_MRT3847_129606C.1
tttaataaaggtaacaacacttgatggtcgtttttaacgtccttaatgaaacctttttgatagcattacaagtaaattcccggaggggtgtattactgacgcaacaagtttgacctgcattaagaatgattgatattcaacaacctcggagaatcccctagtaccacacacgttggacatgctaaaacaaaatctcaataaacaactcctgcacaccagcattaatcactcaatgacctgatgtaaactatcacactaacctgtccccaagtttacactacatctgtactgcacattactgaatcataccatgtttgca

SEQ ID NO: 32783 - DNA, 344 bp, Glycine max
  Clone ID: PAT_MRT3847_129607C.1
cacctgtctctatctaaaaaacccatcactattttgaccagacacaaactttcctgaccttgcgtttccctctccatatcttcatctaagattacacacctctactggcagagacccttatacctatctgtctctcccactacaaaatcccttactcttgatccatatacactcgctcttgctaaccgcacgaaccactttactttactaactaattcgttggctacattacttctattgtgaactgactaaattccaagttctgcatgaatatccaaaacggcacatagttgcatgcgaagacacaggattgcttctcgtcaattcagagtgactccataccc

SEQ ID NO: 32784 - DNA, 800 bp, Glycine max
  Clone ID: PAT_MRT3847_129608C.1
cggggccgggaattcccggggttcgacccacgcgtccggcgcgaaaaagttgttcaacctctgaatctcctttccctcatttctttgtctgcaaagacacccaccctataaccaccatgtcatcaatctcaacctcacctcactcacaccttcttcttccccaaaaccagaatcactttctctccgaaagtgggacccacgcctcattcacaccctctccgcgccctttccggcccatctccattaaatgcacctccaccccggcccaagttcagacccatgaccccctcccggcccaaacccgggcccaagagcgcgtcttcaacttcgccgctgggcccgccaccctcccggagaccgtcctccgccgcgcccagtcggagctccacgtctggcgcggatccggcatgagcgtcatggagatgagccaccgcggcaaggaattcaagtccatcatcgaaaaagccgagtccgatctccgtaccctcctccaaatcccgtcggaatattccgtcctcttcctccagggcggcgccaccacccagttcgccgccgtcccgctcaacctctgttcccccgccgacgccgtcgattatatcatcaccggctcctggagcgacaaggccttcaaggaggcccagaaattctccaagcccactataatctggtctggaaaacccgaaaaaacacaaagggtccatctttcgaagctttgcagcaaaacccagatgcaaagtatttacacatatgcgcaaatgagaacattcatgggggtttgagtataagaactacccaacccc

SEQ ID NO: 32785 - DNA, 475 bp, Glycine max
  Clone ID: PAT_MRT3847_129609C.1
ggctcgtttgcgggggcgaggaccaaggacatagagcggataggtgacaggggcaagaccggagctgccactagggggccacgaaggaggaaaggcacaacggactcaactcctgcatcatccatggagcccaaaggcatgggcccgggccagccagagctgctaccccgagcccaagagggagctcaccggaggataggcggcgcaaaaggaagagacaattgaacagaggggagcagcgctagaggcaccgacaccacggggattggcaaggaagaagaggagggaaagggaagaccactaggtctcaagaacaaggcaacaaggaggcaggaacagctggaaggggggagcctcaaccctagaggaaggggcacggggggctctgacaagaaatttcaggggagggcagggacaccaccagcagccaagggagcaacaggaacaggacctacaccatccgaggcaacacaag

SEQ ID NO: 32786 - DNA, 388 bp, Glycine max
  Clone ID: PAT_MRT3847_12960C.1
ttcggcgagttccggcttgacaaggaacaagggccactccctctgtgtgaggtgtggccgccgcacatttcacctacataagagtcgttgcgccgtgtgcgcttttcccgctgctcgcaccaggatatattacctgagcgtgaaggccattatgagaaagaccacccgtaactggaacgatgaggtacttgctttacgtgccccgtagaattaagagtggctttaaagactgtgcctaagctgcactcatgaagagaggagctgctgcctctaccttagctttgagtaataaccttttcatgctgggacagggaattatataagacttactgtctctatgttgatgctctgcttcttggatcacgtttttttctgtcgttttaatttt

SEQ ID NO: 32787 - DNA, 734 bp, Glycine max
  unsure (1)..(734): unsure at all n locations
  Clone ID: PAT_MRT3847_129610C.1
ctctttggcacgtcaagtttttgatggcgttgccaagaaggatgttgtcttgtgaaactgtttaatagggaattatgcaagaaatggaatggttggagaagcactggcttcattcgagcaaatgagtgttcgaggaatgaaacctaattcttctaccttgtcagggctgctctctgcttgccctgcgtctggatcagtacaagtagttcgtcatgtcgctagttttgttgaagagcagaaagtaaaactggatgcggttcttggaacggctcttgttgatgtgtatgctaaatgtggctttctagatgaggctatggacatatttgagaggatggaagataaagatgtgaaatcttggactgccatgatttcgggcctcggagttcatgggcagccaaaaaatgccattaggcttttcaataggatggaaaaggaggggtttaaaccaaatgaagtcacgtttttggcaattctgactgcttgtagtcatggagggcttgtggttgaggggatggaagtttttaagctcatggttcaggaatatgggttttcaccacaggttgagcattatggatgtcttattgatctcttgggtcgagcaggaatgctacatgaagcacataaactaattgatagcttgccaataaagggtgatgctactgcttggcgtacactgctttctgcttgcagaatctatggnagatgtaaattaggaagtgtgtgaaagagtgcta

SEQ ID NO: 32788 - DNA, 317 bp, Glycine max
  unsure (1)..(317): unsure at all n locations
  Clone ID: PAT_MRT3847_129611C.1
ggcgtaacccccccccccacaaccnnncacagggggcgaacaaaacgaccaacagcccccaccaccaccaccaccaccagcaacaacaacaacaacaagggngcngnagaaggaacnggcacaacaagggcnagcagcacaccggagaaacggacagagacacaaccggggaggcaagcggaagaccaccccggaacaaaaacggaacccccaggcaacagcaagaaggacgaagaggcgccacggaccgacggcgaaacggaggggcaaccgagaacnnacgcaaccgagaacaaggggaccagggaccccaagcg

SEQ ID NO: 32789 - DNA, 331 bp, Glycine max
  Clone ID: PAT_MRT3847_129612C.1
cgtacgtaaaacttggaatcctctagagcgggcgacctttttttttttttttaagatacaatttgctatctatgcattttatgagaagatataagaaattaataacacatttgtcgtgcaatgcaagctaacaagtaataactcattgttggcaggtgggccattcagatttggaccctggagctgatcatgccctgaacagcgtgcataatatcaaagaagcgtggcctgaaatttgggagattgaagatggcgaccaacaggtgaggattcagccccgagcagggggaaaccatggagcctgagctgaaggggggacatgggggtgaag

SEQ ID NO: 32790 - DNA, 392 bp, Glycine max
  Clone ID: PAT_MRT3847_129613C.1
ctcgagccgaatcggcatcgaggaggatctgagtgaactcaattggcttaactaaccctcaagaaatcagcttagtttacttaaaaaggaacaacattaaacaggggcagctaacggccctcccatgacttgtatgccaccattcaaaacagctggtcctgctagtgaccggtgcaacacccactcgcccagaaaagcatatacattcttttttcctgccagccccccatatagacctccttgccctaaatgttgttgaaagacttagagaactaccgccggccaaaacattcttgactgtgaacaatacaacaccatgctagaccctacattgatatcaaaaaacatagcccccccggtgaatcatttggagggtaatatcatccactggc

SEQ ID NO: 32791 - DNA, 151 bp, Glycine max
  Clone ID: PAT_MRT3847_129614C.1
gtgcggctgcgacatgacgatacagcggcaaaattccaactgaaggggagacctcacgtcaggccgcgctacccgctgcacttaaggatatcaacttacgtaggagtgccggggacggcatagctcttccaaaatcggccggtcgatacga

SEQ ID NO: 32792 - DNA, 202 bp, Glycine max
  unsure (1)..(202): unsure at all n locations
  Clone ID: PAT_MRT3847_129615C.1
ccacctttattcaaagagcaggggtgatttgttgagtgatcatgtgtggcgtgcaatatctccgactcataccgcaggtcccgcagcgggcgcggcgcgtgaccgcgacatctgggccacgttgagacacgctttcaagccgtgctggacgatgatttnaggctggttcagagaattcaaggatgatccgaaatcgaggatg

SEQ ID NO: 32793 - DNA, 222 bp, Glycine max
  Clone ID: PAT_MRT3847_129616C.1
aaattgggcacttccagatttcccattcctgaattacttattcttgaactttgcaggcataattttggattgcccattgtaaaattatgggtgcataatttcggcataagtaatccaggaaacaacatataattcagattacttattatgaaattatgtgtacataattttgaaatgggcattcgagagagagtccaattttgatttttctattctagattg

SEQ ID NO: 32794 - DNA, 346 bp, Glycine max
  Clone ID: PAT_MRT3847_129617C.1
gcacaacatgctggctctctttaagtgaataccttataaaaaccctgatacaattaagagttttcttgtttctcgttttaacatgtccatagtgtcatacaaaggcaaaagatcaaattgagttacaatgtgttaaaaaaaaaaaaaaaaaacaaaaaaaaacaaataaaaaaatccaaaataataatcatagaacaaaaaataagattgcaaaaaataatataaaataaaaaaaataaataaaagggggcgtcccttttaaaggatccaagtcttattaccctggtttccaaactctaatctcttttatggggtacctaaatttaatataatggcccgcttattt

SEQ ID NO: 32795 - DNA, 157 bp, Glycine max
  Clone ID: PAT_MRT3847_129618C.1
cagtctgttcatattcacaccttggaaaaccaagagactgttataatctctcttgtcttaattgctcttcaatatcaaaactgtttataattccactttgacatgctggggtaaaacccgtcacctaagacaacggcggaattatgactatccactt

SEQ ID NO: 32796 - DNA, 131 bp, Glycine max
  Clone ID: PAT_MRT3847_129619C.1
tttgaatggtgaatggttatggggatttaacttccaaagattaacacttctcaaattatctacagcaagagatagaattcaagagaagtgttaatctttgaatggtgaatggttatggggatttaacttcc

SEQ ID NO: 32797 - DNA, 231 bp, Glycine max
  Clone ID: PAT_MRT3847_12961C.1
ctcgagacgtatcatggtgtctttacgtcttcctcggaggcggtactcgcgacccgtatcagctggtacaatgggatgcacgagctcatagaagacggtcgccggagccggtgattctaggtcggagggacgtgcgtggtgcctacatgttctcggaggcgaagcaataatgggttggggagacaccaaaacggcgtcgtcgaggatgcgcgtcacggggatgcgcgtgag

SEQ ID NO: 32798 - DNA, 180 bp, Glycine max
  Clone ID: PAT_MRT3847_129620C.1
attgtctgtgtgatggattcccgccttcatatcgttacatggccatttctagaacactcggctatgcagattctgatttgtcggaatcatttacgcagaaatggtgaaagctcaaggaaattggtcagtcgtgggtgataaagtatgcctacaatccaactgcatgagattggatcacaa

SEQ ID NO: 32799 - DNA, 805 bp, Glycine max
  unsure (1)..(805): unsure at all n locations
  Clone ID: PAT_MRT3847_129621C.1
tgcatgcctgcagctagaaacagataatacgacatgaaagaaccgtggagaagaaacaaagcacacagtaaaagggatataatatcagaaaaaatgcctattaataatttttggaaaataaatatgtagttgtgtcatcatctgggcacagcaatacacttctgctatcctggatatttgcatcaatatccttccaaaagtttgaatatacaaaaactctcattttcttgtttctaacactcaaattacactcataaaaggttaaatttcactgaacaaaagaaagcaagacaaattgtgcacgtttagttggatccatgtcagtattgatgctcatcatgtagcagtcatgtgaacagatgcagatcacgatgcaaaattttgctttctagaactaagttgagcaatccaattaatgtaaatgaagtcaataaacagctttacagatttttttccaatcatcaagcttgatacctgtacgtcatgcaaaaccatatttacccttatttttaattacccaggccaaaatgttttgccgcacacaagtcgatactgagtgaaaaaagtaacaaggcaatttaataaaaggacatgtgatgtaaaacctatcttcccaccattgaaatctttgtcctcagaagagcctgaaaattttgtttcttttatgtcaaccctttccacatcagcacctgagtccaaactatcttgcaaccgttccttgatttctggaattgatccactatccgaaaagtctgcaactgcatccgagaacacctcatcttctgatctaattattntttctcca

SEQ ID NO: 32800 - DNA, 503 bp, Glycine max
  Clone ID: PAT_MRT3847_129622C.1
atctatattgtttctaatgcctggtctttctgaataccacatgaagtatcctgggggaacagcctctggcacatggaacattcttgacaagggaagtaggcccaatggatccgtaccatacgcatgaggattggctcttacggctgcccacgatggactccgccactacactgtaggctgtcggccgacagctatcagactcttcctatgggatagtagatccaccagtaccctactgcgtacggaacgtgaacggtacctccatagttcaactcatcgaccgtgtgacaatcaggataaaactggcacgcactgagtgaatgctagtgcctcatggacacagaccctagctaggggccctgactatgtatgcgcagggtgcctaatgccttgagctccgagtggcaaggagaaaaagttatatccgcgcggctagaccggggtactaactataagtctagtattgcaggcgcatgcctcgtaatctaaggggctatgtgcac

SEQ ID NO: 32801 - DNA, 1082 bp, Glycine max
  unsure (1)..(1082): unsure at all n locations
  Clone ID: PAT_MRT3847_129623C.1
cacaaaaccaccaaaattcatccttctattcatcaatccgtaattacctatctttccactttctttctcctacaatggggctaccacccactattgcaacatgctttctcatattggtgctacctcttgttgtgctatgtttgtggaagctgctaaactgggtgtggttgaggccaaagaaattggagcgggcattaagggcacagggtcttcagggcaatccctacagacttttggttggagacaatcgggaaaagtttaggattctcatgaatgcttccaaatctcaacaatccacgagttctctctcagatgataagaacgtagcaccgcatatcgtgacctttaaccatcacattggccgcattcggcaaaaattcatttttttgggaaggcaccaaaccaaaagtggtaatcactgaccctgagcaaatcaaagaagtcttcaacaagatccaagactttgagaaacccaagttgagtcctattgtcaagttgttgggctctggacttgcaaatttagaaggcgagaaatggcgtacacatcgaaagattattaaccctgctttccatttagaaaaattgaaggttatatatacactttaatatatgttttgtttgggaatcactttttcttagcatgttttattccatatcaagttttattcaattatgttttcattaccttgcaggttatgttaccaatatttcttgaatgttgtgacgatatggtttccaaatgggaaaggttgttgtcttcaaatgacaaatccgaaattgatgtgtggcctttccttcaaaatttaacatgtgatattatatctagaacagcatttggaagcagttatgaagatgggaaacgtatatttgaacttctgaaagagcaaactggacttatgatgaaattgcagaacgcttacanttccaggatggtggtatgactactaacattataaatggcatcaaaattatgcatattctttgttatatacctcttaatttaaaaatagaaattttatcctctgttcctttactttcaaaatcggactatactntatatctagctactctacatggacctt

SEQ ID NO: 32802 - DNA, 371 bp, Glycine max
  Clone ID: PAT_MRT3847_129624C.1
ccccgccgcaatttataattccggggtacacgtgtactctactggggggcgcccttttttttttggtgtgttataacactgatgttttattgcttcaaaccaatcagatctcactcaatacatcttcagagccagtttcacgcgcccattgatgcctatccaacgcaatgagggcatgtttaaacatagccattcagatgacagatcatttccctttcatcatcaaaccttgaacagttacaatccaatcattcaattcatattctgaacattcaagagagagtcaagcaacgggattcaagtcattcaactacaaatttcgcatgcagtaatgcaattgatagaaacatatatgaaagacggatgacttt

SEQ ID NO: 32803 - DNA, 444 bp, Glycine max
  Clone ID: PAT_MRT3847_129625C.1
ctctctcgacctcctttaaattacatatataattatgaatcataggttctggatgaatttgctttgcgttgcattattaacattgatcctattacatggggcatcaagaggacatgatgatgtcgtcaaaatcggtgccatattcacattaaaaaccataaacggacgagtttccaaaattgccatccaagctgctgagaaagatgtgaattccgatcctcgcatccttgggggtcgtaaattgtccataaccatccatgattccaacttcagtggttttcttggctttattggggccctcaagttcttggtgaccgacacagtagctataattggtccacaaagttcagtaatggcccatgtgctttcgcatcttgcaaatgagctccatgttgccctactctcctccacgggtctggaccccaccctaacacctctccagta

SEQ ID NO: 32804 - DNA, 806 bp, Glycine max
  Clone ID: PAT_MRT3847_129626C.1
agggatcctctctctttctccacgcgtggcagcaaacaagtgagtgagtgagttgctttgtctcattcactcagctacttctccatccatctccacctaaaaatgcaacccctacactttcattttcttgagcccttttttctcttcaatcctatacacagtgtctggtgtaatgcaagtgtagttttttttttttttgcctctgtgactctgtagatctgacccatgcggggataccgaaaaaataaaggattttgatttctgggttttgttttttggcgcattgggtcattggaaaagtggagtgattgttgctggggggtcatgggttccaatggtagcaaagccacttcttcgtctttcggtagttcttcttcttcatcgtcttcttcggggagtttaaggaaaggtcgatctaagggccttaaagtttttcaatcttgttgtcttggaacaacttctggttctcacgacagtgataatgaagaccaggtttgtgatcagaataaagtaaatggcagtgatgtaacatatgctgatggcaatggaacagactcagatgaggtgaaaacagagtcatttagaaaggttatagctggtgaaatgacttgtgtgccttctaacattgaccttgatggatggggagaaacaagcatccccaacacttcatccagaactggaagcatctctgtccattcttcttcaactcattccttgaaccctacaagtcattgcctttctcggtttagcctcattcctggtaatgtaagcttcagacttagcagaaccactagtttggggtcatc

SEQ ID NO: 32805 - DNA, 1127 bp, Glycine max
  Clone ID: PAT_MRT3847_129627C.1
aatagccacgcgtccgcccacgcgaccgtacgaatgcgggaagacgacagaaagggaacgaccaatgggggtcaacctatgagagtggattcgttgattatagtgctatatatagcgtccctcctctgttttccgagtttccgtgcagcaaaaaaaagtgtgaagtgcagagggatccttctcagtgctgcgacgaacacgacgtcgtgatgggatttttcaaaaggatagccggatatctagggtttggaaaccacaaacacgattccaaggatgaggcccgcgatggtcaacctcgtaccacacaacctcgtaaaggcttcagtgtccctgcccaggtcgtcgtcgatcgcccccacctcgctcccgttctcactccttctacttccggcgacggtggaattcagggtctggattggtatgtaaatcatcttaagatggatgaagatggtgatttagcagatcagttccttgatgaggtttcatcagagaagccagaaggagttgcagtagatcatcataaaacacaagcaaggtttaaactgaagaatgggaccaagtcagtcagagtgaagaaaccgatcctattaggtgggaaaattattccacagattgtggaatcccaccagggcagattgtagaaaaatttgatctggctattgattcgttgggctttatctgtttagttgtgcatacagtggaacctgcagttatattttaactgagctttacttgacggttcctttttgctctttggctttgtctttccttggctatgaatatgtttgggaattgctacatttgatgaaagtgtgtgggagttaaactacccaacaagttaagctatattagaggctgtcaggtttttaggtctagctgttgaagttttttgctacaggcgttgaataatgtagatgggtatctgggtaagaggcctacatgtgagatctacaaagaagctctgaactttaacaagtagacgcatttgaagtgtatccttgtgaattatggtagtctcctataagtattgaaatgttgggcgtatgattctgctaattaattgtgacggttagaaaaaaaaaaaaataaagggcggccgtcgtaccgtatacagcttggtacggtgc

SEQ ID NO: 32806 - DNA, 484 bp, Glycine max
  Clone ID: PAT_MRT3847_129628C.1
tacaccggctgatgatcgacggttgaacaaattctggactcatcaccagaaagatctcgctttgacagaagacggaaagatgggaggtgattagaaacaaacgccatcctgctgatgatcttgcaaagcgcgctcatgaatcagaaggacatgttgctcacacaagcctaaggacacatccagctgagacaagtcgattttacctaggcttaataggtggggaaaattatgagaccttagacaaagtgttgatgcgcgatcttaaactacttactgatgggaagctgtatgagggtaagcatattcctgtatctgatattaatgcatgggagaatcatgtacttcaaatacccctaatggcacaggaggaaattctgacttctacagcaagtgattacagaactgcaatggtgcagaaaaatagcatgcctcaagctaccgcaatgcatgtcggagctatagaaattatcattgactagttcgc

SEQ ID NO: 32807 - DNA, 363 bp, Glycine max
  Clone ID: PAT_MRT3847_129629C.1
cattcccctaaaagcttgtttttgccttcttctttctccttaacatagctgacaaaaacaaacacttcctctttcataattctctccccccactttgactacaccctcattactttacttcgcatattttgcacccttttaacttctattgccactcacaattcttcttgttcttcttccttttcttcatccttatacatttcttgcgtagatttattttttcttttaattttctttagataacaaaaggtgcttctttggattgtgacatggagggtcaacctgctaaacgcagacgtgtgtactctcttgaacccaacaaagtggaacaagcagcatttgccagaaactacatgaactatt

SEQ ID NO: 32808 - DNA, 629 bp, Glycine max
  unsure (1)..(629): unsure at all n locations
  Clone ID: PAT_MRT3847_12962C.1
aagcgcttcattttcttgtcttctggtgcttatataatgacgtactagctagcctcatttttcttcatccttattatttctctctctttctttccctatattcattttctgtgctttgaaagatgactggggttcctcaagaagcacccgtttctcttgatcagctcaagcagatactggatgagtttgcaaaggagagggattgggagcagtatcatagcccaaggaacctccttttggctttggtgggtgaagtgggagaattgtctgagatatttcagtggaaaggggaggttccaaagggtcttccagattggaaagaggaggaaaaggttcatcttggtgaagagctttcagatgtgttgctttatcttgtgaggctctccgacatgtgtggtgtagatcttggcaaagctgctttaagaaaggttcaactcaatgccgtaaaatacccaaaaaaggtttatgaagacccttcaagcagcactgtcagccccaacaacaccaattgataatgcaactactcgagatgctaattgatgataatccattggtgtctatagttattgtagtcgntgttttaggggggaggggggagagtnggaaagtggttttggtttttgttcttc

SEQ ID NO: 32809 - DNA, 429 bp, Glycine max
  Clone ID: PAT_MRT3847_129630C.1
gtgcgtttgagagaagaagggggttaccgtgtttgtttcttcaccgaacgaacaagcatatggtagcttaaagccctagtttcaatgcgaacatcctataatcttgttcttcttcgctctcgcttccgccgctctcacaatttccacgcataccgttccctctccgtcgtaatcctcaaaccagaccaccatccaccagctatcattccctcaaattcccgattccttcttcccggcttcaatgctcatcgccatcgcagtttctttaccagggctaagccagcaaccaccaacattgaattcaacgatcaccacagtcagcgatctgttaaaactattttgtggtgtaactttcttgctttttcactcaagtttggagtatgattagcgtcatcgagccatgttacgttagctgaagtcgtccactct

SEQ ID NO: 32810 - DNA, 231 bp, Glycine max
  Clone ID: PAT_MRT3847_129631C.1
gagtgaattacattgcattgggttctatcagcgtatttcactcaccatgcagaaatgaatttgtgagttttatgtacgctagtgatacgtttaacatcaattctcagctcgagcatctccaagtcaaatatgttgggactggccatgctgatttgcacagatttgagtgggcagtgaacattcaacgtgatacctatgcatcatatattgggcactaccctttactgggat

SEQ ID NO: 32811 - DNA, 329 bp, Glycine max
  unsure (1)..(329): unsure at all n locations
  Clone ID: PAT_MRT3847_129632C.1
ccccaagcggccgctttntttgttttttatttttattttttccccaatactagttgaccatcacacattattggaacacttaattcttacattaaaaaaatcaaacaactattcctcttttgttaatcattattaccaccaacaaacaatacctaacaacactcgatgtattcacaactaaaatccacacaaaaacatataaaaacaaattgaccatctaaacaacaattcttttctgaatgcaccattttatttttttcacgtttcttatttttaccaaataatattttctcttaacatcatataaattaccacataatgttccattt

SEQ ID NO: 32812 - DNA, 648 bp, Glycine max
  unsure (1)..(648): unsure at all n locations
  Clone ID: PAT_MRT3847_129633C.1
aaaataatgtttttcttacttcccattaaacctttttctttatatatacaagggagagatgaacaattattttacaaacaaactcaagcatataataaaacacatcaagtctgcaaatacagcatgctctattgccaacaagagaatatttgtgatggataatatgtaaatagttatctagttaaaacaatcgttctagcaaaaaagagatgtggctgctacgttacgtacggttctgaatcctgacagggaagccaccaaccatgaaagaagtgagatacgcagcgaactcgggttcggccacctccgacagcaccttgaagctcttgataatcccggccacaagtcttttcatctgcaaaaacgccatttcccttcccaaacacacccttggtccagcctgaaaaaccggataagtaaaagcatccaccccctcgaatttccacctcccttccacctcgtccctactcagccacctctctggcctaaactcgccccaatccgccccccatatcttctccgaccgccccatcgcgtaaatatgatacgccactctccaccctcttctcacctgtgtcccatncggcaaaacgtcgtcttcccctgcctncttcgtatccaccggcaccggcgggtacagcctcatgc

SEQ ID NO: 32813 - DNA, 404 bp, Glycine max
  Clone ID: PAT_MRT3847_129634C.1
gaatagccatgtctacttcaaagagcgtcagcagttctagtgaagatgacaatgaacttagaagagggccttggactctggaagaggataacttgctctcccaatatatttttaatcatggggaagggcgatggaatttgctggctaaacgttcaggattaaagagaactgggaaaagttgcagattaaggtggctaaattatctaaagccagatgtaaaacggggaaatttaaccccacaagagcaacttataattcttgaactccactcaaagtggggaaacaggtgcttatcttgtgcatttgattcttgagctccacaggttttatcgtgattcttggtattgtgagaaattgtagacaaatgcggccaatgcagccgcaaaacggtcacaaggactctc

SEQ ID NO: 32814 - DNA, 139 bp, Glycine max
  unsure (1)..(139): unsure at all n locations
  Clone ID: PAT_MRT3847_129635C.1
gcaaattaatgatgctaacattatctatgatatattccaactcctntnccaatnncgtnactggntaantannagnaatncactgncgccgagaattngtcctgttcgagatggttccggggggaagncattngncatt

SEQ ID NO: 32815 - DNA, 1939 bp, Glycine max
  Clone ID: PAT_MRT3847_129636C.1
cggctgcgagaagacgacagaagggggtggcaatgactatggaaggtgaatggaaggtgtcgtatggaatttagagcatgattttagagaagtattaaagtgtatagtattcactttgacttgatctcactccccaaaatgggatacagacatagtaatagtatattatacactatgcatcttgcgtaggccaatttgctttgtaactttagtttctcccttgaccccatttaagtcctgcatatatatgcgtagttttttttatagttttagtgagtgagaatagccatgtctacttcaaagagcgtcagcagttctagtgaagatgacaatgaacttagaagagggccttggactctggaagaggataacttgctctcccaatatatttttaatcatggggaagggcgatggaatttgctggctaaacgttcaggattaaagagaactgggaaaagttgcagattaaggtggctaaattatctaaagccagatgtaaaacggggaaatttaaccccacaagagcaacttataattcttgaactccactcaaagtggggaaacaggtggtcaaaaattgcacaacatttgccaggcagaacagacaatgaaatcaagaactattggagaactaggattcagaaacaagcaagacatttgaaaatttacactgacagcagagagtttcaagaacttgttaggcgtttctggatgcctagattgcttcagaaagcaaaagaatcatcttcttcaaacatgtcaattcaaaaccaggcaattcctatgccttttgattatgtttctcagcatttaactgttgggaccataccaccttggcagggaccttgtatgaatgaagctggtcccacttacatggaccaacatgagcagaactcagactctgaacacaacaatggttcatgcatctccttgtctgagtcagcaaattttccaaaagtgcctcagcattttggacgcaccaccatcacccaatatcatgccttgaataacaatgactttggcaccttcacatatgacggctacaatgtaagcaacaatgtctatgagatggacaacttcaaaacgcctactacaagggtggctgaggatgcgcaatacccaactggtgattgtcaaatggtaggaagcaattgggtaaacagcgattttgcatgtaacatgtggaacatggatgaattgtggcaatttagcaagttacaaaaataagattttagggtttggtttttttggagttaccaagactctatctttggtgatgttattattgttatcatgaactgttgattagctactaccaaattaattaatacagatggtgattgttttctgtacatctgttttgcattacactgttcagataagtacttttgcaatttgtattgattgagaaaagtcattaattagtctggtaggaagcaattgggtaaacagcgattttgcatgtaacatgtggaacatggatgaattgtggcaatttagcaagaaactttggtgcatttgtaggggaaatcggaatgccgaatgcagccactatgatatctaaatgaagagggcccgtgattgaatgaggatgcaattgaagccaataaagatagttcgtttttcagtgattgttttctgtacatctgttttgcattactctgttttgcaatttgtattgattgagaaaagtcattaattagtcactagttcataacacaaacagttggagattgagtgctaataaagatttcgtaaatatatagaagtaaccacttttggaaactttggtgtatttgtagtggaaatcgaattgcagccactatgatatataaatgaagagggcccatgatccaatgaggatttaattggagatgaaagtagaaagctgcaaaatgactcatagcgtgtttgcttatccattcacgacgtagatttc

SEQ ID NO: 32816 - DNA, 314 bp, Glycine max
  Clone ID: PAT_MRT3847_129637C.1
gcaaaatataacatcccatgaacaaagtcacgtgtaattatacaaacttctgaacgatttgatggcttcgtgcatcacctgaagagggtgcacgaatttacatacactacttcctaaaagcgatgacgatacccagactctctcgctgcctcaacattaccgccctcgttcattcgattctgtactcaactattgtatactgggacaacattatgatccatcatatctagattgatcctaacaacggctgctgctgtcactgtcatgaccgaggttctagaatcttttaccgctctaggagtatgtgccaacac

SEQ ID NO: 32817 - DNA, 898 bp, Glycine max
  Clone ID: PAT_MRT3847_129638C.1
gccatgtgtacttcaaagagcgtgagcagttctagtgaagatgacaatgaacttagaagagggccttggactcttgaagaggataattcgctctcccaatatatttctagtcatggagaagggcgatggaatttgctagctaaacgttcaggattaaagcgaactgggaaaagttgcagattaaggtggctaaattatctaaagccagatgtaaaacggggaaatttaaccccacaagagcaacttataatcctcgaactccactcaaagtggggaaacaggtgcttatcttgtgcatttgattcttgagctccacaggttttaaattgtggtccaggttgtgcttacagtcggcgttttatcgcgatttctttgtattgtgagaaattgtagacaaatgcgaccaatgcagccttgaaacggtcacaaagactctcaaagccttgaggtcgcggccaaaatcgtgatcacatactgttttttaaaacctgcctcttcaaaatgctggtagaagcaaagatgcaaatcttgccactatcaacaagcatgctttccattccaaaatattgtcttttctctggattttcatttctttctttaatgactgtaggtggtcaaaaattgcacaaaatttgccaggcagaacagacaatgaaatcaagaactattggagaactaggattcagaaacaggcaagacatttgaaaattgacactgacagcagagagtttcaggaacttgttaggcgtttctggatgcctagattgcttcaaaaagccaaagaatcatcttcttcagccatgtcaattcaaaaccaggcaactcctatgccttttgatggtgtttctcagcattcaactgttgggaccataccatcacattcacacaccccttggca

SEQ ID NO: 32818 - DNA, 527 bp, Glycine max
  Clone ID: PAT_MRT3847_129639C.1
tggttcatgcatctccttgtctgagtcagcaaatattccaaaagtgcctcagcattttggacacaccaccatcacccaatttcatgccttgaataccaatgactttggcaccttcacatatgaaggttataatgtaaacaacaatgtctatgagatggacaacttcaaaacgactactacatgggtggctgaggatgcgcaatacccaattggtgattgtcaaatggtaggaagcaattgggtaaacaacgattttgcatgtaacatgtggaacatggatgaactgtggcagtttagcaagttacaaaaataagattttagggttttgttttttttggaataaccaaaagtccaaaactctttctttgatgacgttattattgttatcatgaactgtggattagctaccgaattaattaatacagatggcgattgttttctgtacatctgtcttgtattactctgttcagataagtacttttgtaatttgtattgattgagaaaagtcattaattagtcactagtac

SEQ ID NO: 32819 - DNA, 318 bp, Glycine max
  unsure (1)..(318): unsure at all n locations
  Clone ID: PAT_MRT3847_12963C.1
aaaaaaaagggggcctcccactaatcctctccctcctcatatccaccttcctcatcctcctctccgtcatcgtttcctttattcaccctcccancnttttggggatgtaaggganccccttcctnctaggaaggggggggncnnnaaaaaaaaaaaaaactnannataaggnnanatccccccgggggggtccnanaannnnanaaaaaaacncnngctcaanngggagagggaaaaaaaaaaaaaaggacncgnaagggtttgtaccatcctttaaaccactacgcantgcacttggacctcgagggctcttccaag

SEQ ID NO: 32820 - DNA, 213 bp, Glycine max
  Clone ID: PAT_MRT3847_129640C.1
ttcttcatctggtctcatcagcgatggacttggtgcaatgcttcatcaagcccccctcttgattctttgcaaatctaactttaaggttgtagcagtttgccagctgccgcaacccattttgggggtatgatcataccgggtcccaccatcgttcttgtttgccaaatgagtggacatcctatcctgcatgattgagaggagaatcggtcggag

SEQ ID NO: 32821 - DNA, 133 bp, Glycine max
  unsure (1)..(133): unsure at all n locations
  Clone ID: PAT_MRT3847_129641C.1
cgagtgttgaagataacacgaaacanaaaccatcatttagttgccatccatctgccaccggggtccactcccaacaccgattccggcacggcgccgtcaccgcgccccaccatcacgctcccttcgcgcccct

SEQ ID NO: 32822 - DNA, 370 bp, Glycine max
  Clone ID: PAT_MRT3847_129642C.1
gccacgcctccggcctaaacagtggcctcaccgtggcctattgttgtggcgattgctgagtgaaaggcaaccttcgaaaagcagtaggcatatatcacgttagataacacacactcttatcgggacctataccgaacactacttgtgacagtacctgacattggtgaatacatctttggtgccattattttctacgaaactatttaccaatccactatcaatggaaggaatatcgttgacctactcgttgatcaaaacatcgatgccgacatcaatgtcgacaagggttttgtgcccctagctgattcatacgatcaatgattgcaccaacgtcttgattgacttgcttcttactaagctgaatactacc

SEQ ID NO: 32823 - DNA, 465 bp, Glycine max
  Clone ID: PAT_MRT3847_129643C.1
gttttagggacaatgctggtgcccgccaaaggcggatacatggggaaaggagtctgtgggagtccaaagacgacagaaaatggggacatgataaatttgaggaaattactttgcacgaaaagcaccatgaagagagggggagaccttataagggtaattatcgtggtcaaggtaaaagtcgaggcacttatcgtggaggatatgttcaaggaaacaggacaggatataatgacagtagcaatcaaaatcaggtacctaagagagttgtgaaagggagagcccccccaaaagtatgaacgtaccaataaaagcaatggtccatcttctgcagtgcaaaataaacattcggagaggacttccacacatgcttccaaggtagaatctggctctgtgcctgttaaaaatcaagtggttgcttcaaatttgaattcagcatccccaccattttacccctcaggctcttcc

SEQ ID NO: 32824 - DNA, 588 bp, Glycine max
  unsure (1)..(588): unsure at all n locations
  Clone ID: PAT_MRT3847_129644C.1
ccacgcgtccgttttaaagggtctttgcatttctaaaggtagtaaaatctttagttaaatcgaaattttctaaacaataaataccttatcatagataattttctcaaaataaaaaaagggcaataccaataatgactttttaggagtttgagaagaacgagagtttcattttatgtgttctaatttacaactatccaaattgaataataatctctagatactcgcaattaacacatttctccttctccttcaaatttacatcatgtggacctaacgcgatagcctattgcatttgaattcagcgtaaaatgcaaaagcaattataattttcataatttcaatgtggattttgacacaggaggatatagatttaatggaaactttgggagtaaacagctaccggctatccctgtcatgggcaagaattctaccaaagggtagattcggagagcccaaccatgctggtaatcgagttctataacagactaatttgatgttctactactcanaagggatccaacccctttgtaacttcttagtcactttatgacattccccaagaagcttgaagacagatccngggagttg

SEQ ID NO: 32825 - DNA, 113 bp, Glycine max
  Clone ID: PAT_MRT3847_129645C.1
ccaaaacatctctcttgattaacggcctttgtaattcaacatacagccctatctatataccattttgaaaacttcccttttggtaatttttcttcatttccagttgtgggaag

SEQ ID NO: 32826 - DNA, 401 bp, Glycine max
  Clone ID: PAT_MRT3847_129646C.1
cgtccctgagttcggctcgaggcacgttttccaacttcaacattcacatattaaaaaacaacaagggttccttttctcgtcgatttcaactctctcagaagctggatgacgataatttcattgataaaatcaaacgaagagagctcatactggaaagtggagaattagcaaccattggtgccatcttcaactttagaggcaaaaagccagattatcttggagtgcagaaaaatcaaccggcattagcactatgtccggcaactaagaactgcatatcgacatcggaaaatgtcactaacctcacacattacactcctccttggaactacaatcctgaaagtaggaaagatcatgtgagcagagaacaggcaatggaggaactgatagatgtgatagaatcg

SEQ ID NO: 32827 - DNA, 205 bp, Glycine max
  Clone ID: PAT_MRT3847_129647C.1
ccacactttcactaaaattttaattttaatctcacccatattaaaaaaaagggcctgtttattttaaacggaaaattggcactctctttctttaccaatactttctcaaactctttctcctaatttcaaactttcatctttccttttctgctatgatactctaccacctttttcaataccactcacacttactccattaccacaa

SEQ ID NO: 32828 - DNA, 407 bp, Glycine max
  Clone ID: PAT_MRT3847_129648C.1
tatgctaggcgtaaccattaatccgtgcatgtatagagatgaactagttcagactgaccatctgtggatggctcattatatcagacattgagagagcgatagtgtatactactggggttaccgagaatattctagaacttataccatcaacaaacgcgaactcttctaaggtatgcacacattatattaaatgtcaacacatgctttgtctgctgtttcgatcattcatgatcactcatgcgatcacactgactacgttccatgaactcattactacaatacttgctgtatgaactttcgactgtctgatagtagactaccatactatacacaattgacctgaaactgagacctgatagctgatcatgatccatagaactctctatcacattgctcgtatgctacat

SEQ ID NO: 32829 - DNA, 283 bp, Glycine max
  Clone ID: PAT_MRT3847_129649C.1
cattgtacttaaactttcaggtcatccttttctgacctgtatgtctcatttaatgtatggctcttaaaggcgtcgcctactgccgttttaccgcaaccgaaccgtcatggcgagttatcccagccgaacccagctgactgaatcatcggagaacgcacccaaaggagaacttctgaacacccacccaaaagaagacaactcacaggcgaacatttctgtaggctgcacgcaggcatacccacatgactcatgcctgaagacgggcctaaataaaaacatatcg

SEQ ID NO: 32830 - DNA, 1118 bp, Glycine max
  Clone ID: PAT_MRT3847_12964C.1
tgaaaatggtgagacaatctcagatgagcgtaaaatcagaataaagcctttgcccaaaaggatagtttcaagaccacctgaatttccagctgatcatcctgttagtgatgtcggcttgcaagttagcaggacttcatcacatttagatacatatctggatcctgccttcatgtctttgattaaagaccctgatgaaaggcggatggagcagtgggagaaaactgctgaagcacaaagaggctggaattgtgctaaattgattggatatggcgaccttggtggaccctcattgtctgctgccgaagaatattctctacactctagatacctgtctaaagcaaattccttaaatctttctgaaattgcagaaatgaaaattgtctatcgtggtggggtagacagtgagggtcatcctgtcatggttgttgtaggggcccactttttacttaggtgtcttgatctggagcgatttgtgctctatgtggtgaaggagtttgagcctttaatacagaagcctttttctattgtctacttccactctgctgcatctttgcagatgcagccagacctgggttggatgagaagattgcaacaaatacttggtcggaagcaccagcgcaacctgcatgcaatatatgtccttcacccaactttcggactaaaagcggcagtatttggacttcagatgtttgtggacaatgtggtttggaagaaagtggtatatgttgatcgccttctgcagctcttcagatacgtacctcgtgaacagttgaccatcccagattttgtgtttcagcatgacttggaagtgaatggagggacgggtctcattgtggatccaagaacaaaatatgtgtacaacagaccatgacaccctgcagtttttaaattgtttgccttgcccttgttgtcgctgttaacaggaagagtggcttgtattagtttgaaatgtgtatggaaccatttttaaaataaatgggacgtttggaaggagtgataagttcccctgtatgtatatgtaattaattgcggaagctaatttgttggatttctttaattgtttgtatattcaagggaaatatattaaataaaattagtctttgatcatttccattttt

SEQ ID NO: 32831 - DNA, 935 bp, Glycine max
  Clone ID: PAT_MRT3847_129650C.1
tttttgagaagcaaacctaacttatcatataatgctattaaacgtaaattacaacttcgtagaataaagaataccaacactgtaaaaatgcgaataaaaatatgtcttcgctaatcatgattttcctttgttttaattggtgtaaccgctatccatgggttgcataattggagtattagcacgatcagtggctatctatgctgctttcctccggagaaacacacataggaaaaaaatgaaaagcacataatgtttgatcatgactttacaactaatattgaaaaaattcacttgcaggtgctaatgagtaaatggtgcgatgtattaatagctatataaaatatcacttgtgttttgagagttttgctgccagtctaccacgagaagtcctcaaaccagcccaaccttttctagcttttctcttacgttgcttcttgggacttggcagcatccctggctttctattgactcgcattctttctaagcgctcacgccggatctcaggatcagcccaaccttttccccattccgagaatgaggaaaatggtttgttagttttccttgcaagcaacatatctgcctcagggtaaacatagaaatcttgctcactcatggacttcacaaattccaatcccaattctgttggctccaggtattttgcctgaacatgggtctgcaattgtatggtggaaaacttgagataagatcacagagaaatgcacactctgcggcacatgacttgtcatctccttccccgatgtatcctttaacctccaaaattcgagcaagacctctccaccataatatatcagtggttaaaaacttctgaaactgctgccttattttgccaaccaatatctgaagatttggcctctctctcagtcctctatgtttggagtgaaaatgtatatcatcatcatatgagcaatccaaat

SEQ ID NO: 32832 - DNA, 387 bp, Glycine max
  Clone ID: PAT_MRT3847_129651C.1
gagccttaaattaatttttattggcctaattattaaaccgaaatttggggtggaaaaccccgccaaccggagaccattatttagatggagaacaaaaggggtcaaggaccaaccacgtcccttaacccaacaattgtttttagggaaggcaaaaaaaccttaaccctaaaaccccgcgccttgaccttaaaagtcctggttaattggccaaacccatggtgggggggatccaccctaaaacaccgctttttttccattcatttccagctcctaaacctttttcttaatcccaaaacctttttaatccaccataatttttttaacaagttcggttacctgtttttttttacaaattcttccttcttcggcacaccggaacggcacccc

SEQ ID NO: 32833 - DNA, 674 bp, Glycine max
  unsure (1)..(674): unsure at all n locations
  Clone ID: PAT_MRT3847_129652C.1
gaattcggcaccagaacacaccgccgccgtcaaggctaagccattatagatcacacgagccaagactgaaccacgttcacgatgctctctttcttatccgcttgctcccgctcttcaccaccgataatggagtccatggtcgcatccttctatcttcaaagtcgccccatgtttgcttctagatatgcggcctaggtctttctgtttccagatccatggtacaacaaagatgaagagaaaataattgaaacatcccagctctgcaacctacgttttgtttgcttccgtatctattgtgcatcaacgaaaaaaatttgaaaggcgccaccgaaaatcgcctccgtcaaccgcgcacagtgatccacgacagagaaaacttctgtttttgttctttgatttttcctttttctccttttcattacacagattatttgttttattttttgttgtctgcaacgttggtattctcctggtttggcaaaggcttgtggttggtgatggtagtcatatggtgatagtaatggttcatgcaagaaaagcttggaggttgatgagggatctactttgttgcttttgttgccgtggaggttgctgttcttatgagcttgattgtcatgcttacaattactagtttgatgtagttgggaaacattagtaaagagacnagcaaaaca

SEQ ID NO: 32834 - DNA, 235 bp, Glycine max
  Clone ID: PAT_MRT3847_129653C.1
caagagcagataaaacccttagccatcacaaccatcatggccacatctgctattcagcaatcggcattcactggtcaaactgctctgaagcagctcaatgagttcgaccgatagaccgttggagccggcaaaggtcgcactgacatgcgccgcaccgtcaagagtgctcgtcagagcatttagtatggccctgaccgtcccaagtacttgggtcccatctcggggcagaatccat

SEQ ID NO: 32835 - DNA, 158 bp, Glycine max
  unsure (1)..(158): unsure at all n locations
  Clone ID: PAT_MRT3847_129654C.1
accgtagaaaattgtacgctaattttggtgtgctggtcgcatatngtcctgaagaactttctgtctgccaagaccttgatcaagttccttcctttattgaaaaatttcccccctatcaatccatttttgcttaaccatcctatcgatacatccctatt

SEQ ID NO: 32836 - DNA, 591 bp, Glycine max
  Clone ID: PAT_MRT3847_129655C.1
tcagaaaaaagatactaattaattaacacaagaaacctaggtagcattcatatacatataaaaacttttttatggtgctatgttttgatttggatgaatcactcagtcttgacatcaggagattggattgaagagggatagaaaaatttcttgactccagtggtgtctaatatcttcttgctaggggcttccctcgctgttgttcttgttgattcagtcatatacatcattctgaagctccactccaccagctctgggcacaacagtttgagtaaatacgtcactttgaaccacgcaggcactgtgaggtaccctatcaaccctcaacgtgccattaactatcgctttggcgcacccactcactaacatctcgcaaatctaggtccacgactcaccttgccttttggtaaccgggtgtcacgattgttatgcctacatcggcccaacttccacccttaatgtttcatacatactcactaaagctgctttgctagcattatacaggtttcttcttgatgcctgcacccagaagaaacctgtataatgctagcaaagcacccttaatgtttcatacatactcactaaagctgc

SEQ ID NO: 32837 - DNA, 1231 bp, Glycine max
  Clone ID: PAT_MRT3847_129656C.1
ggtacggtaaaaacctatgcaatctttagtaaaagaaaaaaacttccagtttaggtacaaaaatcactataaagtgtgaataaattttcaattacatttcgatccctctttcttagaattcaaccatcctctttccaatatagggccggattcacttttttgggaggaggtttagctaacaatttaattatgggagcagatgcaatatgtgactgattcctaaaaatcataattttaataaataaacaccaaaaaattaatcacacgagacaactgaaagtgctacacgtaggtcgttagacgtcccacatatgtacattctgtaagtttcaatttcttgttgagaaacactaccactacgagctgcatagtgattaccactcactctatcacgcagcgaaaaaataatctccctcaggattggttcatggccattgagaagatttcccatgctcaaaacctttctccaagattggttagcagtaggaggaacaaacatatttgacaacacctccctctcatggtcccttacttcttgtttcttgttaaactcctacgcaagaatgcaagaaagatagtagaaatacagagttcaatgctaagaaagactcaagaacaagaaggtattccaacccacgcgtccgcccacgcgtccgtacggctgcgagaagacgacagaaggggtgcaatgatgagacgaaacacacatgtgtgtttgggtagttgacgttgccttatggtttcgccgtgagctcacatttttaactacttctccttccactgagcactactatgagtagaattgattttgatttgcaaagggcagcggaaaaattattacagtgaaagctttttaatttgattattattgcattgtctatgtttttttattgcgtccattaccaattctgggggatagtttgttcctcttggtataatggctcggacgcaatatccatgaagtggtcatcctgattgatggtttaacaacaataccatatggtcttggaaacgccaccaacattagttcattcaaattattaagagaacacaaattttgtgctaggaatatcttcttttactcttgttttgtgaaattaaaatagtgttaccgttgtgtgctgtgacgaggcaattttatggactagagtttctgatctgggaactttctcagaaattgattatcaaacccttggctgtctgagcatactgagaagaaaaaaaaaaaaaa

SEQ ID NO: 32838 - DNA, 315 bp, Glycine max
  Clone ID: PAT_MRT3847_129657C.1
tacataatctattttcacctgacgatcataacaacactcgtcaggattatattctactcttcgaatcccatcacaactataaaaacaccaccattcatccccagtattctccttctttctctctccttttccaacccttcctcttacttttacctttcttccttcattcctaacctaataccaaatctacatcataacttacactctaagtatctaatcactttcttatctttttgctctaatctattctatattcacgatctactattctatccttaccacttaacctgaccccctatctattaccattaacac

SEQ ID NO: 32839 - DNA, 674 bp, Glycine max
  Clone ID: PAT_MRT3847_129658C.1
ggctaagcgaaaccaaaccaatctttttatctccaccctttttatttgggaataataataataataagcacttcaaggttgtgaagccttgaaggtgcatcaacacttgtgtcaacacaagaatgaggctctctgttttacttctagtgttcctcgcagttctggctgccacaaggcctagccttgtagactgtagggtccttccttcaccaaaaaacacagagaaagcccctcatgagcctctcaaagtgattcgatttctcatcaatttagtgatggcagaaaaggccaacactagtgagggtaatataagcaacagggttttgactgagaacaaattccaaaccatgtcttcagggccaagcagaagaggttcgggtcactagcatcatgtttcagttaatcactatcacttttttttttttgtctctttacacggttggattcacatgatggagagcatctttgtacatgaactatatatatggaaagtgtaacttctgtctataagtatttatgcgttgaatttttagaagaagaaaaagttttttggtggaaaaagatcgaatttggcagtgtatggcaatttgtaagcttgtagtaccataaagattgaagttcttgcattgatagtatatagaagggtgattttagtgagtgttcaaactcccaaa

SEQ ID NO: 32840 - DNA, 835 bp, Glycine max
  Clone ID: PAT_MRT3847_129659C.1
cccacgcgtccgagaattcatttatcatatcttttttaaaatttttatgattaaatttgaataaacttttcaaactctcacactttttggactatttatcgtttctacgtctgtgtgagaaagattgttgtattattacaagtgtgagagataacagcgatggcgaggcgaggcgagactcggaacgagtcgttattgactcgggcggttgcggcggtcttcgccttcgtgagacacgccgagtttgagatcctcttctttcttttctttttcatcgcttatcttctattcaaagacatcacatcaaggcctgactataatcaaatgttcgtaaagaagcccggtggaccagaattttggcctttttagaagagttgggtgcttggtcaggttggatgtctttgtccataggggtattcttagcacaccatgcaatgatttgaggatttccttttgtacttgtatctaaatgtgtaactttataggcaaaacatgtgaaactataaaatatgtacaatgtttcgttccaattagttatagcaaaatcaagtataaaaggtttacagcatttgtttttgtcttgtgcctctgcatctcctttgtttttcatttgatatctcctttcccctagcctgggatggaagtgctgcgacttggatggtcatccacgatctcaaatgtggttttactatgttcctttatccttatcttagactaggtgacatatctgtgttttaagatgttgaaaactgtaatcagaaccttttcagctaaaagcaaaaatcttttggggatggcatttgttgcatggagctaggagtttcacttttttccc

SEQ ID NO: 32841 - DNA, 614 bp, Glycine max
  Clone ID: PAT_MRT3847_12965C.1
gaagctcggaattcggctcgagtggaagctgtgaaacaaaatatcttaaccttagtgtctctgtctctctccagctaaagcttgtagcaacctcagacgcgaatcttccattctgttctgcctgaatgaacagacacacatagtcacattccatttccatgtctgcgtcatgcggggtggtggagtgtgtgttcgtgctgggctgcgcgcggtggctgtggaagcgctgcacctacgtgggcagctacgacagcgccacgtggccctccgccaccgccgacgagttcgacccggtcccacgcgtctgccgcctcatcctcgccaactacgagcccgatctccgtacccccaaccaccgcctcaaccccgactgcatcatcaagcgcgtgacctacgaggacacgctcggccacgcgccgccctacgtaatctacctcgaccacgaccacaaagagatcgtgctcgccgtgcgaggcctcaacctcgccaaagaaagtgactataaaggtctcctcgataaccggttggggcagcagatgtttgatggtggatacgttcatcgtgggttgttgaaatcggcggtgtggctgctcaaccgtgaatcggagacgctt

SEQ ID NO: 32842 - DNA, 299 bp, Glycine max
  unsure (1)..(299): unsure at all n locations
  Clone ID: PAT_MRT3847_129660C.1
ggganccacaccggaagcctaaccctaacggngggatggcagagancntgcgntngatattannggcacgataaggngagggtgcanctntggntntacttcaagatctgcgcgtgcaagagaggngcaccngtgntgcccgggttccagaancaagagngncagttagtcgnancnttgnttctgtcgaacatgtnaccagaggcacngncgtgaacatgaagnngttnttcaccnaccccgntgcagccacaancccaatcncttnaccccgaaaagtanaggatcattcgacgatt

SEQ ID NO: 32843 - DNA, 256 bp, Glycine max
  unsure (1)..(256): unsure at all n locations
  Clone ID: PAT_MRT3847_129661C.1
caaccaacaagaattaaccgcttcttccactgtattgaaaccgtacagcgnacaaacaaaaccaagtagcttaagacaaagtagaagaacaaaaaaaaaacttgcagttaacacttttcaatgaacagaaaaagcagaagagcatatttgttttcagaatcctcgtttgttctacatgcctcatggctttgaatacgatgatacttcaatcatggccttttatgagccttgtttttgttttacttttgccacattt

SEQ ID NO: 32844 - DNA, 342 bp, Glycine max
  unsure (1)..(342): unsure at all n locations
  Clone ID: PAT_MRT3847_129662C.1
ttcataggaagaaacccgaggaggggccatcaacaatacatgaccctcataccactccaccaccaggaaaagaccgaaaggggaaaagcacgcagcacaagggcggctatgggccaactgggccaagagggccccctcctccgcaaggggggcgaacganaagggccagaccccnccgggcaaaaaccccccccaaggggagggcagggggacccacaaacccggcgccaccacaaacagggcaggcgcaccggcgggagaagaagagggggaaggccgaacccaggacagccacagcaaggcccccagcaacagggcacggggggcaacaagaggaaacac

SEQ ID NO: 32845 - DNA, 590 bp, Glycine max
  Clone ID: PAT_MRT3847_129663C.1
gcgtgtgtttttttttttttcgaaccaatcgtatagtccctacccctgagcaatagcccaggttcccatgcttagttacatattacctaaaggcaagtcgacgaatactaatctttagctgcctgaaaacgacgccattggtgcgctcacaaggtcctatgatgcttgtgaaacaaaactaactcctataaaacaggagcagcagaagaaacgcaggtaaaagaacaagaatatatgacattgtcaccagcaagttttttttctcccttaaatcaacccccaagcgaaggctgtccttgagcgctggatctaaaggccttccattggcatacacaatgaacccaatggcccttaccttcttaacatgcacaacattccttccataaaagataaatgtaggcttgagcatgctgtcaaaaactttcttatagtcaagcttgttgaacgcttcccactcaaagagaatgcaagcaccatgtgcatccttcagggcattataagcatgccaaaccacaggcaatatctttattgaaataaggcttggtggttgaagatgtgcaaggtggtccttaccaaacttgctcaaagaa

SEQ ID NO: 32846 - DNA, 621 bp, Glycine max
  Clone ID: PAT_MRT3847_129664C.1
aatactaatcgtgtttttattggaaaaaaacaaaactatctatggaacagtacctatatctttcaccttttgactattattacattcaaatgtatagtaataatacttgtggaacactacctaaatctttcgcctttttggagtattacattcaaatatctaatgatagataaacgggggcactcagaaagctttctgagatccatgccttgatagaacgcacaagtttggttagccatacttggactgctacagcgtgaagtttagagagtggaaagtgaagcaagattctgttctctttccactaactttaaaacactcggattcctgctggcatgcaaacgccactgattccttcatgctctcaggtccacaaaccaaaactccgctattagatccaccgatttcatttcggagcttgccaaatgtatctcaaaaagtctaatgaagcaggtccataaggtccttcgatggcaacaggtattcccttccttgtatccgcagttttgtctagttcagcatgtatcaggtcataaagagaattagcccaccacccttcacatttaattatcacagacaaaatgtggtcatcagccctggaactagatattatactgaaag

SEQ ID NO: 32847 - DNA, 737 bp, Glycine max
  Clone ID: PAT_MRT3847_129665C.1
tacggctgcgagaagacgacagaagggggcctaggaatgttttagaggatcgatttgggattctgacacctttgaatcagaaccgaaccctaatttcccattcactcatccttccctgcaaaattttcttgccagctgtgacagtcagtgacccccaacctttgcacctcggctctccatagtttatgatcattcgtgagatcttcggaggcatttcctggccaaccgtgacacgattgctgctttgctttgttctgtccctgcgttgttctgttttgtgatctcttcaacacagcaaccatcctccaaccttcgataacattttcaaggttggtcgctccatgccactgtttgggattgacaactatgacacagaaattaaagctaaagaacaggctcttaaacagaatattgagctccatgtgcaaaaagctagcaatctatcagataaccatcatgcttctgctgtcaccaaggggcagcttggagtagagtgcccatgctttcccctcatgtggcctcgggataccaataagtttgttggtttttcctatacaaaagcccaggccaaaggtattgagatgaaagaatatggcggcgtccaagttgcacttgaaagatgaggctggtggtttctaccattattgttgctaaatatcctctaagaatgtggtactagatgaggaatttttcctccttacattctatcattcttgaatgaattgtcatgaattccc

SEQ ID NO: 32848 - DNA, 884 bp, Glycine max
  unsure (1)..(884): unsure at all n locations
  Clone ID: PAT_MRT3847_129666C.1
acgagccatggctcgggattcacaggcacctcgtgtcacgcaaatacaggtccgagtggactgcaaagggtgcgtgcagaagataaaaaaaacactaaatggaattcatggtatacatgatcttcgtgttgacctacttcaacaaaagctcacaattattgggtgggcagatccagaacaagttgtcaaagcaattaagaagacaaaaaaaaatgccaccatttgctctagtattgaactaacgtctccatctaaaccaactgaaccagagccaaaagaaaatgcaccagtccctgatgcaacacaaccaccaccagcacgagttccaccacctcaagcaagcccaccatcaaaaccaccgcctcaacggccaccacctgaagcaacaccaccatcgcacatacctacacagcacaagacaagccggcagtggcagaacaacacaggaattgaagaattagaacaggttcatgtgaagcaatactatcatctgcctaacaacgttaacagattcagttctggccgcaaccatgttgaacactggcacagataccataatggccctgtatttctacaagagtcatcccgacccatgtatgtgacacacagctataacacacacgtgccttcgtcaatcgtcactgaatatgaatacgtcagatcaccatccagacaaacacattacaattgtatagaacactacagtggagattaccagaacgacaatgtaaacatcacatccatgttcagcgatgataatcccaatgcatgttgcattgtctagtagtagttagggtttcatgagctttcatatgtcttgataagtgagttgtcgaagacgattcgaaaaactataatttgaagatnnaaaannanaannctta

SEQ ID NO: 32849 - DNA, 567 bp, Glycine max
  Clone ID: PAT_MRT3847_129667C.1
gacctacaaatacaaaatccctctttgatcatcccttgttcgcgaatcgtgttcggtaggacaattgtcttggttccttttgctctctctcttggttggagcaacaaagataacaagtgcggcgaaattgctatggacccatctatcatgaagcttctagaagatgatgaggatgaaacaatgcattcaggggtggatgtggaagctttccaggctgccctaaatagagatataggtggagctgggtctacttcacagttttctggttcagatgcagtgttgtctcaaggaagcaataatatatcaagtcaatctttatcacagtggcctacttctaaccatgacacccaaactgactgtcaaaagcaagaatctaaaactgcacaacagcaagagcaaccttcatctgaggtggaactgaagcagcacggatctcttgcggaacaactacagcatgttgcttctcaggacataaatactcctcatttatcacagaaacaatctcaagatgaatgccaccaagcaccagctggacaaggttcccttcccaattctcaagctatcgga

SEQ ID NO: 32850 - DNA, 193 bp, Glycine max
  unsure (1)..(193): unsure at all n locations
  Clone ID: PAT_MRT3847_129668C.1
ggttcaaacgtgcacttacagaaggaacttatgatgatagtgtaanaggaatgactaagntcaagggacacnattccaaagcactgtacatacctcaaaaattgtatttacaaatagtgtacttgtaaagactctgaacaaggcnatgacaacaatgatacagaaatgagtctataaaananaaannannang

SEQ ID NO: 32851 - DNA, 257 bp, Glycine max
  Clone ID: PAT_MRT3847_129669C.1
tttaaagagttgggtctactaccttgtgagcctttgtgccttctttggaatgactaatagcttagcctataggtcaatggggcaaactaggttcactactaaaatcgcaaggtaaaacatgagaccaccctttttagcagatgggtcacccgaaaacactatccccttggaatagatgtctctggaccactattaagaactatgccatcactcttttctcaggcttggatgatttgccaaaggagggttttatcaac

SEQ ID NO: 32852 - DNA, 653 bp, Glycine max
  Clone ID: PAT_MRT3847_12966C.1
tttaatacaaaagcctttttctattgtctacttccactctgttgcatctttgcagatgcagccagacctgggttgtatgagaagattgcaacaaatacttggtcggaagcaccagcgcaacctgcatgcaatatatgtccttcacccaactttcggactaaaagcagcagtatttggacttcagatgtttgtggacagtgtggtttggaagaaagtggtatatgctgatcgacttctgcagctcttcagatacatacctcgtgaacagttgaccatcccagattttgtgtttcagcatgacttggaagtgaatggagggacgggtctcattgtggatcccagaacaaaatatgtgtacaacagaccatgacacacatgaacttctatcattagttgataaaggaggaccatttactgcagtttttaaattatttgccttgcccttattgtcgctgttaacaggaaaaggggcttgtatgaatttgaaatgtgtatggaagctttctttttttcttttttttttggatttttggaaggagtgataagttcccccgtttgtatatgttattgattgtggaagctaatggttggatttctttaattgtttgtatattcaagggaaatatattgaataaaattagtctttattttaa

SEQ ID NO: 32853 - DNA, 402 bp, Glycine max
  unsure (1)..(402): unsure at all n locations
  Clone ID: PAT_MRT3847_129670C.1
gtagagaccaactatgaactttattattaccaattccatcgtatcaattacaaagtgttaaggtatacagtcagtatatagatagatagacagagagagaaaaaaggacacagggggggggggggggggggganaaaanctcctcctgcaccacgcggttctaagacttgcaaccaaaccctactggatgcggatcgaggcgtgttatacgaccaaacccgtttatatgatacaacaaatttacgacactggccactgataggttcgcaaaagctattggccacaaattaggggaaaaggtcctcagttttcccaacactttgagtgccattgaattgggcctttgcaggcacacagccaaaactattgtggatggagtgacaatatcagccatgggtgaga

SEQ ID NO: 32854 - DNA, 399 bp, Glycine max
  Clone ID: PAT_MRT3847_129671C.1
ttcaaatcctgcgccggtcggtaccttcctttcccatctcaacattcaccgctcgctgtggtttttttttttgctccgtcgaggatttcgtagatttgaattgtaataatgcttacgtgcgtccgtcaagagttgtgtgattctggtgtttgttgcatcgattttagcgagatggaaatgttccgaattcctgtggtttggggaaggagtgtggagataaggttttgaagaggaaaaaaaaatttaggattagaaatattgtgtgaaagtaatctagaccttgaccttctcgctggaatgttagagaggctcaacgattgcgacctggggacttgcgcttatagatccagcaacgtggcgaacgaatgttcggatacctgtagagaggtttccacattt

SEQ ID NO: 32855 - DNA, 471 bp, Glycine max
  Clone ID: PAT_MRT3847_129672C.1
ggagctcaaaccaattgcaacataagcacaagctacaaatacagaaaacaaaaaacaaaaacaaagctaaaaccaaagccaccattatgtctaaaagctcagtttcacaatcatatcaatccaaccaagtaaccagagaaggagataaataaattgaataataataatcaaaggacaaacaacaaacatgtcatagtttttaaaaacaaaaaaaatcatatcaatcaatctgaggggagacagttcgacatggcatggcaatagttggttacctcttaacgagcagtggaatcagccacacctatctttctctctactgatatatacataaaaaatgaatgtttatgcttgaactacagaaaacttcgaccagtttgatgatataactcaaaatagcccttccccattctgcacttgtgcaaactcagaagtccaaccagcaataacaatccacaaatcttaaaatcaatt

SEQ ID NO: 32856 - DNA, 377 bp, Glycine max
  Clone ID: PAT_MRT3847_129673C.1
ctcacggtcacggacaagcgaagagtaaagaaagaagaaatgttggtgaggaagctgaaactgaaagcggttagtggggtccacttgagatggatgagcaccgtgatgtgtttcggagatggcagccagggtgccgttggatccccagtaggtgtgggactagacgcatacgaacccacacctgttaccgctcttccttccgacatcgttagcgtccacgccggacactaccattccctcgccctcacttcccacggccacctctgggcctggggcagaaacaacgaggcccaacttggccgcggcccatcctctagagaatcatggcatgagccagaaagagtgaagggattgttagagaatgtgaacgtgtgtgg

SEQ ID NO: 32857 - DNA, 2117 bp, Glycine max
  Clone ID: PAT_MRT3847_129674C.1
gccatggaggaaatgatcaggctattgcaaacgaatgagcccttgtggatgaaaggtgctgatgggagggatgtccttgatcttgattcctatgagagaatgttccccaaggctaatagtcacttgaagaaccccaatgttcatgttgaagcttctagagattcaggagttgtaattatgaacggcttaactttggttgacatgtttatggacccgaacaagtggatggagctatttcccaccattgtcacaatggctagaacaattgaggttatatcttctggaatgatgggtagccatagtggttctttgcaattgatgtatgaagagttgcaagtactttctccacttgtttctactagagagttctactttctgcgttactgtcagcaaattgaacaaggcttatgggcaatagtagatgtttcatatgatttccctcaagataatcaatttgctcctcaatatcgatcccatcgtcttccttctggtgtctttatccaagatatgcctaatggatattccaaggttacttggattgaacatgtagagattgaagacaaaactccagttcataggctctatagaaaccttatttatagtggcattgcatttggagcacaaagatggctaactacacttcagaggatgtgtgaaaggattgcttgtctaatggtgacaggcaattcaacccgtgatcttggaggagtgattccctctcctgagggcaagaggagcatgatgaaacttgcacaaagaatggtcaccaatttttgtgcaagcattagtgcatcagctggtcatagatggaccacactctctgggagtggcatgaatgagattggagtcagagtcactgtgcataagagctcagaccctggccaacctaatggtgtggtgctaagtgcagccaccaccatttggctccccatccctccacaaactgtgttcaatttctttaaggatgaaaagaaaaggcctcagtgggatgttctttccaatggcaatgctgtgcaagaggttgctcatatagcaaatggtccacaccctggtaactgcatatctgtgcttcgagcattcaactcaagtcaaaacaacatgctgatcctccaggagagctgtgtggactcctcaggttccctagtggtgtactgtccagttgatctgccagccatcaacatagcaatgagtggtgaggacccttcctacatccccctcctcccctcaggcttcaccatttccccggacggccaagctgaccaagacggcggaggagcctcgaccagcacaagcacaggcagcagggtcatggggggtggttctggtcctggttctggtggctcactcatcactgttgcattccaaatcctagtgagtagcttgccatctgccaaactcaacatggagtcggtgaccactgttaatagcctcatcggcaacactgtccaacacattaaggctgctttgaattgtcctagttcctgatgagagaacctgctgcatgcttgtgtgatacttccctttactcactctcttcttccttaaatcaatgcttatcagaaaatggttcagaactgaggctatttgtgctggtgctataatcaatgtgtgggagaagtgtttttgggttagttgggacttcaatgccccctcatcaaggccacaagcctctctttatttactgctccagctgatggtagagctgtattttgcttcaaaaggcttcaactttcattaccttgcacaccaactaccagtttttttttcttttattttaagggtaaggttaagtaaggtgcatctttttttttttctttcccaaaaaaaaaattatggtttgttattttgcatacttttgctttggaacaaggtgtagtagtggccgttgtagtagtagtaatagttgttgtcttagaagagggagtcaagaacgcaccatatatatataatatacttagggggtgcatgtttttcttctctacattgcaagattagctagcactccatgaaaaatgtgtatggttcgggcattgacttcctgtgaagggacttgattattattattattcataatttattgttgttcaccttttgttgtaataaatctatattttatc

SEQ ID NO: 32858 - DNA, 452 bp, Glycine max
  unsure (1)..(452): unsure at all n locations
  Clone ID: PAT_MRT3847_129675C.1
acgagggccaatccatgttgacctgaagtttttggaaccagttgggcgagaacttaagatgcttggaaaggtgaaggcctcttttcctatattatgtttttcaagcttgcaaggaaaaaattgctcttctttaagttgatcttgatgagttatttgcatttgatatcgatgaaatgtggaatagaatggatttacttgcatatttctaaaccaatgcacggcattcaaataacaagttgctactagccaaatatatatgctcttgtcctctgaaaattgaatttaaagttattgcacttgcaccatgtgataacatctacgttgattactgttgggtttatagggggacagagagagagatgggatggaatatgcttgagtgaaatntctttcttatgaagtatacccttgatgcaaaatgtccgtatagttattcttaatttcttaccact

SEQ ID NO: 32859 - DNA, 599 bp, Glycine max
  Clone ID: PAT_MRT3847_129676C.1
cacgcgtttgcccttgcgtgcgcgaaaaaaaaaaaaaaaaaaaagaaaaaaaaaaaaaaaaaaaaaaaaaaaaaaaaaataaaaaaaaaaaaaaaaaaaaaaaaaaataaaaagaaaaaaaaaaaaaaaaataaaaaaaaaaaagggggggccgttttaaagaattcggggttggcttctcgggggaatgcaagtctatcgcctttttttggggccacaaaattttatttttggggcccctttttaaaacctgggggccgggaaaaacccgggggtaccccaaaaaaaccgggttgaaacaaaaaaaatttttcgcggaaggggtaaccatttaaaagggcccgccccgatcgcttttcccaccgcttgggcccctttaaagaaaaagggaaccccccttgggggggggaataacccccgggggggggggtgttaacccccggggggggggttttattggcaagggcccaatccccggttccttggctttattccccctcttttttcgcatgtttccccccttttccccccaaacctttaatttgggcgctccttttatggtccgggtttattctttgggggcccctttacccccaaaa

SEQ ID NO: 32860 - DNA, 549 bp, Glycine max
  Clone ID: PAT_MRT3847_129677C.1
acggtttactccaccgccccgcactttgtaatagagattcatcttcatctcttgtactctatacgcaagccgctcaattacaaaatgtttgattcaacccttgatacatatgtaaaaggcgccgcggttgtgtcgcatttaaacgatcagctcccggatgactgactttttctcccagtctcagcttcagcttcagtcaaacactcaggtcatgaaaaaggtgaggacctgaacaaggcagcatctcaatacaaacattccctttagatgggcagacgtaggtcggccaagatatagaccatgccgggatgagccaccccagtgggacaaaaggccctgtacgacagcgggcaatcaatgtactctgtacagacgctcctccaaaacaggcaaagcatggggcggtgtacccatgctggaacctaatctgagcctgcgagcttttgagcctgtcaagccgtcaggccaccgctcaggttttgcagacttgcgatgaatgagagaaagtggcttagacggtgccctgaggctgtgtcagttatttagact

SEQ ID NO: 32861 - DNA, 325 bp, Glycine max
  Clone ID: PAT_MRT3847_129678C.1
gaatctcttcacagacgattcaattcaatcagatgggtttgtagaacagcatggtggtgctaaatgtgtgtttggtcgccacttttccttgtggggggtactactattgccaacttgaggctgagtaagcctgtactgctcatgaaaagtgctcatcatcaatactcaattgatgatcaatcttcaaatccatgctgtgatcaatgcgcatgcactaattcataccctcgtcaatgtcgctgttcagatatcacgctgacttcttgctattcagcatgcctgtcatgtatgtgcgcattatcctatcctgcacagtgtttttgtg

SEQ ID NO: 32862 - DNA, 1015 bp, Glycine max
  Clone ID: PAT_MRT3847_129679C.1
cccacgcgtccgcccacgcgtccgcggacgcgtgggtatagggtactactaattaaaagacgagaattgatagcaattgtgtgtaatgaaaaataaataaagggaaagggtagtagcggcatattattgcaaggaaaaatccaacgtcaaaatggaagacgacccgtgggagctctgcaacgacgacggcttcgtcttcaagcgcaagcgccgccgcatccactccccctcgccgccctccgttcccgaccaagagccggcggatacgctcctgagagagcggaagaaacaaaccctattgaagctcaaatctaagtacgagaaagagattcttctttgggaaaccttgttgaacaccttgcgctcaatgcaacaacgcaccactcaacaacatccccaaccaaacctatccctatctcttccttctacttcctcgtcctccgattccgccggtagctccctcctccacgacctcctattgcaggtggaggcgcaggaagcaataattcgtgatgtgtcaaatttatgcgacatagcagaaacagtgtgcgttaagagagaagaacagcttaaacaaaccttgtttgatcttccaatctgggcttcgccgctcgaacttatgcaagggttatatgatggtgttgatgattgaagctgctactgcattacatacactcttggttatgaatgtgaagaagcagaaagaaaggaaatgatggtctttacaccgtcaattttaatatttgtaagtgtaaactctgtagtagcacagtgatgtagtgtagattaggcatttggcagcgtggtaaatatttttagattgaattgtgttatcaacagtattaaacgttttaggctgaatgaatgatattgatgaatttaaaaggtggggaggctaagatggaatcatgtggttttgtataaaagttcattaacttctagaatctaatgccattatgtgattgatttcttttgatttcttaaaaaaaaaaaaaaaaaaactcgagactagttc

SEQ ID NO: 32863 - DNA, 306 bp, Glycine max
  Clone ID: PAT_MRT3847_12967C.1
tttgacctataatggaatagattcctttcagcctgttttgcaaggaagatcaaaaccaaaccaaacaaaacctggccgtaaaaaggttggagactacaaaaccggtgggactgacaaataccatggggggttttctgatgggcctagaaaaaagggagagggggcaacgaaggctttctatctcgggaggcccccctttcttcccataagaaccccgggcctcttttttatgatccccgctttaatactccaacctttaaaaccccgtaaaggatgcagatttaacaaaaccccttggcctggcct

SEQ ID NO: 32864 - DNA, 390 bp, Glycine max
  unsure (1)..(390): unsure at all n locations
  Clone ID: PAT_MRT3847_129680C.1
gtgctaggcatcaacgcacacaccatgctgatccagaccgcctccacacagacgtcactcgctttggtcgcacagtgcgctaaattccggtagcggctgctaccacgtacaataactgtttctgttcttcttgaggtacactattccggtctaacatgctatcaatagaactactattaagaactccttttagagctgcgcagagcccacactggatccactggaatccgattcggattgctcctagcaacaagacccgctcttgatcgaaccatgtccctatcttgactccgcgtggaaactgatgctgatcataagatctcantcactctacctncggctgatgatgcacttggcgaggaacctcatggggagttagatcagaaggat

SEQ ID NO: 32865 - DNA, 971 bp, Glycine max
  Clone ID: PAT_MRT3847_129681C.1
ggctcgaggttacacacactctctttcttctgctgcaccagcaacaacagagaatgaacagtactgaggaggggatgcaaggcataggcataggcataggctgcttccaaaacgacgtcgtagggcagctggagctgagtcccactatgagcaactcctcctcctcgctatccatggagctggacgagtccccggagagcagaatccaacggttgatatcggagcacccggtcatcatcttcacccgatcctcctgctgcatgtgccacgtcatgaagaagctcctcgccaccatcggcgtccaccccaccgtcatcgaattggacgaccaggagatcgccgccctccccgacaccagcgccccctcggcctttataggcggcacctgcatcggcggcctcgaatccctggtcggcctgcacgtcaccggccacctgatccccaaactggtccaagtcggcgctctctggcccctatggcagaatttgggtgagtgaacgaatctggtttgactcgccgtatacgggtgggaggtgacacgtgtacaggaatggcatccatgagcagcgggtgatggtaataataacaaggtaaatttggctttggactttccactgagtggattgatattgtccgtagattgggtcccattcacgattattaagcaatcgggaccgtagggtttgtcagtttccttggggaatcctaagcttatctcctcacttgtatgtaaatttattaatttccgggttaaaattatggcactttgtttgaataatgatggcaatctggtttggattgggtgggtgggaccgtaacagcaccaccgtgagggatgagggatgatcttatagcctttttcattttgcttgtcccatctggggttaagtcgttacaaggaacaacacttctcaagacccaaagctgtactactttataaaagatgatagaatcatacaaacatgtttctc

SEQ ID NO: 32866 - DNA, 1498 bp, Glycine max
  Clone ID: PAT_MRT3847_129682C.1
cagccgctctggccgctaattaaggtttattacaatacaatagcatccattgtcggattctttctcctttcccaaaactaactcaaacttctatggaagcactctccttcatccccaaagactcttgctcacttctccttcgccctccttcttcttcctctgtcagaacagcgccgccacttgctttcttcaaaaccacccaacagttaattaaggttcattgggcattggcggattctatttccttttctcaaaacccaatttgcttcttcttcatggaagcactctccttcatcatccccaaagactcttgttctcttctccttcgcactccttcttcatattcctcttcgtctgtcagaactccgccgccgccacttgctttcttcaaaaccacccaacactctcactcgcctcaccttctccgtcttcgcgtttttgccctccctaaccccgacgccgatgaacccaccaacgacttcgctttagcgtctcatcctcaggaaaatttaagccattctgagactgagagttccgaagatgatcaagatgctccaccacaaatggacatgtcgtggtcaacgatcacagccccagctggaagtggatccggtggtggcaccagggctggacttttcagaacacccatttctcgtgccgtgcagagtgccacctggcccgagtgcacactggttggggctagaagtggcttgtccaatgcaagggtaactctttttggggatgtctatccacttccagaagatcaacaggaatgggctcataagcagtatattgcaaaacatcaacagggtccttctcaacagtggggcaacttctactattttaggatgcagaatataagtgacatatatttcattggaggctttggtactgttgcttgggtggatgtaaaggaatatgaaacccttcaacctgataagattgcagttgatggtggtgaacagtatttaaaggaactcaatgctatcttctcaaaacccctaaagaaacttctatctagtgagactgaggtagatgacgctgcactcatatctatagacagcaaaggaactgatattagggtccgtcaaggtgcccagttcaacattcagaggatatcatttgatgaaggacagagtgtagaaacattggaagaagctaaagctgctcttcggaaattaatacacaaaggaaaagtgtacaatttgcagaaataagatgttggatgtcctcttcccctttgactagagtagacaacaagatatggaaccatgcgagtttctaatcggactttagaatggttaattttatacattttgcctggttgacatgcaccagacagtgtattatatccatgcatctgcaagcatatttgctaaagtctgatcgtgagaggactttttgtgggctataccaccatagtcaaactagaaataatatatcagaactcaataaataatagtatgcttctcccccctaaaaaaaaaaaaaaaaaaaa

SEQ ID NO: 32867 - DNA, 406 bp, Glycine max
  unsure (1)..(406): unsure at all n locations
  Clone ID: PAT_MRT3847_129683C.1
tctctaattctgctcgaggatgaattccattcaaacggcgtcatcccaantggagccaattcttctttcattactttaattcctaaaatttgcgggcctcatttcctcgaggagttgggacctatctttctcataantttcctttacaaaataattgctaaattactatcccacaaaattaaaaaggtaattccatctattatatacaaattccaatcccctttcatatctttaatacacctctttcacatcctattcatcaccaatttaattgtaagaatcaaggaagggcaaaaaattatttatgattttcaaaatggattttcaaaaaacttatcacttcctgtcctctaaatttctctcctacatcttacgaaaaacttcttttttcaataaaatgattctc

SEQ ID NO: 32868 - DNA, 2265 bp, Glycine max
  Clone ID: PAT_MRT3847_129684C.1
gcatcagcatcttattctgtttattaatttcttttgctgttgtatattttatagtgcaacaccaccacctctccaggcaggaacattctcacgtggtgtagtgactatgcgttgtgatatatcaacatgtagttctgctcatatatcacttttggggtctggtagtgcagacacttgttttaatgatcaggcatgggtgaatttgctgccagtgtttgacattttacatatatgatcttttaaactttttacttacctatcacttattttgggtatatcctcagcttttggagaatcatattaaaaaagagctgattgagaagagtcaacttgtccaggcatttcctaatcatcaacaaagtaaagcaccttcatccgagcctcgaagatcagcctcagtagcgtgtggatctagtgtgtttgaagtttgtatgcgagttcctgcatgggcttcacaggttaattgttgtttctcaaggtttcgtctgtcggatatagctttctaaaatataatttaatggatcttaaaaattatttttaatcaatgaaagggcctagatggaggcttttgctaaagatatttgtgacttctgctttgccattatattttccagttgactggtttatgtattttagtccaattgttaggcctataacagtagtttgtttactttgttattgttccaattgttctgtttttcacggaagtgacggaacatatgaaaatagcctccacattgtattggcttgatcttttagcaatttcatgctgtaatgacatgacccttgttagttccttttttctttttgaataatgaaaccttatcttttgattaatggtttttgatatttgtgcacaggttctgagacagcttgcacccaatttggcataccgcagccttgttatgttgggaattgctagtattcaggcattgccagttgcatcttttagtaaagatgatgccgagcgccttcttttcttttgtactaggcaggagaaagaaaactgtcctaaggatcatgttttctctggtattccaagttggctgaagcctccaccacccagtcgaaaaagatctgaaccatgctctagttcaaagtctattaatgctagtggccggggagttgaagctattggcagtcatagacagaaatttattgttgcttctatgaggccaatccctcactctaatagacacaagattctccccttttctggattgtctgagggtacaagatatgatggagaccatggaaaatcaaatctaccacttgctcttattaagcataatgtttcaggccctacttcagttacaaataggaaatctgtgtcgaattcatttcaagctcaccagattatttctttgaatccactacctatgaaaaagcatggttgtgacagagctccaatacgagcttgctctgaggaggaattcttgagggatgtaatgcagtttttgatacttcgggggcataatcgtctaattccgcctggtggacttgctgagttcccagatgccattttgaatgcgaaacgccttgacctgttcaacttgtatagggaggtggtttcaagaggaggctttcatgttggaaatggtatcaattggaaagggcaagttttctcaaagatgcgcaatcacactatgacaaatagaatgacaggtgttggcaatacactcaaaagacattatgaaacttatctcttagaatatgaattatctcatgatgacgtagatggagagtgctgcttgatgtgtcacagtagcgcagcaggtgactgggtgaactgcggcatatgtggtgaatgggctcattttggctgtgataggcggcagggacttggagcatttaaggactatgctaaaaccgatgggctggagtacgtttgtccccgctgcagtgcgttaaaattcagcaaaaaatcccaaaaaactgcaaatggtttttaacaactaacacaggtcaaacattgctggcccagagcaaaatgtacattgcaagtgctagatagatttatttacacatccattgtgcttggacccttgtctcaattggtaagggtaggtttctaaggactgtaattgtttcacttatgttaaagctgtagagttttgacatgctatggtcacctcacatctcaaacttgcctattttattttgtcaaaggtactcatacctagtacaaaatgggtgtcgtcttgtcataggtattcattgcaattatcattattattattattattattattattattattatta

SEQ ID NO: 32869 - DNA, 391 bp, Glycine max
  Clone ID: PAT_MRT3847_129685C.1
aaaaaaacaccgtatggggtgttaataggcaacatggctgggtgaaattggcacagggaagtgagagtcactcatcggattgctgtgtgctcgtgctccatagaagcgctctcgagacaatccagttgacttgctgatagttggattcacctaagtcttagacatgtctctttattcaaactgcaggcagtatagaataagtcagaatcttcagaataaagaagatatgctgatgattgaaagagaaacatatatatagtttattaaaactgtaacacaaatacaaggcaaaaaacttgtgagaatgtgagctatcaaggttccactacttttcatgccaatgatttttaatcaggcatcgtggtgtacacgttgcttagacattaatatc

SEQ ID NO: 32870 - DNA, 377 bp, Glycine max
  Clone ID: PAT_MRT3847_129686C.1
ccacgctcgaccgacgcctacctaccgataagacaacacaactttaagagtttatgctcatatttacacctttggtaaacccgttaaactgatatcaacagttttttcattctattattatataataaatttcttctgaatcattacactttacagtgaagatttatacaaacgaagacttcccataaacaaaacaaaacatgcataaactccttttcacttatctctccaacatatgagctctaaatgcaaattgtctttcttaaaacttattctatttataaccatattccgcatttttttaacactcctatactcttcggaagtttacaataccaaccatttatcaaactcttgcactctgaggatattgggtg

SEQ ID NO: 32871 - DNA, 563 bp, Glycine max
  Clone ID: PAT_MRT3847_129687C.1
ggttttcccgaaggttctcatcaaagaataactaatcaaataatttaatcatattctctttgtctttccattggatgtgacaaattctggccaccaaaatccaggaccaatatcattttccccctcttctgcaactgcaaatgtcagatttgccttgccgatacagcttttcatgtaactgtttttgccatcaattctagtatgtccagttgccctccttcgtcactatttgtcctaccacaccatctctagtcaggccaagccccatcacccttgtttgccaccttgatgtggctgtctgcctcccttgggctgtgttctgcttctgcattgtttgatgtgatgtggtatgttctttgtagtaccatcatgagatttgagttattttcagttggcttgggctgttttttttttagatttctgctgtggttatctctggttttttgtgcattgggctttgtttggtcttccagttgcgattatggtgtgttagtcatctttcccattcccactgatgaatcatactagcatgcagtgactactcttcccattaatgatgaagt

SEQ ID NO: 32872 - DNA, 315 bp, Glycine max
  Clone ID: PAT_MRT3847_129688C.1
tttttctctgctcatacttgtgcctattgcgggttaccgagtagttacggcttactaactcccaacattcactcaaaatcatgcgtttcgcttatcggcttaccatcaaatcaaactacgtcatatttccttgattatttccttgtgccgatccgtggaatacctcacaccgtgttcgtgtgtgctgtgaggtttcaagatgaatccttacttgtctgcagcataaataaccttattagagctctcaaacctgcacgtaatgttcttatcacttcaaacgtcgggtagaacactatgccggtcccttttcaaaaa

SEQ ID NO: 32873 - DNA, 320 bp, Glycine max
  unsure (1)..(320): unsure at all n locations
  Clone ID: PAT_MRT3847_129689C.1
gtggatttctgaatgatggnttcagcaatggagtggttattcacactggaccaaagcccttggacaatgcattgtattcgcaatgtgtacttgctatgtgtactttagcaaaggatccttctccacgcattgcaaatcttggtcgctgggtactgtccataataggtattgaacaagtggttgcaaaaccattgaagtttagtggtgttcggactgctgaatctacagcttctccactggctcgttcatcttcttggtttgatatgaatggaggacacttgccactgaccttcagaactcctccagtcagtcctcctcgc

SEQ ID NO: 32874 - DNA, 452 bp, Glycine max
  Clone ID: PAT_MRT3847_12968C.1
ggatcctaacatagttgacactgcaatgacttcaagaaaacgtaaaagagaagagtgtaggaagataatcttattagctgctgcttgtgttgttcatatgatcattggtgtagtgacatgatatcataataattattttgttaaggaaccaacccgtaattgggaactagaacgtcacaacttccttaatcgtctttatagaggaacaaataaagattgcattgaacaattgaggcttagtaaaaatgcattttttaacctttgtagaattttacaagaaaagggtggattagtaagaacaagaaatgttccaacaactgaagcagtagcaatgtttttacatatccttgctcacaacctaaagtatagggtagtgcaatttagttattgtagatctaaagaaaccataagtaggaaattcaatgatgtcttgagagcggtaatgaaagtga

SEQ ID NO: 32875 - DNA, 116 bp, Glycine max
  Clone ID: PAT_MRT3847_129690C.1
ggctcgagcgcagaccctgcttccatttgtttattttctactcgcaccgcaagataaggactgtgaggtttggcgtcaccctcggcataataaaattggtgcgactaccattcttg

SEQ ID NO: 32876 - DNA, 533 bp, Glycine max
  Clone ID: PAT_MRT3847_129691C.1
attatcttttttttttttttttttttttttttttttttttttttttttttttttagttttttgaattttgtttatttgatgaaaaaaacgctttggtgttgacgggggaatacatgcgtgccattttgaattttttatacgtgcgaacaaaaccggaaaaaaggggaccacaaattttttttttaggaggaaaaaaaagggcccaccgccaaaatgggggggggggctgcccccccccccccaccactggggcagcaagacagttcccccacccccacaggttgcaaacatcaaaacatgcagggtataaacgtctatacacgtttggccaaactgcattgaaacctgcataaaggagcgggggtttaaagcacatcaaggcgctgtgcgcaagtatagctcagcactttgcacaagataaagccaaaaaaacatgggcaaaagagctgcaagaaaaaatgggcttaagatacaaccttacatgttcctaaaggaacaaaccgggccttatcataggcaagatcaacagggcc

SEQ ID NO: 32877 - DNA, 207 bp, Glycine max
  unsure (1)..(207): unsure at all n locations
  Clone ID: PAT_MRT3847_129692C.1
cttntttntntactcttgcaaaccctanttntcatttnttcccngcaaatttcaaagtgcgtganatcnttcacntccagggtggccaatacagcaaccagatcggcgccaanttctgggaggtggnngcgcagagcacgggntngaccctacnggaangtacggtggggactcggagtgcagctcgagangntcaatgtctactnc

SEQ ID NO: 32878 - DNA, 1319 bp, Glycine max
  Clone ID: PAT_MRT3847_129693C.1
gctcctggtgcgtgacctgctcacggcctgctggaaggcatggatgtttgtgttaaaattataaaaaacaacaaggacttttttgaccaaagtcttgacgggttgaagcttcttaagtatgtcaataagcatgatccttcagacaagtaccaccttctaagattgtatgattacttctattatagagaacatttgttaatagtatgtgaactacttaaagccaacttatatgagtttcacaaatttaatcgagaatcagggggtgaagtgtatttcacgatgccaaggttgcagtcaattaccattcagtgtttggaagcacttcagtttttgcacagtcttggactaatacattgtgacttgaagccggagaatattttggttaagagctatagcagatgtgaggttaaggtcattgatctcggaagtagctgttttgagacagatcacctttgctcgtatgttcagtccaggtcctatcgtgctcctgaggttattttggggcttccatatgacaagaagattgacatctggtcacttggatgcatcttggcagaactttgtactggcaatgttctcttccaaaatgattcccctgcgacattacttgctcgggtgattgggatcattggcccaattgatcaaggtttgcttgctaaaggacgggatacatataagtacttcacaaaaaatcatatgctttatgaacggaatcaggaaagcaacaggttagaatacctgattcctaaaaagacatcattgaggtatagattaccgatgggggaccaaggcttcatcgactttgttgctcatttgcttgaggttaactcgaagaagcggccttctgcatccgaggcgctgaagcacccatggttgtcatacccttatgagccaatatcatcttgaagtatttggaggttttttttctcttggtgatagtgtcaatatttaccctaagctgggtaagttaaatcgttgaaagggaaaggcacctccatacatggttgccgcttttcattatctattttagagatgatatggaaagaggagttgtgcactttcacattcctgcatgatgatgcattgaaaggagtttggtttttattggtaatacttgtctttcccatcaatgatgtaatttagcatgtaagatgtaatgttatgttgttgatttctttgctttgtttggtcttttgttgaaaagggaatccttgaaatattgcttgtacatgatgtgggataattcatttagtcttcagtagtatttttagcatgtttggttacccgttgcatttcgcacagttgaaggagtttgagat

SEQ ID NO: 32879 - DNA, 344 bp, Glycine max
  Clone ID: PAT_MRT3847_129694C.1
cacaaatgctgaatttaacatttccttagagctttgaaaactcatgtttgcgtacaaatgttatggctttgaacatgacttgccaacggcaaaacaaccattttgtatgattagcaagcaaaataaaagtcactactcacaactctaaatgaaaatttgagtactgaatagcataattaacaaatagtttcaaaattataaaaagaattcaaaaatacaaaaaagatgcatgatgaatgtcacaatgtgccataaacccggactacctcttctttatctctaacgaatatttgagttccatgtgacaccttctgtcatcatcttcaaacttaatcttagcagag

SEQ ID NO: 32880 - DNA, 450 bp, Glycine max
  Clone ID: PAT_MRT3847_129695C.1
gccagcaaacggaaaagtctttgtgatcttttttctacagattgtacaaaaacaggggctcaagatagaatcgccactaataataataatgtgaaaatgaaaattctcaataattaaacaaagtgaaaaaaaaaaaacaaaaacatattacaagtcgaagaggctgaacaggttcggcgacggctgcggggacgccacggtgacggaaagaaaccccgacggactcgccaagaagctgctcgccgaccaatacgacggtgaaaagtcgttccaatacgacgccgccgtttgcgcctctctcaccggcgaaaatacctccgccggaatcggcggcaaggttcccggctccggcgtcagtatccccggaaattgacctacttccactccctcccccaacatccacgcgatgttgtcgtctatgttgtgcaaaaccctttctctttctctctc

SEQ ID NO: 32881 - DNA, 219 bp, Glycine max
  Clone ID: PAT_MRT3847_129696C.1
tccacgcgtccggaaactagcaaggctaatgagattgagtgggaacacaaaagggggggggaacgtctaaggagccgcgagaggtataaaagggatgcacaaaaagataggatcacagaaagataggaggatggggacaggagacattgataatgaaagagatcggctctgatatacagtgtttgagaggcttaggagatgaaaaaaggcaagagatag

SEQ ID NO: 32882 - DNA, 420 bp, Glycine max
  Clone ID: PAT_MRT3847_129697C.1
gctcatatgacacgttctcgtattatacattagttaaatttttgtgcaacttgaatgataagaaatatctgaattttgtaatttcatttattcataggagggtctcattgccttcaagacattctccattaggaaacataagaaattgtttttttatatcctattatattaaagtgttgtaaattctatttgtagtcgtgttgggagaagaatatccaccttgtgtgtggtcacagtcctcaatgaagattagtcatcgcttttggtggaggctacttcatactaataccatggtcagcaaaaaaaaaatcaatctgaagtctggaatggtccatctcaaacacaagtttatatatagaattatagaaaagagtactaaatttggaaatgtttttttctcaaaaagaaaaataccggacc

SEQ ID NO: 32883 - DNA, 571 bp, Glycine max
  Clone ID: PAT_MRT3847_129698C.1
gcttcgttttctaatctggaatataaatcagtgatgggaaccaaggccctaccaacaatataggtgaaagctcatctttaaaactgcaagcaggcagctgtgttgcatagacatggatacgagtacgaagcatgacaatcttaaaaaattggtaaaattgtaaatttggtccctcattttattttcaatttcagattttgttcctccgataaaattatttacgaattttgttctcgtatttaatcaaatcacgcaatgttgtccatgtggactgttacaaaataatgttgacggtcacgtgtcatgttgtgacatccaactaatcagaacataacacgtgacaatcatcatctaataaaaacgtgacacattcatttgtaacaagtccaattgtgggttgaaggaccaacattgcgtgatttgatgaaatacaaagataaaattcgttaataatttgagcggaggacaaaattcgaaattgaaaacaaaatgaaagatcaaaaatacaattttacctaaaaaattaaaggtaccaactacgaatatactaatataatttttaaaacatcaa

SEQ ID NO: 32884 - DNA, 450 bp, Glycine max
  Clone ID: PAT_MRT3847_129699C.1
aaaataattcgcattttaccccaacaaaagcccggaacagatctaacatgaaatcataaagcataggatacgatattatttttattccttttaccctcttccctacaggggtgaaaaccaaccgccaatactttggggtgaaaacagaatggtgaaaaatttgggggggaattacccaacattccttttttttttacatggaacagctaaaacgagctccgcaaattcctttacccctttaaaaacgaggggatctggttcaactggaccatggcaccacctttggtgggggggacccgagagaggccctttttttgggaagcaggggggaaagtccctgccaccaaaaaataattaagtctcgaggaaaccctggtttatcatcatattaacatacaggggcgggtgtggggagttccagaactcatgataaatcaaagggtccccggc

SEQ ID NO: 32885 - DNA, 363 bp, Glycine max
  unsure (1)..(363): unsure at all n locations
  Clone ID: PAT_MRT3847_12969C.1
gttgcattctaaaaatatataaaaaaaaattaactgttccatattgatcaagaattagtcaaagataatatacattcattccaacaaatgcatgttttgattcttttccctttttgacatttgtaacacttttttcctatttcgtgttttaaaaattgaaaaagaagccttcttaattggtagctaggtatacaataattaatatataagatatataattagaaagaaactattattaattagcaacgttatctcatttattttttaatctagaaatcactttcatataataggtattgtcactttccttaatttgtagttctattataataacaaataattagggatcattatccatttcan

SEQ ID NO: 32886 - DNA, 489 bp, Glycine max
  unsure (1)..(489): unsure at all n locations
  Clone ID: PAT_MRT3847_1296C.1
cccaggcgtccgaactgtgcctatgcaccaactgactctttggtgtgaccgaacaccgcgaaaccgggctattaaaagaatgcgcctgagcgacggtccccggcgaatataaggacggagcttnacaaaatgttgatcggcattctatcccaagtccatactgtgccagacaagcgcaagcagagctgatcagttacttccacgacctacgagcatccatacgggagaccaagttctccagtgtctaactcgctgcactgcgcagatcgcaacttcaccgactgtcggagatgctacgatctccagtggagctctgccataagggggtatactcaacccgatggcacgcctaccgaaaactagatctcggcaagatattgggcgggctcgaccagaacgtatactaattactggtgctgcccttgcaggcgcacctatggggcgacatacaccacactccggtcgagatgagcgagcatcaccaccgac

SEQ ID NO: 32887 - DNA, 254 bp, Glycine max
  unsure (1)..(254): unsure at all n locations
  Clone ID: PAT_MRT3847_129700C.1
gagntcgtaagangnnagngngaggaancancncagaatggagagagnancncgnnaaggagaganttacgcattggcaaggagttgctggaagcaaagcggattgaagaagagaatgaganganacgtttgttggccttgaaaaaagtagaganagaggangagaaaagggctanggagannatcangaaanagttggaagaagacncggncagacagaaggcggagacttggattgcctccagaggaaccct

SEQ ID NO: 32888 - DNA, 279 bp, Glycine max
  unsure (1)..(279): unsure at all n locations
  Clone ID: PAT_MRT3847_129701C.1
atctttcacaggttgcnggattnagnactactattcactaatataccatgaaaacttaaggtntncnncnanatgaccatngggcggtncaaccttgccggccggattcgtgatagganctctacgccgacgtgatccgaacaacgncgagaacttccgggngtttncaacggnganaaaggncccggcccgaaggcaaagcccttcaatnnaaagggtcgtccttncaccggggngatcccanatttnaangtnncgngganggcgattnaccncaaa

SEQ ID NO: 32889 - DNA, 415 bp, Glycine max
  Clone ID: PAT_MRT3847_129702C.1
gcgcctttgatatggataagagtgcctgaattggagatcttgcacctgtgggtcgctacgctttgctacctgctgtactgggttgatttgcgttggacgtaaaccgggttagacgaatgtgaacactacttgatttgattaattactctggaatacatgagaagctctcagatctagatgaaatcgatcagactgtgagggggagtacggatttctaataaaaaatcgaccttttgctgataataggttcggtgattagaggagttccgaaaatattgtgaagtatacatgctagctaccgttattttaggcatcacatctattactgactggcgttggaaattatgtattgagagtctgtctgatactaaatataaacacctcaataggggctctaacactgctgttatcattt

SEQ ID NO: 32890 - DNA, 336 bp, Glycine max
  Clone ID: PAT_MRT3847_129703C.1
cacgcggctggcgatgaccgcgtacgacacgctctggtcggcatttctgcagggtatggaaaaagtaccccattgccaacgaggacggcctatatgacacgtgttatgaatttcaatcgggtatagaggagatttcaattccgaaaatagattaagaatttgccgatggcatcacggtggaattgccattggcggggatattctatgtgataagagcgcaacaagcgtataagtcttttgctgcaaatgggaatgagaatgatattacgatatttgcgaatgtgcaacagaaaacactagagatcgtgtatgatgttgagggtcgaaggatatggt

SEQ ID NO: 32891 - DNA, 367 bp, Glycine max
  Clone ID: PAT_MRT3847_129704C.1
acagaaggggatcaattcaaaatatatcatcaattaggagcgggcgtttttggaacacatcgaatgctttctcttgcctcttttacaagtttggtgatgaccaaaataatctggtcttccaaggtgatgccacgttttcttccaggggcatagaactcacaaagttagacggtggaggaaaaccattgggtggcattgtggggagatgtttatactcttctccattgcacctttgggtaagctctacaggggtcgcaagcttttaaacctacttcacctttttcatctcatcatactctactacttcaatgtatgggctttccttttttcattgcaccatttgacacttaaatctcctccaaacttt

SEQ ID NO: 32892 - DNA, 351 bp, Glycine max
  Clone ID: PAT_MRT3847_129705C.1
gccttcatgaggaggttcggccacacattatccatagagacataaaagcaagcaatggtactacgttgatagaagactctccagcaccaaaatttcacgattttggcacttgcaaagacttattccaccaacacctgacccatattagtacctcgtgttgctggaacagttgggtatctagcacctgaatatgcaatccgaaatcaagtgactagaaaatcagatgtctatagttttggagttctactattagagattgttagtaggaggcctaacacaaacagacgtttgcctgtggaagaacagtatcttctcacaagggcttgggatttgtatgagagtggggaggca

SEQ ID NO: 32893 - DNA, 431 bp, Glycine max
  Clone ID: PAT_MRT3847_129706C.1
cattccgttccaagaaggtttcccgtcatcactgtatgacgtcctccttctttgggggggggggggggggggggggggtaggggggggggtggggggggagggtgagggcggggaggggggtaggagggtggggggggaaatagttttaagatacccctggatcgcattttaagaggcgaaactttgagcatttgggtaaggcccaaatttaaaagtaaaggtaagccattccacaagtaaaatcatgcaaagcccaaaaattccccctaatttaaagggaagactatgcccacataattttggggtattaaccccctgaaaaatcaaaaccttatcctaaagcttttggaataaaaacccctttaattgaaaccctaaacccaatttttttgggaaccctttagaaaatttcacccgcccccccagtttt

SEQ ID NO: 32894 - DNA, 2021 bp, Glycine max
  Clone ID: PAT_MRT3847_129707C.1
agacgccccagatcagattctctctcttttattcaacttcaagccaagccaagtccggcgttagtcccagcactgatgctccaggctagaacatagctctcggaaaatctatatttgtagactctgacccagttagatcagctcctctgccatgatgtgaagttattgcttattagtcatctacacagttttacaaagctgcttcatctgtatatgataacaaatcagattcaggattcgttatcaccaagatccaacaacttctcaaccacaacgagttgctatttccttcgattcacgaacccagaaaattaaagaattaaaaaagatatcgagtatcaaaaacggcatctggaaaacatgtctcaacaccatggtgatgaaatggagtatgcggcagatgataatgaaatggcagaggtagaagaggatatgtatttccgtggcagagcatttggtgaatcagattcagatgatgacgacgacaacgaatatgactctttggaaaaccggatgtcagatacctctgctgctgaagctaggaagggaaaggatatccaaggtattccttgggataggcttagcattagtcgtgagaaatatagacaaactagactagaccagtacaagaattatgaaaacataccacaatcaggcgaacagtcagagaaggaatgcacagcaacacataaaggagggaagtattatgatttctggcaaaacactcgatctgtgaaatcaacaatacttcatttccaattgaggaacttggtttgggcaacatcaaagcatgatgtatatcttgtttcgagttactcaattatacactggtcgtctttaaattccaagagatctgaaatcctgaatgtatcagggcatgtagctccatgtgagaaacatcctggaagccttttggaaggatttactcagacacagattagtacactggctgtgcgggataagttgttgattgctggggggtttcaaggagaacttatttgcaagtacgtagatcgacctggtgttagcttttgttctagaactacttatgatgacaatgcaataacaaatgctgttgagatttatgatcacccaagtggagctgttcatttcatggcttcaaataatgactgtggagttagagactttgacatggaaagatttcagctttccaagcatttctccttctcttggccagtaaatcatacttcattgagccctgatgggaaactggttgtgattgttggagacaacccagaagggatactagtggattctcaaactggaaagactatcaaacctttatcgtggacacttggattactcatttgcatctgcatggcatcctgatggccgcatttttgctactgggaaccaagacaaaacatgtcgtgtttgggatgttaggaacttgtcaaaatctgttgctgttcttaaaggcaatcttggagctatacgttcaatacgttttacatctgatggacggttcatggcaatggccgagccagctgactttgtgcatgtatatgatgcacagagtgggtttgagaaggagcaggagatcgatttttttggggagatctctggtgtatcttttagccctgacacagaatcactttttattggtgtctgggatcgcacctatggaagccttcttcagtacaatcgacggagaaactatatgtatcttgactgcatgtaaatttgtaactgcataccttgtgtttgtaaagtgcctacagtttatgttcttctgtctaggaatttgagaattgtggcaccacctgactgagaagaaaaatgaccggtggcatgcttcatcatacaatgtaggatgatatggtcgttacataaacttcgtcgtgttaaataacattgattgccaatgtctggaaccttttttttattattatctttccgaaggtaataatgtgaaggatgtttgtaaaaaggtctataatgcaatgctttaccctcaaaattaaaaaaaaaaaactcgagactagttctctctctctctc

SEQ ID NO: 32895 - DNA, 1074 bp, Glycine max
  Clone ID: PAT_MRT3847_129708C.1
ggatgctacagttgtttgatgtacaccttcatgctaaataacattgactgccaatgtctgttttaatctttccgaaggtaataatgtgaaggatgtttgtacagaggtctaaaaaaaaaaaaaaaaaaaaaaaaaaaaaaaaaaaaaaaaaaaaaaaaaaaaaaaaaaaaaaaaaaaaaaaaaaaaaaaaaaaaggggggggccgttttaaagaatccaactttacttccccgggcttgcaaggcaatagtttttttatagggcccccaaaattaaatcccttggccggggtttaacaccgtcggaatgggaaaaaccttggcgtacccaaattaaatcgctttgaagaaaatcccctttttcccagttggggaaataccaaacgtcccgacgccccagatcagatcctctctcttcaattcaacttcaagccaagccaagcaacatggctcaacaacaggaggacgaaatggagtatgttgctgatgataatgaaatggcggaagtagaagatgacatgtatttccgtggtagagtgtttggtgattcagagtccgaatcagatgacgatgatgaatatgactccatggaaaatcggatgacagatacctctgctgcagaagccaggaaaggaaaggatatccaaggtattccttgggatagacttagcattagtcgtgagaagtatagacaaactagactagagcagtacaagaactatgaaaatataccgcaatcaggcgaacagtcagaaaaggaatgcacaccaacacatagaggaggaaagtattatgatttctggcaaaacactcgatctgtgaaatcaacaatacttcatttccaattgaggaacttggtttgggcaacatcaaagcatgatgcatatcttgtttcgagttactcaattatacactggtcgtctttaaattccaagagatcagaaatcctgaatgtatcagggcatgtagctccatgtgagaaacatcctggaagccttttggaaggatttactcagacacagattagtacactggctgtgcggaataaagttgtgattgctgggggttttcaagg

SEQ ID NO: 32896 - DNA, 788 bp, Glycine max
  Clone ID: PAT_MRT3847_129709C.1
tacggctgcgagaaaacgacagaagggggaagaaaaaaaggaaaaaagaaaaaatcttacgccctaatctgtgtccgattttatcaatcacagactcaaaggtgtgcagttattattattattatctacatatttttgcaaagctgcttcatctgtattattacgcagatcagattcaggtccttatcaccaagatccaacaacttctcaaccacaacgagttgctatttccttcgattcacgaacccagaaaattaaagaattaaaaaagatatcgagtatcaaaaacggcatctggaaaacatgtctcaataccatggtgatgaaatggagtatgcggcagacgataatgaaatggcagaggtagaagaggatatgtatttccgtggcagagcatttggtgaatcagattcagatgatgacgacgactacgaatatgaccctttggtttgttttgactcataagcaaaaccttgtttgctcattttaactgtgaaaattcaatgttgtgtgtgggctcatgtgtccatgtattatttgcatatgtagttgctgccttctggttttatgggcaactttagcttacatgattaattttactacaacgttgccattaacataatatttccattttcttgcacttttcttgggatggctttgggttccctgttgcaggaaaaccgaatatcagataccactgctgctgaagctaggagggggaaggatatccaaggtataccttgggatagggtgagcattagtcgtgagaatatagacaaactagacta

SEQ ID NO: 32897 - DNA, 303 bp, Glycine max
  unsure (1)..(303): unsure at all n locations
  Clone ID: PAT_MRT3847_12970C.1
ngttnatgcanncgtanganagctcggaattcggntcgaggantnccntaattcttgcttgnntttncgcntncgctagancntcttcaaaatncnctacaagatctaagagatncaaggatcgntcaacgccttncaagctcngtttcntcgnntgatcnatntagtctgcagatttgaaggaganagcgtnncttatcgagacnggntcgtactcgaaggnagttcgtagaatngctcgngntgttcgnnttacnattgagttgaggcggaaattgacgcatccgctatctctncttttca

SEQ ID NO: 32898 - DNA, 1191 bp, Glycine max
  Clone ID: PAT_MRT3847_129710C.1
tttttttttttttttttttttttttttttttttttttttttttttttttttttttttttttttttttttttttttttttttttttttttttttttttttttttttttttttttcaaatggggccttcgataagtgtttatattactgtatccctagtcaagttcaataacttaaatttctaactcgtacatgtaggaaatcaataatccattaaaaatcaacggtcacctgtattgaaagtcaaataattcttaacacaaaaaacagttgtaacatcttaggtgcttgtactcattaatgctgcaaaacatcaccaaattaaggtgttagcccccagcttatttggaaattgcatgtctgcctccaaacttttgttgtttccgtgatcacgcctcaataggttctttgtttcccaaacttgttggaactattttacatatgggcatgctttcattcttactcagaagcttcaaggatggatgaacctcgatatcacgcatgaatattctatcttcaatatctagattgctcacatccacaacaatttttgaaggaatgtgctcagatggacagagaaattttagactaggtctgatcttattcaaaattcctcctttctgaacaccaggacaggcatcttccccttcgaaaacaacaggcacatccaccttcaatttcattccatcctcagcccaaacaaacaccaaattcaaaatcttcccactctcttcatccctatgaatcttgataggtaaaacggttcccgattcgagcaaatgcgaggatccggaaccggcgcggatctggagagggaagcgcgtggaacagaagaaaggcgcgtcggcggagtcgagaatggccttaatctgcttcttctcgacggtgagcaagtgcttcttcgattccgaacgcgcgtcggggtttttttccagaaggttctggaggaaaacgacgcaaggtattcgaccttgcgttcggtctctcgccgagactttgctgccgctgcactcccttgggatggcttggatcgtgtgataagtgctgcgctggaatcccgacaaggaaccacggcccgccgccaccgttcgaaggtggccggcggcggagcgccaccactgcgccgccatgattgttttagcctgtccctccctgtaacgcgaagtgggggttgagcgttacggacgcgtggat

SEQ ID NO: 32899 - DNA, 233 bp, Glycine max
  Clone ID: PAT_MRT3847_129711C.1
gcccttttgtcaacacttttatcacattccacacatgaacatatatagcgcacgtatgggttctaaccatagtattgggattccccatcgaaatgcgctcgaattagctttggcttcaagattggggatactatataacataaactcacgcctgatgtctgtacatcagtaactccttagttcttgagtgtgtgggatgggaatgccccgaagaggtgcaatcgaatttccgc

SEQ ID NO: 32900 - DNA, 363 bp, Glycine max
  Clone ID: PAT_MRT3847_129712C.1
aaaaatgggcaaccggtcaacccttccaaaatgccaaatttacaaaagggcgggcaaaaagacacgcattttttttataacacccacaatcggggggggctaaaaaagcttgctggcatcccaaaatggaaaagaaaaaaaaattttttgggggggggcctaagaaatctaggggggccccccgcaggttaaggccaggaccgtttttaaaaaccctttggggggattggccctctcgagggtcagggggggggatttcataccagaaaaaaaaaggttggtaccctgggaaaatggccccacctgggtctagggaaggggtggccctctccccagggggttatcccccccgtaaaaccccgg

SEQ ID NO: 32901 - DNA, 815 bp, Glycine max
  Clone ID: PAT_MRT3847_129713C.1
atcttgaattatatgcagctaaactagcaacaattaatgagtgcgacaaaaatgcggttttgcaaaatcagttgcaattgttagtaaaggaaaaatctgctttagaaagagagctagttgcaatggatgaagtgcgaaaggaaaatgctctattaaagggttcattggatgcttttgaaaagaagagcaccgctttggagctcgagcttgtgaatgctcggaaagaccatgataaaaccattcagaaaatgagggagtttgaagataagtgttctgaacttgggcaaaatgtcaaaagtcttgaggaaaagctctcaattttagaggatgaaaatcacgtgcttcgtcagaaagccttaagtgtctctcctaagagtaaccatcggggtttgacaaagtcattatccgaaaaatactcaagtgcgatagccccccgcaccgagcaaaagcccacatttgaatcacccacacctacaaaacttattccccatattacacgtggcggcttgtcagactctcatcgatcaaaattaacagcagataggcaccaggataactatgaactcctctctaggtgcaccaaagaggattcggggctcaaaaatggtaaacctccggcagctagtatcatatacaaatgtcttcatcattggcatgcatttgaatccgagcggacagccatatttgattacatagttgatggaattaatgacgtcactaaggctggagacgatgacattgtcttgccacagtggctgcccaatacatctgcacttctatgccccttgcaaaggaacctgcaatcaaatggttct

SEQ ID NO: 32902 - DNA, 381 bp, Glycine max
  unsure (1)..(381): unsure at all n locations
  Clone ID: PAT_MRT3847_129714C.1
ccaggaggcaccttcaacatgaccgagcaatcagcgtggggagagccagtgaataatggatggatcgacattcagaagaggacattcacgaaatggtgcaacagccatctggcggagaaaatgctgaagatcggtgtgctggacaaggatttggaagatggtgtccttctctgctcacttcttgaagttatatcatccaagaatgtcggaatgatcaacaagaaagccaagatccgtgctcagaaactggagaacacaggcgccgcgctcaagttcttgaaggaggagggtatcaaattggtggctatcggtcctgaagatatcaccgacggaaatctgaagctgattttgggacttatttggaccatnttnttggctact

SEQ ID NO: 32903 - DNA, 452 bp, Glycine max
  Clone ID: PAT_MRT3847_129715C.1
aggcgtgcgaacacgtccgagaggaccacacaagggaagtgttgttacggggtgagttgtaaaatgaggggaattgtgctttggttagcttgttatacttatgttatatatatgtgcttttgaatatctatgcatgtttaggaatgtgatatacttactccatgtgtgatgtttgtgtttggatcctatgatgatatcggaccttgttttcatgagatcaaatgatgagatatatgactataaacaaccttatgctaaatgacgattaacactatactctgatatgatatgacattagagcttatgatttgacattgattttatcatttgctattataacatatgtcaatgaacatgatttatttatatatatctcattgaaatttcaattgtaatactagcaagtttcacctcttgaaggtctcaaagaagttgttaccctttcgtacatg

SEQ ID NO: 32904 - DNA, 328 bp, Glycine max
  Clone ID: PAT_MRT3847_129716C.1
cccagacgcaaaaactcagctttgctcttgcgtctggatctcaaatcatgttcttatactattggatctatggccttctagctttcctcggtctatggcatacagaagccaaaatcctctttctgggtctcgataatgcaaggaagaccatacttcttcacatgctcaaagacgagagattagatcagtaccagccgacccaacacgactacttcggaggaattgatcattgtgaagatcaagtttaaggctgacgatttgaaggtgccatacagttgcctgtagagcctctaaagactattacgcacaggttgatgcagcattttac

SEQ ID NO: 32905 - DNA, 389 bp, Glycine max
  Clone ID: PAT_MRT3847_129717C.1
agacccaaaatatgtttctattaattcttcaaaaattgttactaaattagcacttaaaatattatatttggttaacaaaggattagagcatgacacataactgttaatttggtgttatccaaagaattaaatttgataacagaatctttaacagacggtgatgttttagattttcatagaactgattagattattaatttttttttaaagactaaaatagtgtgggatgtaattgaaatatagaaggccaacctactatagcatttactcattatcagtagtactcttgaattttcagctcctccacaacatggtctatgagtatttggaatcatcacatcatctattgtgggaccagctttcatctttggcatggcaattgcatgcta

SEQ ID NO: 32906 - DNA, 473 bp, Glycine max
  Clone ID: PAT_MRT3847_129718C.1
gctttttatgtaacgatcaggacaagccaatgctattagaatttctgaatcttgcatcaaataatttgtcaggagagatacctgattgctggatgaattggacatctcttgtggatgtaaatttacaaagcaaccattttgttgggaacttaccccaatccatgggttccttagcagagctgcagtctttacaaattcgtaacaacacactctctggaatatttccaaccagtttgaagaagaataaccaattgatatccttggaccttggggaaaataatctttcaggaactattccaacatgggttggagaaaacctcttaaatgtgaaaatcctccgccttcgatcaaacagttttgccggccacattccaaatgaaatatgtcagatgagtcatcttcaggttttagaccttgcacaaaacaatctgtctggcaatataccgagctgtttcagtaacttgagtgccatg

SEQ ID NO: 32907 - DNA, 911 bp, Glycine max
  Clone ID: PAT_MRT3847_129719C.1
gaccacgctcaaaacctagttacttcttcagtgtgcgtaccctcctcaacactaaaccctctctgtgtccctctccgttaaacccttgacggcgttcggacctgcttcgacggtggcggcaccatggttctcactaccgagggcgcgacgaactccgtcgaggcggtggcgttcagcttcctaaccgacgacgagatacggcggagcagccgcgtgaagataacgagtcccattctcgtcgattttttgctgcaccccgtgcctgatggactatacgacgccgctttgggccctttcgatgacaagtctctttgtaagtcgtgtggtcaaacttctaaacattgcccaggtcattttggtcatattgagctcgtttcccctgtctacaaccctctgatgttcaatattcttagcaatattctgcaaagaacttgtttcacttgccatcattttcgggcccccagcaaagaggttgatattcgtacatcccaattggagctcataatgaaaggggatattatcagggcaaaacgtttggaatctattatccctggaaaaagtgtggattcttttaatccagatgaattcatacatccaggtgatggagatgagagccagtgttatagtgctgagcaactgggagaaaattggacctcccttcaatttagtgaggcaatgtctgttctaaggaaattgctgacgaaaaaacataagaaatgtcaaaaatgtggagctaagaatcctaaaatcagcaaaccgacctttggatggtttcatatgaatgttctctcagctgatgaaactagagcagataccattagatctgtggaaagtgaaacaaccaatgatgatatatctttaggtggtggggatactacagacgtagaagatattacctctgcagggactgc

SEQ ID NO: 32908 - DNA, 284 bp, Glycine max
  unsure (1)..(284): unsure at all n locations
  Clone ID: PAT_MRT3847_12971C.1
gagccgaancggcncgagnacggcggcgagaagacgacttttgggagccttanctttataagaatcatggggtattatgaaatggtgtgaggggatacttactataaatgctcttcaatcattgttatttctatcaacagcagcatctgttagtgggttgaaaacgattgagaggaactttgctacaagcatggataccggctcagactatggagcattcacaaagatactccctttaccaccatattctgctccagctttttcctcttacattactttccttt

SEQ ID NO: 32909 - DNA, 594 bp, Glycine max
  unsure (1)..(594): unsure at all n locations
  Clone ID: PAT_MRT3847_129720C.1
cctttagcaaaatattttcttttatattgcttctaacaagtggtgtttctgttcttggcttaataggatctgtttattataggtgcaagtaatagaccagatttgatagacccagcacttctgcgccctggtcgatttgacaaactgctatatgtcggagttaactccgatgcatcttacagggagcgggtcctgaaagctcttacccgaaagttcaaattgcatgaagatgtctcactttactccatagcaaaaaatgtccaccaaacttcactggtgcagacatgtatgctttgtgtgcagatgcttggttccatgctgcaaagcgcaaagttttgagagcaaatccagagtcttccagccaagataatgaagcagattctgttgttgtggaatacaatgatttcatccaggtcttagaagagctgtcgccttccctctccatggctgagctcaacaagtacgagcaactgagagatcagtttgaaggcacctctaaatgagttttgttattatgtgtttctgctgctgttttgaggaatacaaaacaaatatacatcannattctaataaaaaaaaaaaaaaaaaaaacac

SEQ ID NO: 32910 - DNA, 233 bp, Glycine max
  Clone ID: PAT_MRT3847_129721C.1
gcgtccgtacaggtgttagaacacctcagaaaggacctcataccaggacacaaaccatactttcctcctgtggataggggaacctgactgttacgatcgaagagtcaccttctctctactctaacttatctcatacatacaattaccctcaggttttaccaattacaattgaatacattgtctctttccacagcatcctattatatcccgacaatatcattaatgaaaatctg

SEQ ID NO: 32911 - DNA, 550 bp, Glycine max
  Clone ID: PAT_MRT3847_129722C.1
cccacgcgtccgaccacacttccggtaaatgtgatacactcttactctaatagtccttcctgtccatttacaatcccaactctcttctcccttgatatcacgctggtagcactgggggtcttcgcctgttgttaacccagcacactccaactcctttatcatgctcgatgcatgtccaattattaacgaaaagaacaccaatggtggacctatattgaaagacaacaggccaaagctcactgagtgtagaaaaacagacgcgctcatgattgtgaggaaaacaacgcacaatatgtaggcgccatcactcatagcccaattatcatgatttaagtgcagtgcaacagggacaacctcagctggggagaagacattcgcgagcagctctatactgtgtatgagcgcctggcagaaactacaacacattactactattcatcaacctatagccccaattagcactactacaaagatctgaatgacacaatcattggttaacacagctctgtgaccatacatagatatgctttattggaactaataactgaac

SEQ ID NO: 32912 - DNA, 299 bp, Glycine max
  Clone ID: PAT_MRT3847_129724C.1
aaacccgaaattcggcccaagcaaaatccctatccagtaaattaactataaagccaacccaacaattatccctttccttccggccccgctttgctttcctggccctttcaaaaaatgttgaacaatttgtggacaaaattggaaacccaattttcccaggtggcacatattacattaggccacaaccttggggggctgccggtgttgaattgaaactaggccggaaaggaaaaccaaatggcccatttaaggttttgcaaaataagccacaaacttcccttggaaaacaattcaaatca

SEQ ID NO: 32913 - DNA, 237 bp, Glycine max
  Clone ID: PAT_MRT3847_129725C.1
acacccttccgccaacccttccggtgctttcccgctttcttttcacttcaaccgatttcctctccggttcggcctaaatattcagagggggggttaaatccattaaacatacattctaagttaatttttaatataagtaataacactcatttatttttctttaaggtaaaaagaacttttccatcaaatgaaattccaatcttttatgatactttatgattttatttttaagttttt

SEQ ID NO: 32914 - DNA, 133 bp, Glycine max
  Clone ID: PAT_MRT3847_129726C.1
aacggcgaactgtagacgaatcaaaacaaatggatagtggagctattgctatcttagctgattggtgttcctcaataataggcttttatgaccgaaggtgtaactgtttgactatcaggctaggtaataggag

SEQ ID NO: 32915 - DNA, 151 bp, Glycine max
  Clone ID: PAT_MRT3847_129727C.1
tacggctgtgagaagacgacagaaaggggacgctattctggtgagagaagaaagaagttgtgggattaattaaaggaagatgaagaaatccttttatgtgggagtaacagcagcaagcataacataacatgatagacagacacatcattat

SEQ ID NO: 32916 - DNA, 313 bp, Glycine max
  unsure (1)..(313): unsure at all n locations
  Clone ID: PAT_MRT3847_129728C.1
wncgtcncangcacgcgtacgtnagctcggaattcggctcgagnnnnaatagagaaagcacaacctgtttcattggaattgnctgnaancantntagtntgcagtnntgcacagtttaaatacngntctaaancctgatngtgacactnctcnngancattctaacnngnnaaactgggntcggctactacaatggatgcgtggnaaaaatcncggaacgaanctngctcggntggaacangtatttatgagctgcnggtttctgangnttcgtngatggnnaagcagntangtgggnactnnagggatgncn

SEQ ID NO: 32917 - DNA, 113 bp, Glycine max
  Clone ID: PAT_MRT3847_129729C.1
gtcgcgcgcgcgcgtgcaggctctcggttcgcctctcgcgccataattggtctttgatcatgcacggtggtgggaaagctggagacgccctcggcgtgactgctgcaaacttt

SEQ ID NO: 32918 - DNA, 297 bp, Glycine max
  unsure (1)..(297): unsure at all n locations
  Clone ID: PAT_MRT3847_12972C.1
gtcgcatgcagacgtagttacntnancacgnaattcggctcgagancncatccncgtacaccncanccntgagagcnncatcttgantgccatncggngggcaactngncttgtnttgcncgagnntnangnganncaccnnnnnncgcancgcnnngcnaacngttnnggnnntntgnanaaccccatnnntnnnnctcanancggcagaanacngnnggntgaaatntcccngtaagngnggtaatggggttnaggnaatnnnntgtngctnggntttganannctnaaanancc

SEQ ID NO: 32919 - DNA, 2488 bp, Glycine max
  Clone ID: PAT_MRT3847_129730C.1
ccacgcgtccggcaattgcaattgatatgccaatgaatgtcaagtctgtggttatctacctagctatcgttcttgcaagttatgttgttgtatcaattgctgatagttttgcagctagtgaaatatcaaccaggcttaaaatatcaaaagcaaaagtaatatttactcaggatcttattatgcgtggtgacaaaagtatccctctttacagtagagttgtggatgcacagtcacctatggctgtagttatccctgccaaaggatctgaatttagcatgaaactgcgtaatggtgacctctcttggcatgattttttggagaaagtcaataatctcaaaggcaaggaattcatagctactgaacaaccaatagagacattcacaaacattctcttttcttctggaacaacaggtgatccaaaggcaattccatggaccaatattactcctctaaaagctgctgcagatgcatggtgccacatggacgttcgtaaaggtgatgtagtgtgctggcccactaatcttggatggatgatggggccgtggctagtatatgcatccttgctaaatggagcttcagtggctctgtatattggatcccctcttgggtctgcctttgccaagtttgtacaggatgctaaagtcacaatgcttggtgttattccaagtattgtacggagttggagaagtacaaattccacatctggctatgattggtcttctatccgttgctttggctccactggtgaagcatctaatgtggatgaatacctttggctgatggggagagctctctacaagcctatcattgaatattgtggtggtacagaaattgggggtggatttgttgatatgattcataatcgcaattgcggatcactactacaggctcagtcattagctgcttttagcacaccagctatgtgctgcagtttgtttattcttgatgatgaaggccttcctattccacaaaatgttccaggaataggtgagttggctcttggtccgctcatgcttggggcttcaaatacactgcttaacgctgatcattacggtgtctatttcaaaggaatgcctctcttgaatggaaaggtattacggaggcatggagatgtatttgagcgtactgctaaaggatactatcatgcccatggtcgttcggatgatacgatgaaccttgggggaatcaaggtgagttcagttgagattgaacgcatatgcaatggagtagatagcagcattctggaaacagctgcaataggggtaccaccttctggtggtgggcctgagttgttgactatagctgttgtattcaaggattcaaatagcacaaatcaagatttacaccaattgaggatgtcttttaattcagctctccaaaagaaactaaatccactgttcagggtttctcaagtagtcacactgccatctcttccaaggacggcatccaacaaggttatgagaagggttttgcgacagcaacttagcgaaactaaccaaaattctaaaatataatacaatcatgtaatctaatattgaagattggatatcctggaccaggagcgatcatggtacacatttaaaagtattgttctttttggtactagaaaataataatattacggtaattacaatataatgtacaaatggtataaataattcccatttgtaacaatagaaataaaacagaagaataggagtttgaattgtattttgaaatcatttttgaaaaccagagcatatgcaactaaccaaacttcgtcacgcaattcctcgagtgtcatcctttgtagagggagatcatcaagttgttcatcacgccatattattactgtatcattcaaacttcttttgccatttacatttaagcaattctgtgctggattaatagatgctccaggaagccattgaccactcgggtgtgataatgggctttcccctgaggggctatcacgtaagatgcattcaggtggtttggaaaatgatatgctcatttcatccaacacacatttccaatatatctcagggtttgagactgaaaatttctggaaatcatcaaagcttgtaataggatccttatatgccgaacccagaaactcttcacccttcctctctagcaactgccaaacattagtcaaagcagcactttcccggttgggtatccaagcgggtgggtcgggaccgtaatccttgtagcaaccatagtacagcatctgatgaaaggagaagggaagttcagggttgaggatgctgttgctgacgtgctgccacgtggcgggggtgccattgctgtgagtttcaatgatttctgcgagaccctggtggagagtggcagcgtcttctcttgcaattccatgggattcaatatccgacacagtgatggaactcagcgatttgtaataagccatgtgtgtaatagtaggatccaaagttgcaccactcacttcacccaaaagcatcaaacccgtttcaatggcgggttgatacgg

SEQ ID NO: 32920 - DNA, 718 bp, Glycine max
  unsure (1)..(718): unsure at all n locations
  Clone ID: PAT_MRT3847_129731C.1
cccgcgtccggacgtccgcagcaacagaccactctccctttctctctctactttctctctctaaaaaaagacctcaacagaacagggcgccgaagaagaagcagaagaagaaaccctagaaaggagaaacaactcaactcagctcagttcagctcaacccagcaactcttcatattcttccacacaattcaaattctttttccattttttttgtctctctccactggttttctcttcggtttcaactcgagacacatgcggaaagtgtttgaagagtgcacatttcggtgtttgggtttgttttggaggcacatcaagggcttggaggagtttgggttgaaatgaaacgttgtgtcggttgagactgagagggttttgtttgtggacatgtntttgtgactaggttgnngnggtggntaaatattttttgggctttaggttttgatttgttttcaaagggggggcggtgatagtgagaggaatgggtgcctcctggngccacccacgccgattgggtggtgctcagtctgggcccgctgtcgctttttgagatcaaattcgggaaatgttggcgggtcaaggggggggaaagcctgggccttcacaaacctcgttccctttcgctggggggacagcgaaaacagggtaaccaacatgaatatgctagggaacatggtctatggggacttccttgctggatcagtctttcccgaaggga

SEQ ID NO: 32921 - DNA, 450 bp, Glycine max
  Clone ID: PAT_MRT3847_129732C.1
ctctagtattttttttaagagtttactagtatagagtgttcatgcattatttttcatgttttgataacaaatgctaaagaaaatggaatgaaatgagatgaaaggaaaacaagtggagggaatggagttctaatgtttctatttagtaaaataaaaggtgattccatatcatactttcaaattaagaaaaaaaaatagtgcttgaaatgtattgcttcaaattccattcaatgcatcttactataaagaagccaaacaatgaaagcaaatatcattttgttacatttcacttcattgtgtttcttttcatcaatattcaatattgcccagagttgcaattttagtagaagagaaaataggggtattagtgaaattgtacacatcttgaactaggcccgtttatttaagctactcgtttaggtgtcatattactatttactcgtgcccaca

SEQ ID NO: 32922 - DNA, 367 bp, Glycine max
  unsure (1)..(367): unsure at all n locations
  Clone ID: PAT_MRT3847_129733C.1
acaaaaannaacgcgaaggggaacaaaaagaacgcnnacaangaaggnggcacnnggcggggaaaggggcgcggaaccccaaaannggnangggncnaaacacanncaaanangnanccgcncangagacaagagggcgaggaaaagcaattttttttttgaaaaaggaagagcangagnacccaacanncccggggggcccgganncccncccccgcggccacncgcccccccgggggggcncacccagaaacgccggggaaagcaaaagacgccgaagaccaggngggggcacgagggggggacagggaacgggaccgcaacagcggcaagacccccgagagggggcggcccgaagaacgggggg

SEQ ID NO: 32923 - DNA, 283 bp, Glycine max
  Clone ID: PAT_MRT3847_129734C.1
aagattgcagagtgctagtgctaacacctgcagtgaacatggcctctgcatcagcatgtctgctcaagtcttcacttgttcttgacaagtctgagtgggtgaagggacaaacccttcggcaaccttctgcgtgaggtgggagatgcaacccgaccacccgatgaggcctgaccatcagagctgggtcctatgctgatgaggtcggtaagaccgggaaaacaggggctgtaccagggaggtggattggcgctcgtggatggggggaatgcgacctgggtgaagc

SEQ ID NO: 32924 - DNA, 515 bp, Glycine max
  unsure (1)..(515): unsure at all n locations
  Clone ID: PAT_MRT3847_129735C.1
tgcgggtggacgacacaacggggcgcgcgcccgggggaagagagaccctagacgtcgacgctcagaagttattctgaagagaaacgttgaatctgattgcctatgtgcgttcggtcccgtttcataaaccacgacgatgtcgtttggggcctgtctgctgtatcattacgcatacccttcatttctgtggccagcagaaacagaacctaccgcttcggatgcaccgcccaagtttccgtatttcctttctgcagattggtgactattattcgtccgggtttatctctatgcaagttgctgatagattattcatgcgacttggcaagttggaatctggcaagaaaagaccctacggcccatgagtagatgctggcttacacgtaaccctgacttcttctttggtcctttggtgttgnatgattatggcgctatcatgtcaggcagaggatgcggtgcattaccagctcgtggcgttgaagaacactggccagccccgggcggagcatggggtgggg

SEQ ID NO: 32925 - DNA, 453 bp, Glycine max
  Clone ID: PAT_MRT3847_129736C.1
ctgagcccaagaggcgcgccgacatttctagatagcttacctttggcggtgagcacttgcaatccgcactgagcgctgcccaagagggtgctgctctgacaggacgagatcagactgtaatgttggatactctccaacggactcgtcaacaaattgcaactaaacctgaggagaggttcaatactgtaggcacaaatacgatttaggcatacatctttcgagtgaaagctaatagtgctactgtgacactcattacaacgtattatcctacacacctatcactggaggcttaaagcaatgccccgaaattgtatgtgttggttgcaatggccctttcaaaccatgttgcacaaacaattcatgccccgcttttgtaatcaatcaaatagcctaatctatttacagtggtggcttaagtgaggatttcatattcctttctcaaaataaaaattt

SEQ ID NO: 32926 - DNA, 494 bp, Glycine max
  Clone ID: PAT_MRT3847_129737C.1
aaaacaaaggggtaagttttccataaaaattaccatcaacaagctgtttcaataaattgaatataaccatgtcccaactaaatgatagttgccccacttagggtaaagcctaccccctcctacaattaatttatacaagctcaattttttaaaagttaacaatttcctgggtcaaaaacaacactttttttccctcccaagcttttcaaatgacagtttttttggttatggataaagaggggggccttttttttaaccgttgctcaaacaaaaataaaaggaccctgtggattttttaccccccggaataccaattttgcagggtttcacttcagcggcaaattgaaaaaagcaaagggactttccagttgaaaatggatcaagggaaatgttcccaaacatcaaaattttggaatccccaccaaaacattgctggaaaaaggatttcaattttgaattcctaaaggggacctgcttttgttttttttcccaaa

SEQ ID NO: 32927 - DNA, 404 bp, Glycine max
  Clone ID: PAT_MRT3847_129738C.1
tttcgaataagtccataacaacccctgacagatgagtatgatataagcactgtaactgctgttcttattgagaaaccaccctgttggttaacctatgggcattactctactgtcatggctataatgtatcatttacagatctctgatagagattttgttatgaagaaagcaatgacaggctgagctctaattaggtggagcatctatctttcctcctggagaacttattaagactttactttaactttaacaacagaagagaaaatttctatttagctgcattctatcacataataccgaacaaagcttcttgataaaactttaccccactcacgacacactccttgatatagaggccggagcttcaccatttttggaatagaccacctctactttttttttct

SEQ ID NO: 32928 - DNA, 746 bp, Glycine max
  Clone ID: PAT_MRT3847_129739C.1
acgttgccacgtggaagtggggcccggtggaggaggagttcatggatgccgccgcgtgtccacgcacgttcgtcgacggcggggatggtgcgatgtacatgtgctgcggcggtgacgtggttgcgttgcaaggggacacgtggcggaatgtggcgaaggtgccgggtgaaatacggaacgttgcgtgcgtgggagtgtgggaaggggcaatgctggtcattggatcgagtgggtttggggaaccgcatgtgggctttgtgttggatctgaaaagttgggcttggactaaacttgtgagcccagaggagtacactggtcacgttcaatctggttgccttttggaaatttagtacctcatgttttttttttttggaagttaaaatgctgaatattattgatgcataatacttgagttttgtttcggggcgtttgtgtaaatacatgatcatatgaagcaacaattttgtttctttggttgctttatttacttactcaaaagcttgatcattttagtctgtagtagcttttaaggagttgtagtatatatggagtgcacaattacccttttgtttagagttagaacgaacaaaagtggaaacacgggatataggaaattgcatatcctagtagacagcactagatgtgcagtacagcaaggaaaagtgtaacaaatgaagatgttgtgcttacacttcattgatgttttgcttaaagacaaaaattaattcgtcttattcttgtttgcc

SEQ ID NO: 32929 - DNA, 450 bp, Glycine max
  Clone ID: PAT_MRT3847_12973C.1
accagcaattttcaatttgtttgctatatgttctgcaaatcatgtttaattgcccccatgagattttatgttagcagggctttgttgtttcttattttaccatccacagtttgtttgagcctttccctcttgcaatgcagcatagtttatcgtctgatgtcttttttaagtattttattttttataattgcattttattgtaatgttgcagcatatgaaaattttcgaggccctcttggcaatgtcaggaaaggagtactggtgtcaatgggttttggtacaatcacagctcatgcactgatgagcttagaagctcgagggactctttttgtaactcctggaatggaggcgtatgatggaatgatagttggagaacattcacgggatacagatcttgatgttaatcctgtgagggctaaagaacttacaaatatccgtgctgctaccaag

SEQ ID NO: 32930 - DNA, 482 bp, Glycine max
  Clone ID: PAT_MRT3847_129740C.1
cgcgagaagacgacagaagggtacctgtattagccataatgaaatgatgaaaggttgatgaggataagattgattctatgatcttccaaatgtagagagccttctttcttctttgaatttttctcttctgatggggatagaaaaaaaaaccaaactgtaagtctatggcttctctctacaaatgggggccataacctaaatttgataattataatttgacccctcatcaaattataatatcactaatggtatctacacaagtctttcatgacatatatacccttagtcataattttatattgattagaccactctagtattttggctaataatataatgatcataactcattcaattatgtgatatgtacatgtatgacccaaaattgctaacaacttgataacttggtttatagttcatatccataaaacaagtaattagaaccttagtgaaaagtttcagcacgaataatcaagattgct

SEQ ID NO: 32931 - DNA, 225 bp, Glycine max
  unsure (1)..(225): unsure at all n locations
  Clone ID: PAT_MRT3847_129741C.1
acggctgcgagaagacgacagaagggcagtactatcatgtagttatatattagtagtattatgtttggtacaattatttattcttgtaataattatcttaaatgtcacatgtanagttatctgtaattggttgcaagtgaagacttnttttttacattaccaaggtatcaatacactctgggtataacattcacatagaagcaagtggaaaacacgatagggtac

SEQ ID NO: 32932 - DNA, 316 bp, Glycine max
  Clone ID: PAT_MRT3847_129742C.1
aaaccaaaaacccaatgctttttttgaaaaaagaggaaacgatttttttaaacccaacccaacaaaagggttttggtttaattatccccccccttatttttaaaaaatttcccctttcccggttttaaagcccgtttaaaaaaaaaaaaaaccttgaacaaccctggggggcttttttttttgatggggccccccctttaaaaggggaggtgggctaaaaccccctttcccggaatatttttcccccttgagggaaaaacaaaccccctttgggccacttttcccccaaaaaggctcgtcgttttcgggaacccca

SEQ ID NO: 32933 - DNA, 366 bp, Glycine max
  Clone ID: PAT_MRT3847_129743C.1
cctgataatccggctcctgatccccgaccggcggagcctgaggaacagtgaatgaacccgttccatggtttgtattctaaagagctcgaagcatcattcgatggagctcatccatggtgacatatcgggttaagcgaagcttgtttaagcataggcgagctagccactaaaccctccaaagcctctatattgataggaacatcaacacattctaactctttaaactacagattgggctggctatcgggaaaacactgaatccaatccacctgcggatctttctcaacctcagattgcagaggctcaagctccctgagtactctgcacttggagacaactacggagaggccgggagtgccgaatccc

SEQ ID NO: 32934 - DNA, 275 bp, Glycine max
  unsure (1)..(275): unsure at all n locations
  Clone ID: PAT_MRT3847_129744C.1
tggccattgaagtgttactgggcactgatgacgggtctctggttttctctcccaactctttctccgtggcccctggggaaaagatcgtgttcaagaacaacgcaggtttcccccacaaaccgnttgtgtttcgaccgaggaccaagattcctagcggcgtggatgccgggaaaatcttccatgaccgaagaaaactttctaaatgcggtggggaagacttacaggtttatttttggggtgccaaggggaaccctacgttttttttttgtccccca

SEQ ID NO: 32935 - DNA, 324 bp, Glycine max
  Clone ID: PAT_MRT3847_129745C.1
ggcctctgccgtttcctccttattccacaccacaccttcaatatatggaagaagtactttctccttctatctcccacctactttatctcctccttctttacctatgaaccaattaaacaacacacttcatcacaaaactttctttattccatttcctcaaacttagtttatatatatattaatctatttctcttgtgtcatgggggctggtgtttcttcatgtaataaagttgaaaaagaaggaggagggtctatttcttcatcatcaagagattcaagacccggtcttggtgacatcccaaaaaggttcattttcttcctggt

SEQ ID NO: 32936 - DNA, 401 bp, Glycine max
  Clone ID: PAT_MRT3847_129746C.1
gcgtaccatcttttcctattttgtttttttttttttttgtgggggggaaccatttttcttttttttggggaaattaaggtgggggaactttagggcactaggtgttaactggggaaaaaaagtgtccagcctgatggtgcctaacgtttcaattgggtaaattaattgcaaaaacctggggggcctatttgagaagctaaaagatattattaaggaggtggcttattgaattttttaaaccaggtaaacttgtggggccaaagtgttttataaagggggaaatcgggggggagagggggtttgcattttgtatggcatggggcggttttttgtgttaacaaaggtattgctttaaaagggatgtttttttactcgcccgaacccaggagaaaaatagtttt

SEQ ID NO: 32937 - DNA, 287 bp, Glycine max
  Clone ID: PAT_MRT3847_129747C.1
gagtttcagccgcagcttgccccacagcattgcgaccattatcagctatggctgtctgtaagattagacgatctccaaaggaaacatgggtggcactatgacatccgctgatccctttgccaagagagactggtacgatatcaaggctccatcgctcttcgacgtcaagaatattggcaaaaccctcgtctctcgtacacagtgaaccataattgcatcagaacgactcaaacatccagtttttgaggtcacattggctgatctccaaggggatgaagaccactcct

SEQ ID NO: 32938 - DNA, 121 bp, Glycine max
  Clone ID: PAT_MRT3847_129748C.1
gacatcaaattttcatcatgcactgagtgcatagactcaggtgtcgtcgttgtacaggtctccgtagatagaagggcgctgaagatggttacagtaccaggcaggacaatacgcgtatgtg

SEQ ID NO: 32939 - DNA, 217 bp, Glycine max
  Clone ID: PAT_MRT3847_129749C.1
caggtatggttaatgactgtacactcctttgaggatggagcctggaggaatgcggccgctacttggtgaccatataagtctatgaaaacaagcctgctgacatttttcaaggtcaaatggatacagattatctattcacggtttactcattcccttacaactgattgacatgttaacatgactgatgtcttcacctttggtaccatatatgggtcta

SEQ ID NO: 32940 - DNA, 419 bp, Glycine max
  Clone ID: PAT_MRT3847_12974C.1
aaaaagataattcctgcatgattgcatatattattccgggtaacattgcacaaacgtgggttattaatgacaaagacatgggctttcgactcctacagatacataagcttatacatacactactgatgaagggataacattacttatcttggacagttaatcaaagccagagacagtacttatgcaaacatagagccctttgatagaaatacagcatggaaatcgtttgatagatattccctcatcactacacggatagaccacagtgagaggcatattagccggaccataaaggtgtcacagtgccacatgactcgtgttggctataatgcccgataaaatctcaccaagagtctatccgtgccactcaaaggcctctaatggcccggtattagaagtccaggcgacaccgccatctg

SEQ ID NO: 32941 - DNA, 336 bp, Glycine max
  Clone ID: PAT_MRT3847_129750C.1
aaaaaaaatccccttggggggtggggataaaatttaccagggggttttaccgatctcatggggggaaaaaaaaaaaacccactttgttagaccgactaaaaaaacctttttttcaatctgccccctcacgggtcccattctcaatttcctaaaaaagttcaggggcccctagtacttttccgagaccggggaacctgtaagtgggacccactacaattcccgggggggggttaaagggaccctctgaaaaataatttttttaaaccccccttttggtaaaacccgggttttatttcttttttttaaaaaggcggtcaccctctttttttggaccca

SEQ ID NO: 32942 - DNA, 340 bp, Glycine max
  unsure (1)..(340): unsure at all n locations
  Clone ID: PAT_MRT3847_129751C.1
ccagacggggggaaccgcaagccncagaagaaccggggccacncncccaaggcgcggggaccccgccgcccgaaacnccgccnccaccgccggaaaccaaagacggccaccgcggcggcggccggngangggccagaaccaaaccacnnccaacacgcggcccgggggaanaaacgaagccgcggcacggcaccgagcagaagacgccggggacgaaaacccggacgaagaaggcgccaaagggaacgccgacgacgaaggccccgagagcgcgaagcacggaagggcggaggacacagacaccgcggaggccaagaaaggcagcaccaagagggacccc

SEQ ID NO: 32943 - DNA, 418 bp, Glycine max
  Clone ID: PAT_MRT3847_129752C.1
aaaaaacatataaatttttttacaggaatgaattctgaacatttcgatattcataaagacgaaaaacatattttagcctatatgaaataaactatcaatttagttcttcaaatattttttataactaataagtatatatatatatatatatatatatatatatatatatatatatatatatatatatatattatctctaaaataataaatatttattaatttagttcttacattaatgatgtttactggggttcaaagactaatttaaaatcttttttttaatatttaagaaattattttgtatgatttttaatgtgtgagaaattatttatataatttatttattttaaagactatttagaaaatagaataatattttagggataattagggataaaaattattatttattctaata

SEQ ID NO: 32944 - DNA, 504 bp, Glycine max
  Clone ID: PAT_MRT3847_129753C.1
gtcgttggcgaagtccgactcggaggtagaagaaatgctggatcggatgctgactcgtttggctctctgcgacgattccaagctggagccgctgctctccaagcttctccctctctgcatctcctccctctcctcgcaatccgtcgccgttcgcaacaaggtgcttgagattttgagtcacgtgaacaagagagtgaagctccagcctcaaattggtctacctttgtctgacttgtggaaattgtattcggaatctgctgctgtccctatcataaggaatttctgcattgtgtatatagagatggcttttcagcgtgttaatgcaaaggaaaaggaagatctggcacctgatctcttggtgaacatctcaaaacttccacttcaacaccaggaaattatccttagaatcattgttaaggtaattggtgagtgccactctggtcaaattggtgatgaagtttctgcaaagtatggaaaagtgaacaattctcaagatagggagct

SEQ ID NO: 32945 - DNA, 522 bp, Glycine max
  Clone ID: PAT_MRT3847_129754C.1
aaattttgtggttccgaggtaaacccacatcggttctgagccacttctgaacatcatacacaccgcaaaacagacctcaagaactagaatcggtaacactaactagccatcaaattaaccattgtgatgttaactatattctttatgaaattgttacaagatgttttcagaggttgaacagaactgatgtgctataaaaagaactgatcattatttgcctttacacatgccctagtggatactagccagctcggtatacttgggaccaaactcggaacaatgcacgcaaacacttgaggcacggtggtggggtcagagataatgcgcactgccctctgtaccttggctaggtcgactgcaggaacgatcggaggggggtgggagttaataccacacttgaacccaggagggcaccaatccacaaactgaatggtcctcttggtcttgatggaggcaaccagagcgttttcatcactgtgtgcaccagaaccctggagcgttgggaaacaatccctgcacttt

SEQ ID NO: 32946 - DNA, 259 bp, Glycine max
  Clone ID: PAT_MRT3847_129755C.1
aataaaataggatataacaaaaatgaacatgtataccacttagatggttatttagcaaggcaattgtgctgtagctctatacgaacaagcgtgcactctaaatatcgaactaaagtatgtggtgctaaacgatattcacaaaccgagccctcaaacacatttaaataacgagttactctagggacaccaactgaaatgagacccatgcgcgtacaaaccatttctacatattcgactccctcaggtgaagaatgagtat

SEQ ID NO: 32947 - DNA, 387 bp, Glycine max
  Clone ID: PAT_MRT3847_129756C.1
gagaaagcaaaacagtacagaactctcaaacctttagccaaggcttgtttgggtgtactgtacatacaaggaaatatcacaaaggtgaaagtggaaaagtagaaggaaaaaaggagattgaaatttatttatttttaattattttgaaggcatatatacgtgaattgaattttttcacaggaaactcttccagtgcagcaaatgatggttgataaccctaactggtggagcatgcatcaacaaccttctttgatccctccccaatatgtgtttcctccttcttcaattccttttaattctttgactgaaaatcaagagcctcctcagtcatggagtcaactgttttttactggattaccgggagaagaagagaaacttgggcctaag

SEQ ID NO: 32948 - DNA, 269 bp, Glycine max
  unsure (1)..(269): unsure at all n locations
  Clone ID: PAT_MRT3847_129757C.1
cgctgataactatnacaagtacctnnatatgtatgaggatgctgctgctgaaaacccaacgcattcttggctttggttgaactttggtcaaantgttatatttagtactgnctctttcatgcgtcaatgggtnctgtngctcncattgngtgcagggntggnacaatgactgtggtgatttggnaatggtgaatnggttctcttcnaactatgctcttcagctcnantttccnttgtnnagtgttancctngggantaggtcggngtct

SEQ ID NO: 32949 - DNA, 139 bp, Glycine max
  Clone ID: PAT_MRT3847_129758C.1
tttcgttttcacaaagcgtaagcaaccaacatatggtggcgcttaagtgggctgcttggggatcaaaatcgcacgctcgagtacatttatcttcaaggcatatttaccgccggattctatggtccttactgcacacata

SEQ ID NO: 32950 - DNA, 622 bp, Glycine max
  Clone ID: PAT_MRT3847_129759C.1
taaaaaaacagaatcaatattaatgtcctagtattaagtttcttgatgcaattctcattcaaattttgccacataggctcttagaatgatagttgaaagaaatgtgaggatggaagaaataaattttctttactagtattaactattaaggaaccaaaatctgtacaacaaccaggcatgctttcatttcatggcatacaaagtggcatctctatattacttcaaaataatgcaaaatatgtgtaataggtctcatgtatttcctctcctatgtacgaagaggagaaggagataagcttggattaggagtagcattgctgcttgagcttgtgtctttggaatcgtgaagatgttccaataatctcaccacctcatttatgtttggtctaagtttctgttctgtagataggcattgaattgcaaggtgagctattctctttgcttcgcgctttgagtattggccttctatgcgagcatccataacttgggagatcttgtgtttgttggtgaggagtggtttggcccattcaactaaactgtgctccccgcttggcctgttgtcatccagtgcacgtttccctgacatgagttccagaagaacaactccaaaactgtatatgta

SEQ ID NO: 32951 - DNA, 388 bp, Glycine max
  unsure (1)..(388): unsure at all n locations
  Clone ID: PAT_MRT3847_12975C.1
tttccttattttcattcttatagcccttattatcaacagttgccttttggttttgctggtacttggacccaagggcattcatgttgctttcaactttagtaaactccattttatccataccttttccagtgttccaatgcaagaagggctttttgcggaacataactgtgaattggtcactcacccttctgaacattttttgaattgaggtggagttgcccatgaaggttggtgcccttttcaaacccggtggagggatattacanacaggggatttcacatttgtggggatccatctcacaaagtatgatgagttcttggtctgaacattgatcctctgntcgcgcacctcccttgtcgtcttcttacccccgaaccttggcgaagt

SEQ ID NO: 32952 - DNA, 527 bp, Glycine max
  Clone ID: PAT_MRT3847_129760C.1
gagcattttacttcacatattttattccaattgtgtttttgttcttcacttgtctgaatgactactccttgttccctccaatgttttgaaggatctttctttgagttataagagattttaagatttgataaaacagagaggatgtgatgtgtgtgtgagtttgggagaggggagatagctaacgctttgaaggaattacatgttactgatgcataatatgcaaatatgtagtttttttatataaaaaaaaatagaaatgctagcaacacaataatgtgttcaaattcatatatgacataataaatgtcatcattaacttaaagaatgttatagagtatattactgacattctaactttttcaatgatcactctcaaaaataaaaacatatagaaaccagataatttcatagatctatatctaattcactatgccattccaagattgattctaaataggaatcaagttgttattaaacagagatagtcaacattttgcatgtccatcatgtagcatctaagcatcact

SEQ ID NO: 32953 - DNA, 279 bp, Glycine max
  unsure (1)..(279): unsure at all n locations
  Clone ID: PAT_MRT3847_129761C.1
acgagatcaaaancgaangaaggcaatgggttnntgctcgggattctttcanattgctgaaatngagccngttnncagctttaggnaagtanaagctngnctaattggncggancaantccgggggncaaaaanaggattcatcaattcgcnntatggatgcnaaantcgatgaacaccttttcagggngacaantggtattgantttctatcaaaaactatggatcttggaagatcggactggggcganttggaaatgtgggaaacaggtggggagga

SEQ ID NO: 32954 - DNA, 447 bp, Glycine max
  unsure (1)..(447): unsure at all n locations
  Clone ID: PAT_MRT3847_129762C.1
gagcatgtctagctatgtcgatcgaactgtccaaggtcctgtcactgtagtttaagccaaggcctatgcaaaaggctgacgaaaagtcactgaacacacagggctgcgtgagaggaggggattaagcgccgttacaaccgcagttgaaaatgccccgttagctaccaaagttgtggggcctacccttcatcagctaaagcagcgagcagcggcggctgacacaaggcaaagtaagctaatggatgcacgcgtatttctaacacgattgtaagggtgaggcttggccgaagtcacaatatgggaagcaacaagacggtacgtataaaccgcgtatacngtgtaatcgtagagaaagagtcttcggggagcagggagcggtacgtgaaacccagcagacggcagcagcacgagcggagaaggccagtcgtgaagagaaattaaacagtg

SEQ ID NO: 32955 - DNA, 127 bp, Glycine max
  unsure (1)..(127): unsure at all n locations
  Clone ID: PAT_MRT3847_129763C.1
gagctatgatcgtcgcaaagcacccccgtacgtaanngctcggaaattcgggcttcgagggcaatggttccgttctaagaatgtatcaattggagatgaattttactgttatcaatctccttctttc

SEQ ID NO: 32956 - DNA, 190 bp, Glycine max
  Clone ID: PAT_MRT3847_129764C.1
ccactgacctcggggcccgtcaacgagcgcggcttgcttcgctgatccgccgtcgtctatcaccaccagagcaagccatacccgcggctcccgacgccccagcagcctgcaccgagcctcttgtgtaccacctggtcgccatccaccgcgactacaggcacgtccacccgatggtgactcggcgcgccgc

SEQ ID NO: 32957 - DNA, 280 bp, Glycine max
  Clone ID: PAT_MRT3847_129765C.1
cgagaggcgatctcgttgcatacgagaatatttcaatctttaattaaccattcggggcatagggcgcttaaggagggtggtgtacaagacttaataaacttaatgccattctgaaagagttaaagagttcagattgtatttataccattttaaatgctgcatgtgctgcttaacttagttatcttaccatccagcttctgaatcaccattgttttctaaacaaaatggcagatgcttccctgttaatcatgggagaaagcggcttttgtcatatatctat

SEQ ID NO: 32958 - DNA, 344 bp, Glycine max
  unsure (1)..(344): unsure at all n locations
  Clone ID: PAT_MRT3847_129766C.1
ttcattttcacccacactttcgtttataatctcaaagcttnctttgtcgttgtatatattacagggtcgagaactccatcatgtaatcattgtaccgcttccgccaagtggttggccctctgctttttcagaaccttcaatttacccattgcgatcttccaaataggtattacttgtagaaactcttctccaaaacaacatttgatgcctttatccacttttctgtttttatagcggttgcttatagcttatctaatccccttcattatttattatttttaatttgattttaccttcaatcttttctatatttattgtatattataaatttcttaattattttt

SEQ ID NO: 32959 - DNA, 234 bp, Glycine max
  unsure (1)..(234): unsure at all n locations
  Clone ID: PAT_MRT3847_129767C.1
attaatattgctttttaaataggcaattccggtagatattcaagtcacttgttcacacgagttacatttagtnaaaaattgcattatattgtgcgaacttttatgaaagactgaccatctatgtctgtacaaaatattttgggttgttcaaagttctctgcatggctggtgtaatagctcttgcataatgtattgtgtaaataaaggactgtatactatttgcttttgatgttc

SEQ ID NO: 32960 - DNA, 752 bp, Glycine max
  Clone ID: PAT_MRT3847_129768C.1
ggcttaaattatcataaccctaacaatattcgttcggtcagtgtctgttcccgtggaacgatgtcgatggtggacagcgccggcaacaaaggaacgatgtcgaagaagaacaacctcgccaagagaaagaagcagtacgaattcgatctccaaagagagaaacaagagaagataaagaaagagcagaagctccatgcgaagaaaaacaagatgaaagttgatggtagtggcaagaaaaagaaaggtgggagtggatttcaggtggggaagagaaaagtgaagaccaagttgactgcccttgctaaagctaaggctgcccaggcaatggagcttgacaaatgagcatgtccgccttgcaagttatttgcagcgatgaagagtttggcattttgttttcatgatgaggtatatgctttctgtggccacttgatgcagtccattgttagaagaactagtaaggtgtaattgatgtccgaatctgagcattgagagcaggaagatttgcttgcttgcttgtgatggtttcgaatccctaatgatgatgatgattatgtgatttttctagtgagagtatatggtcagcataaaactgcttaaattcttagctagtaaggggagtagagatcctctccattttttaggtaattgttatgcacggatgtatctgagcattgtgagcccaacaatgcttgcagtttaagtttcaaattcttaagggttaaaaatcgtttcaagtaaaatctgtattactg

SEQ ID NO: 32961 - DNA, 444 bp, Glycine max
  Clone ID: PAT_MRT3847_129769C.1
ctcgagccgctcgagccgattcggctcgaggggcgatccattatcacctctcctcttcaatatcgtggcagaggcacttagcggcatcatgtcacacgcaattgcgaagggattgtatagggggttcttatgtggcaaaaacaaagtggaaattagcctactacagtatgcggatgacacaatcttctttggagaggcaacaatggaaaatgttagagctatcaaagcaatgatgagggctttcgaacttgtatcgggcctcaaaatcaactttgccaaaagtgggttgggtgctgtaggggtatcggaggagtggaggatcggtgcaactggataccttaattgtagcttgttgtcgttcccgttcacgtaccttggtgttcctattggagcaaatccgagagcatatcagatgtgggaccctataatagctaagtgtgagag

SEQ ID NO: 32962 - DNA, 278 bp, Glycine max
  Clone ID: PAT_MRT3847_12976C.1
tttttccttctaatgtttttatccttgccctggtttgtttccgcgggatcctccttcacaaactcagattgcggctgcggcttttgctgatcacccgaaaacttcttcgtggttttcaaatccttaggcttcgaaccaccctttatgtttttcttgttgcaaccaaaccataccttcttttctttaacccctacaccattggaaccattctcatgcccataaaaccctgcttcaagcttcttatcttgacaaataccatcaaaaatccccattcggag

SEQ ID NO: 32963 - DNA, 414 bp, Glycine max
  Clone ID: PAT_MRT3847_129770C.1
ggaccgtaaaagattccttagcattatcatatcaaggcacagttgagtaaggaacaaaattcactctccccatggaccagatggaacaatgacaaagtggtatcattaatgccttcgacgttgctaaccaaatagattaagaatttacatcctcttgccctcttccccttattaaataacacatcttataataaggggggcattgggacatataactttgaccgtactcttgtcacagccggcaacattaatttgggtagggatgtaacctgaaacattgtcataccctaaactttgaattttattgcggtcggctttgacaagaactcctgaattattatatggaccacttgccaaatatggattaaaatgagaacatggctgggggatgtaagtgaagacgctgcaaattcc

SEQ ID NO: 32964 - DNA, 624 bp, Glycine max
  Clone ID: PAT_MRT3847_129771C.1
gctgggtttggttttgcatttccttttaactccaatctcactgctgacttttcgagggccatcttgaatgtgactgaaagtgatttaatgaaagaaattgaggaaaaatattttgggaagaatgatgatattggaggagaagagacgtctactgaaatttcttctgctactctaagtctcaactttcatagttttgcagggttattcttgattacagggatttctactttattagcgctattggtctcagaaactgttatttggcaaagggcgattttgatagccaaggcatacagtcagaagtttttgttctccactccaccttccccacaaacacgagttcatccaactcaagattcaacgcacggatcaatagaggccgtttaataagtcccttctcatcaaagatttccttgcatgcagatggaaattaaattctgtatatatgtatgtatggcttggcaaacttgtagaactcgtctgtgtgtatatatagtatatggcaaaaataataggaggaaaaagcttaattagggggtcatatgtatgaactttagttgaagattattaatatgcagactcttatcttgcgcaaaaaaaaaaaaaaaagggcggccgccgact

SEQ ID NO: 32965 - DNA, 500 bp, Glycine max
  Clone ID: PAT_MRT3847_129772C.1
attgtattcataacatcacacaatgggggaagtgattataaccaccaaaaccccaaccatgaatccagatcgtttcatatcatacgtaccctactgttgatgatgttgcaggttgtacgtgctgaaaaggaaattatgtgcattgagagggatagggaagcactcctgcaattcaaagctgcccttgtggatgactatggcatgctatcatcttggaccactgctgattgctgccagcgggaagggattcgctgcaccatccttaccgagcatgttctaaggctcgaccttgacggccagcttaattattattcatatggaatggcctcgcgacgttatatcataggagagatccaccagctcgggatggggttgcaacatttaaactatttaaaccatggttcgaattattttcaaggctgaggaatcccagagttttttggttatcttagcaacctgagacaccttgaactgtgaaatttttgattttggcggaaaaa

SEQ ID NO: 32966 - DNA, 518 bp, Glycine max
  Clone ID: PAT_MRT3847_129773C.1
agtagcaagaaggattcaaaggaaggtgagtgctcgtggcggtggctttccccccgtgcaaacgattgctgtagtccatgaggattcaactgagatagcctgcatgcttttggaccccaaacttgtcggagcagatagggttcagaatagggttgagatgcaggcagcggaagaaggactcgacgtagaacaaggttatttcaccgacctttctccggaaatgttcgtagagaaatacatgaaactaatcaataatgctaacaaatcgtgatcatgtgtgtaactcgttagttggacttgttgatcgatgaataatcataaatgatcaaaggttgtgattttcagtaagtgtaatacaatggttctaaattatgattcctaaatggttggctggaaagacaaccaaagggtaacaaaaatgaagcatgcatggactagaaattgagattcctaaatgcttctgtgactatctatccgtatttatatatcaaattaatgacccgtttttcggtcaaaaa

SEQ ID NO: 32967 - DNA, 334 bp, Glycine max
  Clone ID: PAT_MRT3847_129774C.1
aaaaatctcaaatttttttttatacaccgagcaacacactcactcgcgccattatttcaaacatcatcaccacatccaatcactaacttattttaactctactctcaattacactttttccacatgtaacgtctgatacccttcataatgtatccacaattccacccacattcaatcccatacagtatcccaactataatgtcattcacataagcaacggctaccaaatccatcactataattcacccctttcaattacaaacagccccaatcaagaaatttctctcgtttaaaccacaagaacccacttcaagaggttattttactatattca

SEQ ID NO: 32968 - DNA, 235 bp, Glycine max
  Clone ID: PAT_MRT3847_129775C.1
agacgtcagcacacgcgtcagtgcggctgctaagattacaaaaggggggtcgtctagccgcaatcacgaatcccaattccatacctcgcgttctgccttcctctattacatcaggatggagtcacaggtgatgcatgcaattgttggcagccttctgggtcgtagtgggtgaaaaggacaattatcacaactttggttgaaatttttggatgatcataatcttcgcaacagcagg

SEQ ID NO: 32969 - DNA, 135 bp, Glycine max
  unsure (1)..(135): unsure at all n locations
  Clone ID: PAT_MRT3847_129776C.1
ttntttttttcttggggtcccacgtttcctttctttaacaacggaaaggatcttatacagttctttctgcttcacaagagaagataccctcatgaaaacggagttctacaccacggacctgttacaggccccaat

SEQ ID NO: 32970 - DNA, 1071 bp, Glycine max
  Clone ID: PAT_MRT3847_129777C.1
ttttttttttttttttttttttttttttttttttttttttttttttttttttttaaagggagaattttgtgtagtatgtatacccttaagacacatctcaacgcaattttccaaatgcaaatgctaaactattcattgaaacattgattgatagagaactgatttactcgctaaccaataaatgctaaactattctcaaatacaggatctaaaacttttactagttctctcaaaaacaaattacctccaaatttcaccttaactcctattagctggtctctaatctggtgactgttcctgtcttcgtcaactgcctttatccaaccaaaggaaaaacgaaaaaagagtaactggtcattatgctccaaaatgcttctcatgtacattcctccatcacttaggcagaacatctttctagcttgctttggaggtatacatgtatccacgaagctttcttacctcttctgatgactcagttagtaaatgatccacatagaggcagattgcagatgcaccaagaggaccaaatggtagccatataacatcccaacggaactttggcaacctcaacatgtaatatagccagaagattgccagaataacggcagtgtaccatgagtaatggatccatctcctgcgatgcattgactggtcaagcaatcctatgatggcaaatgagcatgctaaaacagccacccagtctgcaaatataatcatccacgagtagatctcctccatgaagtaagcgtgataccgcagttcccatggagatgaagcctgctggaagatggagtacaaaagaaacacgatgtaacagaagaatagagctgcaaataccgtcctccataagcgactctgctgagcttgactcctttcaagagaacgaaccagctcttcttgctcttgagggtccaagggacgagagtctccgtcgtgaaccggaagagataagttttcgtcttcttcattgtgcaacttccttgccagctttttcatttctctgcgaccgattagaaaacgtttctaggaaaattttgttatccccttctgtcgtcttctcgcagccgtaaa

SEQ ID NO: 32971 - DNA, 579 bp, Glycine max
  Clone ID: PAT_MRT3847_129778C.1
ttcggcacgaggcctcgtgccgaattcggacgaggcatgttcttgctgtcgatatactattacatctggtcagtggatcttattcgtgtaatgaagagtcaacagactacaatcgactctgctttggaaagcattaatctgcagagtatgatcagtgttcagcttcagtctatgatcatggataacgctcaaactacgatacgcaatactgatatcattacaagccttaacaatgatattcagacactccagcaaatacagactctacagaataaattcaaagacgaaagtggagaactaccatcaaagatacaagaaatctttgcgaatatcgattgcaatgaagtttattcctccaaatatctcctttcagcggacattactgttagcgaatgtatcacactcgctgcaggaacagatcgaataggcctcgttaacgtgatttctgaccaagccttcaaactttcgaccttcttattgaagtttcagagtagtgcaagagatgctgatacattgggagatctatatagagaagctgtagagacatttattcaatattttgatgtggcgactacgctg

SEQ ID NO: 32972 - DNA, 226 bp, Glycine max
  unsure (1)..(226): unsure at all n locations
  Clone ID: PAT_MRT3847_129779C.1
gtttcttggagcttcacaaacttaaaaccaagnaacatctattattgctactattgtgtgtttttctagttaagtcccaaggtgtcaacgacaatgaggagggtttcttcagtgcccgtagtcatcgaccccttgacaagaagagagaagaggctcccagcctgaggcctgccccaccgcccatcagtggaggtggctatcgggctcgtccagccaaagcagctgc

SEQ ID NO: 32973 - DNA, 849 bp, Glycine max
  Clone ID: PAT_MRT3847_12977C.1
gttgaggcaaacagggatgtaacgaggatggaaatatttatgtcactggttcgtcttttggatcaaaacagtgaagggcggtggtgcatcttcatcgaatgcaattgataccaacatgatggtgtatcaatctttcccacaagctacccagataacagcaactggtaggcccagtagtttgcaatgaaccacctgcttatagtttcttggttgctgttgcaatgaacttaacttcgtctaactactgtttcacctcagtttggagggggatgagtttagttagttaagaacttctcaagattaatgtgcattagtataatgtatatgcatgtttcctcctattcctgccaaggtcacttatcctgtgttggcacttggcagtgtcttctgatgctttaggcaactctttagataatttgcatccattttttttcctgtgtgagtaatgccattggtcaccaagttgtataaggcttttgttgatgttgttgctgagtaatgccattggtgttgatggtgtgattcggatgtatagatatttgtaggatttgcaaagggggagatcatgtgtttgaccatcaagcttatgcacttgttgttcctcctgaccttttttcctccacgtttttttctttcttggagtggtgatattggctgttataatataccaattttcattaatgtaagctttgtgtggtttgtatgagtctatgctaaatgatgcactagattaatactacctcttagaataagtgtcattttagagtgttgtataagaattaaggaaatcattgtaaactcttaaaaaattatgtaaaataggatacacagacagtgaaatgtgttttt

SEQ ID NO: 32974 - DNA, 752 bp, Glycine max
  Clone ID: PAT_MRT3847_129780C.1
tacaaacctctctccgtatcactccaagttataggtcacattgtcacaatgtggtcaccaattgttctactgttgtgccttattcctcctgtgttcttgctattcttcttccaataccgtagaaccttcaagaactcaaaccttccaccaggtcctagaggccttcccataatagggaatctccatcagctagatagctcgaatcttcatcttcagctatggaaactctcaaagaagtatggccctatattttcccttcaactaggtttaaggcccgccatagtgatttcctcatccaaagtggccaaagaggcacttaaaacccatgacgttgagtttagtggaagaccaaaattacttggccaacagaaactgtcctacaatggaaaagacatatcattttcaccaaatggtagttattggagagaaatgagaaaactttgtgttgtccatgtccttagctctagacgtgtctcgagcttttcctcaataataaattgtgaggttaagcagatgataaagaaaatatctaggcatgcctcatctttaaaggttacaaatttgaatgaagtgttgatatctctaacttgcgctattatatgtagaattgcttttgggagaaggtacgaagatgaaggaactgaaaggagtaggttccaggagctactcaatgagtgtgaggccatgttgagtatcttctttgtttcagattatgttccattcttgggttggattgataaactgaatggact

SEQ ID NO: 32975 - DNA, 423 bp, Glycine max
  Clone ID: PAT_MRT3847_129781C.1
gcgactcgtacactttgatggtcaggcggacccactctcattctaactgatgtgctggccaattatgccgagacccaaattgattacatactggcaaatatcccagggagaatgagctatgttgtaggggtcggttatgattacccaaaacatgtggaccacataggagcatctctacccaaggacaggatcagcactggcgctagggcggatcgagatggaggtgcacatgtaaggcatacccaaacacaattgctggagccatggttgggggtcctcacaagcatgcaggctaacatgatgctactacaaactgcactgacacacatgccatctcttgatggaaatgctggatcagttgccgcagtagcggaactggaaggcgacaaaaccgcatctaatgaccaagataccctccgctct

SEQ ID NO: 32976 - DNA, 455 bp, Glycine max
  Clone ID: PAT_MRT3847_129782C.1
aattcggctcgagcggctcgagcggctcgcgacggctgcgagaagacgacagagggggggggagtgttctttggttatgctagttgtgttggttttgttaatttgttagctgtgtgaatatgctcacggtgatagctgtggcagattttcactacaatattgtgagtcaatgttgtgtgcacgtacgactatgcatgcaagactttgaataatctgatatgttcaagaaatgggtgattgatatgaaaataaaagttcttgacattatgcgacttgaaatcctcgattctactctacatgacatgataactttgaaagctcaattcgaaagtgatgactgtacctttgtgagaatgtgagccatccatcattataactcattaggcgtgttctgccccattgattgcttgcacaatagccttggcttaaatcttgtagatgcgatctaattcaca

SEQ ID NO: 32977 - DNA, 417 bp, Glycine max
  unsure (1)..(417): unsure at all n locations
  Clone ID: PAT_MRT3847_129783C.1
ccgctttggaaaaaggtgtgttggaattttgacatgaggaaattattacactcttggtcaactgatgtgcgtcctgcaacaagctctgtgtggacgatgggtgtccatatgcgaatgctatggtgcatgatagttcagagtctacaataccaggagattttgtcagtgatgttaagaagacagccataaacaatgtgtgtgcatatggacttaatgctgggattatcagagatctggagttttgtgcaccattcctcagtccatttaacagcaaactgtctggaatcaaatggcatcagtgagaacaccattgcattttgattatagcacgcacagctttagtcaatattctattgaccttctcggcggaggaatgctagtgcacaaaagtgcagattgngtcacacttatacaaaa

SEQ ID NO: 32978 - DNA, 1321 bp, Glycine max
  Clone ID: PAT_MRT3847_129784C.1
cgaccccggcgtccgcccgcgtccgccttaacccacccaaaccccaaatctgaaaaccgtcctattcgtcgttcgaattaggggcatctctgaactggaacaaccagatgccagcgatttgagcgatgcacagtcaagaagaagctgcgtagtgcgtttgcgtttcgttcttccaaatggcggtttccgacagtcccagcggcggctccacgccacctcatcaggaacaacaagccaacagcaagtacggtttcaccaagcccctctctctcgcgggtcccaccgacgctgatctccagcgtaacaacgatttggacaagttcttgctcgattcgggtctctacgagagcaatgaagaatccgctgcgaggaaagaggttcttcaccgccttgatcagattgtgaaaagctgggtgaagcagttgacgcgccaacgtggctacacagatcagatggtagaggatgcaaatgctgtcatttttacttttggctcttaccgactaggggttcatggacctggagttgacatagacactttgtgcattggtccttcttatgtaaaccgagaggaagatttcttcatcattttgcataacatcctggccgaaatggaagaagtttctgaacttcaaccagttcctgatgcacatgttccagtaatgaaattcaaattccagggaatatctatagatttgctgtatgcaagtatatcacttttggttgtgccagaagacctagatatctcgcatggttcagtgctgtatgatgttgatgaaccaactgttcgaagtcttaatggctgccgtgtggcagatcaaattcttaaacttgttccaaatgttgagcacttccgaactacactgagatgtttaaagttttgggcaaaaaggcgtggtgtttattcaaatgttactggattccttggtggtgtaaattgggctattttagttgctcgaatttgccagctctaccccaatgcaatccctagtatgttggtttctcgattcttcagggtctatacacagtggcggtggccaaaccctgtaatgctatgctctatagaagagaatgaactgggattccctatatgggatcctcgtagaaacccccgggacagatttcacactatgccaataattactcctgcatacccttgcatgaattcaagctacacgtttcggcaagaactcttcggggtatggtggaccaattctgctatgggaataagatttgggatgaaattgaggttaataaagcccaggggaacagcatgtttccaccttatattttttttgagggatacaaaaagtatttacaagtg

SEQ ID NO: 32979 - DNA, 1282 bp, Glycine max
  unsure (1)..(1282): unsure at all n locations
  Clone ID: PAT_MRT3847_129785C.1
cccgcgtccgcccacccaaaccccaaaatccgaaaaggcgaaaaccgtcctattcctcgttcgaattaggggcatctctgaactggatcaaccagatgccagcgatttgagcgatgcacactgaagaagaagaggaagaagaagaagaagaagaagaagaagcttcgtagtgcgtttgcgtttcgttcttccaaatggcggtttccgacagtcccagcggcggctccacgccacctcaacaggaacaacaacccaacaagtacgctttcaccaagcccctctctctcgcgggtcccaccgacgccgatctccagcgtaacaacgaattggacaagttcttgctcgattcggggctctacgagagcaatgaagaatccgcggcgaggaaagaggttcttcaccgccttgatcagattgtgaaaaactgggtgaagcagttgacgcgccaacgtggctacacagatcagatggttgaggatgcaaatgctgtcatttttacttttggctcttaccgactaggggttcatggacctggagttgacatagacactttgtgcattggtccttcttatgtgaaccgagaggaagatttttttgtcattttgcataacatcctggccgaaatggaagaggtttctgaacttcaaccagttcctgatgcacatgttccagtaatgaaattcaaattccagggaatatctatagatttgctgtatgcaagtatatcacttttggttgtgccagaagtaagtttggttattcattcagcagggactttatatgttctgagagcacatttttgtgggggacaattttattaaaattgcatttgtcttagattgagagtttgaaggctttcctagcataagcacactttccttcacaaaccgagttccttattgcttttagaatttaatccaattacatctccttcatcatgtgtcctacataagtagtgctatcattttgttatttatctttcttttctctttttatcatgttcgacttgaattgtaggatcttatcttttcagccccttaacagtatagcaattgagtagatgctttttgttgttcaatttgaagtgtaggatattaaattagtacgctgattctgacctttatgtagcacacttaagttttgctaaatgtacatttttattgttgatctaaatttatttatgcagtttattgattttgatacattatatttgttcaaaaaggttgttaatcagtattatatttgatatcatgtatccaattnctgttgccttttgcattct

SEQ ID NO: 32980 - DNA, 308 bp, Glycine max
  Clone ID: PAT_MRT3847_129786C.1
ctgagaaccagaccctatcaaaccggacccgcacctgaagcccaagagcattggaatccgtaacttaccaacgcaccggctgctaagcgctggttgtctgggcacctcttcgaccgcttccaagatcggaggaaattgtgggtcagacaaccaatgcgacgctcgacttagctgcctaacatgtcctgccaatgcaaatacccgaccaagatgtttgcgtacacaaccttttagcccaacctccaatgtgagaggcttagcgttcaaccaaattgcatggctgacgactcataaatattatgctctgg

SEQ ID NO: 32981 - DNA, 190 bp, Glycine max
  Clone ID: PAT_MRT3847_129787C.1
cgggtacgaaaagacaaccaaaggcggcaaactatgaccctagccgataaacataaagaccgacctctgaaatttctctcaactctctaagaacatagagtgctgacttgacggacattcattctcagacttatgatagttatatcaatttaaaagaacatcctgtcacaatgccgaaccggatccttaa

SEQ ID NO: 32982 - DNA, 173 bp, Glycine max
  Clone ID: PAT_MRT3847_129788C.1
ttcgggtggggaaaagagacagaggggcatcatctataagccactaattcgtcctctagttaatttattaggttatttggtaattgggcggataatgacaaagaccatggtgtgtgtatattataccggcctcagggtcgcttaaagccaatgcttcatctatccaaacttct

SEQ ID NO: 32983 - DNA, 370 bp, Glycine max
  Clone ID: PAT_MRT3847_129789C.1
gaggtatctgaagtcaaagggcaagatgttgtttgtattatatatcttcacagctacattagactgacctcattgttggcggtttcatgctctgtcaatatgaggatttgattatgcctactcctcactagatatagacaaggtatgtttataagcacctaggggtagttaatacttttaattagattgttctgtttacttttatattactcgggttcgccataagacattacactgaggcttccccattttttattccaagtaaactttgtttttgttcttacccaaattaattttttaaattaagcacttgattcttttaatacgggagtggtatcttctatatattatgttatgttcacaacatttt

SEQ ID NO: 32984 - DNA, 115 bp, Glycine max
  Clone ID: PAT_MRT3847_12978C.1
attcccgggctgacccacgcgtcaacaccagacgacagaacgggtacgaggacacgtgatgacggcatgcctcgcaaatttgagttatcaggaactccctctgctccgacaggtg

SEQ ID NO: 32985 - DNA, 395 bp, Glycine max
  Clone ID: PAT_MRT3847_129790C.1
ccttcgcgtgcggaaaggcggactatcgatggagaccctactcttgacctgaggtgtcaatacctaagtaatgcagacttactggccaaaaatgctactaatcttgatgggtttgtgggttctggtcgatgatgcatagacagtgagtctctggacttgctagaaagtaagctagctgttctttgtttccatataaaaatctttgatgaactctagcctgttgggtacaggactgatggttatacctgacacaccttatgcttctgtataaggtgtatggccaagagggaagtcctactggtgatgctcttgttgcagatgcaacactatagaatgcgtaagagctatcttcagatggactgagcttaacctatgcttataatgaatatgctgtt

SEQ ID NO: 32986 - DNA, 584 bp, Glycine max
  unsure (1)..(584): unsure at all n locations
  Clone ID: PAT_MRT3847_129791C.1
caagatacctgttgatattttccacttaactttaagagcaacggagattagcttccctcaagctaggaaggttttcttaagcaaagttcataaatatataaaagacaacctgttagatgccaaatatgcatgtgcccttatatttaacatatctggaaccaaggattccaagccagaggagtttgcagaggacaagcaaaacctggatgacattattcatatgcattaccaagcaagggcttggctgctttctggacaatcagatgcaaatttgttgaccacttaccctgaaaacatccttccatacctagttcatgcccttgctaacatatcctgccccaatattgacgagtgcaaggatgttgaagcatatgaaaatatatacaggcaattacacttgatactgtcaatgctaatgcanagagttgaagatggcaagtcaaaagtggctcttatcaaagagaacgaaattatatctaccatcacttctatcttttggagtgttaagcaatctgcagatgtggttgattcatcggaatcggagaattcgcttgccctatgggacctttggggttagcatcact

SEQ ID NO: 32987 - DNA, 329 bp, Glycine max
  unsure (1)..(329): unsure at all n locations
  Clone ID: PAT_MRT3847_129792C.1
cgaggcatatgatgcttnatggttttgnagaggcccttctnggcanattcccagncaagagcggganattgttgcccttttctggcaaagggtnctgggatgttnatttcagncagggnctncagtcctggganaacttggnagaaagnaccagncaaancgttgctggtttaagtgaaattttcggcagcccagccttgtancttatgggattgggttacagttgttcanggctttggttttgaggcacccaaaacaaaggngnagnctttgcacaaggcaggattggagtaaggttatngncgcagctnctcagggtgattaacctt

SEQ ID NO: 32988 - DNA, 442 bp, Glycine max
  unsure (1)..(442): unsure at all n locations
  Clone ID: PAT_MRT3847_129793C.1
ggcaaacaccatcttgcattttatcacccattgaggtaaaagcgtcaagctaatgacattaaagaagcgcttcttgggaggcaacccagttctgactcctttcattttgtttttcgtgtattgcataagttggaatttgctttttgatcattgaaaagggggatatcagcttataatgagtcatagatattgggggggttggnntaccttgttttgaaaaaagtggctgaaaataaattaaaaacatttttaagaaacagtccattcagttagcgcatatcatgcgctgagcgcatctcagtttctcgttaagcgcacaaacctctgcatctcaaggtgattggctcgctaagctggtcatgggcgagcttagcccaattcaatttgatctgaattgggctaagtgagagtacattcaataagcgcatcatgtttagtggct

SEQ ID NO: 32989 - DNA, 283 bp, Glycine max
  Clone ID: PAT_MRT3847_129794C.1
gagggcacaaaaacttaatattattttattcacactgaaagactgcatacaaattgaaatgaattcaaactgccggacactaggtaacctaatatctaaataccctaacacgggaatgaaccacttgatcgggttggctggggctgaactcgactgaagagttctctgtgtgctgaacattattgttcagaacggcgtttggtgctttacattcaagggcgtgcctggccttagctaggtacttagttctgtcccacctgttccgtttctgcccggctcctct

SEQ ID NO: 32990 - DNA, 454 bp, Glycine max
  Clone ID: PAT_MRT3847_129795C.1
ggtaattaatcagacaaattaagctgtctggacacatcaagcttgcaaaatgttttgtacaatcgttcaaatgaatgttcacaaatagcatccatattaacaagggtggtagccaagtccctagcattatttagacaccccccaaaaccaatcccttcaatcaaaaaagtgtaagtagtttcatttggccgacaccctttggccaccattgcagccaacacctcaatggcatcactaactctactcactttgcacaacccaagaagaacaatgttgtaactaacaacacttggcttacactcactactctccatctccatgtccaccaacaactcaatgggctcatccaccattccatctctgcacaaacaagatattagcgaattatacgtaatcccatcaggatcaacacccttgtccaacatctccaaaatcattcctaatgctctaactt

SEQ ID NO: 32991 - DNA, 787 bp, Glycine max
  unsure (1)..(787): unsure at all n locations
  Clone ID: PAT_MRT3847_129796C.1
gacggctgcgagaagacgacagaagggggcattaagcagaatcataatctttcatcacatgcatcatatggcgcttctacttgtcgctctcttggctcttgttactacattaccatcggttactgttggagaagtgctttcacccattctcgacgttgcttcactgaaccgaaccagttttcccaagggcttcatttttggggcaggatccgcatcgtatcagtacgaaggtggggcaaacgaaggtggcaaaggaccaagtatatgggataccttcacccacaaatatccagataaaattgtggatagaagcaatggagatgtcgcaaatgaccaatatcaccactataaggaagatgttgggatcatgaagtatatgaatttggatgcttatagattctccatctcttggtcaagaattcttccaaaaggaaagctaaatgggggcataaatcaagaaggagtcaaatattacaacaacctcatcaacgaactaatagctaacggcttacaaccatttgtgaccctttttcattgggatcttccccaagctttggaagatgaatacggcggcttcttaaatccacgcattataaatgattttcaagactacgcggaactttgttttaaggaatttggagatagggtgaagtattgggttactttaaaccaaccatatacttatagtacgggtggctatgcgaatggggtaaaagcaccaggtcgatgctctaaatggttgaatccaaaatgcactgctggtgattcanggacagagccttattta

SEQ ID NO: 32992 - DNA, 206 bp, Glycine max
  Clone ID: PAT_MRT3847_129797C.1
tctcccacgcttcctttcaaactcctattgtagattgtatacctgcctaaccatttttctggctttggttgcactggcatggcgaatcggaataatttgagtttttcttcttcttaaaatatcaagcagcattggagaccaacttcttttcttttcaactgaaatggttctctttttatccttagttagcagaacctatttccaat

SEQ ID NO: 32993 - DNA, 504 bp, Glycine max
  Clone ID: PAT_MRT3847_129798C.1
aattttaaaaaattacttttgaagaataacattaattattacaagtgttaccaacaacattttaaaaacaatgtatgtatttgggggaaaaatatatcttttgaaataattaatatttttaatgaaatatgaatttcttttgtctctattttttgtaatatctttatttttaaaaataaatctagatatttaatattataatacttgatagaacttaaaatctttcaagattaatataatatttttttaatccatctccttccaaagttttcaattattcaatcaatacaattttaaaactatagtcctactaataaaaataataatatataatatcatataataattcaaattaataacaaataatagtatatttttaaaaagtgtgaaatttatttggggccttagatgatttgttgacctaaggtaacaacctaactggccttgtagttgccacggtcctgtactacatgatatattaatttttataataaaaaagtctgt

SEQ ID NO: 32994 - DNA, 380 bp, Glycine max
  Clone ID: PAT_MRT3847_129799C.1
ggctcgagcaaaatttgattgatccctcattaatacaaatctgcagctcaaattttctaattaatggccagatctcttaattgagaacaggatataacgttgcttgatttgctatactaacactatgtcattaacccattgttgcaattgcccttgggacaaaacctgtcatttgtacgtagtagaaaccactgccttacaatggaaaacgtacgctacttgcacactcctgtttacaacttagtcttgcaggtgatcgctaagaaacctcgtttaacttctgaaaccttccactattcgactatggaagcatttttgctctaaaactcctgtttctagccggcgaaggctctcattataaccatacagacctaaaatta

SEQ ID NO: 32995 - DNA, 625 bp, Glycine max
  unsure (1)..(625): unsure at all n locations
  Clone ID: PAT_MRT3847_12979C.1
ttcccgggtcggacccacgcgtccgattttgtaatacttacgctctattaattagcgtaaccataggtcaatcataaggggagggtcttccatcgccaaatttatagcatcttcatcagtaggcatgttgtccataggcggggatggggaaggtgtggatgtaggtactggggacgatctacgtgcatcaattgaggatggagatggggtggatgtaggtatcggagatggtccaagtgcattaacatgagatgaagatggtctagcttcagtcggaggtggagatggtgtaggtgcaagatcaggaggtctaactgggatagacacagaagatggggatgaggtagatgatggaagactatctcgaggtggtaatagtctaaccacatatcgtcttttctttgcaactgcccctttcccacttgaatcatgtgaagagggccggggagggtcaaccccacttgatgacatatctatatatagaaaaataatattataacataaacattgaaataaaatattgggatcaatgactattagataagtaacaaacttccatatcacaacaaaaataaaatatgctaaccaagttttgaagtattagaagaaaacaaccattatanct

SEQ ID NO: 32996 - DNA, 1854 bp, Glycine max
  Clone ID: PAT_MRT3847_1297C.1
attctccatcttttttcttcttcttgaatgtgcttctgttgccaaagtttggatctgtcatttttctcatcaagttactatctataattaattaaattcctcgtggaatattgaagaagccatgtctacagctgggcaggtcatcaagtgcagagctgcggtggcatgggaagcagggaagccactgtcaatagaaaccatagaagtggcaccaccccagaaaggtgaagtgcgtttgaggatcctcttcaactccctttgccgttattatcaaataattaattaaattcctcgtggaatcttgttgaagccatgtctacagctggtcaggtcatcaagtgcagagctgcggtggcatgggaagcagggaagccactatcgatagaaaccatagaagtggcaccaccccagaaaggtgaagtgcgtttgaagatcctcttcaactccctttgccgtacagatgtttactggtgggatgctaagggccagactccgctgtttcctcgtatcttaggccacgaagcttcggggattgtggagagcgtgggcaagggtgtgacacatctgaaaccaggtgaccatgctctcccaatattcactggggagtgtggtgaatgcacctattgcaagtctgaagagagcaacctgtgtgagcttctcaggatcaacactgacagaggagtgatgctcagtgatggcaaaacaaggttctccaaaaatggacaacctatttaccacttcgttggaacctccactttcagtgaatacactgttctccatgaaggatgtgtcgccaagatcaaccctgctgcccctcttgacaaagttgctgttgtcagttgtggattctgcacaggttttggggctactgtgtatgctgattttgtaaacccgaaagatcacaacaaaccagtccaagaggtcattgctgaaatgactaatggaggagtagatcgtgctattgaatgcactggaagcatccaagcttcaatctcagcatttgaatgcactcatgatggttggggtactgctgtccttgttggtgtgccaaagaaggatgttgaattcaaaactaatcctatgaagttcatggaagggagaactcttaagggtaccttctatggtcactacagaccccgcactgacattcctggtgttgtggagaagtacctcaacaaggagttggaactagacaaatttatcactcactctgtgccattctcaaagatcaacactgcatttgatcttatgctgaaaggggagggcataaggtgcctcatctgcatggaagagtaaatcaatgatgaatgatgttccctgctgtgagaacaatgtttctgtgttatgtgaaaagagaattgaataaatttggcatgcaattcggttgttggattcatgctatatgagtgtgtaaagaggtaacggggggtgatgactttcttggtcattgtcgtggctttgtgacttctattgcaaatgttgtcttgtaactttgttgtattttcggcaatatatctatatgatatctatctttcttaattcggttattggattcatgctacatgagtgtgtaaagaggtaatgggggtgatgactttcttggtcattgtcgtggctttgtgatttctattgcaaatgttgtcttgtaactttgttgtattttcagcaatatatgatatatgatatctatcttaatttctatcttacaggttccatgagaaggttacacaaagcgcggaagtaaaacttgtattctaattgggacacagcgcaagctgcacttaataatctggtagtttcgcccatcggtaaaaacctaatgtattgaacagcctttatcctagctaaattatc

SEQ ID NO: 32997 - DNA, 194 bp, Glycine max
  Clone ID: PAT_MRT3847_129800C.1
ggtgtgtcggtcttgtcttgttggtaaagaaagagaagagagcggtcgctctcgaggatccaagcctacttacgcttgcatgccacttcatacctcttctgtagggtcccctacaacccacttactggccgtctttatacaacgacgagactggtaaaaccctgtcactatctaacataatcacttcgaactac

SEQ ID NO: 32998 - DNA, 162 bp, Glycine max
  Clone ID: PAT_MRT3847_129801C.1
ccacgcgtacgcccactcgttcggtcatttactatgccttcacagggggtgatgaggttgcgtgctgagcttgagatcttggtccactacttgccctttatcttgttcacaatgccatacaacccgacttatatggggcggctgaaggtcgtggattgcaaa

SEQ ID NO: 32999 - DNA, 410 bp, Glycine max
  Clone ID: PAT_MRT3847_129802C.1
ggcccccccaaaaaccctaagaaaaaattcagggaaccccaacccacttttttattcaacattaaaaggggccccaaaaaaaaaaagggggtcctgccttgggataaacaaaaaaaacgggggggcccccccccaaaaggggaaccccggggcccatagcccattaacaggaaaaattttaaattttctcaggggggaaaggccggggggggttccaaagcctttggggagcaaagccctccataaagggggaaaccttttcccaaacatgggggggaaagggggtcaaccaaaaaatttttggggccggtggcggagacaaatcaacccatttaatcggaagggggccaaagggaaggttttaaaaacctagggattcgacacccccaaaacgattggggggccaaaaa

SEQ ID NO: 33000 - DNA, 422 bp, Glycine max
  Clone ID: PAT_MRT3847_129803C.1
cccacgcgtccgcccacgcgtccgtgcttgtggtaattatcccttcaacagagagcctcaatgtacaaaaggataaatactgcttgtggtaattttagtttacagttagtgactgtgagaggtttcttttggcctttggctatacaaaaagtgttatagagcactgagattcactatttttttagagcataagcatatttaagcagggatagatgagataactattttttgttttgtatccttggcaattctaagagagataaagttgagtccggatactcgttgggggtatcaaggttatttagatattgctttagcatttatttgcgtctattgtattttatgggaagtgttggaccaaaacaacagtaaagaaattattttgcaacttgtgactagtatatatgatattgtttcacccc

SEQ ID NO: 33001 - DNA, 352 bp, Glycine max
  Clone ID: PAT_MRT3847_129804C.1
aagcaattcaactgtatctagttttaattactaagtctcgctgaatatcttcattaagttttaacttattaaatcttatttaataattactttattaaattcataaatacatgagttctcatatataactaaattaacttgtcaccacaataatccaaagttgtactctccatgcagaaacattggccactaggttaactctccatcataaccttccagtgcagaaaggctataaggtctcagtaactatccgcaatactcaacagagaggaatatgttccaaggattccacaaatgactccgaatgcagcaattgcaacactgagtgcaacctgtgtctttgtagcttttt

SEQ ID NO: 33002 - DNA, 386 bp, Glycine max
  Clone ID: PAT_MRT3847_129805C.1
gacagcactaactattaatgaagatgagtgtgaagaacaacatggtggtgctaaaggtgtggctgtcgcttcttttccttgttggggttactgatgcacacatggaactgaacttgatcaaaagcgatctgtcatcaggttatgatgatgatgaggattcacatccatgctgtgatctctgcttgtacacacgctcaatgtctgatcaatgcagatgtgaagatattaagctgaattcattccagtgagattgtaagatctgcatgtgcacacgcttacagccatgacagtgtccttgtattgactccaacgacttgtgctacgaactttgctagtccataaatgactagaataactaatagctatgctaaatggacgaatccctt

SEQ ID NO: 33003 - DNA, 1706 bp, Glycine max
  Clone ID: PAT_MRT3847_129806C.1
gtttctgctgcaggcagatacatagatagatggcatattcatattctctttagagtgtgtttgtattctgactatgctacgcacacacaaacacaaactgctgcatattgttcacacttttctttgcttttcttcgaaactctcccaaatcgcactctctctctctctctctctcataaattcgccaccttttattttgcgtaactgctctgcaccttagtcttctctctccattctccaactccatttcttcgatctggagctctccgctttcaaagctgtcaaatttccgattcgggatggacaaatacgagctcgtcaaggatataggatcttgcaggttcgggcaggtcaatcgattgatggcatattcatattctctttaggctccccgctttcaaagctctgaaatttccgattcgggatggagaaatacgagctcgtgaaggatataggatctgggaatttcggtgtggccaggctcatgcgacacaaagacaccaaggagcttgttgccatgaaatacattgaacggggtcacaagattgatgagaatgttgcgagggaaatcataaaccatagaagtcttcggcaccccaatattattcggttcaaggaggtggttctgactccaacccatctgggtattgttatggagtatgcggctggtggagagctctttgagaggatttgcagtgctggaagattcagcgaagatgaggctcgatatttcttccagcagctcatctcaggagttagctactgtcattccatgcaaatctgtcatcgagacttgaagctggagaacacattattggatggcagcccagccccacggctcaaaatttgtgattttggctattctaagtcatctctgcttcattctaggcctaagtcaacggtgggaaccccggcctacattgcacctgaggttctttcacgtagagagtatgatggaaagttagcagatgtatggtcctgtggagtgactctttatgtaatgctggtgggagcatacccatttgaagaccaagaggatcccaaaaatttcaggaaaaccatcaatcgaattatggctgttcaatacaagattccagactacgttcacatatctcaagactgtagacatcttctatctcgcatttttgtggcaaatccagctaggagaatcaccattaaggaaatcaagtcccacccatggtttgtaaagaacttgcccagagaattaacagaagtagctcaagctgcctactacagaaaagaaaacccaaccttttctcttcagagtatagaggacatcatgaatattgttgaggaggccaaggctccacctccagcatccaggtcaattggaggatttggctggggaggggaggaagaagaagaggatgaaacaaaagaagcagtggctgagactgaagaagatgagtacgaaaagagagtcaaggaagcacaagcaagtggggaatttcatgtcagttaaaaagtgtttatttttagatagagagcaattgattcttggtttcctttgcacttagctaagttcaactaaggtgagtgtgttttgcttgtatgtataaaattaagttttccgcatgggacatatagtttaataaatggctgtacatttttttaaggttgtgcatggtaaggttgtgcatggttgttaattgtgatcatattataagtattattaacctgtccct

SEQ ID NO: 33004 - DNA, 1906 bp, Glycine max
  Clone ID: PAT_MRT3847_129807C.1
attctgactatgctacgcacacacaaacacaaacacaagaattcttttgtctctttcttatcagtattttcttcccctgcgttaaagttaaagttgcaattcctctgttccttcaattgttcaaatcccgaaattatcattaaccttgctgcaaattgcgcacacgattctttgctttccttcgaaactctcccaaatcccactctctctctctctctctctcataaattcgccaccttttattttgcgtaactgctctgcaccttattcttctctctccattctccaactccatttcttcgatctgcagctctccgctttcaaagctctcaaatttccgattcgggatggacaaatacgagctcgtcaaggatataggatctgggaatttcggtgtggccaggctcatgcgtcacaaagacaccaaggagcttgttgccatgaaatacattgaacggggtcacaagattgatgagaatgttgcgagggaaatcataaaccatagaagtcttcggcaccccaatattattcggttcaaggaggtggttctgactccaacccatctgggtattgttatggagtatgcggctggtggagagctctttgagaggatttgcagtgctggaagattcagcgaagatgaggctcgatatttcttccagcagctcatctcaggagttagctactgtcattccatgcaaatctgccatcgagacttgaagctggagaacaccttattggatggcagccctgccccacggctcaaaatttgtgattttggttattctaagtcatctctgcttcattctaggcctaagtcaacggtgggaaccccagcctacattgcaccagaggttctttcacgtagagaatatgatggaaagttagcagatgtatggtcctgtggagtgactctttatgtaatgctggtgggagcatacccatttgaagaccaagacgatcccaaaaatttcaggaaaaccatcaatcgaattatggctgttcaatacaagatcccagactatgttcacatatctcaagactgtagacatcttctatctcgcatttttgtggcaaatccagctaggagaatcaccattaaggaaatcaagtcccatccatggtttttaaagaacttgcccagggaattaacagaagtagctcaagctgcctactacagaaaagaaaacccaaccttttctcttcagagtatagagggcatcatgaatattgttgaggaggccaagactccacctccagcatccaggtcaattggaggatttggctggggaggggaagaagaagaggatgaaacaaaagaagaggaggatgaaacaaaagaagaagcagtgaccgaggctgaagaagatgagtacgaaaagagagtcaaggaagcacaggcaagtggggaatttcatgtcagttaaaaagtgtttattcttagatagagcaatagattcttggtttcctttgcacttggctaagttctactaaggtgagtgtgttgtgctcgtatgtataaaatttaggttttccacatgggacatttagtttgataaatgactgtacatttttttaaggttgtgtttggttgttaattatgatcatattataagtattaacctgtcctttttgctctctatcccactcttctccctatttatctcgcagtagggatttagggacatatgcttctctttggaggtcaaaatgcttggtatagtgtcttcttgtatccgtttcctttccctttggtttagttttaaggcctaaaagagtttccttgtgttaagtctggttttatgactatgctagtagtgatgcctgtttcagttcgtagctatctgtttctcagctatgacttgacgtcgtggaaagcaaaatatagtttagttcaacataacct

SEQ ID NO: 33005 - DNA, 345 bp, Glycine max
  Clone ID: PAT_MRT3847_129808C.1
cactcatccttatacactatctataaaatatattatttatccatctgtcttcatctaatttctacagatattttcaaattcaagtgcatacaccaaccaattcatacattttcaatcccattctcacatcaacaattttaatcatcatcaaaactttaataattttccaatacttcttacaatatactttatccacattaatttcctcttaataattcattgtatattaattcaatctttatcatctcaaacatcttttataacacaacttcatcctcttcaaaaatcaaacctagctatatatacactcacaataaatcaaatcaatcttctttaatccttatt

SEQ ID NO: 33006 - DNA, 768 bp, Glycine max
  Clone ID: PAT_MRT3847_129809C.1
ctctgccaaatgtttatcataaatgctggccctggatttaggttgctatggaacactgtcaagtctttccttgatcccaagacaacttcaaagattcatgtatgtagaaatgctatattgtagctgcctaaggctcttttcatgatggcttatggctgctgacattgcttggtgcctctatggaaatattacttaggttctcggaaacaagtaccaaagcaaattgtttgaaataattgatgccagtgagttgccagaatttctgggaggtacctgtacctgtgcagatcagggtggttggctcagatctgataaaggaccctggaaaaaccctgaaattttgaagatgattctcagtggtgaagcacggcgagcaaggccagtagtaaaagttctaaacagtgaagggaaggttattgcctatgccagaccacaatatccaatggtaaaaggcagtgacacatccacagctgaatcagggtcagaagctgaagatatagcttctccaaaagtgacgaagagctactcacacctgaggttgacacctgttcgggaggaagctaaggtagttggaaagttgagctctgctggtggtggtaacttagctgggtatgatgaatatgtaccaatggtggacaaagctgttgatgctgcctggaagaaccaagcatcactccagaggtctcaaacttcaaaaggaaaacctccccttcctgacactcctaacccccctgaagggattcgagctcggattgtggagctctaact

SEQ ID NO: 33007 - DNA, 603 bp, Glycine max
  Clone ID: PAT_MRT3847_12980C.1
aagggagtctccgcttatggtgcaacgacgacgcggtgttgagaagattgtgcaatggggtaggcgatcatggatcataaccaccatcatcgtcatcacaatcacaatcatgctcttcacaccacccctctctccgagcccaccacccccaccacccctcgccccaccctcttcctctccacctccggcaaggccctcctcctctccaactccaacaagcgcctcgacacccccaggaagaaatatgtcaagcaggtcaccggccgccacaacgacaccgagctccacctcgcctcgcagcgcggcgacgtggactctgtccgccacgtcctcgccgagatcgactccatcatgatggggagcttggagttcgatgcggagttggcggacatcaggtccgccatcttcaacgaggtgaatgatctgggagaaaccgccctcttcaccgtcgcggaaaagggccacctcgacgtcgtccgggagctcctcccttacaccaccgatgatgcgctttcctccaaaaaccggtccgggtttgacaccttgcacatcgccgctagcaatggtcatcttgccattgtgcaggcgctactaaaccatgac

SEQ ID NO: 33008 - DNA, 371 bp, Glycine max
  Clone ID: PAT_MRT3847_129810C.1
ttccaacgaaaagaattcgattattgtatcgattcagcaattagaactaaagtgttgttcccaaatggagaagttcaccagaagcatgctggtataatttcaggaacagctggaaccttgttatttaactctttacttaatacaatcgctggttatactatattaaatatgatgcgaatgtactcattccaagatcaattcgattttattaataaaattgaagatccaaattggttgggtgatgatttcgccttttttacatactacgatttcgacttggaacttttttcccatttgatgttcaagtattttaacgtggttgtaaaaccagagaagacaattagaacacagatactcggtgatcgaaaata

SEQ ID NO: 33009 - DNA, 1159 bp, Glycine max
  Clone ID: PAT_MRT3847_129811C.1
cgctcattgttctcccgagcggatgcgcctcgagtacgcccgcgtggggtcgacaggcgggggctggaggggcctctggatctggggtggagtttcctcgcgtgtcgctgtttgcgaagccgcgctttgccgggttcccctgtcacccaacttgttctcccaaagaattaaaaataagaaagttcacacattgttctacgattgaaagcacgttgaagagagaagacgacagaagggagggggaaacttgaagtgccatcggataagtggtggagtttgtttatttgattgattttgcaaatcaattgaatgattggatccccaatcaccccacaaggtgtgattgaaagaaaaaggggcatagggaaagttgaagttgaagtgaaaaatatgcagagtgataaggatagagaagaggacatggacaggctaagtgacttgcctgactttgttttgcttcatataatgaaatttatgagcatgaaacatgctgttcagacttgcgttttgtctaaaagatggaaggagctgtggaaacgtctcacgaatttggcgttgcattcctcagactttgccgaccttgcacatttcagcaaatttttatcatgggttctgtcgaatcgagacagctccatttccctgcatagtcttgatttgaggcgtaaaggctgtatcgatcatgaactcctggacatgatcatgggatatgctgtgtcacatgatgtccagcagttggcaattgaagttaatttgaatgctaaatttggttttaagttgcaccctagtatcttttcttgtaaatctttgacatttcttaagctttccatctgggctgtcccttggatgactgaacttccaagttccctgcagttgccagcattgaaaagcttgcatcttgagcatgtcactctaactgcaggtgaaggtgactgtgccgaggccttctcaacttgtcacgtgttgaatactttggtcattgaccggtgtaacttgcatcatggtgcaaaattcctctgcatatgtaattccaacctttctactttgaccataggtagtaccattcaagaaacaccctacaaatttatactttctactcccaaatcttagatctctttccgtgatgcgtgatcctattcaccaatctctgcttgcaatcttt

SEQ ID NO: 33010 - DNA, 346 bp, Glycine max
  Clone ID: PAT_MRT3847_129812C.1
acggctgctagaagactacagaagggggagccttacagagagtggtttcagtgatagagggccggggactcgatttaataagattcgccatcgtctatttacgtgcatgccaatcacaaacatttccgtaggtaaggccttacgaggcgactcacccccacacgtagaaggctggtttggctgaatttatctcaacattcatctatgcgttcgcctactcaagctcgtggatcgcattcaataagcttaccgacatcggatctgccactccctgccggattcatcttcgcgtccatcgtccatgcattctccttgttggtcgccgtcttcgtcggaactaacattt

SEQ ID NO: 33011 - DNA, 333 bp, Glycine max
  Clone ID: PAT_MRT3847_129813C.1
aggcgctttcgttttttttttttttttgttttttttccacttattggtttgcttaaactcaaagggtagccccgcctgacctgaaggctccccttttggggtttttttgaaacagaacccttttggagttttttagaaaccgtacccttttggggttttttagaaaccgtacccttttggagttttttagaaaccatacccttttggggtttttttgaaaccgtacccttttggtgtttttttgaaaacaaacccttttggggtttttttaaaaccggacccttttgtcgtttttttgaaaccgaacccttttggggtttttttgaaaccgta

SEQ ID NO: 33012 - DNA, 662 bp, Glycine max
  unsure (1)..(662): unsure at all n locations
  Clone ID: PAT_MRT3847_129814C.1
aaaatccatgagactgcgatgtaaatgaatactgattttcttgagcaatttcagnggggtccggttttaaagcctcttgttgtgaaatggaagtatgttcataggtcccagcacttacaccagttccttgaactaaatttccatctgaggtagtagtagcagtagtagaaagatgctcatccccgtaatagtcaggatttctagtgtctgagttctcaattgttgaaacatctgttgcaccagatgtatcctccaagctacttttcaaaggcctagatgtaaatgacccagatccagaaagggggtttccagatccaaaacttccaaagctcagattcatgcattctggagtatggagtagtaggtgatttggaattactacagaaggattgtcatgttcttgttctgtcccctgatcatctctctgtatatttagctgctctatgtttgcagccactgatgaaacatcatcttcagctcctgtgttatcctctgacgtacttttagcagatatagaagcagattcaacattgtctgcattctcaacagaaccatcttcagctccatgttcatccaagtgagttttctgctgccaatcagcttcagcaaagcttgacgagtttgcatagcactcagaatttgcatgggcatcaacatctgca

SEQ ID NO: 33013 - DNA, 333 bp, Glycine max
  Clone ID: PAT_MRT3847_129815C.1
tgtacaatctgattctctatctgtgaaggaaaagtttggtgattctcttctattgttgaagctcaaaatttggaagccaacaaagaaaatgttgagtcttttagacacacaacacttctggtaggctagacatgctaacgataaaaattctaaataccgcaacattgataacttacaagatgatcatcaaacgtgctttgagccaccactctgaagattgacaaccgttcacaaaggaatgctatgacacaagctaactcaccatgaacactactctactatactgggaaacacattagactgacactccactacaaaaggccagcatatgga

SEQ ID NO: 33014 - DNA, 1934 bp, Glycine max
  Clone ID: PAT_MRT3847_129816C.1
aattcggctccagcaaaactactgtaacagaagaccgagatgtgttggtagatgcagctgctgataagatggaaagggatttgattcttcttggtgctactgcagttgaggatagactgcaaaagggggttcctgaatgtattgaaaagctcgcccgggcaaaaatcaagttatgggtattaaccggagacaagatggaaactgcagtcaacatagggtatgcatgtagtttacttagacaagacatgaaacagatagtgatcactctggattcaccagatatcctatcattggaaaaacaaggggacaaggaagctctatcaaaggtacatgaccttggaagttttttggcatttaatttctctcagaattatagatctttgatacaacaattgcttaggcctctcttgaaagcattaagaagcaaattagagaaggaatctcacaaatcaagtctgcaaaagagagttctaatacaaataaaggaagttcttctgggtttggcttgataattgatgggaagtccttggattattctcttaacaagaatttggaaaggtccttctttgagctggcaattaattgtgcttctgtcatatgttgccgatcttcacccaaacaaaaagctcgcgttacaaaattggtgaaattgggaacagggaagacaacattatctatcggcgatggggcaaatgatgttggcatgcttcaggaggctgatattggagttggcattagtggtgctgaagggatgcaggctgtaatggcaagtgattttgcaatagctcaattccggtttctggagctccagccatatgcacttcagctctggtgttatcggcgtatatcaatgatgatatgctattttttctataaaaacattgcatttggatttaccctattttggtttgaggcatatgcttctttctctggtcaagctgcttacaatgattggtacatgtcattttacagagaaatcttgtagtagggcatgaagttggcttatctgatgatgagttacctaaacaagtccaggacaaactactacatctgagagaaagattgaagcaaagggagttgtgaaaatgtaaatgcttctaaacatccattcttagaaacttgaaattgtatttagtttcttgctgagttgggaagtggcattgaagtagtagtgagaattgcaaatagcttttaattttaattctttacttttcctccttcggtttccaatttttttttaagatagaagaggcaggatttgtgtagcagtcacctgatgtagattagctatgtaaagcttgtgtaattgttgtgccaaaaaaggcctttctatttgtgaacggaaaaagcaatagatatttgatatatacgatctttattattgtcagcttacagggtttttgtggaagcatgtgctccaagtggtctatattggctggttacccttttggttgttgtgtgtgtgcttctaccctatttctcctataggtctttccaaagtcggtttctaccaatgtaccatgatattatacagagaaaacaagtagaagggcatgaagttggcttatctgatgatgagttacctaaacaagtccagggcaaactactacatctgagagaaagattgaagcaaagggagttgtgaaatgtaaatgcttctaaacatccattcttagaacttgaaattgtatttagtttcttgctgagttgggaagtggcattgaagtagtagtgagcattgcaaatagcttttaattaaaattctttacttttcctccttcggtttccaattttttatagaggcaggatttctgtagcagtcacctgatgtagattagctatgtaaagcttgtgtaattgttgtgccaaaaaaggcctttgtatttgtgaacggaaaaagcaatagatattttatatatatgatctttattgtc

SEQ ID NO: 33015 - DNA, 320 bp, Glycine max
  Clone ID: PAT_MRT3847_129817C.1
ctcggaccgtgcggaccgtgcggaccgtgcggacctggtgttgatcggatgctagacagggatgaaaatgaagtccttgtttttgtgtcaatttggagatggcaatgccatgcgtcatatgtccttcaatgaacactgctatggccactcggaggaaagccaagtgaggctgtggaaccaccatttggttggaccattctagaggcttgacaacaaagatctcatgcgacaattgaaactcaacagtaccacagttctttatgcaagacctgatcatcaggcacttggtcattaatgacgactttatttcatctcaaaac

SEQ ID NO: 33016 - DNA, 293 bp, Glycine max
  Clone ID: PAT_MRT3847_129818C.1
atatgatacactatatccctctttctttctctctgccaaaacgagtatttgggggaggattacattcatattgctaccgttgcaaccaccatccttatctttaaactctaaaaatgcatcatctaaagctacaatactccttcaattataaaccctattcatatgcataaccccaacaccttactctcacctataaccgctttcgcaactcttaatcttcttattatgtagacagataaaaataaggttgaatgataaaacaagtatccaagttcgatatctaaacgtactaa

SEQ ID NO: 33017 - DNA, 534 bp, Glycine max
  Clone ID: PAT_MRT3847_129819C.1
gtttatttgggagcagaatcctacatggttgccacacatgggaaaggccttgtaagaattttgttggagttttggttttcctagtcctggacgtcttcttagtataagcatcgggggaagctttgggagttacattggtgtagtgcatatcatggtgtgaatatctggatcaaaatgttggctcctcagtggactctgcatactaaaccgtgtagtcaacgtgttcaagtcattcataattatgtccaccggtgactgcaaatgcaaaacctgcttcctcaaatcatcctgggacatcagatacatgtttttcatcagtctgatataatttttagggtctgaaataaattatattgcatatgtttttgaaacacattacctgattttcttcttttccttcatcttgttttggagatttgacaaacttctcttttgccttcggtgagggaatgctttccacaaagctatgacttgttttaaaaaataagtcagtaaatatcatgaatcttgttgtaatgaaatataatttaaaca

SEQ ID NO: 33018 - DNA, 458 bp, Glycine max
  unsure (1)..(458): unsure at all n locations
  Clone ID: PAT_MRT3847_12981C.1
ttagggtctactcccttttccaagctcctcaggattctggatcttactatgctgtcctgagcggccttcgagttccttatctcatggaccttcttccgtatcttggtcaacaacatggatggattttacattgttccagcttttatggacaaaccttgttgtttacattaccaagaacttcatgaccctgcccaaacatcaaggttcctttcattctggtatctggggaggcaagggacaaggaaaatccttccaatgtgagcttgtctttgccaagatgggaatcaaccccatcatgatgagtgctgggcagtcggaaagtggaaattgcttgagagccatcaaaactgatcaggcatagataccgtgaagccgcagacttgatcaataagggaaagatgtgtgctccttttatcaacgatcttgatgcacgagctggtcgtnttggtggtaccacc

SEQ ID NO: 33019 - DNA, 134 bp, Glycine max
  unsure (1)..(134): unsure at all n locations
  Clone ID: PAT_MRT3847_129820C.1
ctcaaaacgaattttgaatcgtactcggttttaattgttatatttaactacgctactattccaacttggggtggggatgcntattaaaggaggggggaaccgcccaatttctgctttcaccccttatgttctac

SEQ ID NO: 33020 - DNA, 153 bp, Glycine max
  Clone ID: PAT_MRT3847_129821C.1
aaatccccaacttttaccaaattttttgaaatactggtggatatcactggaaactgtctaaaatctcaaccaaacgggcaaacccattagagaaaccattctgaacacttcttcttcactgataaacacgagctgatcacttattcatttaat

SEQ ID NO: 33021 - DNA, 119 bp, Glycine max
  Clone ID: PAT_MRT3847_129822C.1
ataaacactccagcaactcctcaatatccactacacacttcaatatgagcgaaattcccaaggagcaatgggcgcaggtcatcgagaagaccggcggacccgatcgattacaacgaaga

SEQ ID NO: 33022 - DNA, 573 bp, Glycine max
  Clone ID: PAT_MRT3847_129823C.1
cacgatgccgaaggaagtcaagcagaagtctggtctcatcgttggcctcaacgccggccacaaggtcacccccaggacccccgctcccaggatctcgaggaggaagggtttcctctccaagcgcactgcgtttgtccgtgagatcaccaaggaggttgctggtcttgccccatacgagaagcgcatcatcgaattgcttcgcaactccaaggacaagcgtgcccgccgtctagcgaagaagaggctcggtaccttcggtcgctcaaagagaaaggtcgacgagatgaccaaggtcatcgccgagtcgaggcgcgctggtcactaaacggtttcacgatttgcggtggatgaagcaacacggcgaacgagcgaccgacttactttccgattttatcctgggtgttcggtctcttttcacaacgggcggctcgatacgatctcggaacgtcacagcataccacaaaagtatgacacgattcatcggagtatggcaatggacaatggtggttcttaaacgtacctagcatgtgtcactcaaaatcatgaaatgtgacgattggttcacgccaaacc

SEQ ID NO: 33023 - DNA, 652 bp, Glycine max
  Clone ID: PAT_MRT3847_129824C.1
tacggctgcgagaagacgacagaaggggatggttgacatagtgaaatataactcatcaatgcattaacgatcctctgattcattgacattgactttctgtcgacgtacgcaacaaacaatgggtttgaactcgctgttcaaccgcaacagggacggcgacggcgacggcaccatcgattttgaggagttcagggtcatgatgatgatgatgggctcgcgccatgacaccaccgatagagttaaaaatgtttcagaaacttgaaatcttgcatttcttttttctttgtaggaaactactcatgcatttttagattttaagcttgcttcctgctggattcaatttctgagattcttctttccatactttttccttccctgttgatgttttttcccccatttattatacacacattattattctaaaaaaaaaaaaaaaaaaaaaaaaaaaaaaaaaaaaaaaaaaaaaaaaaaaaaaaaaaaaaaaaaaaaaaaaaaaaaaaaaccccaaaaaaaaaaaaaaaaaaaaaaaaaaaaaggggcccttttaaagaaaccaattttaacacccgggggttggaaagaaaaaattttttttttaggccccaaaaattaaattaagggggcgggtgttaaaaacgggggggggggaaaa

SEQ ID NO: 33024 - DNA, 162 bp, Glycine max
  Clone ID: PAT_MRT3847_129825C.1
ctcctaaagcgggccgcccttttttttttttttttttcagcacatgttatgaatgacatattgtagaaatattaaagaacgattcattgaataccacagctagcaaatctgcataaaccaggagacgagctgaataaatagtgccatacctctgaaaaaggg

SEQ ID NO: 33025 - DNA, 634 bp, Glycine max
  Clone ID: PAT_MRT3847_129826C.1
ccgccacctccgcctctgtcgctactccccacgccctctccgatcgtgtggcgcagttcggcgagggcgtggggaggttcttccgcgagctgcgggagatggcgcggtcggatccgcggaaggtggtgtttgcgggcgaaggcggagctgtcgctggcgctggtgtcgctgttcatttacatcaaggaggagcagctcagcaagtactccatctgggccattctcaccgtcgttgtcgtcttcgaattcagcgtaggtgcaactttgaacaaagggttcaatcgttctttgggcacaatttccgctggagggcttgcgctgggaattgctgagttggccgttttgtctggaaagttcgaggaacttatcattgtactatgcatatttatcgcaggattttgtgcaagctatgtgaagctactgcctgcaatgaagacatatgaatatggttttcgtgtgtttttgttgacattttgtattgtattggtatctggaagaactagcagggaatttttctccacagccttttatagattaattcttattgcaattggtgctggcatatgtttggttgtaaatattttcatataccccatctggtctggggaggatctgcataaattggtggtgaaaa

SEQ ID NO: 33026 - DNA, 236 bp, Glycine max
  Clone ID: PAT_MRT3847_129827C.1
gctgcgcgtgcaccgtttttcttaactttgactttcgctatgattgttatttgattttttctattctgatgtatgcatgtgttgacgctggactgagaggatgtgcagcgctgaatctacctgtatgttccaagcaatggacctgctggtagggcttcctaggatgcatatgccaggaagaggacattgatggaggttggcttggacattaagagagatctactagaagtcatgag

SEQ ID NO: 33027 - DNA, 382 bp, Glycine max
  Clone ID: PAT_MRT3847_129828C.1
tgaatgttgaattccttctggatgaccgctcacagaggtgtgcagtagcatttataatgagatgctcatcagatatagctatgaaaaattactgcgccaggcaaaagctccaagtatgtgtttacaatcctgcaaaaattttgttgctttgtgtgagtatggtgattatcactgtaattagcgttcatgaatatgacaagccttactttaaaggttctaaaatgaaaagctatctagctagttataacatcaccattgctgatggtattgacaaaactagttcaactttataatttagaaagttatcacattgttattttctcaaaagaaactttaagcagttgtttaatgtattgtgcatcgctcctgaggacaaggctag

SEQ ID NO: 33028 - DNA, 369 bp, Glycine max
  Clone ID: PAT_MRT3847_129829C.1
cctagttctagatcgcgagcggccgccctttttttttttttttttactacttaatcagtcattcatcctatataatatggagtaatatgagtatatgacgttgcaattttctagatgccacttatgacaaaaaacgcccaccacattctaccctgcacagttgtaaggggaacttgagaggaacttgcaactagtcaatggggcgttttacaaaggattcaaattcaactagcttttacaaacgcccaccaactagttttctttatattataggaaaaccactatagtcaggattagcaggcaaaggtagtttcttagtcagctcctcctgctttccttgtttctatgcttaggtattcttagttgact

SEQ ID NO: 33029 - DNA, 496 bp, Glycine max
  unsure (1)..(496): unsure at all n locations
  Clone ID: PAT_MRT3847_12982C.1
gccaatcagtgacaatgcaagaagtattgctaagatggcaagcataatccatcatattcgtaatagaactaatacccttaatactactaacaacactactgctaccataagcaaagaatttactattaaatctactactgtantatctttagccctatttagtacatttataagcatagctagaattttaactattaatatcttaactcccaaagtctttattaaactcatagttaataccatgcttccttactaattttctaccataaccatgaagagtattgaaagtacatctttgaagatcatgtaaaagattcgtaaacgaggtaacaccattcgacaactaatgaagagtcataccaagcctgattattgcacctacatgaaaatatctactaatgcatccatcaaagaaatgatgcggtgtagtacgcttatcatgcgcacgccactcatgagtanaatcgttctcgagagtaagaacactatgggagta

SEQ ID NO: 33030 - DNA, 722 bp, Glycine max
  Clone ID: PAT_MRT3847_129830C.1
attcccgggctcgagtacgagaacctaacatgcatttaattcaaacaactcctcagttagtttcatttcatggctaactattcccaccctcatatatctgccaatgtctgagtcacttgctgaccctccggcaacatttttcagtcataattgccggaaaccgccacaagaccggccaagagttggcggaggaagtgttgtccttggcacaaggcctactccaccttgggctcacacctggtcaagtggttgccatctctgctttcaatagtgataggtatctggagtggttattagccattgcatttgttggaggaatagctgctcctctgaactatcgctggagttttgaagaggcaagattagcaatcaatgcagtgaacccattgatgttagtgactgatgagagcagttacgcaaggtactcaaaactccagcaaaatgatgttccatctctgaagtggcatattttgttggattccccttcctcggattttactaagtggaatgtgttaactgctgaaatgcttaagaggcatcctgtaaaacttctaccatttgactactcctgggcgcctgaaggcgctgtcataatatgctttacttcaggaactacggggaagcctaagggagtcaccccttagtcatggagctttgatcatacaatccctagccaagattgccatagttggctacaatgaggatgatgtctatctgcatac

SEQ ID NO: 33031 - DNA, 522 bp, Glycine max
  Clone ID: PAT_MRT3847_129831C.1
ttttttttttttttttttttttttttttttttttttttttttttttttttttttagaaccaaacaaaactatcgggcattgaaaggctttttggcccacaaaaagggacaaagggtacaataccgcctctcgggtcgaaaaaattccccagcccaaaaaaaaaaaatcaaacggggggtacttcccctcttcaaaaagcccatataaacagcgctctatgaaggatttggcaaataccaaaaaaggggcgcccaagaactgtccaagcatttaaaggacccgcccaacgggggacaaaaactagaggtcaaaagggaggggccagaccgggaggacaattaaggggaggggcatttgccggcccgggacgaaacaataaggggcggggggttccccggggggctaaggacccaacccaccccctagggggcccgggggccccaggaccgaaacccccgcataggaaacaggggtgcgggatacccgaaaaaggggactggggccccctttttgtggattctc

SEQ ID NO: 33032 - DNA, 798 bp, Glycine max
  unsure (1)..(798): unsure at all n locations
  Clone ID: PAT_MRT3847_129832C.1
gacgtgcgcccacgcgtccgcccacgcgtccgcccacgcgtccgtccacgcgtccgcccacgcgtccgcccacgcgtccggttcagtataagaatgttgttttcacggtttgggatgttggagggcaagagaaatttagggctttcttggtggcgctgtggttaacaatactcgangggttgatatatgttagaagatagtctggaccgcgaaaggatggggaaagcaaaacaggaatttcagacaatcataaatgatccatttatgctccacagtatcatcttggtgtttgccaacaaacaggacctgaaaggagcaatgtcaccaagggaaatatgtgaagggttaggtctctttgatctcaagaatagaaagtggcacatacaaggcacttgtgctcttcggggagatggtctttatgagggtttggactggttgtccacaactttgaaggagagacgagctgctggatactcttcaataggactaggaacttcatccttctaattttcaagaggtattttggcaatggacgaatgtgttgagtgtgtggccagttctaagttgatgtgatcgataatcaaatattttttgggttacatctgaagctctcattagtagaaagttgcttcgcctttcagggtgctttaaatatgtatgcgactttgctccaattatacaagtttgtgcatgacgaatgattaactaaattcttttgcgatattgatatcccttattaagtgcacttgtactggatagaagttaacggatactggatcacttgttcattctcccccg

SEQ ID NO: 33033 - DNA, 1296 bp, Glycine max
  Clone ID: PAT_MRT3847_129833C.1
aattcggctcgagccgctcgagccgctcgagcggctcgagagaagaatatattcctgcgttttttctattaacattgaacataaaggtgaataattttctttgtaataagataatataaattaaaaacggaaatgcgaagattcttaattttattgaggtgttgtgattcgaaatcaaactgaaggcaacgccactgcaatctgttctaattagaaatagaaggttcatcatctcaaaaaggcttttgtgattctcgatttgatttggatcgcacagaacgaaggcatgggtcaagcttttcggaagctcttcgacaccttcttcggcaacaccgagatgcgggttgtgatgcttggtctagatgctgctggcaaaacaactatactgtacaagctccacattggagaagttttatctactgttcctacaataggttttaatgtggagaaggttcagtataagaatgttgttttcacggtttgggatgttggagggcaagagaaattaagggcactttggaggcactattttaacaacactgatggtttgatatatgttgttgatagtctggaccgcgaaaggatagggaaagcaaagcaggaatttcagacagtcataaatgatccgtttatgctccacagtatcatcttggtgtttgccaacaaacaggacctgaaaggagcaatgtcaccaagggaaatatgtgaaggattaggtctctttgatctcaagaacagaccggggcacatacaaggcacttgtgctcttcggggagatggtctttatgagggcttggactggttgtccacaactctgaaggagagaagagctgctggatactcttcaataggactaggcacttcatccttctaattttcaagaggtattttggccttcggatttggcaatggacgaatttgtagagtgtgtggccggttctaagttgatgtgattgataatcaatttttttgggttacatctgaagctctcattagtagaaaagtgctaagcctttcagggtgctcaagatatgtatgtggctttgctccaattatacaagtttgtgcatgacgaatgattaactaaattcttttgccatattgatatcctttattaagtgcacgtgtgccggatagaagttaatggatactggatcacttgttcattctgccccgatttcctccatctcactctttgtagtatttctgtgtggctgtacctgtggtgattcataaaaataatgattctgacaaatgtgtcaaaattctctaatccaaaaagggcggccatgtcga

SEQ ID NO: 33034 - DNA, 878 bp, Glycine max
  Clone ID: PAT_MRT3847_129834C.1
caagggaaatattttacatggtctaaaagaaccaagacttatcatagtggagatcaaataaattgtgtgcagacttcaaatcaaagcaaaagttatattatatagcatacagtttgctatacagtttatattacaagttcttgaaaagaatcagggccaaaaacttgacaccaggagaggaatggggcttgtaaaaaaaattgggaagtatcagcttggtaggacaattggagaaggtacattctctaaggttaagctggctgtcaatggcaacaatggtcagaaggttgcgatcaaggtcattgataagcatatggtcctggaaaacaatcttaagaatcaggctaaaagagagatcagaacaatgaaacttctccatcatccaaatatagttagaattcacgaggttattggcacaaaaacgaagatatacattgtgatggaatatgtttcaggaggacagctattagacaagatatcctatggagagaagttgaatgcatgtgaggcaagaaaactattccagcaacttattgatgccctgaaatactgccataacaaaggggtttatcatcgagatctcaagccagaaaacttgcttcttgacagcaagggaaatctcaaagtgtctgattttggattaagtgcattgcaaaagcataacgatgtcttaaacacgcggtgtggatccccaggctatgtggcacctgagctgctattgagcaaggggtatgatggagcagctgctgatgtttggtcatgtggggtgatcctttttgaattacttgcaggctatttaccatttaacgaccggaacttgatgaacttatatggaaagatatggaaggcagaatatagatgtcccccatggtttactc

SEQ ID NO: 33035 - DNA, 115 bp, Glycine max
  Clone ID: PAT_MRT3847_129835C.1
gtgctgcaaacaaattctgatgtagctaaagagactactaaacgaccattcaacctcttgtaatgtctgtcccgtaggcaaagataccttatagtcgcaatcaactagaatggct

SEQ ID NO: 33036 - DNA, 214 bp, Glycine max
  Clone ID: PAT_MRT3847_129836C.1
ccttgattgtttttcaaggcctgactgcaacatagatggtgcgatgcttttgggtggtactgatcataccaatcctgtaaatgcagttcgtagtatttttggtgcgcctttcaaaggcggcaggcccattccggtggttacatttccgcataccattgtgcggattgtaccaggcatgtatttaagggttcagcttttgagtaccactaccaat

SEQ ID NO: 33037 - DNA, 283 bp, Glycine max
  Clone ID: PAT_MRT3847_129837C.1
acgaacttttttattcatggcactagcacttatgtctaggaaggggggggttgagttatggcaagcacaaaggccgcctgcgcggataagaagcgcatggctgcgatgagtgcaccaatgaaggtgcaagcccagacatgcactgatgcaaacggagaacctaccagccgcgcctatgcttacctgaagcaggggggagacgatccacaaatcgcgctggagcggaatgaggaacatcccaggatcaagccagcaccaccatagacaaacaaaccgagcgcaa

SEQ ID NO: 33038 - DNA, 822 bp, Glycine max
  unsure (1)..(822): unsure at all n locations
  Clone ID: PAT_MRT3847_129838C.1
atcgagccttcagagacatcaagttcccgtcctcctcgttcaagtactcgttcgttcatcatgaagcccactcaggtcctcatcgcccttgcggcagttgcctatgccgcccctgtcgctgaggagagcaaggtcgcggttgtggacgatgacttccctctcgccgagctcgaagcctacttcgagcaccatctgaacggtgatgactccgaggccgcggctctgcaggctaggcagttcactgggaacacctacaaccagctcaccgacgggacaccttgccgccccgtcacactggtgtatgctcgaggaactacccaggatggtaacgttggagacccagctgccgttgggccgatcttcttcaacaaccttgcctcccgcatcggactgtccaacctggctgtccagggtgttccttatgcggcgaacgttctcggatacctccagggaggcgatcccactggcagcaggaccatggctgatctgatcaaccgggccgccagccaatgccccaacaccaagattgtcatcagcggctacaggcagggcgcccagctcgtccacaacgccgccggcatgctctcctcctccgtgaccaaccgagtcaccgcagctgttaccttcggtgacccgaagcggaaccagccttttggcaccatccctacagcccgcacccgcatcttctgccgttcaggggacaacatctgtgatggcggcatcatcatcacccccgcgcacactcagtaccagcaagacgcgcccgctgctgcggattgngttgctgctcgcgtttagcctcaatatattgactttgcatcg

SEQ ID NO: 33039 - DNA, 313 bp, Glycine max
  Clone ID: PAT_MRT3847_129839C.1
ggaaagcacaatatggaacattacaccatgaaaagtcgtgcccaaaacctagatcaactttctatgttgaataacttacactaatctcatggtagtggagaatccacaaatttgatcaaatttacataagcaatggcatatgaatggatgcactcccccataaaagcacctacgagcaggcgtgaaatactaaaatcaaagacttatctataaataagaactttgccttactgagcatgcattccagcattagttcacataccctattcgtgtaacaaggagggtaggcgacatctaaaacacaatactggaa

SEQ ID NO: 33040 - DNA, 2499 bp, Glycine max
  Clone ID: PAT_MRT3847_12983C.1
tcaatgaactcgtcccatgcactcgcactctgcacttcactcccatttttcaactacaacaatccacatcttctaactactatcacgtcgattcaatatctcttatcctcagttcccgcgcgtctcacactcctcgctctcttctccgctaccaccttctactgtctctacaagtctcgccgcttaagacaccttaaactctccctaaaccctaaccctaaccctaaccctaaccctaagattctcttcctctccgaaacaggcaccgccaaaaccctcgcgcgtcgcctccaccggctcctttcctccaacgatgtcgcattcgacctcgtcgatgcgcagcactacgagcccgaggacctccccaaggagacgctcatcctcctcgtcgcctccacgtggcaggacggcgctgcccccgccgcctcccgcttcttcgccacgtggctcgccgacgccgccgccgacttccgcgccggctcccttctcctctcccgctgccgcttcgccgtcttcggcgtcgggagccgggcctacggtgacgactccttcaacgccgtcgcgaagggcctcgccatgcacctgagggcactcggcgcgacggaggccgttcccctgtccgaaggggacatcgacggtggcgatgacgtggacgcggttttcgatcggtggtgtgagaaggtggtggcggttttgaaaggcgttggtgttgtggaaagctgtgataatgatggtgctgaggaatgcggcgtggtttcgagttctgaagaggagtctgatgtggaaagtagtgagattgttgatcttgaggacattgctggtaaagctccttcgcggcggaaggtggtggctaatggggaagagagcaatgggaagttgaatggcagtagagaaatggtcactccggtgattcgagcaaatttagagaagcaggggtataaaattattgggtcgcatagtggtgtcaagctttgtagatggaccaaggcgcagcttcgaggtcgaggtggttgctataagcactcgttttatggaattgagagtcacagatgcatggaggcaacccctagcttggcttgtgcaaataaatgtgttttctgctggaggcatcacacaaatccagttgggaaaagttggcagtggcagatggatgatccaatagagattgtaaattctgcaatagacctgcatacaaatatgattaaacaaatgaaaggagttcctggagttaccttggagcgattatctgaaggtctctcaccacgtcattgtgcattatcgcttgttggtgaacctattatgtatccagagataaatgcacttgtggatgagctgcacaaaaggaggatttccacttttctagttacaaatgcacaatttccagagaaaattaagtcactgaaacctatcacccagttatatgtaagtgtagatgctgcaacaaaggactctttgaaggcaattgatagaccactctttggagatttctgggagcgattcattgattccttgactgctctaaaggaaaaacatcagcgaacagtataccgcctgaccctggtgaaaggctggaataccgaagaagttgatgcttattctaagctctttagtttaggagaacctgactttgttgaaatcaagggagttacatattgtggctcgtccactacgtcaaaattgacaatggataatgtcccttggcatgctgatgtgaaagctttttctgaggccctagctttgaaaagccaaggagagtatgaagttgcatgtgagcatgctcactcgtgctgtgtcctcttagcaaaaactaataagttcaaaattgatggccagtggtatacatggatagactatgaaaaatttcatgatctggtggcatctggaagaacttttgacagcagagattacatggctgccacaccatcgtggtccgtctatggatcagaggaaggtggatttgatccaggacaattgagatacaggaaagagagacatcacaagtctacccgcaatcaagcaggttagacatttaagagcctttggcagccaacactcattttcctgttgatcttttttcttcagtgtataactctaggttatacaacatacttcaataggacagttttgtaatacatggcttcacacataggttagtaccatttctgtgtatttaagccccattgttttcccaatcagcagttgaatgaacagaacattttttcttatttaccacaaatagtactttggatgtcaatgttgcagtcacagaagtaatttgtttttgagattgagatcagaagaatatgtttgagcttctgctgcaccaagctattgcttagtgttgctctgttgtaatattttagcaaattcctcagttggtctttcaggagaggaagattagctggaaatattataatacaatgcaatcatgtagaacgtgtaaatctcaaagtaacgctctactcgttttttcctccttatagagtttaatagtaatgt

SEQ ID NO: 33041 - DNA, 330 bp, Glycine max
  Clone ID: PAT_MRT3847_129840C.1
ggctcgaggggaaaacccgcgatctgagcttctcttccaggcctttgttcctgggccctataaagctgtgttacgactgttcggacatggctttcgcacccttcgggctggactggagcgacatgtacaaactgtgactcgaccacctcttaatcgcgcaccgcgtttggacctttctatcaattgccgataacgaggttgcacacatggttcggaaactgttggaacacgaatcttctggttctgccgagaacttgaccgaaactgtgatgtctattacgaactctatgatatgtacaattgcttctgcgaaaagttacgggagaagag

SEQ ID NO: 33042 - DNA, 249 bp, Glycine max
  Clone ID: PAT_MRT3847_129841C.1
attcccggatcgacccacgcgcccacccacgcgtcagggctgccaaaaaaacaacaaaagggaaccaaacttaatccccccttggttgcagcttcagcaccaccggaaagcaattcaatccgcaatgggaaccaatttgaaggcaggaggtaattccaaaagaaccaaccttaaagccccaaatccaatggtaattaactcaaactcctcctcaaaccgttacgttttcctggtccgaagactgggaat

SEQ ID NO: 33043 - DNA, 268 bp, Glycine max
  Clone ID: PAT_MRT3847_129842C.1
aaaaaatctacgaaagatcctaaaagtcagccgtcgcgtgacttcgtttaccttccaagagatgaatcatttggtcacctgaagtcatcggattttcttgtttatatacttaagtctgcatctcaaaatgtcatacccaaattacaatctgcacttaggctacagttcaatcagcctgagtttaatagcttcgatgacgtgcgaggactctatgatggtggaattaagttacctactgatacacttagccagcttagccctataccat

SEQ ID NO: 33044 - DNA, 284 bp, Glycine max
  unsure (1)..(284): unsure at all n locations
  Clone ID: PAT_MRT3847_129843C.1
tnaaattctgcgtagatgcaattttggctgcttgagctatttcttctactctttattttttgaaattccgatctgtcacaatgttgaaggtttcatttcgacgatatttgaagannnnnnnnnnnnnnnnnnnnnnnnnnnnntagattttttctgtaaatatttgttcnntcttttgtttaccatttccactttggtagcatctgcataatttaattttgctgatgtagatgctagatggttgggggtgtgctttcctttggtgctttattgttctgtggagg

SEQ ID NO: 33045 - DNA, 352 bp, Glycine max
  Clone ID: PAT_MRT3847_129844C.1
ttgccttacaaaatcccactatgcaattatcagtcttgaggctcagttctcaaatacacttaccaagggaaagtggaatggatacgcataaaacccgaaaaggttctagttcactcatcttcctaacagacaacttagaactgacctgctgaagtcttttgccaagcaaatcatgatatatagcatcgtgatcctggccgacgccaaatttaaggccccctaactttttaagtttcataaggatatgaatggctataacggtcaaaatattgaaaatgggccagattcatttaactaattattagtgtactaagacatgctacgcaatagagcggaaacaacttagtgattt

SEQ ID NO: 33046 - DNA, 267 bp, Glycine max
  Clone ID: PAT_MRT3847_129845C.1
aaatgctgaaaaaaaataaaaaaaaggaataagaattgggcgtgttattggatggaaaaaaaggagcaaaagattaaaataaatagggccaaaaccaaaaccaatttaacctgaggaggaaaaaaagtataaaagcatatgtcttttcaaaagccaaaaacgtattttaagccttggcccaaaatagagggggaaaacccaaagctctatactagatataccccataggctagcgtgggttaaaaaaaatagggaaaaagccgcccc

SEQ ID NO: 33047 - DNA, 131 bp, Glycine max
  Clone ID: PAT_MRT3847_129846C.1
tcggccaagccgtccgatcatatcccactcttattctatgtcacttaactctatgtatttagcggatatgggggtgaaatattgggtctgtgaattttcgagagaaaaagtgtgcgccctttaatagggtg

SEQ ID NO: 33048 - DNA, 219 bp, Glycine max
  unsure (1)..(219): unsure at all n locations
  Clone ID: PAT_MRT3847_129847C.1
aacanattttttattnagcgaataatttttttccccgcgcacaaaccacggggaagaagaaatttttgggacaaaaaagggccatttaccccttttaaaaggcaaaaccccaattcccccatcctaaaacccaatataaaggttccggatttaaaaaaatccaaaattacccggcttcaattaaaagaaaaaaaaaaaaaagcgggccccgggggccac

SEQ ID NO: 33049 - DNA, 639 bp, Glycine max
  Clone ID: PAT_MRT3847_129848C.1
cgaagcttctcttcctcgccactctctctctctctctctaagaccccaaaacaaaaccgtgtctcctatttattttccgatgggttttccggtgggttacgcggaggtgttcttcccgaacccgttcctgcacacgctggccctcctcggcctcctccgaaacctcgtattcttcctcctccacctcctcggattctccgacttcctcgaaaccgaggtcgcctggccggaccacccccacccctccgacgaggctgcggcggcgcggcccccatccgcgtcggcgctcctgatccgcgacctccttcccgtcgccaagttcggagactccgacgttggcgcccaacaaaacggcttgtgcgcagtgtgcctgttcgagttctccgaggaggaggaggttcggtgcctgcgcaactgcaagcacattttccaccgcacatgcgtggaccgttggatcgaccacgatcagaaaacgtgccctctctgtaggaccccctttgtgcctgatgatatgcttgatgattataatcaacgactctgggctgcttttggggttaacgagttttacgccgattacactttttccttttgaactctgaatttttgaatttcaatcatgaaagtgaattgtatataacc

SEQ ID NO: 33050 - DNA, 271 bp, Glycine max
  Clone ID: PAT_MRT3847_129849C.1
cgtggacttgcttaaagaccgaccaagttcttgcagggctggtccagtggctgaggacgtgttccattggcaagcaacgattgtgggagctgctgatagtccttatgctggaggtgtgttgctagtcgctgttcgctgtggtacggatgatgctgtcgaacctcgcaaggttgcctgtatgactgaggtgtggcatacggacgtagactgcagtgggaggcattgtcgttgtatgcttgacgaagatgggagccctgcgctcgccatatcg

SEQ ID NO: 33051 - DNA, 379 bp, Glycine max
  Clone ID: PAT_MRT3847_12984C.1
ggctccggcgaaggcagagaaaaagccggcggagaaaaagccatcggcggagaaggcaccggcggagaaaaaacccaatgcggagaagaagatctctaacgaaggagggagcgagaagaataaaaagcgcacgaagaagagcgtggagacctacaagatctacatcttcaaggtcctcaagcaggttcaccccgacattggtatttccagcaaggccatgggcattatgaacagcttcattaacgacatcttctagaagctcgcccagcaagcgtcgcgtttggcttcgtactactaaaagactagcatcactctttaggagatactgaccaccgtgcttgtattgctatgtggtgaattagtcaaacgcgcagtgtct

SEQ ID NO: 33052 - DNA, 228 bp, Glycine max
  Clone ID: PAT_MRT3847_129850C.1
gtgaagctatctttcaaaacgctgaaattgtattacatctgtattgaagcttccgctgaaggtctaaaagatcagctgaggatgtcataatgtaattcttacccttaggttccaaaatccaaatatttaatgctattttaaatttaattacatgcacaattgtacttgttttgttcctgttagattataattataatatataaaacctgcgtaacttcatcgttgaca

SEQ ID NO: 33053 - DNA, 565 bp, Glycine max
  Clone ID: PAT_MRT3847_129851C.1
ataagatggatccagtgagaccaataacttacttctaattaattaaactacttagtaaaacagactcgcatttaaataactatacacaaatttgactaattaaaaagttagatcgtatacttacaaacaaaattacaaactcaggttctgaaaacatttacataataaataaatgtgtaactgagcctcaaacgtgtacattttggaagctaaccgtatttttcctgttttttctatgtattttttccttcctcaaaatcagtctggtccttagcagtgcaagtcagtcagccacagaacacatacagcttggattttgcaacaaattatcctccaaatggtgaacttttgcattcaaaacctgatttgctggaagaaaagtctgctactcttctgatatgaaccacatccatttgctattatctcggatcaaatgtcgtgtcccaaaggatggatatatacaatgaagtgaaatccctattgacaaaacttaacatcttcaatgatagcagccaaattttagtttgtttctgatcatcctttgtacctatgtgtttggcctgac

SEQ ID NO: 33054 - DNA, 375 bp, Glycine max
  Clone ID: PAT_MRT3847_129852C.1
aacaaagtggtccaattgctataggcgtgaatgcacttttcatgcaaacatacattggcggtgtctcacgctctctcatatgtaccaagatcaggatgaaacacggtgtgtaacgtgtaggatatggtgcaaaaggcttctcaattcatacgcttggcaggaaaacacactggatcatcaagaattcgtggggggagaaatggggagaagatggctattacagactctgcagatggcatggcaagtgtggtacaaacaccatggtttctgctgcaagggtgacgcatccacacttaacacctacatagaattatgcatcttattaactatgcacttaaggacatctatttcaataatttgcactctaggtgatgt

SEQ ID NO: 33055 - DNA, 842 bp, Glycine max
  Clone ID: PAT_MRT3847_129853C.1
ttataggcgtgcgagacgacagaagggtaccggctgcgagaagacgacagaaggggaaccaaaaaataataatggaggtgcagcaatggtggaggctcagattctccttcaggaatgcaaccatggtcgtgtgtttccttaacataatcactgcaatcttcttgcttcatgcttttctcacctctgcttacacccgcaacaaattctccaacgctaactcaaactcagctcaactcaattacattaaggaatctgaagagattcgacttgccatgctaccggtggaactgataaaaagagtgagggagattgagcaggaagtatacactgaaccagaaactgcccagaagaaagacacaaagctgactgctgcagttgatctgtctaaaaggttaaaggatttccgttccttgaatgatgctgccagcttgaaagctttggaggaatggcgaaagaggaagatggagagggccagacaaagagaattggagaaaaatggaacaacttcttctcaagcttgactttatatattctcttatatcaagtgaaagttgacatgctgatttcaatacataatgggacaattagtagtcatttagtgtacactgtatagcatctttaagattttccacagcttatgttataaaggaatctttcttcggacagaatttgtgattaatagtttgatactattactcatctactttagttttctttatattttaaaaattaaaataaataatttaccatctttcttaaaaaaaaaaaaaaaaaaaaaaaaaaaaaaaaaaaaaaaaaaaaaaaaagcatagtgtcatgaaaattgtatgaaggcaaaaaaa

SEQ ID NO: 33056 - DNA, 158 bp, Glycine max
  Clone ID: PAT_MRT3847_129854C.1
acgacaaaaaacttgagctcaaggaattcctaaactcaaaggagtgctcaagtgaattgcctttgaactgtacacaatccatatgaggaaggggggattgtacctgtctcccctacctacagcacgaggttacaaacattatattgtcgcccattatt

SEQ ID NO: 33057 - DNA, 381 bp, Glycine max
  Clone ID: PAT_MRT3847_129855C.1
cttcgtttccggggccgcgcgggagtcacctagacagctctctgtctgtatctatatgtcgccacacagaaccaccaaaacctttgaagtcttgcaagcagagccttctgtcattctctgtggaccaacaaaagaggcagaccatggctgacaaaacctggagagaggaaaccgccttcaggaatccgaaacgagtacactgtgcggagcaactgcggagaagcgggaaccctgctcaaataacatgtgtagaagtgcttcaccgacttaccagcttgaccgtcaccacgtccagcgccggaggcgccgggatagcgttcacggctaccagatgcgggatattcgcgcgtacactgaacagatctttgggcgaggagccct

SEQ ID NO: 33058 - DNA, 543 bp, Glycine max
  Clone ID: PAT_MRT3847_129856C.1
agcaccgataagaacattaacgatatcattaaaaaaacactaaaagatataactcgaacgccaaagaaactgaaaaaaagaaaaatcaattaaaaaacttaaaatattattattccttggttttttttttttcctccccctccggaaacatcacaccactttttaaaaggcatcaccatgggaaccaaaatcatcctccactttttccgccacggaattttaaattttggcctaaaaaaactcagcaccctccacgagggggattccacctaaagccccagaaaccgcacccacagccaatcccggccccatcccaccaaacttacttttttttttctccttttggggggcggacccgaaaccggtcccctgcccatacaaagccgtttgggggagcgcattatagccggagccactttgagggggggcattataagggtgggggggcgcattataaggatacccacttgggggagcggaaaatacccctggtgggggggggccccatagggaggatacccaccatacccctgcggggcaggg

SEQ ID NO: 33059 - DNA, 412 bp, Glycine max
  Clone ID: PAT_MRT3847_129857C.1
gtagacatcttcatctgcatacaagtatttataaggtgcatgtaccaagcacttgctggaatactctcttgccagtgaccacctcatcgaatgctcatacaatttcttcaattactgctgctacttctactttaccagaggacactacaccgacagcgatgtcgccgtcgaccactgccgccccgcgtctactgagatctacgacttcactgatccgaatgccgcttactctgaatgtgtattagaatcggccaccgtaaataacgtaaacgctaaccgaaaccgctatcgtcaatgcgacctggacggcaacggcgtttttatctacgatggtccggtgcttacgcctgctacataaatggagcccgatgaaggttacactgtgtgcgagtagcgccgtcagaatgccatt

SEQ ID NO: 33060 - DNA, 261 bp, Glycine max
  Clone ID: PAT_MRT3847_129858C.1
aggggggccaggtattgaaatactgctacaatacagattgcgttgttgctccgtcgccacaagtccctgccatgcatgggtatctccagagattctatgcacaacatgcgtgctgactggtggcaagaatagcgcatgcatgaacaagagaaagtatgagcttggtcgccagcctgctaacaatacactgtcaagcaaccagacagtcaggacgattcgggtgacaagtggaaatgtgaattgcatggcactgatattgga

SEQ ID NO: 33061 - DNA, 487 bp, Glycine max
  Clone ID: PAT_MRT3847_129859C.1
caacaacaaacatttttttcctttttttttggaaaaaaaaaacagtttggggactggaaacccccccccagcaaccaatttaagggaccccccaggggttggaaaattccagggtttaaagaaccgtaaaaaaggatagcccaagtttggaggccccattccaccccgggaaaaaaagattaccacttttggagaagggggctttttttttaaaaggcggggttaaggggttttttcacccccccccccaacaatggtattgggaagagggcaaccccccggttggggaaaggaattcggttggacccacagttttttcggcttctcaattttttaaagcttcagcgggggcacgttttttttccgatctttgcctccccaaagaaatctttttaaccattttgggaggggggggggctctcattggctcaacttgggcccaaatttttctaattccgggttaaaatttgccctttggcggcggccc

SEQ ID NO: 33062 - DNA, 450 bp, Glycine max
  Clone ID: PAT_MRT3847_12985C.1
gacgtatgatgcacgctgacctcatacttaggacttcggaattgaggcttcgagtgcaacggatcaactactatgcactttttggatgatggcacactatccactccatcatatgttacctggagaaaggccctgccatctgcactgtaagattctggtaccaagtgaacactaccagctgagtctacactcaaacacttagaactagaggttatactatcgatcatcatccttgcggcactgatctaaggctaggcttccctcatttacactatgcctttggacgagcaacttggagccagcgtctatatgcatacacgtcggtctgtctgatcattctttgcagtacacggaaacctcatgctgactctgactagagtgatgctgcgtgataatgcttaagttgctcacaatgtgagcaagtcgactggcacattcatacatcattct

SEQ ID NO: 33063 - DNA, 279 bp, Glycine max
  Clone ID: PAT_MRT3847_129860C.1
gggaaccctacaaatggaagggggccttttaataacccaaggccccccccccccgcaaagtcctgaaactcgttgggctaaaaaaaaatgtaatagggggttcccccaaccccccccctttaaaccccggttaaataaaggcttttttgcccccggggataaaaaacccattttggggaacaacagtggggagagggggggggaaacttaaaactttggccgaaaaacaggcttcctaaaaaagaagccccaggggtccaaaaaaaaaccccccttttt

SEQ ID NO: 33064 - DNA, 356 bp, Glycine max
  Clone ID: PAT_MRT3847_129861C.1
aactgctgctgttgtcacactttccaagctcctcaacatctaaagggggaacaataggacctttataattgcgagtaactggcacccgtcaaccatggatatgatctgaacatgggctaatgcgattgaactgaacgacggaactgcagagcttactgacattgatgacaggcatggagatgttagaggtgagctagtgcagtaccctggcactgcaggagaggatgaggactatggggagcttgtgaagaaggctcatgctcatgacagtgaacgttgttatggcaagagattcgctggcactgactgacatggagcctggcggagagttctaggcagatattggtggaggatca

SEQ ID NO: 33065 - DNA, 536 bp, Glycine max
  Clone ID: PAT_MRT3847_129862C.1
ccccccaactctccacttccgcagtagccccaactaatctaatgagcaatcgcccagagtcaggcatttctactcctagggacactgtgcctaacactgaggaggtgacagaggagaagtctgattcattgtcagcagttgattccaaaagtgtctttggtggagtccatggccattcaaattgccgtgatgatgcccccgagaaacatgcgtggtagttttcatcttgttgtgtagctcataatgataatgttgagtagacataggctttgttgaacctaatcctggcaaaagcaggattcgaagtagaagaattagcatattctgagtcgacgtaagttgtatctttatactagtaaagattttatcgttgtacataaggaacctgtcatgaagagggaccctggtagaatgtttcatcaggctagctagtgttataggcagagtttgatgcgaagaaaagccgagcagaactgcttagttattttgttctctatattgttttttttagtacaattaaaattcgtcattttcca

SEQ ID NO: 33066 - DNA, 292 bp, Glycine max
  Clone ID: PAT_MRT3847_129863C.1
ctcccatgttagcaggaggaacccttgaatgggaggcattgccttgttgattagctgagactatttgaaagattggtatccaacaactcaaattattgattgccgagatgagaacttatgcagcgtacaagaactagagacaagcaacaacgatctaatttcatcagtcagttctgcattcatattgcaaattgatctcatatatatttcctaggccaggtgaatttatagatgaaccacaacacccaccgagactaataaactacgagaattactataggatccacagcta

SEQ ID NO: 33067 - DNA, 157 bp, Glycine max
  Clone ID: PAT_MRT3847_129864C.1
cgtggttttactgggacggccctggggtggccctgtctttccccatctcaatacatcttgcattacatccccttttgtccagctggcgtggtcggaaagaggcccgctccgatcgctcttcccaacctttgtgcagcctggatggcgaatgggaccg

SEQ ID NO: 33068 - DNA, 126 bp, Glycine max
  unsure (1)..(126): unsure at all n locations
  Clone ID: PAT_MRT3847_129865C.1
gngctacaaacaaggtgcactncantttcaagcanaagantccaaagagtggggagtatgtngaacaccanctcaagtatccnccnnctgtcccatcngacaaacnaactcangnatacacngcaa

SEQ ID NO: 33069 - DNA, 352 bp, Glycine max
  Clone ID: PAT_MRT3847_129866C.1
tttttattgtttttttaccatatacatcggaattgaaaaagaactggctgtactgaatgatccgttggctcaatgctacaaattgaagaatcttaccctagtgctccctgctctcatgatattgacaaactatatattgccctacaattaacttactctttatggccttaagaagaggcatctaatccaggacactctctaggagcttgagaccttactacctgcgggggaggactctgatttgaattaacgctgaccttatgaccatcttacataacacctgttaagctgggcactattacctggtatagaaaacccctgcctaagggtcaaacaatcatacactacttac

SEQ ID NO: 33070 - DNA, 976 bp, Glycine max
  unsure (1)..(976): unsure at all n locations
  Clone ID: PAT_MRT3847_129867C.1
cccacgcgtcaacacacgtccgtacggctgcgagtctccctctcaccttcgagaacatcgacaaaaagataaagggtgaataattagcagctccttctagttccggtgtcggtgtgggtgtttgaatctggtgaaggatgtcaattgttccaatcaaccagggtgatgccaacggctccaaccccttcgcttcgtggggtcaattcgtggattttcctctccctccttccatctccggcttcttccccggcttggaattcggattcggattcggatcatccgtgaacacacgtgtggactggagggagactcccagagcgcacgtgtggaagctggtgcttcccggcttctccaacgaggacgtgctggttgagctccaagacgagagggtgctccaagtcagcgtggagagcggcaacttcgtcacgaggtttaaggtccccgacaacggtaacctagaacaactcaaagccaacatgcgtcacggggttctcgttgtcactgttcccaagtttcatcaacccactactactgcccctgccaataggaatgtcagggaagttgaaattgaaggcaccgactgaacccagtgaccaaaacgctgtctttaatcatgtcttgttcgatggaactgtgttttcttatatgttatgcgtgcgataccctaccctgctctgttttaagtcagttaaaccaattaatgtatattactagtatgtagagtatatgtatctctgttttaaaattgatggtttagttttgctaattgtgttgtagtacgtacttaataatatattgcaaagcttatttaagggaaagttgagattccagattgccaccattgttcagaaataaactgttactgactgcagtctacatctcgtgactgacaatcctgcgtatctactaatcgcntgagacatctctctctgcatagtatatatggatggctctcttatgccttctcattggtatc

SEQ ID NO: 33071 - DNA, 499 bp, Glycine max
  unsure (1)..(499): unsure at all n locations
  Clone ID: PAT_MRT3847_129868C.1
nngggngngggttttttttattttttttttttttttttttttttttttttaaacatttaaaattttttttcccaaatttactaaaaattattttcacccttcggggccaaccttttgaaaaacaaaataaaatttaaaaatagaaaattaattgaaaaacgggtttttttaaaaaaccctgtccattttttttttattttccatcatctacttctactatttttttcccccgggtttctttaaaggaattaaaaaaacttgttcttattcctaacagggaatactaggatctttgatgatttttaatcaacaaatttaaaaaaagatttctccccccctatgtaacttctacaaatattgacattcctgggtttttgaagacccccaaaccccaaaatctttccttaaagaaattgtgcccacttttttccccccatatttaaaattttttttccctgccatttgctggcccattggcccaataaattttttttggggg

SEQ ID NO: 33072 - DNA, 245 bp, Glycine max
  Clone ID: PAT_MRT3847_129869C.1
ccctcctccggataggcaccaagctttcttaggaccaattagctgagtgacggtcttaagggatgatgaacttaccttgcattttgaatcctctcacacgcctaggatttcctgcaattgcaatggtttctatatgaccgcctgcacataaaaacaacactacttctatacatattactacgattacgattggggttaaattatttctcaattattatacgaaaatctaatgaaggagtgttgtg

SEQ ID NO: 33073 - DNA, 593 bp, Glycine max
  Clone ID: PAT_MRT3847_12986C.1
ccacgcgtccgaaaatatagtagtagtagatatatggcaagttgctcatcatcattcctcataatgaaatcttcacatttggggtatgtctatatggagcaaccttcccttggacattttagccaacatcttctcatttctctccccagactcgttggctagagcaagatcagtttgcaagaattggcacaaatgttccaaggcttatcctatagccacaacaacctcttcatggttcttggctcttccaattcgcaaccatagaccatattgctacgctcataatccagtgatagataaatggcaccaactctctctaccaatcccatcaattcgaccaattgctccaattgggagcctcctcctctcaagggtcaccaattccacaaccctccaattgggtctttgcaaccccttcactagagagtttaggcaccttccccgattgcatgttgcaaggaccaaccctgccgttggagttgttacaatctcggagtcatcaaatccaaaccgtgatgacgataatgttcggtttccttcctttaaggtctacgtggctggtggcatgtccgaggcagcacaaggtggcggcg

SEQ ID NO: 33074 - DNA, 1405 bp, Glycine max
  Clone ID: PAT_MRT3847_129870C.1
attgttttttttttttgaagcattcaactaaatacgcattaattgagtttcatgtatccaatatcgttttatacattgtgtttggaagagatgaatgaaaagaaatgaaagtatgaggagtgaaagagagatgaaacagataaaagttggattgttttgtatacataaaaaataggtgaaaaaatattcattatagaaaaagattcatggaatgcacagctaacatgatattcttaatcaaagaagaagcatctgtacactgtacaattgggtctactatatatatgaaatagggagcagattctctcccaaaatggaacttgcacgataaaagtcctcaaccagttgaatgttgcataagctccatccactgtctcaataagtttgcaagagtcctaggcagtgcttcaatgttcctcagaacaatgtagtagggaaatggaaaggaatccatgtacttgaaaattttcgtctgtccaccctcaacagacgcttccttgagatccataattgactcctgagaattatccagaagcaagaaagcaaccattcgattaccagttgacacatctctaacacactgctttaatttcttcttttcaacaaaccgaccatctgcaattattaaaactagctgctgaagggggttatgtccagatggaagtcgagcttttgcaactgcagtatctagcttgttagttaagtacttcaataggtcaacaactggctcatccgcaatagtattttcttgcttgaatgtcaaattggagatcatcttgactccagactctccagtaaagggcttgtcaaagtcgtgcaataacttgatgtttcctttcgttccaaaactagcaacagccaagctgcccatttccaattgcgaaacagcacgacatactgtaaccaatgcctcaatagcaacgtcaccacagccattctctgacatactatgtgaatcatcaacagctataacaacttggtaatcacgtttgttgggtctggttcgtctcagccatattctatctttactataatcacttgctatgtaaggaattacctttttcatatttatccttttgccagttctataatccccttgaagcttgctggccacagtgggctccattacaaggcgcaattgctcagtcaactcatgagacaattttgttgtgctaagctcgaatcttctccaaagagcagtagcattatctttcacatgatcaggtacatcaaaaggttcttggcatttacccaagtctttgtcatgctgaaaaggctggcttatattatcattgttctcactcaagtatgaattcccaaaagaaaccaaatcttccaaacgattttctagatcaatattcatactagcaataggatacactgatccatcttctcgtgatttctc

SEQ ID NO: 33075 - DNA, 249 bp, Glycine max
  Clone ID: PAT_MRT3847_129871C.1
acaaaaacgtttgctttccaagctgatatcaaccaactttctcattctcatcatcaacaccttctactccaacaaggaaattttccttcaagaacttatcaacaacacctcctattctttgtacaatattcaattttatagtttgacatataataacaatcttttatcttaaccacatctgttcattcatataattccatacaagactaacaatacacttaccattgtttacagtaatattggcattac

SEQ ID NO: 33076 - DNA, 485 bp, Glycine max
  Clone ID: PAT_MRT3847_129872C.1
tcaacgatacatgctggtgggggctgtgtttggtgcaagtgccattgaaaaaatgacaaaggtgattcaatcgcttaatgaacttgaaaggcattgggctgtcatgaagaagagtcctggaatgcctccaggtgcgaatacaattaacccagctgtcatagaaggtggacgtctttctgcatttattgcagatgaatgtcgattatggattactgttcattacttaccgaacgaaagttatgaatctgtagttaatgaaatagagcaatatttaaataaggttgcagaagcagatgtatggctcagagagaatccacttgaatttgaatggggtggtacatccatgattgaagataaaggagaaatcttcccaagtttcactgttccgacacatcatccaggttttaagcaattagaagaagcacatgaacatattcataataaaaagcttgaacatggtatgagtacaactgtaactgatggag

SEQ ID NO: 33077 - DNA, 458 bp, Glycine max
  Clone ID: PAT_MRT3847_129873C.1
cctgtttctcctacatgtggaaaggttttcccaaagggactgtctcgctacattgatcggggcacattggaaacatgccttcaccttattgttctttctctatctgtggttatggctgggtctggacatttacaaacctttcggttgttgagattcctaaggagcagaaattgtgcagatgggcagtcaagttatggtattcagatggcagtaagcttagctattggtttcttgtttcttggtggtggaatgagaacgttttcgacaaacaaccattccattgctgctttgctaattactctatatccacgcttgccaactggtccaaatgataacagatgccaccttcaggcatttcgccatctctatgtccttgcgacagaggcacgatggattcaaacagttgatgttgacacaggtctgcctgtttatgctcctcttgaggtcacagtcaaaga

SEQ ID NO: 33078 - DNA, 836 bp, Glycine max
  Clone ID: PAT_MRT3847_129874C.1
agttcaaaagactatggatttcgaaaagaagatacgaccacaaatgtagcattatacaattattcttgccacagaccaatgtagtattactcaattaaacaaaagatcattcattactcggactaagatacgaccacagatgtattgctctgttgcatttaaatgatatgcatactatggaattcgaaaagaagatctaacttaaagttactaccttttttttatggatccacacataaatttacccctgacaattcattattcaagcaaaggcacggtgcagaagagttggcccagactatcttcgaaaagaaccaggaagttattaaggaactctgcacaccagtaccaggaacaaaggaccttcataacttcctggttcttttgataaaggtctgacttagtatataattctgcaaagtctacgttaagctgagactcaacaacaggagaagagatctccagcatccatgtggctggattacatccatctttaatcttaggaactcctgcaatagcctcaaagtactcaataagctcaattaaacaaaagatcattcattactcggactaagatacgaccacagatgtattgctctgttgcatttaaatgatatgcatactatggaattcgaaaagaagatctaacttaaagttactaccttttttttatggatccacacataaatttacccctgacaattcattattcaagcaaaggcacggtgcagaagagttggcccagactatcttcgaaaacttgccttacatttgctcggacgcgtgggcggacgcgtgggcggacgcgtgggcggacgcgtgggcggacgcgtggg

SEQ ID NO: 33079 - DNA, 289 bp, Glycine max
  unsure (1)..(289): unsure at all n locations
  Clone ID: PAT_MRT3847_129875C.1
cactttcaccagaacaaaacctcacattaatgtcagaactattgaacacatgaatcatagaaagaccacgcttaccacgacaatcaccaaagtgcttactgatgaaagaaaagctaaagctatagcattcgatgaaatcgataaagctcctaaaaagaagaagagaagaatcacgattacaacgacgcatgtggagtgtaagactacaaaacgacattatactcatatagactgccgcanacacgcggattatatgagatatgtgattaccggacctaggcagatagat

SEQ ID NO: 33080 - DNA, 324 bp, Glycine max
  Clone ID: PAT_MRT3847_129876C.1
cattcaaaggaccacctaccatttgttgttcacgcatcaagtccaataagaaagtgattttgggcctaactcaaccccaaaagctagctcaaggggtgagagaaagaatatttttctcccctcttttattaactgattagctaggctaaaaatactaatagaatatcgtatcatatattttatcagtctcaatcgattgctttgttctatgtttgatattgagatgcttcaagtgctctctagatgtttgtgattaatcttatttgaagatagcctttgattagttttgattggatttggatggatgccgtatacggtggactc

SEQ ID NO: 33081 - DNA, 413 bp, Glycine max
  Clone ID: PAT_MRT3847_129877C.1
tcttttttttttttttttgcaagcaagcaaggcactcaaagacatacatggcattctttatacaagggaggctcttgctcgttctttgccagctcactacgctgcttgctgaaaaattatcccttgcttcaaccaaaaaaaaaaaaatgggtgggaaaatgcatgattcccttccttggaatgaattatttctgtcttctactccatgaacggacaaataacacccccggaggatctatcattgctaataatgaagagcctcctcctgatctttttgaaaaaattcggcttccgccttgaagtactagatcttagtggttccataaacgcggccaaaggatagagcggtttctcgaaccaccaaagcgagggtgctggcacccaaataaggcccccggggtgccccccttacc

SEQ ID NO: 33082 - DNA, 536 bp, Glycine max
  Clone ID: PAT_MRT3847_129878C.1
acatctcactagtacttcggccgccctctacttttatatggaatatctttttaaatcctccacttcttcttcttcatctccttctcctgctacattcataaaggagacgcatcatctgatcgataagggtttcgatccttcacatgaccaacgatacaatgcatggacatcgctctctaaacatgccattattactgctactataacatccactgaggaaaatgagctggagaaagaaaacagggaattctgctagccttacgtgtaacctaaccctaaagactacgcaatggatcacgaagagacaaaccatatgatacaaaaaatgatgtccgagtttgattcctacaaagacgaccaagcaggcatagacaacaatatcacctttgggtcttggtactttaacccttcacagtctcatgcaacaactggcccaaatgcactgagatccctacgccctactacgacatatgtctactgtgattgcactcgacactgctcactgacaactatcgaacatggtgtctctacttaca

SEQ ID NO: 33083 - DNA, 333 bp, Glycine max
  Clone ID: PAT_MRT3847_129879C.1
gggcaaagttgtgtccttcttaatggcatgtttttatgggaggttcaaatacccccataacaagaaaaaatgggcgaaccaggactaaaaggccatttgccaaaaacattctagcaattgtaccaaatcaattttaaagggttggaattcagcataaacgtcccccaccatattttaagtggcctaatcatgttcggacactttaaatttatgggcccacatgattcattcattatccaatgggcccgaaacctttctatttggaaaatgcttacccttctatgctgggatggcttcaaaaagggcatcgaaactgtcatgggtagcaaaaat

SEQ ID NO: 33084 - DNA, 469 bp, Glycine max
  Clone ID: PAT_MRT3847_12987C.1
ttgttatttttttttttttttttttttttttttttttttttttttttttttttttttttttttttttttttttaagggcccaaaggggaaaaaaaacccaatccccgaacaagggtttttaacccaaagggtcacccccaaaaaaaaacaacccaactccaatcattatccccccggccaggaaaaaaccttcaaaagctttctaaaaattgggggaacccccaggggcgccttaaaaaccctgcccctagaatttttgagagaaatattatgggcaccgggcctctccaacaaatcccaaaaagttgtttaggcttcaaaaaacccaagctcaaaaagcttttggggggccccaccgtaatcagcgaaaaaggcttcttcccccgaggcaaatttctcaacaagaggggggaacccagggtcagacaaaagtcccctttcaaaaggaaactcaaagaggccttttttt

SEQ ID NO: 33085 - DNA, 642 bp, Glycine max
  Clone ID: PAT_MRT3847_129880C.1
aactccaagtgcttgccactctcatacaatgtccatgactgttgtagtcaaaatcaaggttcatatagtaagatgttataagaaaacaaacaataattggtacatatatatgggaagttccttacttgtcgaagaaggtaatcatccttaagtgtatcttcaacaacattcacattagtactctttcgaccacttatgatttctagaactacaattccatagctgtatgtatcagccttttctgataattgaccatggagtgcatactcaggtgctgtgtatcccctgacaaatgcataagatttatgagactactctgcatgtggataccaatatatttgactctttaaaattttcaagttgagttattggtattatattttgactcacaatgtcccagcaaatcttgtgctaagatgagattggtcccctggaagcagcttcgccaatccaaaatcagcaattttaggctgaagttcttcatccaagagaatatttccactcttgatatctctatgtatgacagaaacatgaaattcctcatgtagataggccaatcccctagccgtgcccaaaattatatcataccgttgtctccagttgagtgaacctttttttttacctatttcccatgtgtatatg

SEQ ID NO: 33086 - DNA, 312 bp, Glycine max
  Clone ID: PAT_MRT3847_129881C.1
attttaaatttaacttttctaatttaaggaagttatccaaactgatgaataaaactgattatttaacctcctatattatctccttccattccccttcgtttttttttttcatttgatctcaccattctattctatctaaacctggtaggcattgtcatttcagtttttgaatttattgaaaaaatagtccatgaatatataatctatcattcaagttaatcctacatagaatattaaatcctgcgtgacacacaagtgatatgtttgtacaattcttttggcacatcaatctacttcatatgtgcaggacta

SEQ ID NO: 33087 - DNA, 311 bp, Glycine max
  Clone ID: PAT_MRT3847_129882C.1
cgcgcgtttttttttttttttttttttttttttttcctttttttttttttttttaaaacccccttttgggggtttttcttagccgtacggggccgggggtttaacctggaattcccgacgggtacttttaggggtaacattttttcctaaaggggggcgtttaagaggtgggggaaaaaaggggcaaagatgttccctgggggaaaagggtggcgggcaaaaaatccaccccacaaagagcccggaggaaaaaaggggaaacctgggggggggaaaagagaggggtagccaaaataaataggcggggggct

SEQ ID NO: 33088 - DNA, 232 bp, Glycine max
  Clone ID: PAT_MRT3847_129883C.1
ctttatttttcaggtgttacacacagattaatttagggcacatacaggagcacattctgatagtccaaaaaatccttacttccaccccttatttgctcaccatggcaagataaagatcttcttatatctagaaatagtataaatgtaacacatacgccgacaacgtaaataattttgcacattattcgaatgatatgactgaccctcggtcacattacatgccaggaataga

SEQ ID NO: 33089 - DNA, 991 bp, Glycine max
  Clone ID: PAT_MRT3847_129884C.1
atttgattcacactttaagcaacacagaaagagagacaacttataagatgaaaaacgtaggaaaattagagtttagtggagaattatagaaattacggtcccttcttctaattgtgtgcgagtagctgttcttctgcttctgctttacaagtttttgttgccatggaagcagagttggataccgagcagcagcagcaaatgacggaaggaagctattcccaaactatgcaaattgatccaaaaagggctcgatttccatgctccgttgtgtggtcaccacttcctgtaatctcgtggttcattccttgcattggtcacattggcatctgcagagaggatggggtgatattggattttgcagggcctaattttgtgtgtgtggacagttttgcatttggagctgccactcgctatcttcaaatccccaaagaaaagtgttgtgtccccttagtccagtctgtgtacaatggtgaggaacactacatgcagggtgaaactagaggagatttgaggacttgggatgatgcactaaggaaaagcactcaagaattccaacatctatcttacaatctctttacctgcaactgccactcgtttgttgccaataatttgaacaagttgggttttctgactggtggatggaatgtggtgaatctggcaattttcattttattcaatggacgttgggtcagcaaagcatctatgcttcgatctatcttaccatttgtggttatattttttcttggagtcacattctggggcttcaccttcctaaagttttggttcttcttcacttccattcttattgggtggttccttcttgttacttattgtttcaagaacctgattcagttgtagtatctgtttctcttgttctactttgtataaaactgtaatacgttcgaagtgatggaagtgacccaattaaccatatactttgtattcagataaattttgttgctaaatgttaaaggcttgttcttgtggtatc

SEQ ID NO: 33090 - DNA, 316 bp, Glycine max
  Clone ID: PAT_MRT3847_129885C.1
gtcctattatactcccaatgtaccccgttcactcgatgattactgcaatcattgacaatggctatcaacacttcatgaatccctcattgctgctcaatacattgtaggaggtttgtaatgacccagatagcttggtgagctaatcaccataccagaaagcacacgctagatcactgggctgattatgctgatctgaagatatctgcgtctcgcaaggccgatatggacatgtcaatgagcagaccttgtagctgaacctaaggagtttattgaaccacatcaattgtcggatgcacagctacgagacatgacttat

SEQ ID NO: 33091 - DNA, 373 bp, Glycine max
  Clone ID: PAT_MRT3847_129886C.1
ataggaggggggggggggcggttggtcccacccgcgcatttccggaccggacgggccgggttaccattttacccgccgggggcccgacccaaccggggccccacacggaaaaacgggccccctggggggagacgacacccccccccaagggcgacagcaaacaaaccgggggcaaaagggggaaacccgggggggccgaaaaaaaaaactaacccacaaaaatcccccaccccccacgggccggataaaacaaagaaaaccgggggggccaaaaaaggaaaaccacccccccacgggcgggggggcgccgcccgcctaccaggccccaaaagaggcctggcccccacccgataagaaggagaacccccccccg

SEQ ID NO: 33092 - DNA, 301 bp, Glycine max
  Clone ID: PAT_MRT3847_129887C.1
cccacgcggacaaccacgcatccgttattacactttaaatgtgaaaacgaaagcaggatacggagtcccacagacgtggctgaccatgagacaagtggctctgactcagattccagcaacacgcggctggaggatgcactgtacgacaccataaacttcagcgacttcaacaccgttactaagatcgaaccactccacatcgagaggaagtaccatagatcggcgtttaccatgattaagaggtggtgccagaaccggtctagaattggaccatgtccatgctattacgagactactctat

SEQ ID NO: 33093 - DNA, 208 bp, Glycine max
  Clone ID: PAT_MRT3847_129888C.1
cataatatgtactttttttttgtctgcagtatgtatatggcagttttttggctcactgctacaggccaccacccactatttaaccttgataaatttaatgctactaactaaattaactaatttccttagccctattgaattagtaattgggccttataaaaaggactggagggagtatctctttctaagtttctttattggtttccct

SEQ ID NO: 33094 - DNA, 455 bp, Glycine max
  unsure (1)..(455): unsure at all n locations
  Clone ID: PAT_MRT3847_129889C.1
gaannnggcgcgagctccgcttctgtcctccagctctctgaatgctatgtcaggaaggaagctctactttaaatgtgaatgttgacaaaaggggtgagaagtggatattttatgaattctacaaaatttagatgctatttttcatctcttgttttttggagttattgatgtactttaaattcgatcacacttttggctaaaaaataaagaagaaaagatgataacacacttccttgtgttgtgtattctgtgcccatcagtggagcttttaaatttaggggagcctgcaatgctgtgttttctctcaatgatgaagatgcttctaaaggggttgtaacacacagcaggtttactatgtgcactaattctagatgttatttttttaatcagattctgtaaagctcttctgactgttttctacaaaatcattggaaaccatgccgcatcatttgctt

SEQ ID NO: 33095 - DNA, 107 bp, Glycine max
  Clone ID: PAT_MRT3847_12988C.1
ggattgagtttgcctgtcgcactgctctcacccatctgaaaatgtcattcaccttgcccactccgccttctacagcgcggtcttcagcatctctcattcatacaacg

SEQ ID NO: 33096 - DNA, 303 bp, Glycine max
  Clone ID: PAT_MRT3847_129890C.1
ggctcgaggtacaagaaatagggtttgatccttgtcatcacttgacgacaatgatcgacgacgttaactatcctgatttccgatccttgctgagacagacgggaggctcctatgatgacaggataacggacgaacaaaaaccgactgagatgacacccagtgcaagggcgaacaaagccataacgaccgagtgataacaggtgcgctgaattaagtcgctgaatgaaaatgggtggtaggtatcgtgtctgctgctaaagtaaaagcttaacgggtgcgcgctgaagcatctgcatgtgatgt

SEQ ID NO: 33097 - DNA, 400 bp, Glycine max
  Clone ID: PAT_MRT3847_129891C.1
gatgtgcagtgcaactactcatgataagatgaacaaatcaatcaaaattatcacagatccatatggactacaacccattattaatttttggccaaagaaaaggaagaagctgtttaccttgtagctcatacatatttcagtgtagagactagagacagacagatcctgtgtgcacttgttccgatccaacaccatatcgtatttctctgggtactgtttttcttggttattttcaaaactgaagggtgtagaggaaaaaaccatgtcaaacaacaacactactactcaaataaagtatgatatttttgttagctttaggggcaaggacatccgcaacgggtttcttagccatttggttgaggcttttgacatgaaaatatatgcttttgtagatgataag

SEQ ID NO: 33098 - DNA, 213 bp, Glycine max
  Clone ID: PAT_MRT3847_129892C.1
gggactattcttgaaagggttgattgtttggtccaaaaaattcaaaaggacatttcgatggtgggggaagggaaaaacattgggtaagaagggtttttggttgaaacgaacttaaacttgctttaaaacagttggggtaagggaactttttggcttgggaaaaggaaggctttccaatttgttccagcttccggataaccctttttcatcctt

SEQ ID NO: 33099 - DNA, 2546 bp, Glycine max
  Clone ID: PAT_MRT3847_129893C.1
ccacgcgtccgtgcacactccagacggaagagaagagacgataatggcgggttctggcgggaaaaaggtgcaccaaatgatcgtcggtttcggcggcagtggcctcggccaggttgtcatcgccgtcgccgtctctttcctcgtccgcgtcttctccgctcccggcccggccctctcgccggagaacgaagctgacgacgtgccggagaacgattccgacgacgcagaagctccaacttccggcaaggtcacgccggtcacaatccagtggagaaacatcaattgctccctttctgataaatcttccaagtccgcgaggtttctgcttaaaaatgtgagtggagaagctaagcctggaagattattagccataatgggaccttcaggttcagggaagacgacgttgcttaatgttcttgcgggtcagctaacagcatctcctcggttgcatctgagtggcgttttggagttcaatggaaagcctggttccaagaatgcttacaagtttgcttatgtgagacaggaggatctctttttctcgcagctcacagtgcgggagacattgtctcttgctacagaactccagcttcccaacatatcttctgcagaagagagggatgaattcgtgaacaatctccttttcaaactaggcttggttagctgtgctgataccaatgttggtgatgcaaaagttcgtggaattagtggtggtgaaaagaaacgcttatccatggcatgtgaactgcttgcaagcccatctgttatatttgctgatgaacccacaacaggacttgatgccttccaggctgagaaagtcatggaaactctccaacaacttgcacaagatggtcatactgtaatttgttctatacatcagccaagagggtcagtgtatagtaaatttgacgacatcatcttgctaacagagggttcacttgtttatgctggtcctgctcgtgatgaaccactggcatacttctcaaaatttgggtaccaatgtccagatcatataaatcctgctgaatttttggctgatcttatatccatagactacagttctgctgatagtgtctatacctctcaaaaaaggcccactggtcttgttgagtcattctcacaaagacaatctgcagttatatatgcaactccaattactataaatgatctctcgaacagtagaaaaaaaatcagccagagggctgtagtaaagaagaaaggagtttggtggaagcaatttttggttgctccttaaaagagcatggatgcaggcttcccgtgatgcaccaacaaacaaagttcgggcaaggatgtcaattgcgtcggcaattatctttgggtcagtattttggagaatgggaaattctcagacttcaatacaagacagaatgggattacttcaggttactgcaataaacacagctatggctgctctcacaaagactgttggtgtgtttccaaaggaacgggcaattgtagatagagaacgtgctaaaggctcctattccttgggcccctatctgttctcaaaattgttggctgagattcccattggagcagcatttccattaatgtttggtgctgttttgtatccaatggcacgtcttcatcctactatgcaaagatttgggaaattctgtggcattgttactatggaatcttttgctgcatctgctatgggtcttactgttggtgctatggttccaaccactgaagcagcaatggcagtaggcccctctctcatgacagtttttattgtatttggagggtactatgtcaatcctgagaataccccaatcatcttccgttggattcctaatgtttctctgattagatgggcttttcagggactttctatcaatgaatttagtggtcttcaatttgaccatcagcattcatttgatattcaaactggagaacaggcactagagcgtatttcctttggaaaaagtaggattagggatacggtgatagcacaaaatagaatactgctattttggtattgcaccacctaccttctcctcgagaaaaacaagcccaaataccagcaacttgaaagccctattgaccacagcaaacctcatttaaaacttgaggagctcaattctgaacaagttgatcagacaattgaagctccgccagtcagtcaacttgattccaaacagcccctcgagtcacctgaagtagatcttgttggctcttttgtccttgaaggtactaaatagaaagatacctttgcaaaggatgaccaacaaatactgagacagtaagccgtttcctatagaacaggacaacaaacacaatgtgatattggacaacgaaaacatcagcttatgcttacaggttgttagttttttggtcgaattacagattgttatatgtaataataaacagtcatggtggataatcttggactgtctcatggtggttcctttgattatagtgactattttcattaaatgatcagagattctgtggaaatcatccatgatatggatttttcttgaggttggtcacaggtttcctttatatgaacttagttatgaatt

SEQ ID NO: 33100 - DNA, 882 bp, Glycine max
  Clone ID: PAT_MRT3847_129894C.1
ggcttttcagggactttcttatcaatgaatttagtggtcttcaatttgaccatcagcattcatttatattcaaactggagaacaggcactagagcgtatttcctttggaaaaagtaggattagggatacggtgatagcacaaaatagaatactgctattttggtattgcaccacctaccttctcctcgagaaaaacaagcccaaataccagcaacttgaaagccctattgaccacagcaaacctcatttaaaacttgaggagctcaattctgaacaagttgatcagacaattgaagctccgccagtcagtcaacttgattccaaacagcccctcgagtcacctgaagtagatcttgttggctcttttgtccttgaaggtttgtaatcagctgggcctactgctgttcttatcagatattcatctatttaaacccattagggtcggcctagtggtggggttgggggtagatgcatgaggacttatgttcgatccccattgctggcattgtacaaaaaaagaagatattcatctatttattgatttatctaatacaggtactaaatagaaagatacctttgcaaaggatgaccaacaaatactgagacagtaagccgtttcctatagaacaggacaacaaacacaatgtgattggacaacgaaaacatcagcttatgcttacaggttgttagctttttggtcgaattacagattgttagatgtaataataaacagtcatggtggataatcttggactgtctcatgttgattcctttgattatagtgtctattttcattaaatgatagagattatgtggtaaaaaaaaaaaaaataaaaaaaaacaaaaaaaaagaaaaaaaaaaaataaaggtagaaccaaaaa

SEQ ID NO: 33101 - DNA, 248 bp, Glycine max
  unsure (1)..(248): unsure at all n locations
  Clone ID: PAT_MRT3847_129895C.1
agnncnagcnnaaggagaagagcattatagagnnaaaaaagantgaaanaaaagtangggtgangnntnncggtagagagcgcaaacgcagacgcaaacgctggttgttttgntgcngcttatnatncgactgtccgagagagagagtcagagataagaccttcangttgagttgaaatttttcntgcaatcngnntttgtcagtcnaatcaaatattnttatatacttangagccnnctagagagac

SEQ ID NO: 33102 - DNA, 583 bp, Glycine max
  Clone ID: PAT_MRT3847_129896C.1
aagggagagtacggaactggattcaatccgaatatgaccgatatcttgctttcttggctcacagaagaagatctagcctattatgtctccaaatttgagaaaaccggcttcactggaggcttaaactactacagaaatatcaaattcggctcgaggctgacgacaccatggacaagagtgcaaatcaaggtgcctgtaaaattcattgcaggtgaattggacatggtatacacctcgctaggaatcaaggagtatatccacggtggaggtttcaaggaagacgtgccgaatttagaacaagtgattgtgcagaaaggagttgctcacttcaataatcaagaagcagcagaggatatcagtaattacatacacgattttatcaacaaattctgatctgatccaaaaatgaattccacctggaataaagtcgcaggatcgtgcagttgatgtcaaagggtccaaattgttaagttctgtttttattttattactagctatgtaacatgggcgactcatgttagggcttatggcatatttgggatgacattatgcataaataagaaaagttatttttaattaaaaa

SEQ ID NO: 33103 - DNA, 337 bp, Glycine max
  Clone ID: PAT_MRT3847_129897C.1
gtcagggatcattcacaatattgcggagacccttcatgtgggagggctcactatggaggaggagcataatggtgagcaccttgctggagaatacaaaggggagcaccgtggtgaacacagtagtgagtacacatgagagcatcatggtgaacacaaatctggacagttccatggtgagcacaaaccacagcacagataggggttcctagacaaagtccaggacaagatccatggtgagggcggcgccgtccagggcgataagacgaagaaggagaggaagattcacgagcatggacatgagcatggccatgacagcatcagcagcagtgacagcgat

SEQ ID NO: 33104 - DNA, 177 bp, Glycine max
  unsure (1)..(177): unsure at all n locations
  Clone ID: PAT_MRT3847_129898C.1
caacaacncactcactaagctaaacaatttcatnaagcctgccatggcttcctcgtgtgcttcctctgccattgcagctgtngccatctcgacaccaagttcccagaagaatggatcactctggggaagcanaaaagctgcttttcntngtgggaggaaantgagggngaacanttt

SEQ ID NO: 33105 - DNA, 467 bp, Glycine max
  Clone ID: PAT_MRT3847_129899C.1
gacgcccaacacaacacaccatcttctagctcctttctaacgagtttctattactattggagtcattgttttcttctctctctctctctctctcttacacaccaaactcctgttgttgttttctccttcccaaaacgcatacacacaccaacaaggttgttgttagccatcactaacatcaccacaaccatgcctgaggcaccgagagactacaacctttttgagcaaaacaagaaaactctcgagttcattgaggatgtcactgccaacgcagaccaagttcagaagagggtcctctccgaaatcctctccaacaatgcaaacgctgagtacctcaagagacacgacctccacggccaaaccgaccgcgaaaccttcaagaaactcttgcctgtcataacctacgaggacatccaacccgacatcaaccgcatcgccaatggcgatacttctccaatcctttgctc

SEQ ID NO: 33106 - DNA, 749 bp, Glycine max
  Clone ID: PAT_MRT3847_12989C.1
tacggttgcgagacgacgacagaacggggaacaagtggctatataagagatgaagtttcactctctttatagcatttttgtgggatgcgtcagtgagaatggctagcaagcaagtctattagtcacctttgttttagggtccatttctcgtaccccattttgttacacacttgatatatgatttatcttgctcaaaagaagtctcattttaataagattttattcatatatgcactatgcagtgtgcttcatgtaattatttgaagtaggcaaatagtttattttttcagagttatttgatcgttgatagttctttcaagtttcacgttgatttggtgcaatccttcatcaaagtcgtcattatcacataatttgtgaatcagacttcggatcgaacctctgaccacatgcttaaaggacaaagttacttctcaaccatgtcacacaatgttggcatggagaattgatgctttcttgttgtagattgcttgcatatgacaaaaatgaagataaaggactttgccatggagacatgttttaaagagaacagatactaagaagtagtagcaatttttctatggcaactacagtgcatcacaaagttaaatttttctaaagagtgataaactcttgacattgtcattataaaactttctaatgccccattgatattgcactttgtggatttatgtcaaactccctccctattcattttttttaatcttctcaaaagaaaataagttcctacc

SEQ ID NO: 33107 - DNA, 1688 bp, Glycine max
  Clone ID: PAT_MRT3847_129900C.1
cccacgcgtccgcccacgcgtccgcccacgcgtccgcccacgcgtaattcccggggcaactgtttacaacaataataagttaataactcgcgtagcgcaaggaacagcataaacgacgctgcgctgaacgacgacggtgtcagacaaacggtgccggttggtggtgccgccacgctattacgcctaatcgtatccatcaccctcatcaaaacccctcctttctcttaatttagaaaccctaattcagaagaaaaaagtcaccttctccagaatttgcgcggtaatggcatcttcttcagactcatggatgaaggaatataatgaagctgtgaaacttgctgatgatatcactggcatgatttctgaacgtagttcattccctgcatctggaccagaaacccagcgacatgcatctgctataagaaggaagatcacgatattggggaccagacttgatagcttgcaatctcttttgtcaaaggtccctgcaaaaactgagaaggagatgaatcgtcgcaaggacatgcttttgaatttgaggacaaaagttaaccaaatggcttcaacattgaacatgtcaaactttgcaaatagggatagtttgtttgggccagaaataaaatcagatgcaatgagcagaactgttggcctggacaacagtggactagttggtcttcaacggcaaattatgaaagagcaagacgatggccttgagaaattggaggagactgtaatcagtactaaacatattgcgttggctgtgaatgaagagctgaatctacataccagactcattgatgacttggaccaacatgtagatgttacagattctcggctgaggagagtgcagaagaacttggcagtgttaaacaaacgcaccaagggtggttgctcctgcttgtgcatgcttttatcagtcattggtatagtgggtttggttgttgtcatatggctgctggtcaaatatttgtaaagataaaaatacccaaactcgtgaagtttctctttttttcatgtttctgaatgtgcattgaaacatgataacgtgtttctttgttttttcttggtgctttggcagtggcatggaatttattaaggtattgaaaggcttttttatgtaattgtcagatttcaaatgttgatacccttgagtgttgttctctttgtaaaaatcagtaaaattgaggtgacttccatttaaaaaaaaaaaaaaaaaaaaaaaaaaaaaaaaaaaaaaaaaaaaaaaaaaaaaaaaaaaaaaaaaaaaagttggccgctataaaagaaaaaaaaataaaaaacacatacataaaaaaagggggggccttttttagggatcccaagtttcataccccgtggccgcgggtttaaaactttttaatggggaaaaaaaatgcaattacccggcccaattttttaaaagcacatcccggtaaaacccgggggtgtaccaactaaaaggccttggaaaaaaaccctttttaacaattggggataatgaagaaaaagggggacccgcccctcttttccaaaattatgcacaacctttagtggtgattgggaccccccccttatcgctacaatttaaaaccgggggggggggggggtgctcccccttttttacctttttttttggcaacgcccaaaggctcttccctttaagctttaaaacttgggttccctccagg

SEQ ID NO: 33108 - DNA, 241 bp, Glycine max
  Clone ID: PAT_MRT3847_129901C.1
attaattaactttatgacaccacatatatacgtgtttctttcattttctcagaggattgcactttcgccttcaatattatacagccaaattaaaataaagaactttggtactaatcataacaaacgcaaatgacagaaggggattaaaaaaaattatgaagttgccttcctttgtatatatacgttcacaacctaagtggtaacgtgatcatgatcatcatcggacatcagcacaatcaca

SEQ ID NO: 33109 - DNA, 292 bp, Glycine max
  Clone ID: PAT_MRT3847_129902C.1
tttattcacacggacaatgctgagaaatgagggaaggcctgaggagaacagacagaagctcactgaaggtgcctcaggagaagtcccgagatctacacaggaagccatagattagccaccaagggttgcactggctgaccgtccaagacctggtgagtgggagaacctgagagtgaaagagcacgcacatgatgaagaggagaagcaaccagctgagaacctgcacttcaaggaagaacttgttgacggaagcccaaatggcaacttggtgctagagttggaccttggaacc

SEQ ID NO: 33110 - DNA, 474 bp, Glycine max
  Clone ID: PAT_MRT3847_129903C.1
ccgtacgttgtgttgataagtagctcacccaggttcaacatgtatgggaatgagtttggaatgggaaaaacagtggcggcaaaaagtggatatgcgaacaaatttgatggaaaagtgacatcatacccaggtcgtgaaggagggggaagcatcgatttggaagtgggccttttaccacatataatgagcgctcttgaatcagacagggagtttatgaatgctgtttcggtttccaatctctgatgctcgtttgctaaaatgttcgcagtatttggcagttcaacagctcaaatatgattatttctgtcattttaaacgctgttaaatctttattagtgaagtgatgcatttatcttctaagcaatagatttttcgctcctcccacggagaaatatttaggctcccttgcgcaatgattgttgagtttttgtcacatgaaagaaatatatgttttagagaatagttttttaaggg

SEQ ID NO: 33111 - DNA, 293 bp, Glycine max
  Clone ID: PAT_MRT3847_129904C.1
gatcttaacctaatatattgggtgggcttattataaagacaaattgttttatttgaatttaatgttaacattttatacaaaaaaaacgcattttactaggggggaaaggaatcccacccaacgtttttgaatgtttggaaaaaaaaatcacggaccggggggggggaaacctatacccggttaaatgaataaacaataggtggtgatacttctggccgggggggcttaatgaccttaaacccaaaatgggaaacctccttttgtgtcccaaaacggaggaaaatccccggagg

SEQ ID NO: 33112 - DNA, 122 bp, Glycine max
  Clone ID: PAT_MRT3847_129905C.1
cggactatctacgtgcccatggtgttcaaaatactggctccatacatgcgacccgtgggacctagcccgtttggatatctacggagagaaagaatggaactttgatacaccacggcaccgga

SEQ ID NO: 33113 - DNA, 927 bp, Glycine max
  Clone ID: PAT_MRT3847_129906C.1
atgtccttggtttaattcttagttatctatccccagtaaaaaagtgcaatcatagataataatggctcttgttgtttcctctaggaaggattcctttgtttgttgtctccttttcataatcgtatctgaagccagcgcacagtataacaccgtattctgtgataacaacaaagggaaccacacagtcaatagcacctacaacaacaaccttaacacccttttatccactctctcttcccacacagaaattaactatggtttctacaacttgtcgtatggtgaaaatgaagacaaagtaaacgccattgggctctgcagaggagatcttaagccagatgagtgccgcagttgcctcaacgatgccagaggcaatctgacccagcgttgtccaaatcagaaagaggcaattatatattatgacgaatgcttgttgcgctactcagaccggtcaatatttggcgtaatggaaacttctcctgattatgtgctatttaacatacaaaatgcaacgaacgtgggccagttcaatcaagtcctgaggaacttgatgaggatgctaacaggaatagctgcatcaggtgactctcgacgcaagtacgccgccgccagcgcaaccgccacaaatattcaagcaatatatggtctggtgcagtgcactccagacttgtctcagccagagtgcaaacactgcttgattggggctatctcagaaatcccaagatgttgtaacggcaagataggtggtagagttcttagacccagttgtaatatcagatacgaaaactaccccttctatgatgaacctacggcatatgcaccagctccatctccatctctgtcactgtgatgccgtcgcacttccaccttccatctataatactaatagaaaattattctcaaataatgtttgtatactgaataaaggag

SEQ ID NO: 33114 - DNA, 393 bp, Glycine max
  Clone ID: PAT_MRT3847_129907C.1
actccatgtgaaagctagataggtaggcacacactcgggagggaccctgctaggaattcaagagcctcactcatatatatatatataacatggttggaagaagcaacctaattaagttctatctcccaatatatatatcattcctttatttagtatttatatataacctttcttctcttatattcattcctattctttagtgagacaaatatttaaagcactcaattagctaagtgtttggaggttagatttcttgtgaggcttatttgcttttttaacttgttgaatttgaatcatcttgtgaaaaacagactcgatcgttattgaagaaagaaagtaaggtgtttggaatgaagtttgatccgaaatcattgtctcaatttcattcattta

SEQ ID NO: 33115 - DNA, 305 bp, Glycine max
  Clone ID: PAT_MRT3847_129908C.1
cccacacgtccagcaagcattgcatccctcatgaattgtagtttgtattgtgctttagagaaaaattctgccatataatgatgggttttaagatcataaggtatgttttgcaacaatgactaaattatttgctgctatgatcttgaaactctatgcaatttccatacttcaaacagtggtaatggatgctaatgaacaaggaggccacttgtatgacaaaaagagaaaacttggaagtgagagtgtaaagagtaaccaatgcccataacaatgctcgatgagatatatccagacccaataccaca

SEQ ID NO: 33116 - DNA, 197 bp, Glycine max
  Clone ID: PAT_MRT3847_129909C.1
accccgcatactagacccagaaaaacaacaagggtcaaaggtaaatttgcaaaaaggacagaatctcgcatattataacatttaaagtaaccaggatattcaaaatcctctatttcgagaacatatccttcaacaatttcaccgctactttctatctctaatgtgcaaacagacagtccataacggatgaataatat

SEQ ID NO: 33117 - DNA, 312 bp, Glycine max
  Clone ID: PAT_MRT3847_12990C.1
accttaaaaaagaggggggattttgaaatcatatccctttttccaccctcacatatatgataaaaactacaacacaatcggggggaaacggagaatccacgccctcttcattaaaaacacccaaacccaagaaaaaagaaaccccttccaaaaattaaacaaaaaaggggaaaaaaaagaaaataatgggggggctgacaaaaaaaaaagaaagggcccccgccaaaaggaacaaaccaacagggggggaaccaaaggcataacaagggaaaaaaaagtgggtccaccaaaggcaaacacacccaatgcgcc

SEQ ID NO: 33118 - DNA, 361 bp, Glycine max
  Clone ID: PAT_MRT3847_129910C.1
gtccggaattcccgggtcgacccagacgaccgctcacgcgtccgatccgcacagcacactctcatacatcatacgccgtcgaagtcaccctggctcgctctgtacaaccagaaggatgctctggacctatcaatgggaactacaggaaataaggcatagacttttgatgaagacaaacccagtctgtggcaaggaactaaatgaacttgtatgacacgctctaagagctggcttcttcaagagacacactgggcatacattaaaacctaaagaatgatgctacatgatcatcaagtgaaacactagttcatgacgatgttcaacacactacaattgatgctctattcattgaagatgaccc

SEQ ID NO: 33119 - DNA, 297 bp, Glycine max
  Clone ID: PAT_MRT3847_129911C.1
ctctatcactaattattgcgcgcatgatcattggtgagaaagaggggagtggcttagtttgtacatacctgtgagcttaacacagcgggccactattacttctgctgtcatacagcactcgccatgctgaccctggtgctttagccaaagctgtcaccacagacattctgggaggatacacgcatattgattgtgctgatgcgtatatcaatcacacagaaattgattttgctgttaagaagctatttgatcatggtgtcgtgaagcgtcaagacttattgatcacctgcaaactct

SEQ ID NO: 33120 - DNA, 242 bp, Glycine max
  Clone ID: PAT_MRT3847_129912C.1
cgcgtaccacctctccctatattgaggggaactttagctggacggaatgatcgtcatagctgactgctacgcgaaatctatatacgctcacaatttcactcaagctactagcctgcttcttaaagccactagcctgaagtacgctacattgactcatacacacaccactggtgtcattctcactgggaactttacactaatacaacctgacatgccatcatgcgttaatgaatcgggccaca

SEQ ID NO: 33121 - DNA, 335 bp, Glycine max
  Clone ID: PAT_MRT3847_129913C.1
aaaaggatgagggctattaggggttagcgaatgtgggagggggggtactatttattttttatatccaattttacaactttttcctccaagaataaatgacaaaaaggacggagtgaacccaacacatggaaagctgagagacatcatttatagcaatttttttttgtgggctatttctgcatacatcattgctaatacaacgagaaactcgttaagggctggcgtgtggttaaaaaaaatggatactatatgcagaaaactgtgaattttgatcactaacatggtaaacaaattttccttgataaatttttagggggactgtgcacggaccaaaa

SEQ ID NO: 33122 - DNA, 408 bp, Glycine max
  Clone ID: PAT_MRT3847_129914C.1
ctcgagccgtttttataaattttcatatgtttgatttaaaatttactcataacttaatttttcaataagggatgtaaacataaatcttattgcttggtaatctattttccaaaattaattctattaaaatcaaaattttcagccttgataaacaaagctaagtaagtttttttttttttttttttttcatttaagtatgtcagttttgtagttacaatcatgtatagagatagtaccacacaaccactccattaatccaagagttcaatctctaactccttttccatttatgacaaccttgcacgtattgttatattcttctccaacacaagattttagccatttctgcaactgagttttcactctctaaagaaagctttcttctctctcttttttggcatgaaaaat

SEQ ID NO: 33123 - DNA, 447 bp, Glycine max
  Clone ID: PAT_MRT3847_129915C.1
ggaaaaaggcccggtttaaaattgaattgggggggaaaaccccccaatttgaagtttttccaatcaaaattcaaatcttgcaaaaaaaaaaaagtaaagggcttttttttttgggttcccttttttctctctttctggcttttaacgaaggcttaatcccaaaattaaaatctttggggcccttttttttttagaactcaaggaaaacaaactccaaatggaaaaaaaaaagccgggtcctccatttttttatccaactttttattctcagtttactcaacaggagggggcccaaactcggccaatttgggggtcttgggagcataaaacattttaagaaagggggggttttcacggggggaaaggttaaacacatgcttccaaaagccataaacccccgggggggggggaagcctctgtgggaaaaattgcgcaggggtctttttt

SEQ ID NO: 33124 - DNA, 117 bp, Glycine max
  unsure (1)..(117): unsure at all n locations
  Clone ID: PAT_MRT3847_129916C.1
atcatcatagacacaatgggggatctggggacacaaaatggaaatgttgcaaaactccttagatatcatatcattctcacctacgggttttagctaaccctncagccatcccagcgt

SEQ ID NO: 33125 - DNA, 171 bp, Glycine max
  Clone ID: PAT_MRT3847_129917C.1
cttcgacgacgcggcggccagcacctggtggcgccacagcgtcttgccgccgaagccgccgcacacgtagggcgaggtgacgtgcacctgcttctcgtcgaggccgaatatttccgccatcgaccacgacatgtgcgccacgccctgcgatgcgtcgtggatggtcagctc

SEQ ID NO: 33126 - DNA, 217 bp, Glycine max
  Clone ID: PAT_MRT3847_129918C.1
caaagggagatggccgaaacacaaccccccacacgattccaggggcctatttcattgctctttccaccacccattggtcttggggtgtacctcaatgttcccggggagtacctatacattggagccggcgtatttaccatcatattttgcattattgagatagataaacccgataaaccccatcacttttaaccccacatataccatattggaaagg

SEQ ID NO: 33127 - DNA, 327 bp, Glycine max
  Clone ID: PAT_MRT3847_129919C.1
ggaccttaattcagggctttattttgcattgaacatacctgaaagtatctagaaaaaataaaacctggggataaaaaccccctccttagggggggggggagggaatacccgtttatttaaaaagccttgctgggtaaacccctattacaagaaagcccttcaaattatagttttaaaaatttttggggggggcttgaacatgcccccccaacccaggggtttgtttcacagcctttgaaaaaccttgggctgggcccttaaccttttcccctgtttggtgaagaaacccttggggggggcccttccctgacggggccgatttttggg

SEQ ID NO: 33128 - DNA, 482 bp, Glycine max
  Clone ID: PAT_MRT3847_12991C.1
tacggctgcgagaagacgacagaagggtccctcctgttaaaaatacctctccaagttgacgtgtaaaattcgggatctcactctagcacgtccactttgacatgttacgattccagattttgataagaataatatgtgtgtgcgtgtgtgtgccacgagcgtaaaatttgtataaagtaatgtgaacattctttttgttcgataattaaagtttcatgtcgataggaaaaataaaaataagttaaaatgtatacaagcataaaaagggtaaatttaattaattcgtttgtatattttagatgatatacctcctatatttgatatgcatccagtccaagtactgaagttcatatatttgacgatcgatatcgaacccttgaacacttttttttttatgtagtcatatcctgttgtttgaataaatagcttagaaatgtaatatattcctcttaacccattctattattacttttgttatgcat

SEQ ID NO: 33129 - DNA, 296 bp, Glycine max
  Clone ID: PAT_MRT3847_129920C.1
aaaattaggagtagggttttgctaccaaaacttagcaaaacagacagcgatcagccttatcagcttagaagtcatcattttgaatacttctaactgaaaaaatgtaaatagtttaggaaaaataggttttcccgcaaatatgtgtttgccattaaagaaattaagggttcttttccccttgttttctgttttttctttcttttttctatgtactgatgagagaaagaattagctagataaagtagtatgtgtatgactaaggcactatgcattgaacttacagtttattcctcatt

SEQ ID NO: 33130 - DNA, 534 bp, Glycine max
  Clone ID: PAT_MRT3847_129921C.1
tacttctctgctatacagccccttgacaacctatcaagcccagctatctatcgatgatgatgtaagctatggatgctttgatgccatccatgcatccatggatcttatggaagattgtaggatgttagggtgataggcctctcacccttcactctccacctccgacaatgcgcttatgcttgagccctcgaattctccaccccatcaccacatacgtggatacatgtaggaacctagatgtctggaaggcatgaagctaagaacatatggtcacatctcagcaagccgccaagacgcaatgaagtcatcgcactctctctcattctaagggccatatgggtatggatgcaatggtactactgcatctctgcttctttggaacggaagaatgaactaatatgctcatacgttcgttcctttgcgaacctacatgccaacttgagaagaccctaacactcaatgtgcagatgcctacaatctcgctttctcctcggaatctgcaaatgagtaagtatgtacttatgcccttatact

SEQ ID NO: 33131 - DNA, 877 bp, Glycine max
  unsure (1)..(877): unsure at all n locations
  Clone ID: PAT_MRT3847_129922C.1
tcggctgcgagaagacgacagaaggggggtgagaaaagaaagcgttgcattatttgcactacgcgttgagcggcgcgtgacgcacggctcatttaattacttagcagaagttagaagcgcccgtgtccgtgtttcttccttaatttcttcttcaccttattatcatcaaatgttctgagattgagctcatgttgggtgtaggtgagaaagaactcacaatagagaacaacaacacaattccatggctgattttgactcaacttatagtcctccttctcctctttgcgctcctctttttcttcaccctcctcccattgggtcccgacgaccaccaccacaacaaccttgtcaccgccgacacgccccctcctccgacaacctcttccagtgtcttctttttcgacgatattcaaattcagcagattgactccccgtttactaatcacgattcatcgcccactcatccaccaaccaccttgcagggtgggcagaacctattattaaaaggcgaaatagcaacgggtccaagtccaagcatgagaagggaagaagagataatggaggaggaggaggaggaggctgcatcgttgtatttccacccttgccattattttcaattagccacggtggcattcctcaaatgttttggcttggattctacatctgatagcccttcaacacgaagacataggaaaagaaaagaaagctgattatgaaaattatgtaattgtcagccattatgaacattttctttatcatttctcttgtagcccgaggctctacgcaatttggtgggacagaagaaattctgttcttgtagcataataacgcttgcttaatttaacaaattaaccccacggcaaaaaaaaaanaaaaa

SEQ ID NO: 33132 - DNA, 294 bp, Glycine max
  unsure (1)..(294): unsure at all n locations
  Clone ID: PAT_MRT3847_129923C.1
ataagaaagggatcatatcggatagcatagggtaggtgttttatacattatactnnngggatcgcatgctacaatccaggcttactacttgattctttatttttataaaacaaaagtttaccatttaaacaaacttatcacttaggctttggaccttagacaaactgactaaggttttcattcacaattaggtttttgtatatttggattctagggcttaaactgttcactttaaatattaaacatgaattccaaagtgtaatattattctcccttttcctttttaattgggtt

SEQ ID NO: 33133 - DNA, 553 bp, Glycine max
  Clone ID: PAT_MRT3847_129924C.1
caaaagcttcaaattaatataggttttcttcttctttaagggttttggcctcacaccgaggagattttcccactaggactttgccttaggtcttatgattaggggaccattaaatcctggctttaaatatatgccctatcttcatgcaaatgaccctttttgattaccttcgggtaaactaaggctttaccaggccactttcttgggtcaaagcattaaattccaccaaagggcgtctttggatagtggttaagaccttctaaaatctggagttccattaatgttccataggatccgggggatcctacaaaaatcttttttgaaaaccaaatttcacccaaagattattaaaagaagtcttaaaggttattcttaaaggctctgccaaatcatgagaaaggttggctatagccggaggaatcaaacacaaaatcattcttcttagccggaggtggcataaaaggaagttttaaactttggaattaattggcatccaatcaaaataatcgaggaccctgattggccatatgaataatctttggactaaccaccc

SEQ ID NO: 33134 - DNA, 369 bp, Glycine max
  unsure (1)..(369): unsure at all n locations
  Clone ID: PAT_MRT3847_129925C.1
anatgaagatcggacagtttattttttgactgtttattttaaatctgatcatatgagttaaaatatgatccgtctaatcttcattagacagtcatcaaattttgantgcagagaattcgggtctgtctctgcagccgaaaattgcaaaaagcaanannnagaaagagaaataacgaaaagttaganagagatagagaggatgtagaagtgcagcagaaaggttggttnctgcagaagatccatgtccatgtagaagttctgttgggaattcaatttcgaatgtcagattanaaacttggtgactcaaatgtgagtcgaaaaatcctatgtttggtccccaacagatanacgtaactatatacnttttgc

SEQ ID NO: 33135 - DNA, 295 bp, Glycine max
  Clone ID: PAT_MRT3847_129926C.1
acactttatcttttttttctcttttcatcacaattcaatctttgctcaaatagtatatatttaccaccaataattacaacttcaatcttctccttttcccttcttccctatcccatctttcccccatgattgaatcacatattagttatataccccaacatcatttcttccaccatcaacatcaacagcaaccacaaccacaacattctcttaccattttctatgatcgcaatatttcattttcatatctcacatatctttaactatatacatatattctccttttctttatcac

SEQ ID NO: 33136 - DNA, 925 bp, Glycine max
  Clone ID: PAT_MRT3847_129927C.1
ctttcttctcttttcttcatttttttccccctaaaagcatttcacaaagagaagacacagtggatcgtggtttcacttcatttcagaccaaacatggtgcagtggcataggcacgtttttccctttcttcgccacattcacaagcgagtattggaaccccaggccactcattcagctccaagccttgtaatttctcgcttagcctcttctctttcacaaggtcagttggggaggagaacatggacaacaacaactttgccctgtttttcaagacccgtttttctcactttccaacatcagggaatatcaagttctgctcagttgctggcaaattcatcagaggaaacacctgttttgtcacctttagccccagtttcattattgagtagttcaaaaggtgaagaccagaagcagaaagttgttactaagccagaaaaagttcaagcgatattaaaggcaataaaacagagtccaaagaaggtcaacttggttgctgctctggttcgtggtatgcttgttaaagatgcattgatgcagttggaattgacaataaaacgagcagcaaaaactgtatatcaggtagtaacattaggtattttcattgtcacctcattggacaagcttgcaaaatctatagttttaattgctttcaaagttcctctgtgaatgcatcaggttttggtaataaaaaaattcaactcattctttgccccctcccctagctcttttactttttgtcattgatctcaaggaccaggttttcaatgaggttatataaatttttacatgggacaatgtcatgacagtgagtaagaaggctattttattaccttctatagggtaaagcaaaattgaacgcatttgttttaaaaccctacacgttgcaggttattcattcagcccgagcaaatgcctctcacaatca

SEQ ID NO: 33137 - DNA, 1253 bp, Glycine max
  Clone ID: PAT_MRT3847_129928C.1
cacctagcgtttaaccctagagttttggtttggcctttcttctcttctcttcttatttcccacaaaatcatttcacaaagagaagagacagtggatcgcggtttcatttcagaccaaagatggtgcagtggcagagacacgttttcccctttcttcgccacattcacaagcgagcagtggaaccccacgccacccattctgctccaagccttgtaatttctcgcttagcctcttctctttcacaaggtcagttaggaaggagaacatggacaacaacaactttgccctgtttctctagacccatttttctcggtttccaacatcagggaatttcaagttctgctaacttgctggcaaattcatctgaggaaacacctgttttgtcacctttagtcccagtttcattattgggtagttcaaaaggtgaagaccagaagcagaaagttgttactaagcaagaaaaagttcaagcggtattaaaggcaataaaacagagtccaaagaaggtcaacttggttgctgctctggttcgtggtatgcttgttaaagatgcattgatgcagttggaattgacaataaaacgagcagcaaaaactgtatatcaggttattcattcagcccgagcaaatgcctctcacaatcatgggttagatccagaacgactcattgttgcggaagcatttgtaggaaaggggttttacaaaaagagactttggccccatgctaaaggaaaatcgtcgcttagagtaagaccagaatgcaggctaacagttgtagtaagagagataactgctgaagaagaggcagagattgctaggctgagggtccacaacttcaagaaacgcaccaagcgtcagcaacgacttgtgcctcatcagctcattgtgtccaatcctatttggggccgcaaaaacaaatctagtggtaaaaacttgagtgctacacctgcataagctgagcttttgcttgtttccatgcttatgtcatttttcgtgtatggaaacagttgagaaatatatgtctgtcccttgttgcagatgatagaattttgtactggatcatgtttagtattgttctcatttattagcttatttttcttcctactaggtactataaagaatgtcttgttcaatcaccagcatgaatctcctcttgttttgtggggaagtataaacatatgttttttttatttttatttttaaataaaggcgtattcttgcaagttgcatcatttaacgtggtgtgctttgatt

SEQ ID NO: 33138 - DNA, 744 bp, Glycine max
  unsure (1)..(744): unsure at all n locations
  Clone ID: PAT_MRT3847_129929C.1
gtacgacctcgcaggttatctcggtgccggnnaattcccggggtcgacccacgcgtccgggtaactaaaaaaatacaatcttgactattcttagattaagatatttggactattgataaagtgtgattagttgttaaccgaggaatatggcgatcaatgtctgtgacagtgactagtgatgacccttggcttattagaagaagcttttgtgccttatgtggtttgaatatgattatgcatggatggttcattttttcttggcaattgttttccatggatcatgactatggggccacttttgattttgggttgtggtgtagctgttaccagtttgtatttctgagattatctaatattttttaatggtctcttttacgggggagggtaacggtgataacatcgtttgtttggctttgatttgacagcattattattctgactaagcatcgcatgttgttatgtgtttatgatatatattattattaataatgtgaaaatcaatcttataactagtactagttattttttgcatgccaagtccaatacatacatatggattgaaatcatttgttctaattccttgtctctctaattaaaatatgacaggtgattaaacaatttttttctttcttttagaaagtagtactctctgtctctcctgcttttttttttttgttgagatgttatattattaatcgaagggagagaaaacaggacatggaatatgaatggatgatttgagtc

SEQ ID NO: 33139 - DNA, 363 bp, Glycine max
  unsure (1)..(363): unsure at all n locations
  Clone ID: PAT_MRT3847_12992C.1
cgggcaagaagaagccacacaaaacgaaagaacggncgggggcaggagccgaagcagcagcaacaacacaagaaaaggggggggggaagnncaagnncaaccncaaccccaagcnccncaaaagagaggaagaccncgcaagaaggcgncagagcgggacgaaagcgaagaggaacaggcacaagggagggagcaaggaggagcacacggcacagagaaggcaagggcnaaagggacaacccacgaggaagaaggaacagcgccggcaggcaagaggggcacagcgaaccaagaagagagacaaccggcagaagnggggccagggagaaacagagcgaggaggaaaagccgacccagagagag

SEQ ID NO: 33140 - DNA, 154 bp, Glycine max
  Clone ID: PAT_MRT3847_129930C.1
ctcaggctccggctcgagctggtgttccgttcatggcactttcgtacggcattgtgggtggccggatggacaaggtgcaggctatctttgacaacttgcgcggtacagtagctagcgatgtcatggacctggtgctggtggctcaacacttaga

SEQ ID NO: 33141 - DNA, 427 bp, Glycine max
  Clone ID: PAT_MRT3847_129931C.1
tcagtatcccaatgaaaatgaagcaccattaattcttctgtattccatagacccagctcatgcattcacccccattacttataagcttagacaaaaaaatagctcctctgactaacattagcttcattaacttcctttacttcagagaatacctagaggaatatcttgcccaaggtataggggcccgaagcactagaaataacatcggctcctttatggaagagactctatataacaaaaatgtgaactaagcaaaatactaagaaacacctcctccgcgtttggagaaccttatggggccaccccttggaaaagtcccacaagcgttgggggtgtattaggggaggggtgtgtcgcgcccacaggctaccacgcatctaacgaaactttgctggagagaacctgacgactctgagctcctttttgc

SEQ ID NO: 33142 - DNA, 497 bp, Glycine max
  Clone ID: PAT_MRT3847_129932C.1
ggctcgagaacttgggactttaaggtagaccttgtttttccgttttcgatgccagctttactttagacggccaggcggcgaatccataggagaagctcaagaatataatcttctactttatctttatcggcatggcgaagcgagaaaatccgcaacacataagccttcatggtcttcttattcaggtcaaagccagtgcttgcccactcccctacccaaccaaaaccaagatgtgctttggccgtgtttgtagcaatcggaaccagccaatgcaatgttttctccatctcttgtttaatatctgatatggtgagctcttttacaacatgaaagcttggtaatttggaacgcaaggctaattttatattaggaggcaagctctgatacagtgcatcccttgtatttgcaggcatagaactggatctggcaacaagagtatcaatttggagcactatattagcataatgtaaagcaaggcctgcaggacccaatttttg

SEQ ID NO: 33143 - DNA, 242 bp, Glycine max
  Clone ID: PAT_MRT3847_129933C.1
attttattaaaacggatggctttttgtatctacttattccgtggcactattgctctgttgtttgcgattatgaaccgcagaaaatgtcttgcctttttttgtttgctcacttaagatattattggattttattagataaacatgtttgtttttatctgttattttaagattgtacgaggctgcttgatttaattaatgtatcccatgatttccatctcataaaccctactcaaattgattgc

SEQ ID NO: 33144 - DNA, 418 bp, Glycine max
  unsure (1)..(418): unsure at all n locations
  Clone ID: PAT_MRT3847_129934C.1
atatatggtagcgttcgagtcgtgattggggatcagcttcatgccaccaacggtgattttcaagacagaacacctttgggaacagtccaagttttgacacctagcaatcaagctaacactccccagttctttgagccattgaaatctgataccatgaacaatgatgctgtgatcagatcagaggatgcagaacttggagaagctgatcaagaagagcaaaaatatgtagatccattggataaatttctccctcccccaccaaaagctaaatgctcagaggagctacaagcttttaaaaaaaggaaactatcttgtttgaaataaaatgggtttcctctctacactaatatgggtgcctcttatagtgtgtgaggatgtggataattggtgcggcttactccgggttganaaaaaanan

SEQ ID NO: 33145 - DNA, 113 bp, Glycine max
  Clone ID: PAT_MRT3847_129935C.1
gcattattcgatgtcgtattgcactctctcatctcatctcccattcgcattctagctaacatccgcttatcatgtgcgcactactcaccgagtgtgttctacacatttctctg

SEQ ID NO: 33146 - DNA, 600 bp, Glycine max
  unsure (1)..(600): unsure at all n locations
  Clone ID: PAT_MRT3847_129936C.1
gggggaggcaactccaataatttatgacatgaatatattcactgaaattcatcagttcctaaaaaccatactcctaaaaacacaaggaaatctccgagagactgcaaataatacaaccaagcatgaaactatgcttctaaccttccgttaaaaagctacatctttgtgttttccacttatcttaagacatgtctgtgttaagcaaaagagtaaacaaatgttgggaaaatctgcatggtgcaaaatagtctaaggactataactgtgctaagaggcaaaggtgacgactgattaaataatctgaaaatcttccataggcactgaaagtcaaaagggccttaattaattaatccgagacatggccacaggttgtcctcacataaggactcaaagggctcaatgcgaatggtgaaagacttcctcttttcttcacaaaactgctctcggagtcagagacatggccgcttgatttctttcttctcatataggggcttaatgccaacgatgacaacctaccttttgtcatctttaaaccgttatccaaatctgagacatgataactacgacttctgtntgtgcatattctctgagagcataacg

SEQ ID NO: 33147 - DNA, 116 bp, Glycine max
  Clone ID: PAT_MRT3847_129937C.1
ttcagatatttgttgtttctttctctgaaggcaatagaatgtgtttcatgtttttttaaggtgtatcatttggatagacaacttttatcagaaaactagaggtatattttttattc

SEQ ID NO: 33148 - DNA, 849 bp, Glycine max
  Clone ID: PAT_MRT3847_129938C.1
ttcatgcgtccgcggacgcgtgggctttgggaagctgaagaagacacatgaagctacaagggtgtttgagcatctagtgagtttgggtctcaagcctaatgcaaaatcatattctcttcttgttgatgcccacctcattaaccgggatgtcaaatctgctctggcagtgattgatgatatgagagctgctggatatgaaccatcaaaagaggtgctaaaaaaggtcagaaggcgatgcatgcgagaaatggacaacgaaagcgatgccagagtgcaatcactggttaattccttgaattaccgattgggttcagaaaaccgacgggatattctgtttaatcttaattacagtagtatgggttatgcttgaatgggtgcattgtctttgatgttcaaatgaattatttgaactatttggcatatctttttattgcatccgtttccaagggaatctatgtatattagtggatgctgctcaggttgccggggccggatgatgcaaagaacagctttgtgcaatcttatatttgttgtatttatgtgtttatgaagcggggaggatgttgatgatggaattagctttcttagtgaaagcccaaaccagtgaattttccagcaaagttcgaaataattgtaggactgatccaattttggaagaggttagaatcaagatcgacacttctctcatggttcttaattttttgttgtgtttttttggcactgcctgcttattcttaacaatctagtgtggcaacgactacaagctccaaggatttggaaactgctttttgtggtgctgtggttgtattaaattaaattctactgcaaataatggtaaaacttccaatc

SEQ ID NO: 33149 - DNA, 785 bp, Glycine max
  Clone ID: PAT_MRT3847_129939C.1
cttgtttgtaggcacgagtgacgagagagggtgtctccggaaaaaacaagtgaggttctatggctgctgtgaaagcagagaacgtgtgtgcctcgccatcgctgaaaatctccaaggaagtggaccccagacatgcttctgagaccttgcacttcgttgacgttatgggagctgccacgccccttcccggtaactgcaacgcgcgtggcttctacgacgccttctaccggagcttcatcaaagtcgataacatccaacgtggacggatttcatgcaccgttgtggccaaaccacccatctgtaatggctatggaactctgcatggaggttctgttggatccttggttgagattctatctaatgcttgtgctagaactgtagttgctgaggacaaggaactttttctaggggaaatcagcatttcttacctctctgccactccagcaaatgaagaattgctagctaatgcctctgtggtgaagactggaagaaatttgactgtggttgcagttgagtttaaactgaagaaaactgggaatttgctctatattactcatgctaccttctataacatgccagtttccagtttatgaatatttagctttctggtggacattgttcagcagtttatgaatatttttaaaaaataaataaagatagaggcacaaattgtccctttttcaactagtatcaataatagatttatagtttgtagtaatcatgtatttattggaaaacagcaggaatgtaatgttattttttttcttttcggccaatatagagga

SEQ ID NO: 33150 - DNA, 2483 bp, Glycine max
  Clone ID: PAT_MRT3847_12993C.1
ttccaccaacaaggcatcaataatcctttcctttcccttccaaaccttcgagaatgagcattatcatgtccaccaagtcatcgctgaagtctctcctccaaaagggtgagaatgagcataatccattaaccatgtctgatgaacagattttggaacaaatttactcaacccacgtccacagtgacaccaagtttgatgtggattctcttttcacccttgttgagaacactcttagacgttcaacccacattgttgacaatcttgtgcagggatcccatgcaagcttggagcacattgacgacaagatcccccaattcaattcaccactttgtaccttgaagcaaatttcttttgagatgtcatgcaagcctccaagtgaggaaattggtcaccgaactacactggccatacttaacaagctctcaaactatgagtgggatgctaaggctgtgctgacactagcagcttttgcactcgaatatagcgagttctggctgctagcacagtaccatccggcggctccgcctgcgagtgctgccgccagttcgcggcgcgtgccactgcccgcgccgcccgcgccgctccgaaggcatcgacaagccatccttgaggttaacaatttggtgaaagcaacgttgcaagttattgaggttatctttgagctggagaagcttaccacttatgacaccaaagatgtacctgctttggggcttgcaattgaacaaatccctgttgatgtttactgggccatcatcactatcgtcgctgtggttactcagattgattgtctcaccactgattcagagcacaagcaagaactgtctcactatggtcaaaagatcaacatcatactcagcaaactcaggaagcagataactctctgcagacaacagatagatgaggcacaatattatcgcaagctgaggaaatttttccaaacccccactgaaataatggaggtgtttaaggttctgattttcaataaggatgctcctcagccgcggttcgatggtgctactaagactaaggtcgatatcacggtgctaaaaaagaagaacgtgtacttgtttatttcttccctggacatcacggaggaagagatttcagtactccgaccagtttatgattctattaaaactaacgatcagtataagattgtgtggattcccattgtagaagaatggaccgagcaattgcacaagaaatttgaggttttgaaaagcaagatgccttggtatgtggtgcagcattctggaaccatagcagggtacaagtacattaaggaggaatggcacttcaaaaagaagcctatggttgtggtgttgagccctcaagggaaggtgcaacactcaaacgcattccatttgatccaggctcatggaaccagggcttttccctttacaactttgaatgaagaaaaaataaacagtgagaacgattgggttggctccgtattaggcagcattcaccccagcataagcacctcgatcaaagagcaaaagtacattttcttttatgggggcaacgacaaagactggatccaacagttcaccaagtacgttactgcccttgcaaatgatgctgctataaaggaggcaaagatttccatagagttgttttgtgtggataaggaagacaaaagccttgtgaggcgcttttggagtggcattgagagtttatttgtgactaaggttcacaaacaagctgatgcagtgactcaagaagtgcaaaagatgctttcttacaagaatgaaactggatggtctctcctcagtaaagggccatcagtggtggtgagtggtcatggaacaacaatcttgaagacagtggcagagtttgagaaatggaaagaggttgtgatcaaaaagggctttgcggtaaccttcaaagaataccatcagaagattgtggggaccactcaccgttgctcacaccttgagattcctaacgttgcagggaagttacctgagaccatcaaatgctcagattgtcctagggtaatggagattttcatcagctataaatgctgccacaatgagaatactgccaatgccattcactagaatggaatgtgggttctggtttgttatatatgttatcgtgaacgacagagagagtgtgagaataagaggcttacctcagttacctgctatgcgtgtctttcaggactacgtactagcttctatagtaaaataaagatcactctctgtatcaatgaaaaaaaaaaagttacttaattaaggtctatatatgttctctatgtaatatggagctgtattgaatcttagcattcaattaattaagcttctttatatatagattgtgttgcaatacttgagtagtacaacacaactttaatatgaaaattaaaagttgcgctgcactggtccaaaaaaagttctgatttccttaaccatttttgcccaacaaagctgtcttgttatttctgttcattataaagtaaattacgcaaaaaaaaaaaa

SEQ ID NO: 33151 - DNA, 593 bp, Glycine max
  Clone ID: PAT_MRT3847_129940C.1
gtacgacctcgcaggtatctcggtccggaaattcccgggtcgacccacgcgtccggttgcgctgttcgcacgctaagtgcatgaagctagtgtgagtagctgaatcgaatcgaatcgattctacctaacaaggtggctgagcgatcacacagtgttgcaattctcttcatcattttcatcttcttcggagatcttgcccgcgaaggtacaccctttggacatgttgaacatctgcgagtgctatgttcgacaccctaaccaaactgaccgcgttatcggaaccatactaggatccgaccttcccgacggaaccagaaatatacgaaattactatgctgaccttcacaaccagtgtatctaacagtgtccattggatctagagtaccaccacaatatgttaatatcccaccaaaaattgaagccaaaggaaatcatactcatatggtattcaacacgaacatggagtaacagatgataacgcattaatacactagtactattctggacaagtgcccaattccatacacttgactgatgagactggctgtacaataggagcgggtaccagtaaagcatacgggtgtaacaagtta

SEQ ID NO: 33152 - DNA, 228 bp, Glycine max
  Clone ID: PAT_MRT3847_129941C.1
tacacttttctccaaaactatccaacaagggaaacagaatattattccattcgtttcacttccacacaacataaaaaccaaaaaaacacctacgccaacggcaacatcagcagtcagcgtcactatttccaacatctgtactatttcctcctctcacacgctcctgatggaaagccgaaaccttccggcgccgctgacggagttctggtcgccgatggggtttgattt

SEQ ID NO: 33153 - DNA, 381 bp, Glycine max
  Clone ID: PAT_MRT3847_129942C.1
ctcacgcgttcggcaaaaactggcatggcagtggatgaacccgtggtacccacaatatgcgtaaacaggataaactcaattataacactacttgctgtatcttcaggttcaacccaactaagtgtggtgtgaggaatatgtgaaaagtaacatatatgtgaaagagagaggaagagatgtctacgacgctagatcatcctatacgacagaaaaggctaacatatgtcgcagtggtgcatcttaagaaacatggcatgcgctttgaaattgcttgatacgctaacaccgtcctctcttggcattctggcgtggaaaaagatcggcatgaagcgctgcatgtccacactgcttataccaatgtttgcaaaggggatcttggca

SEQ ID NO: 33154 - DNA, 373 bp, Glycine max
  Clone ID: PAT_MRT3847_129943C.1
gcttattaatttatttgtgggagggggggggcaacaacccccctttaacttccattttttggaacaatttacatattccatccttaaaaagaaggggtcagttaaaaattttttttttaatttttaattagagaattttaaaaaaaaaaccttttttggccctttataaaggggttttttcttataacccctttttttaaaaaaccccctttcaaaaatcttaaaaacggtcacttagggccccaattttaaaggaaatggaaaaggaaggaaaaaaattaaaacgggggttgggaacctccaatggagggggggcccttaccatttcaaacgtcggttgggatccctttttgggggtttccgaaaacccggg

SEQ ID NO: 33155 - DNA, 257 bp, Glycine max
  Clone ID: PAT_MRT3847_129944C.1
gagtactgcaatgacagcatggcagagcttgacttaagtttgtgacgaaaatcaggcagatcgtgctcatatctaaacgcataggtgatccagtggtggcgttgacattgatggtccacactcacttcaatgatttccacatctctgacatgctgacgcgctatggtttgatagttccagcatcacacgatgcccgcaaatctcgagcatgtgactatgctcgtgttgtgattctgtgggattgatctcgcgctctc

SEQ ID NO: 33156 - DNA, 524 bp, Glycine max
  Clone ID: PAT_MRT3847_129945C.1
ttttttgtgtttttttttttttttttttttttttttttttttttttttttttttttttttgaaaaaaaaccccccctttcccccttttttccaaaattaaaaaagggggggaaatttttaaaaaggcgaagcctcccccacaaaaggggccgccccaatttcctttttggggttaaaccacccccccagcaaaaaaaaacccaaattccaaatcctgccgagggttcccctttttaaaaaaatctggcagtaccctggggaaaaaaaaaagccggcttaaaaattttcccccccatctcaaaattttgaaaaattcccaaaaaaatattaaaaactttaaactttttgggattttcaataaagaaactcaaatcccctgaagtttgttttgccccctcaaaactcccctttttaaaacccttttttggaccccctcccttttttgggaaaaacaattcccaaaaatgggggtcccattttgccccctttcacccctcaaaaagctcttccctggggctggttgt

SEQ ID NO: 33157 - DNA, 439 bp, Glycine max
  unsure (1)..(439): unsure at all n locations
  Clone ID: PAT_MRT3847_129946C.1
acaggnngagaagcnagccgaagagataaaaaagggagcgggnnccgangaaggaggggaagcaaaggnacggcaggcacgggaaagattttttttttttgnccnagggaagaagggagaaaccccaaatattgatgtaccgattattacagagaacgagttacctgaggctgatgggttattggttgggttccccacaagatttggaatgatgggtgggtaattaaaagatttaatggatgcaaatggaggtcagtggggcaaacaggaactagctggaaagaatgcaggaatattttacagaaatggatatcaaggagggggaaaagagaataatcggttggaatctattactaaggttgttcaccatgggaagatttttggggacattggttaaacatttggtgctgggaaggttgagagggagaatgggatgggg

SEQ ID NO: 33158 - DNA, 778 bp, Glycine max
  Clone ID: PAT_MRT3847_129947C.1
ctaatttttgagtttgaattgcctgctccaagtcaatttgttctgaaccaatgatgttacaatccaacatgcgtccgctgtagtttagccaagaccctcttttgagggagatcctacttagtgtggctacattttctattacaacaaaggttgttctcaggttccttacaattagctttgcagtgaggaatgtatgttttaacatttgcttttatcgagtttatatgtgttcctgacacaattggattgggtacgtgttcttctgccgatggatccgaaggggggctattgggcctgatggtcttcttgtttggcattccttgccgacgtcttggatgtatgagtcctcggcagagtgaaatcagtgatattttatctttttttatactaaccttgttggacttgggatctgtgggtctgtcacatcatgattatgggtagagttatattcctcctaatcatgttttacttcttttaattgatgatttttctgaagcagctttagtggtaataatcatggtcgaagggtggtcattacttgtccatgttgaattgctgagatgtattcttcgacacatatggatatgtgattgaagggtgtgtttggattcttgttatgtatcttacatatggtctctttgattttaggcataagacatttagcataaggaattgatttttaacaatttttgaaccattgcttttgcttcatattgtaaaatatttttctgtgttgatgcttctgctgtcgataaataatgtgaatattaatttgttg

SEQ ID NO: 33159 - DNA, 522 bp, Glycine max
  Clone ID: PAT_MRT3847_129948C.1
ggacacaaaaacgggagttataatgtataaaaattattttacatattactcatttggaataatacaaaaaaaaaaaaaatcaggcttcggattcagttgaaactacatggattctcctttatataaaaaccaccaaaattaaatctgcaaatatggattacctaatctaaaaggcatgataaagtatccagcgtgctcttgaaccaatcagtacatccaactaagagtttgacatatctaaataattggttcctttataattcaaagccgggggggggaaatgtcaaaattgtctggagttgggacttgatcagtgagattgggggcattctccaatcttcatggtactacgtttttgtgtaagttaacatcatgcatgcatgcatgcattaaattaaaaaagggaactcctttagtttgtgtcaaccaaaagacagctatttctcgcaagttgccactatccagttgcactctgccctggaactttcttgacaccgcctcccctcatcaaaaccctaactt

SEQ ID NO: 33160 - DNA, 317 bp, Glycine max
  Clone ID: PAT_MRT3847_129949C.1
cgcgcgcgtaccagaatgcgactactagtcattgtatgaacctatttctctatctacatcagcttgcctagtatcgcaggagtatgctacaacagcgaatcattcactctctcttgttactagtcattttcaatggaaaactggcaaggaagcttaaacactgtcactgacacggtgaaccgccaacgatagaccttgcagactcgctccagcagctcacaatcgtagcgtaggcccaatgacgtggcaatctccgctgcaggaggcgcagcgccagtccaaacgatagcctatgaagactcgctatcatgccgcac

SEQ ID NO: 33161 - DNA, 339 bp, Glycine max
  Clone ID: PAT_MRT3847_12994C.1
ggaataatatttaaatttatttttggttggggtatgtttattgtatttgttttttttatatttttttttgaaactggggggttagcaacgccaagagttccccgtgttttaagagtggggcgctcctgtagtttggtaattattgtttcttggggggggggggagccagggtaaagaaaataaaaaaacaaaagccgggcgggggggggaagaatgacaaaaaagcagacaaattggctcggtggggggggggcaccaaggggtgatacatacacaccaagcgggtgagaagcgagctggggacacccgaaaaaaagaaggagtgggcaaggggaaaaa

SEQ ID NO: 33162 - DNA, 536 bp, Glycine max
  Clone ID: PAT_MRT3847_129950C.1
ccacgcgtccgccaagattgctccagacccttaaggtagtatgcgtcaagctagtgacgttaaagaaacgcttactgggaggcaaccctactcttttttttttttatttattttcttaatcatttcatatagttaggtttcaacttgtttgtgattgctagactaagtcattagcatgttttgtatgataaaaggttgctaaagcttatttgaagctgtggatgagaaataacttagaaaaaattttcattcattcactcgctcagcataccctgtgcgctaagcgaatcatccttcatgcgctgagcgagtcatcacttgcgctaagcatgtcaacttctacccattggctgaaggggtctcgctaagcgagacagttgtgctaagcccaaaaacctctctggaattgcatttattggaattagggtgagcgagtcatcacgctaagcgcaacatatagtctcgctaagctcatctatgcgcttagcgagatggtctcgctcagtgcaatgccagccgcgtcatgaggcatttat

SEQ ID NO: 33163 - DNA, 394 bp, Glycine max
  Clone ID: PAT_MRT3847_129951C.1
agcccctggccgtgccggtaccgaaccgcagttcccggccacgcccacgcgttcgtctgctgccagaaggcgacacaagggggggcagggataaatctaacttagggtggcagaaacaatcacttgcactgcgagtggctccaaaagcaagtagtacattagtgacgaggctaaagcatccaatagcaatatcaagatgagaacacgggttagggcggggagtgcggcaattaggggggatgtgccagatgcctgctaggaccaggggctatccacgtggaaaaatgctttaagatcactgcagcaccatgtgagaacccatgtggctacattctatgaggccaacatgctttctattcctgctcagatcaccaccacgctaattcatgtgatg

SEQ ID NO: 33164 - DNA, 439 bp, Glycine max
  Clone ID: PAT_MRT3847_129952C.1
ggcagccattgataccaacggcgtatatgtgaatggaaaattgtgcacacatgccaacctcacgattcctgaagataacttcagacatgtggaacccgggagcactgccaaccaattgagcttaggactgagtcctgcgaatgttgcgcactaacctggactaaacacgcttggcgtgtctatgtctcgcatagattatgcacaaaaggatctaaaccctccacacactcaccctcgaggcactgagatgcttatggtcatggaaggcactctttgtgttggattagtctgctgcaaccaagacaatgatcgactcttttccatagagctcaacaaaggtgatgtgtctgaggtgccaattgggctcggtgatgacgcaaacaatgtgcggcaaggcaatgctgggcgcatcactgatttgagcagtcagaatgctgga

SEQ ID NO: 33165 - DNA, 500 bp, Glycine max
  Clone ID: PAT_MRT3847_129953C.1
gttagcagtgccaccttcttggggggggggggggggaatcaaagaggggcagagcgacaggaaagaaatatatcaacgataaagaaataggccgtgtgtgaagtataaaccacaggaacgttaggcgccgcgcttggtagcatgcaaggagattaaacgatgatttggaatagatgtacgaaaacttacactaagtaaatttaatagactaaagtgtttaggttatacggtgctagtgcaccatagcaatttgggccatggacatgttatctgcatattggccaacacgccaagtaaccaactaacccgaaccattatatggcgttttaacaattagcccagcttattaggccagagggcggtgaatatattggctttgggcctgatggttatgcttaggctacttataaatttaagtagccttaattggttaggcagttgtgtaacgctgcctttatgcaagcttaatatagtacaaaatggacgctgtattgggccgc

SEQ ID NO: 33166 - DNA, 1117 bp, Glycine max
  Clone ID: PAT_MRT3847_129954C.1
attcttgactagtattaagaatatgttgtcaaacattgcaacaatgataggtgccttacatcaaacattattgagtagtattaagagcattgcaatgatgatagctatctctgcaacttttatgattttcttcttgtgttcgccatcagtggctatactaatcaccaggttgccgctaccctcaccagtgacaggccctgagtccgtagcattcgaccggaacggtggagggccatatgtcggtgtttctgatggaagaattctcaaatatgctggtccaaccgagggcttcaaggaatatgctttcacttcaccaaacagaaacaagacaatctgtgatgggcttgctgatttctcagaactccaagcaacatgtgggaggccattaggattgcgtttcaaccatcaaacaaacgaactatacgtagctgatgctatatacaagcacaacaagagaatgtgaacactactcttcagtttctcgatggcttggatgtagacgtcaacactggaatcgtttatttcacccaagctagtgctaactacggtttcaaggatgctcaggcactacaaagcagtagagaccaatctgggagcctattctcactggatcccaaaacgaaccaaacaagagtgttgatgaggggtcttgcattggcatctggggtggcagtaagcagagacgggtcatttgtgcttgttagtgaatacttggcaaacagaattcagagattttggctaagagggccaagagcaaattcttctgaactattcttgcaactcactggtagaccagacaacattaggagcaaccagagaggtcaattttgggtggcagtgaatggtgctttaggaccaaatccacctcctaggcccactattttacctggtggactcagaattagtgagaatggtgtcattttacagattttgtctcttgtcaaggaatttggtagtgaggcagcgagtgaggttcatgagcataacgggacactctactctggctccttgcgtgcttcctatgttcccatttcttctatgatctagtttttctacatgctccatttgtatgtgaggggaacttcaaaattattaatgaataaagaatattgatccc

SEQ ID NO: 33167 - DNA, 480 bp, Glycine max
  Clone ID: PAT_MRT3847_129955C.1
ctccattagtgggctatactaatcaccaggctgccgttacccttaccagtgactggccctgagtccgtagcgttctacctgaacggaggaagggcatatgtcggggtttctgatggaagaattctcaaatatgctggtccaaccgagggcttcaaggaatatgctttcacttcaccaaacagaaacaagacaatctgtgatgggcttgctgatttctcagaactccaagcaacatgtgggaggccattaggattgcgtttcaaccatcaaacaaacgaactatacgtagctgatgcttattccgggcttatcaagattggacccaatggaggggctccaacccaatgctttaaagatatacaaccacaacaagagaatgttaacactactctaggctttctcgatgggttggatgtagacgtcaacagtggagtcgtttatttcacccaagctagtgctaactaccgtttcaaggatgct

SEQ ID NO: 33168 - DNA, 213 bp, Glycine max
  Clone ID: PAT_MRT3847_129956C.1
ggggtttaaattaaaatatttctagtacacactccttttttttacaaataaccgcaaaggggttccagcacgactcgaggacacaagttaacgattatttaggttaagggactacatgctttaaagggaattatgaagcagttatttctccctccccaccggcagactttttataccggcccttggcgccatgaaaccttttaaaaaacttaa

SEQ ID NO: 33169 - DNA, 471 bp, Glycine max
  Clone ID: PAT_MRT3847_129957C.1
cggctcgagtacggctgcgagaagacgacagaagggggacgatgccttgagttcattcttgctgttgtcttagccttaggcttctgaaaatctgtagaaaagaaacacaagaaaaagataagaaaaatagtattaattatgcgttgacttcaaagtttaaatttcattattaatcatcgaaatttaattgtgtctgaaagtgagatcataaattggctattcatttccttcagatggttacgtgtgtaatgtgttattgctattatgcagagactaccagattattgctacatgatatattggagctattcatatgaagaccataatgattaaaattgttcctgtacaccatatgtattaattattgccacaatattgcagactaatatgtatatttttttctttccaatttgttgagcagactccaaatacagcttggtgtgaacatgccatcaagggcagaacagattt

SEQ ID NO: 33170 - DNA, 214 bp, Glycine max
  unsure (1)..(214): unsure at all n locations
  Clone ID: PAT_MRT3847_129958C.1
acagnnatngcaacggcganaagcnnaaacnacggnaatncagctcgagcancgacnnaancannananacacacaanagncaagagacnnanagcaccaaaancaagaaggaancngaganagcccaagcgcnnngannaaancaagttngaaagnaaaccacnaagacacagagnagcacgagaggccgnccanacngacgggaacnaanca

SEQ ID NO: 33171 - DNA, 353 bp, Glycine max
  Clone ID: PAT_MRT3847_129959C.1
gacacatgtctggcattttaataagaaagattgatactgacgaagaatggtgcctttgagcaaaagggctggtctatggcatacgccattcaccatatactgaactgttgaaaggacaattccaattacaccactctggctatgcacaagttcaagagggtactgcaaaaacttcagtagaaagtctatttgctgttggagatgtgcacgaccatgaatggaggcacgctataactgctgctggatctggatgccattcaagtcaatcaattgagagatatcttgtgagcaatgatctttctatagagcaccatcagccccaaactggatatggtagcaaggaacaaacagac

SEQ ID NO: 33172 - DNA, 384 bp, Glycine max
  unsure (1)..(384): unsure at all n locations
  Clone ID: PAT_MRT3847_12995C.1
ttacttcaaaatttgntttttttacccgaggcaacaagcacgggggcgggattaattaaaggcacgagagaacaaccaacagaaggcagtcacatgcctggctggctcacacacggcagaaccaacagtgagggtagtgcgcgcccctgaacgcacgcaattacatacagatagataggtacgagcaagcttgattggaggggggggaacgacctaatgaatgacaggcaggggggaaggaaaatggaacggcctgcttctctctgggcggcctggggagagatccattgaatggcaatgaatcaaacaaacaaggatgcctgcctgaccaaatagtctctcgctgctggctgggatgaaagcacatgcattgggagaggaacg

SEQ ID NO: 33173 - DNA, 251 bp, Glycine max
  Clone ID: PAT_MRT3847_129960C.1
agaaagaattcatatgtattttaactgggacttgaaagtgtactggaccttaacaccctattaaatttcggatcaagtcaaggaaacaaaatggatcttaaagatgaactagaaaaatagactgaaccggaagccccttttgataaaagaggaaattgaaactaacccaacgtctatccctggtttattattgaagggaccatattcttaaaaatagggattttttaaaacctctaatcattgtttaaaaa

SEQ ID NO: 33174 - DNA, 505 bp, Glycine max
  Clone ID: PAT_MRT3847_129961C.1
tacggctgcgagaagacgacagaagggacggtccttcgacctcgacacaactctcaccaccaccatgcctaaactccttgcaccgccattgatttttgatctccagtaaatggaaaatggaacatgttcatcaaactgaatctcagtattggaagcaacaccaccacttgtgacactaactttttttttgttacatgtatgtgattgatctatctctgaatttgattatattaagatttaattaagtttttcatacttgaaatatgggtcgtttcagatgactacataacattgtatttcaactaaatgctcaaataaaatccatacctatcctactatttgttgtatattccatttctatttaaagtgatatgacatcaaactatccgttacttgattcatctaccatttcatacgataggaaataatgatgatatgcattgaatttcttagctatcattacagcttaaatgattaatgcctgctgcttgtagttttacactat

SEQ ID NO: 33175 - DNA, 183 bp, Glycine max
  Clone ID: PAT_MRT3847_129962C.1
gcgcccttttcgtcccgttttttcccaatcgcaacactgaaggaaatttttttccatcgataaatgggaggacagacggtcattccagctcgattcacaataaaacgaaaattaaggggtgacggcaagggagggaaggacacacaaaactgtggaatccgtgtagatggaagaaaaagcaaa

SEQ ID NO: 33176 - DNA, 479 bp, Glycine max
  Clone ID: PAT_MRT3847_129963C.1
catggcgaaaattctgaacaaaattttttatctaacattttacattaattaactataaaatatttgattcgaaacacgctgcagggtatatcgagcaggaatttcaacctctgcaatctgttgttaacaatcaccccattacaaaaaatcactgtagaacgtaattatcaaaatgtcttggttgaattgcaagtaggccgtgaaacaaacctgacagatgccacaccttccagaaaattgaaacttcattcaaggataaattcctttggaaatggaaagaggaaaatgtgctatgcaactagatacgtcaaaattttgcttgattctttataggttgcaagttgtacatgcgaccgatgctcagcagtaccgcattaaaataatacttgggtcggacaaggattcttgagcaaagctggaaaaaatccaacttgggaattcttaacgggcatttttttggccccagaagaacataaata

SEQ ID NO: 33177 - DNA, 1090 bp, Glycine max
  Clone ID: PAT_MRT3847_129964C.1
gcttgatcctctgagcggccgccctttttttttttttttttattgaaatagatgtcaataacaattcgtgcgcattacatcgtacgcaacattgagcatggtgatcttgaaacctttgctgatatttatgattataatgaaactcaacatataagaggaccaacaaaaaagcttggaaaatgaaagagcaaatatgcaatgatgtgaatagcggttagggtgtttgtttcccttcacaagctttttctaaacgaaggtacaaactaaagcatgattttttttctttttttcctttttcaaatactattgtggtgacattcttgctgtcacagtttccttgctaagaaggaaagaattttaccttcactagtgtagactaatttgtgccaacactattatcactaaggttgccaaaaggataaaaaaaaagatgctccaaccaaaatgcatagggttggttaactaactaggtgactgatgaaacagaatgcttatccaatgctgagtctcctttttttgttttccctaagtatctctttgatatctgcttctcttctatctacaaataccatcaacttcttgatgctacgagttcgacttggacgtctaggccggccgggttgcatttccttgtcgtcgatcttatcaggctctgggctgaatttgttgtattgacagaagattctagcaaagaagatggtccccactctcagagagttgaaggatggcagtagacaagtcaatggcaaggggagagtccctttggaatgcctgttgtcaggtaaacaaacatgagaagttgagaacaatatccaaccatgtttagaaaattctcacaagatatagacacaacaagcacactcatagtaaaagaatattcaccaacaagcacactctcatgtttgagtcttatggactgaagaaacatgattaagagggtagccctcattaaaagtgaccagttaagttcctaaatgaaaattaatcatcgacaaattcaatgaatacttggaaccaataatatgggtaaaaaaaatagtgaaaattcatgtataaacttagatctacctttattttcttatttttcacc

SEQ ID NO: 33178 - DNA, 279 bp, Glycine max
  Clone ID: PAT_MRT3847_129965C.1
gcctgcgagtaccggtcccggataattcccgggtgcgacccacgcgtccggagacatccaagcccttcgatcgaagcggttcgctcttattcgctcgatgtggttatgatttgatcgatctgcgcctgattcaccggataagtctctctggtatcgcaaatcctatctgctatatcaaaaagcgacgatggatcgatacattttggactagggcatgcgtacaccttcctggaaatccacttactagagacgagattgaactaatcaaagacaggctga

SEQ ID NO: 33179 - DNA, 244 bp, Glycine max
  Clone ID: PAT_MRT3847_129966C.1
atcgagccgcgcgacgcgcccttttttttttttttccaaaatgggttagctaccactacactattttaagtagagattacaagctcacaaaatctaagaccaaaccggcaaccccatttggtttgtttgaacttaaactacattcccattggttttggctttttgagatttcatcacccggaattttgggttccggttttcggacttcaagggaaattaatggatgagaactaatgaataagct

SEQ ID NO: 33180 - DNA, 699 bp, Glycine max
  unsure (1)..(699): unsure at all n locations
  Clone ID: PAT_MRT3847_129967C.1
cacttttacgaaaattaatatttactcccttaaaaattcatnnnnaaatataatcaagtcaaaatcaagaatatcaaattttactccaatttaataaccatgtgatctctttgttgtggcaaacagaaagaaaaaacacactacattatcttttcgttgtagcatatagaaaaacacactacattgtctcttggttgtaacaaataaaaaaatatgttacattatctctatcttgtagcaaaggtaacaaatcacataacccacgataggaaactaatttcacaattaaactacattatcaaactattaaaatattcatcaaaccattaaggatcacaaggaatcaagttccaaccaagtaaaataaatattatactatattcttaagtgctcacagaaatcataatcaccaaaagaacttattttaaaatttatttgcttctcttaaaaacagttaaaagtgtcactaagtagattagctacaaccaaagtgaacacaatcaatgtcttccaatgtcattgggaggatcaaccaccataattttctacacaatctaggcattaaaataaaaagaacaagagtttagggtaaattccannnntttaaaatgcatannntntcaaggaaatcacaacaactaatctaccacatgaaaatactcatttatctcaatgggttatggaattagctcaaggagc

SEQ ID NO: 33181 - DNA, 241 bp, Glycine max
  Clone ID: PAT_MRT3847_129968C.1
ctctcctcgttcacgctacacctatctactcttcttctagctttacagttttaacagtatatatatggcatagacattcctattgacctcagaatcggtgaatgagggacaatctgacaagctctgcgtacacatctccgatgatgtcctcgacgcttgcctcgagcaggatccagacagaaaagttgcatacgatacatgcaccaaaaccaacttggtcatggtcttcggagaaatcacg

SEQ ID NO: 33182 - DNA, 186 bp, Glycine max
  Clone ID: PAT_MRT3847_129969C.1
aataataatattagaagatcgcaacacaggtaccaataacgccccgactattacttcattataaaccttgcggtgcgaaaatcaaataaaaatagggggtattattattttttacatttcagctttgcggaaaacatcttaacccccatattggggctccagacgtacctcattgaccggaacctg

SEQ ID NO: 33183 - DNA, 680 bp, Glycine max
  Clone ID: PAT_MRT3847_12996C.1
cggttttgtgggtggaaatattgcaaaagagttgtgtgtaagtaaagcagctgcttctcctgtttcccaggaaagctttgcgaacaggcgtgtagttaccagtccgtcaaccactgttgtgaagaagtctgggtctcctttaaatcccgaggaaatggtggaatcttctaatgtaggcatctcagagtgcatcctcaatgcgggtggaataggaccctcgtactatactgcagtttcatattttgcagttgctaaagatggcaggatggtctattgagaagcgtcaacggcctagtaggcgttacccagagtcagtttataggacaccagagggaaagactattcgggagtttacaaaggcttggagattatgtggtgagctattgtctgttgaaaaatgcaattttatgtgcagagattataaggaatggactgatattagtcaattctggtctgatctatccagtacactgataaatgttgaaaaaacaaagatgcagtcagaagaccctgctgctgtattggcttatcgatggtggcttttggatccttttgtagtagttatattttttgatagaaagattggtgtgctgaaaaagggagaggcagtgaaagcaacttggagtttagtttctagcaaatatatgggggcatgtgctcccatttgttcaagctctggg

SEQ ID NO: 33184 - DNA, 480 bp, Glycine max
  Clone ID: PAT_MRT3847_129970C.1
ccgttttgtttttgatttttttgtgtttagcgcatcttattctccaaactttaaggatagaggagcggcttaagccaaatcattatgaaaacacggaagataagccgaccttgcatttttaggcttaatcaatgaccccccttatggatttttatcaaaggttccaaggacttattgtagggattttggcggtgcacgatactaccaagggggccaaaggggcgttgagaaggaacccggaactttagaacctcagggacctttttgttggggaacagagttttgtgacgcctgaccctgtccacagaatgcaaacagcccttcggttgatggcttaacaggaaatgaataatctgctttgagcggcgctgggaagatctggagatcccatcgtcgccttgctagaagaggggggcctgcttatggataaatgcctctaagagccggaggccgactgcaagaccctgatagcgttgcatt

SEQ ID NO: 33185 - DNA, 120 bp, Glycine max
  unsure (1)..(120): unsure at all n locations
  Clone ID: PAT_MRT3847_129971C.1
cgggaagangatgatnanagtntggttggggaatgggcagcagcagtgtcctcacgaaacactgtccttgtcatggaaattgtaanaacctcatccccaatttnaagcncgttgcangct

SEQ ID NO: 33186 - DNA, 400 bp, Glycine max
  Clone ID: PAT_MRT3847_129972C.1
cccacgcgtccggtctaaggtttcatatatgaatatttcatatccttacacacttccacatgatatataacattctttttgttatgtaatgtaatgataaatgttatgacctctcacctcacttcttctagaatcctatacttacattcacaggctgaagtactttcagctgttttgttcattttggtgtaagatttatctactttttggtttatgtgaggtacttgtgtggtgtaagtagaacttctgctgttcaaggtgccggcaaaaggtgatgaagttgattgcaactgttgaaggaatcgcttccattgtcctagacccagacaaaaacacagtgacagtgattggtgaggctgatccattaaggacagtaaagcctgttagaaagttcagaaaa

SEQ ID NO: 33187 - DNA, 747 bp, Glycine max
  Clone ID: PAT_MRT3847_129973C.1
ttcactgttcacaatttttttgggtataatcctcttcttccctctttcaatgttctctttctctatgcacaacccggctaaagacgttgaacatcttctttatcctcagatccctctcttctcccctgattctctcctacatcatcatcttctatctccttgccaaaaacacctcctgtggtgtggacccaaaatttcttgcatgtccacccacaacctgcgccaacaacaatcaaagtataagttatcccttttacatccaaggaaaacaagaacctttttgtgggaatcccggttttggcatctcttgtggcccaaatggttttccaatccttaatctgtctaatacccaatacatcattcaccaaatattctacgaaaatcagacacttcgagtgtccaatgccgcgttttcagtttcacgatcaaacaccaccaattccaaaggttgtcttcctcttcctcttactcagaatctcactcttcctagtacccccgagttcgatattgctccgaatcaatcaaacatgagattgttctacggctgtgagtcattaccttggctggaagagcacaaagttgggtgttttaacgaaacgagttcagttctggcattgtataaagaggataaaaatataagttttgtgtcaaagaattgcaagggcgaggttgtggatacgatagtggaagatggaataattaggagggaatgaagaagcgttgagaaatggggtgtgctgacgtgga

SEQ ID NO: 33188 - DNA, 319 bp, Glycine max
  Clone ID: PAT_MRT3847_129974C.1
ggagtttgttgatcaaccacctgttctatccccgctgtccatcatactacggttgggtcattacgcaccagagggttccaacgctccccacactcacctttcaggcacttacatccatatcatacatgactactcacactatatcaaatactagactatcaatcaagatcaaaaatgactgctaaccacaaaacataacaagggtaatctgaaaaagatcacacttgggctcattcatcaccaacacacactggtatatgtcaatgctcctgtccatgctgctcttaacagctaaataacaatatccatcaccattgca

SEQ ID NO: 33189 - DNA, 566 bp, Glycine max
  Clone ID: PAT_MRT3847_129975C.1
ggttcacctaggagatataaataaactttaggtcatgtacatgtactatataaaacactctatataggttatgattagctagtgttggagattatatttatgtcatcctcttttcttattgataactttggtaagtcgggatcaggcagttagttatttctggtaagagttagtttcagattttattagttagtatttgtcagttggttctgtcttccccctaaagttataaatactggtgtatatgtgaatcttgcttaatattgagattggatagtcttctctgccaaagttctctttctctttactccatggtctctactttctttagttcagattcttgtcgacttggaatccatctaggtttcttggaatgctgccagagttatatgttactgtgactgtcccatgtgacttcatgtcgttatctgtgctgagaaatagcattgaacgcagcatcaagtttcgtgagccgaaatcggttgcctccaagggtaaaagagcatatcttggcttatctgtgcttaagatttatgcggagaacttgaatcagcatcagcttattg

SEQ ID NO: 33190 - DNA, 277 bp, Glycine max
  Clone ID: PAT_MRT3847_129976C.1
aaaagggattggaaaataattactaaggcaacaccaactaaaaacacggaacattgtttgaaacagggaactgcataaaggcaaaaaggactgtccctttgtgtaaaaaaagattgagagcgaatactgtaaatgatccaacggcagacaaaccaggcatggtaagaggatctgaaacttttctcctaacccgccacctttttaacaaaaagaacttgaaaagaaaactctggctaacaaagttaaacagattgtgacatagaatgagagagaacgc

SEQ ID NO: 33191 - DNA, 885 bp, Glycine max
  Clone ID: PAT_MRT3847_129977C.1
ttttcttttctggtaatgagaccaaattgactagtgatgtcaatttgatcaaattgattttttactcaagtataaatagacatccaagcccattgcataaatatgtacagatgtacatccttcctgcagactccaaaacataccaacagtataagatcagttagtaacttttatctatctttctatcagtcaatcaagagagagagagagcaacagtatattacaacaaaaaatctaatgaagtctcaagaaagaatgatgaaaaactccatgttacaacgtggtgctatgataaagatgttactcggacagagttatcagctgatccagtcaaaaaaatgggcagggttggatgccaatccacagcagtaataggagcaccatgcggaagtgttctccatccactcaaatgaccatgaacctggtatatgggtgctctaaatgaactggatgttaccaagagtctcctcccatttgcatctaatgccatctcatgtctgcaatattttgaatcattgagggggtaacagaacctactacagtctcttgaccacaggatttgaccttgattttgcaaactccactcaaaaatcttcccatcacagcccaggctaaaaatgctagtctcatctggtccaaacagaatagaactgatggaagaatcatgtgctggccagccagtgatttgtagaccagcagacatgtcaaacatgtgaatcattccatcaacagcagaagctgccaaaatctttccattgtgattaaagcatagagaagtaattgctggcggatcttctccaagaggaaggactgtcatggctttccacgtcttcatgttccacacagttagtgaagcaaaacccaggtggtcaatatagttagaac

SEQ ID NO: 33192 - DNA, 1069 bp, Glycine max
  Clone ID: PAT_MRT3847_129978C.1
atagcaaaattatcaatttcataggaacctaaaaacaaaaaggttcataaggatttaaaacagcatgtcatcacaattgttgatgcttcactatagaccacattatcatacctactagaacactacttcattgcaaatgcaatggtaacaacactcaataaatctcaaaggaacactacaatgcatcctaaaaccttgatcatctttcgttcagtgttaatcttggtatgttattttgccattttttttctcagttcagcaacaacttcagaatttgtctgagtttgatgttcttctatagccaacatcttcttcaactccatgatttgttcctcataccaacaaattcttcatttgttgtaaccttcagctttagcttcttcatttgtgtgacaacaaatgattcaaatccacattacttctacaacccacattacttcccacgccaccattattttcagagtcttggttcaatcatttcttcaaatcatcatcccaaacccaaaatctacagttcttaacttcattccactcagcacatcaccaaaataacttgtttagatgcttgttggttcacgattgtagttgaacagccgacttctcgcaaaggcaatgaacaacaccatcagacccaatcgatgaatacgaaactacaagtaataccattcacaacgaacatgaaccctactcgacctttgtcaaaccaccacaagtcaccaccaactcagatttttctcctgtcaacaacccatcttctgttatactcctcatcctcgtctcagatcagcaaccctaaaaaaaatcaaacaatccaaaacaacaacttacccatgtccagattttgttaccactgttcatcagtcatcactatcaatgtataggacagtacaattacaaatatggttgtatggggggcgcattggtatttaaagcgtaggtaacaggttttctatcatgaagtgaatgcccaggggcaagcccatcaacacccaagaaattatcaagaagaagagcttgtctgtgttgttttttcagcaacttcatccttttcagcctttgcactcgagcc

SEQ ID NO: 33193 - DNA, 789 bp, Glycine max
  unsure (1)..(789): unsure at all n locations
  Clone ID: PAT_MRT3847_129979C.1
ctcagtgttacatagtactaataaagttcacactcttatccttacacatctcccactattataacattacatcactcccaacttcccaactctcttgattgaagatggttggaattggggttccaatatgcgtgcaatgtggcaacaccagcaacccccggtggcacaaggtggtggggccaacgctggggtttctggcgtttgcggcggcggcggtggtcgagtggccggtgggggctctggtgtattgctttcgccactccaaagggtcgcaaaatccatgggtcatcccgctaccgtcatatacccttcagtcaccaatgccatccccatctaattaaagttctaactctatatatacatatatatatatatatatatatatatatatatatatatatatatatatatatatatatatgttaataatgttgttatataccagtatatggttttgatgcatggtatttacgactgtattaatctattatatacgttgtccttccttttttaattagtgacttacagttgcgtaccaatgcatgttatgtgtaacgcttggattacgcagttgttcagttaatttgccttttaggtatgtatcacataataaacttgagcaatctttttttgcctctttttactttgataaacttatggaaggacttttcgagaccagatatatatactgaatttggcagtgnnnaaaattaaataaaaaataattttctattgtaagaaattatgcttattttgttaaaagagaaaaacatttttgaaaaaaaagaa

SEQ ID NO: 33194 - DNA, 413 bp, Glycine max
  Clone ID: PAT_MRT3847_12997C.1
agaacactaacctttattttattttccccccaccaattgtctctttgtaaaggaaacaacatcgatgccttgttgggccagagagcaggggccgttgggtgtttctgtttcctgacaagttatttatagatagcctttattatcattatcattatcataagaagaagaagaaaagcaagtaaaaaggtttcaagttttaacccatttgttttgctttatctttttcacttttcagatcctttttctctcaattctgagcagaaaacttatatccttgtctgaggttaacttttttcatcggacacaacagacaacaaccagagcaagaagaaccaggttttgtttgtgtgtctatttcagctgccaaatatggataggagcgggcaaataccagcgtttgggaactgggatta

SEQ ID NO: 33195 - DNA, 246 bp, Glycine max
  unsure (1)..(246): unsure at all n locations
  Clone ID: PAT_MRT3847_129980C.1
gttgtggcaaanccaacgcgagcacaaaatggcaaatacaagtttgcttgatttccaacacagcctctcaaggaaaaaatacccgaggaagccatcacgtctgttctcctgggaccggcagaactcggggtcgaagaatgtatttccttttttctaaggggggggagangaagcaggcgcccgacacggnagaaaccaaccaagacgggggggggggggggggggagcacaaagccaccacgaagg

SEQ ID NO: 33196 - DNA, 175 bp, Glycine max
  Clone ID: PAT_MRT3847_129981C.1
ggcgaatttcatgtggtgcataagaaaagaatagtctttatagcagagaagaagagacagctttcacagagacccttttaccggcaagctcaagataagggaccgttttgtataactatccggataacgcttacgcaagcttttcccaaaatggttccgggaccaaaaggacgcc

SEQ ID NO: 33197 - DNA, 800 bp, Glycine max
  Clone ID: PAT_MRT3847_129982C.1
tcgacccagcgtccggaagttgtgtcccgtttgcgtggtctaggtcgggggggagaaattcaggataatgacatttgagttgtcagcttcccaggttctcctggatccttcaagtgggagggtgtgcaaggatcattcagtccattaacctctgttaaaaggatatctcagaaaaaagactatgacattgcccttgttggggcctttagaagggaaaaggacaaagagatggaattacaggcactaagagatgaaattcaagcgtccatgaagctggtgaaacaaagagaagatgagatacaaagtttgaagatgagactacgttttcgagaagctggaataaaaagattagaaacagttgcttctgagaagatctcagctgagacacacttgctaaaagaaaaagaggagcacttgaaggaaattgaggtcttgcgggcccaggtggatcggaataatgaagcaactagatttgctatggaaaatttgcagctaaaagaagaaattagaaggttaaagtcattttgtatggaaggtgaacgagaacggatgagtgaacaaatcatggtattggaaaacaagttgttggaagcactagattggaaatttatgcatgaaacagatctgaaaacaaattctgatttgatgatggaagatgtacataatgatggtaatctcatctccaaacaggagtcaagtccaaaatcacgatggcagtctttgcttagggaggaaaatgagtttctcaagattcaggctatacaaaaccaggcagaaatggatacaatttgcaaaaagct

SEQ ID NO: 33198 - DNA, 257 bp, Glycine max
  Clone ID: PAT_MRT3847_129983C.1
tcgagaacgaggcttccaaaatgttttggtatgcaagatgcattgacaaggttgtttccttttctgctgtgaagtttatatgaatatatgtctccgttatgaatgaaatggtagccgtggaacaataaatataggaagatgttcctgtgtcattattgagcaattatactgtcaggactgtagcacagcctcagcttaagctcttgacatataaacttgattagcatgtgatttgtttgtgtatcagtatcagtttt

SEQ ID NO: 33199 - DNA, 424 bp, Glycine max
  Clone ID: PAT_MRT3847_129984C.1
ttacggctgcgagaagacgacagaagggggggggaatataactatttaagtattatgtttatgtagatagcttcggtttttgtttggggtgaacttgtacatatatagcttctgaagtcgttgatatgtcaataacttcttgggtgcattgtacatatataatgaactgaggttattgatagatcagtattggaacacacgtcactgtctcactgaccttatttctatcctcatttctcaggtttccaattattcgaaggaagtggaggagatgaaacatgtaacaaagcaagaatttattgcatcattgcggaggtttgcttgagttgtcctattaaaattctagcattgtacttctacatacgcagctactgaatattcggatttcaatcttgcaagaaaagtaatggtttcttcaggggag

SEQ ID NO: 33200 - DNA, 362 bp, Glycine max
  Clone ID: PAT_MRT3847_129985C.1
aaagaaaagccatgcctaagaaccacaacattttacgggaacctgagatccaattttccagatgggccaaaattaaaattaaaagccagcccattttagaaccaaccggttggggccggattacatggacccaaagggtccaaacttcaattttaattccattaaaggtttattccggaaaccggaccttcccttttaagtatttccattttttttaaggtgggagggcaaagaaaccccattaacccttaaattagcttagaacccaggctttttaacttttaagttttttaacttagggctggtttaacaatccttttcttcctaatcctaatactccctttggtcttaagaaggggcgt

SEQ ID NO: 33201 - DNA, 541 bp, Glycine max
  unsure (1)..(541): unsure at all n locations
  Clone ID: PAT_MRT3847_129986C.1
ggctcgagcgcagccatggattcggagttccccaacaaagcgttaacgagcacgcgtttttccgacctgaatccaccactctctgaaccggttctccaagccctatcacactctggcttcgagttctgcacccctgtccaagctgccactattcctctgctctgcagcttcaaggacgtcgccgtcgacgccgccaccggttccggcaaaactctagcttttgtcgttcctctcgtcgagattctacgccgctcctcttctcatcccaagcctcaccagaagtaaaagcagacctaaagaaaatagaggaggaaggagcaaacatattgattggcacgcctgggcggctatatgacataatgaatcggatggatgtcttggatcttaaaaaccttgagattctgattttggatgaggctgatagactcttagatatgggattccagaagcagataacttctattataactctcttgcctaagcttcggagaactggtcttgtctctgctactcaaactgaggctatngaagagcttgctaa

SEQ ID NO: 33202 - DNA, 1872 bp, Glycine max
  Clone ID: PAT_MRT3847_129987C.1
atggattcggagttccccaacaaagcgttaacgagcacgcgtttttccgacctgaatccaccactctctgaaccggttctccaagccctatcacactctggcttcgagttctgcacccctgtccaagctgccactattcctctgctctgcagcttcaaggacgtcgccgtcgacgccgccaccggttccggcaaaactctagcttttgtcgttcctctcgtcgagattctacgccgctcctcttctcatcccaagcctcaccaggtgctaggaataattatatcccctacaagggagctatcaactcaaatatatcatgttgcacaacctttcatttcaacattggctaatgttaagtccatgctccttgttggtggagcagaagtaaaagcagacctaaagaaaatagaggaggaaggagcaaacatattgattggcacgcctgggcggctatatgacataatgaatcggatggatgtcttggatcttaaaaaccttgagattttgattttggatgaggctgatagactcttagatatgggattccagaagcagataacttctattataactctcttgcctaagcttcggagaactggtctgttctctgctactcaaactgaggctattgaagagcttgctaaggcaggattgaggaacccagtgagggttgaagttcgagcagaaacaaaatcagaaaatggtcctgcatcatcaaaacaaccagaatcttccaaaacaccttcaggacttcacattgagtacttggaatgcgaggcagataagaagccatcacagctatctgccagggagaaagcactagcttcatttacatccctttcaaatggaattcttctatgtacggatgttgcagcacgtggactggacataccaggtgtagattgtatagtgcagtatgatcctcctcaagatccaaatgttttcatacatagagtaggtcgaactgctcggctgggtaaacaaggtcatgctgttgtcttcttattaccaaaggaggaatcttatgtagaattcctgcgtataagaagagttcctcttcaagagagaatatgtgctgatgaagcatctgatgttgttcctcagattcgttctgctgcaaaaaaagatcgcgatgtcatggaaaagggaattaaggcctttgtctcttacatccgtgcttataaagagcatcactgttcctatatttttaggtggaaagaacttgaaattggtaaattggccacaggatttggcttattacaacttccttcaatgccagaggtaaaacaccactcactttccattgatggatttgaaccagttgaagatatcaatttgggggacattaagtacagggataaatcacgggagaaacaaaggaagaagaaccttcaagcaaagaaagaagccaaagagaaagagccaaaacctcaaaaaccgaagaaaaccccaaatgcacccactgacatgcggaagaaaacagcccgacagagacgtgctcagcagacaatggaagacgaggaagagttgatgcatgaataccgcttgttgaagaaattgaagaaagggaccatagatgagaatgaatatgccaagttgacaggcactgaggaattactttgaaagcaaagtatgcatgcctgattatgctgttctggatatcatggttgctgttgtaaaggtattcagtaaagaatggcagtttcaaacaaaaaattttggctagtaaattataatattcttgcccacggattactatactagttaacacaaaaggcaagaatttgtgatttgactttgacccattaacacactaataggtggctgctgtgaaaatttagtaatgataggctcaaggagactattctatct

SEQ ID NO: 33203 - DNA, 319 bp, Glycine max
  Clone ID: PAT_MRT3847_129988C.1
caggtggatccagatgcatggcattcagccaatgaaccaacataactgatgaactcgtggctacaaatgagaaattgaaaaacataaccgagactaaaggggactcaagtgagtggacaggcaaataggaactcctgtagctttatttgaactacattcggattacttgtgaacccgtatcttttggttgaatatttgtagatttggtttatttattcaaatgcattttttttatgtaactatgcattctcattggagcaagacgtgcaattggttgatgggagcaaaacgtagaaaacaagtcatattttttttagat

SEQ ID NO: 33204 - DNA, 3073 bp, Glycine max
  Clone ID: PAT_MRT3847_129989C.1
ggtctgggccggacctcccccggggagcgggtctattgagataagccagcgactgaatccgatggcgaatgagggaagcgacattgacgaagtgaactatgcgttggatggcgtgggagaagaagaagaggacgaaaatgcagcacaggaggaggatgacaatgacatggaagaagatgaagaggaatatactttcaggttcaaaaccgggatgaatcctttggactttgttgatgataatgatgattctggcattcaaccctaccagcggttcgtgcgtcttgaacgggaagcccttgctgataaaaagcgaaaagcacctgaacaatgccatagtgaagaaccaccttctaagatggccagggaaggtgatatttctggggcaaagatagctgagataatggaagcaatggattattatggtatgcgcaagagatcgagaaagcctaaaaaaagaggcaggcgaaaaggatcaaagaatagagttgaccctaagctaacacagatgcagggtgatgccacgtttcactatgcatgtggcgattatgaccgggctaaagctgtgttgtgtgaagttattaggctggcaccaaatttgcatgagtcgtatcacacccttggacttgtctatacttcactccaggattataaaagagctatggccttatacttgattgctgctcatttggatccaaaagagtcacctctttggaaaacgatttttacctggtccatagaacaaggttatgttgatcaagccggttattgtcttttaaaagcaataaaagcagatcccaaagatgttactcttagatttcatcttgcaaggctttatgctgaacttggacattatcaaaaagctgctgtgacatatgagcaagtgcataaactctgttgtgagaatattgatgcactgaaagcagcagctaagttctacaaaaaatgtggtcaagttgaatactccattcaaattcttgaagactatattaagagtcaacctgttggagcaaatgtaagtgtagttgatctgctgggtaccgtattgatggaaactaaggcacatgatagagctctgcagcatattgaacatgctcaaacagtaaatgcgaggaaagaattacctttgaatttgaaaattaaggaaacaaccggaatttgccatgctcatcttggaaacatggagagggctcaggctctctttaatgatttgaaaccagagaatgcaagcaagcatattgacttggttactaaggttgcagactcattaatgggtcttgaacattataatcctgcattgaattattatttgatgttggaaggaaatattgaaaaagaaaatggtcttctatatctgaaaattgctaggtgttatatgtccctgaaagaaaggtcacaagcaattctcttttattccaaagagaagagttcctcttcaagagagaatatgtgctgatgaagcatctgatgttgttcctcagattcgttctgctgcaaaaaaagatcgcgatgtcatggaaaagggaattaaggcctttgtctcttacatccgtgcttataaagagcatcactgttcctatatttttaggtggaaagaacttgaaattggtaaattggccacgggatttggcttattacaacttccttcaatgccagaggtaaaacaccactcactttccattgatggatttgagccagttgaagatatcaatttggtggacattaagtacagggataaatcacgggagaaacaaaggaagaagaacctgcaagcaaagaaagaagccaaagagaaagagccaaaacctcaaaaaccgaagaaaaccccaaatgcacccactgacatgcggaagaaaacagcccgacagagacgtgctcagcagacaatggaagacgaggaagagttgatgcatgaataccgcttgttgaagaagatgaagaaaaggaccatagattagaatgaatattgcaaaggtattgggaagcactggagattattaatctctctctaagattggcccatacatctctgtctactgaaaagaaagaggagcttcgatctcttggagctcaaatggcatacaacaccacggatcctaaacatgggtttgattgtgtaaaatacattgttcagcaacatccacacggtgttgctgcttggaattgctactacaaggttatctcaagattggaaaaccgagatacaagacattacaaatttgtacgtggtatgcaaggaaagtttgtggattgtgtgcctcctatcctcatttctggacatcagtttaccatatgtagccatcatcaagacgcagcaaggaaataccttgaagcttataaactattgccagagaatcctttggttaatctttgtgttggaacagccttgatcaacttagcattgggtttcagacttcaaaataagcatcaatgtgttgtacaaggtttagcattcctctacaataatatgagaatctgcgagaacagccaggaatccttgtacaacatagctcgggcattccatcatgttggacttgtaactctggcggctttttattatgagaaagttattgctatttgtgagaaagactatccaattccaaaacttcccaatgaaaatcccgatagcatcgaaactcacaaacctggttactgtgaccttcgcagagaggcagcttacaatttgcatttaatctacaaaaaaagtggtgctcttgatcttgctaggcaagttctcaaagatcattgtaccttgtgagtttacatgtaccttaatatgtacaaaattttagaagcatttgcattgcaatataatttattaggttttcatatatgataatggtattcatttattaagttactacagataccgagcaatagtgatttaaagacctactgcagtgcttatgtattttatttgattttttcttgaaactttgctttctgtatatattgagatgtctcttgggcgtcaaacatgagtcagactagcttgggtaagctgtctatattgtttgacaatacagaacacgtttttccactcaaaaaagagaaaaacaaaaaaaaggggaaaaag

SEQ ID NO: 33205 - DNA, 1387 bp, Glycine max
  Clone ID: PAT_MRT3847_12998C.1
ggggtgttttaaggctaagggcattcctattatggctttataaaggcaaagagagtcaacagtgacagtttaggcattgaaattctaagctttttcagaatcggggtcatactcgccaacagtaacacccacctacctgtcagcaacagtcactcgtttactaaattccccatccagatcacaacccgaatagtccctatcccctctattcccttccttaatttcccacattcctcattcaaccaccaatttcattttatttccctacctcgatgccttgtaaggccagagagcaggccccgtttttgtgtttatgtttcccgacaagttattaattaatttctatagaatagatagccttttcatcataacaagtaaaaaaggttttttaagttttaacccctcttcgctttgcctttttcacttttcagatccttttgctctaaattctgagcagagaatttatatccctgtctgaggttaatcttttttttttttttttttatcgggaatcccctccctccctgcctacggatcgtgtcattacattcctttaaagttcaaaccccacacgcgtccgcccacgcgaccgcccacgcggccggaagaagaacctgtttttgtgggtctatttcagctgccacttatggataggagcgggcaaataccagcgtttgggaattgggattacgcaaacgagttgccaatcactcagtacttcgagagtgcgagacaagctggtttagttcgttacagttcctcctccggcgaaagtgacccttacgtgcgtgcagaccgtgacctttacgccgttgattttaagaaacccattcgcaacatcccaacttctactctgaaaaaggcgacgaggagacagggtggttaaaggaagggaaaaggagaatgtgaagatgaatatgagaaaacaggggaaagtgtgcgacgtgacggaacaggcaatgaagccagtggcagcgatgcatctagacgacgccgttccgcgacttcccaaacctgttgacgaagatctctataagatcccaccagagctacttggcacaactaagcggaagaagaaaatgctgggtttcatttccaagtgtctctcatgagcctagtctccaaggactttttctgagtagctatgtagtgctggtttttgctgcaccccgatgctaatttcactcttttttataaaaatataatgtatgttaagaatgaatgtagtaattgtcttataatttaatggctttcgtctcggttcatttattattttgattttgtcggtgcctgcatttattgttatctttgaattgaatatttgtttctattgtgcccatatgcatctgatgtcatactaattcttagtcacggtgaagttcctcct

SEQ ID NO: 33206 - DNA, 2274 bp, Glycine max
  Clone ID: PAT_MRT3847_129990C.1
aaaagagctatggccttatacttgattgctgctcatttggatccaaaagagtcacctctttggaaaacgatttttacctggtccatagaacaagggtatgttgatcaagcgcgctctctggctttcaagcgtccgggaaattgcataaaggacgaacacattgaacggcgttcggcagcgaagttgctacaaactgaacggcggcgcagccatggattcggagttccccaacaaagcgttaacgagcacgcgtttttccgacctgaatccaccactctctgaaccggttctccaagccctatcacactctggcttcgagttctgcacccctgtccaagctgccactattcctctgctctgcagcttcaaggacgtcgccgtcgacgccgccaccggttccggcaaaactctagcttttgtcgttcctctcgtcgagattctacgccgctcctcttctcatcccaagcctcaccaggtgctaggaataattatatcccctacaagggagctatcaactcaaatatatcatgttgcacaacctttcatttcaacattggctaatgttaagtccatgctccttgttggtggagcagaagtaaaagcagacctaaagaaaatagaggaggaaggagcaaacatattgattggcacgcctgggcggctatatgacataatgaatcggatggatgtcttggatcttaaaaaccttgagattttgattttggatgaggctgatagactcttagatatgggattccagaagcagataacttctattataactctcttgcctaagcttcggagaactggtctgttctctgctactcaaactgaggctattgaagagcttgctaaggcaggattgaggaacccagtgagggttgaagttcgagcagaaacaaaatcagaaaatggtcctgcatcatcaaaacaaccagaatcttccaaaacaccttcaggacttcacattgagtacttggaatgcgaggcagataagaagccatcacagctagtacatatcctgataaagaatctctcgaaaaaaattattatatatttcatgacttgtgcttgtgttgattattggggagctgtccttccttgtctttctgttttgaaaggcttctccttgattcccctgcatggaaagatgaagcagtctgccagggagaaagcactagcttcatttacatccctttcaaatggaattcttctatgtacggatgttgcagcacgtggactggacataccaggtgtagattgtatagtgcagtatgatcctcctcaagatccaaatgttttcatacatagagtaggtcgaactgctcggctgggtaaacaaggtcatgctgttgtcttcttattaccaaaggaggaatcttatgtagaattcctgcgtataagaagagttcctcttcaagagagaatatgtgctgatgaagcatctgatgttgttcctcagattcgttctgctgcaaaaaaagatcgcgatgtcatggaaaagggaattaaggcctttgtctcttacatccgtgcttataaagagcatcactgttcctatatttttaggtggaaagaacttgaaattggtaaattggccacaggatttggcttattacaacttccttcaatgccagaggtaaaacaccactcactttccattgatggatttgaaccagttgaagatatcaatttgggggacattaagtacagggataaatcacgggagaaacaaaggaagaagaaccttcaagcaaagaaagaagccaaagagaaagagccaaaacctcaaaaaccgaagaaaaccccaaatgcacccactgacatgcggaagaaaacagcccgacagagacgtgctcagcagacaatggaagacgaggaagagttgatgcatgaataccgcttgttgaagaaattgaagaaagggaccatagatgagaatgaatatgccaagttgacaggcactgaggaattactttgaaagcaaagtatgcatgcctgattatgctgttctggataccatggttgaaagcaaagtaatgaatgacagtttcaaacaccacaattttggctagtaagttactagattcttgccatgtgggtacactgtaggcatctaatctaataatataaaatttgttaatccaaaaattggcatggcatacatggacgatgactagggtttaatttttttcccactttaggaaacaaaaatatgatctaatatggtacattagatataattaacggttaaaataactggagactacacag

SEQ ID NO: 33207 - DNA, 271 bp, Glycine max
  Clone ID: PAT_MRT3847_129991C.1
tcgtacggctgctagaagacgacagaagggggctcctgtttgctgtgatagctatagggaagaggattaaaacgaaagtgctagtaatgcttgatactactgttggggtagcatatgaatgccatggctgatactaccatatgttccctttccaaatgataactgtgtgtggtgggcattacagcaatagatgtggctatgtgccatttggaggctcgtcgttgaagctaacaacgaagtcaagggggaaagcgttttttgctgttgcgga

SEQ ID NO: 33208 - DNA, 353 bp, Glycine max
  Clone ID: PAT_MRT3847_129992C.1
cgaatttccgggttgaccccacccttccgataaaataaaccttattaaccatccccttctaaggatcgttgtggtcctggcaaatagcgttctttcttccgtcatgggataattcgggcaataatccctatgcttgagtgggattgctctttaacgatacgcagctgtggccccttaattctcatcaccatttccgccgaaagaagatagaaccaagggttctctgccgtgctatcgagataccgtgagcgtaattggtgtgcaattgtttctgtgtacatgtttgaccgtttatctatggataggacactggacatgttactctatgacttctgtgatccggacttctaatg

SEQ ID NO: 33209 - DNA, 516 bp, Glycine max
  Clone ID: PAT_MRT3847_129993C.1
cttcttcaaatcatatgaacaaattaatacaaaattacacaatgtgatgatatttatatattacatctgtcgtaaccagagaaccacgatggttctgctagtttggcaagctcaccatactctgcattattagtaaagggctcaaactgatcattaacactgtttggctcctttgagttgtcataactgggcatgacaccatcgtcatcataagtcggtagtacagattcctttggcaaacgtgcttctgcaagaagctcattaagtgtgataatctccttttcgtgtttattcttcaacttatcaatttgtttgtaggccttggcagcttcctgttctgcatccatagcctgtttctgtgcagtagtgacagcttcttcagcctctttaagccgcaaaagcagttcaccagcagcttgcactgcttctgcagtgtccttcaactgagactgaagccctttattttcatctcttaagattcgctgttctttttctctttctgcttttaaagctgaa

SEQ ID NO: 33210 - DNA, 1327 bp, Glycine max
  Clone ID: PAT_MRT3847_129994C.1
cgttgatcagggagatggagtgtttgacaaggtagattaatcatatattacgtacgaactataaatcgttttacgatcaaaatcatagcttcattcgtaggctatcccgagaaacacgcgaacaatgtggtgagtgcatcatgcaagcctctgcaattgtctctgtttctgtctctttcttccctttttcggaagtcagcgtcaccgcttcatcatcggtgaaatacccaaaaccagacaccgcgatcaactgattacaacagtttcttcatagcgagttctgtcttcaaaatcattgctttatgttggtgtctttctgggttggttgcttcttccacaatggtagagagagagagagagagagaaagaaaggaaagaaagagtttggaggaagatagagcgacatactgagaagggggtcctactgcttaattttttaggggcatcaacagtctctgtccatgatttttacttgggttgggtggtgctgctgtgtcctcaaattgacccatccaatcaccatcactgtattcagcatcacactcctttctatctcaccattttgatcaataaaccaaagcttctctctctctctttggtcctttttccatcactaggaggatttcaaattggtcattgagggtggctcaaaagctctgcttctggtcaaacgggacaaagtggatctcactcatatgaagagactttcaactttggtggatgggtttttggttcttgcattgttcagttgtagcacatggacagtgtggagcagctcatgctgcaatcagataaactcgtacgaagtccggcctcacagtgtcagtattactgaatttggagctgttggcgatgggatcactctcaacacaatagcatttcagaatgccatcttctacctaaattcatttgcggacaaaggtggagccaagcttttcgtcccggctggccggtggttaacaggaagctttgatctcatcagtcatctaactttgtggttggacaacgatgcagtaattcttggatcaatgaactctgacgactggccagttgtggatcctctaccatcatatggtcatggaagggagttgccgggtggaaggcatagaagcctcatttatggacgcaatttaactgatgttgtcataacaggtaacaatggaactatagatggtcaatggagtatctggtggaacaatttttggaacaaaacactgaattatacgcgtcctcatttggttgagttgatgaattcaactggggttctcatttcaaatgtaactttcatgaattcacctttttggactattcaccctgtatactgcag

SEQ ID NO: 33211 - DNA, 1089 bp, Glycine max
  Clone ID: PAT_MRT3847_129995C.1
ggaaactaaagcgtcaaattttatttttcaaatatctctttcaacaaatagttaaataataagtcccatgtcaaattagtcatcacttaacaacagtgcaaccttgactaactagatgaggcatgaatgatcaaagcaaagtacataatatttgctagtgatttagatgttcttagattttgttaaggacttagtcttcatcttttccaccatcttctctttgacaagccttctcattattttcccagagggtgactttggtatggcatccacaaagtgcaccactctcactttcttgtaatgtgcagcattggaggcaacatagttcatgatgtcctcctcactctcttttgcacctgggctcaaaataacacttgcagctgggatttcccctgtctcttcatctggtaatggcactacagctgcatcttcaactgatgaatggcttagcaatatggcctctaactctgcaggagcaacctgggtgaagccatccattcttgtcaatggtttgggcagtctcatcctcctgtttatagtaaccttgcattacacattggcttcttacacagagttccccgggtgtgttccttgggagggatcgaccagtgtcaggatcaacaaacttgacttccaaatttgggaggatgaatcccactgagtttttattagtacttcccaatcctttttgtacataagtgagtgtgatgcagctatgctcagttagtccatatgcctcttggacagcaacgccagggaacttatgttcaaaagcattaaggagttctggtgcaagtggagctgctgcagtcataatggcctggagttttagctttctgaggtcaaattcatccactattggatttttcaccaaggtgagaatgatagggggcacaatgggtgcaaatgtgacctcatgagtgatcaaggcattaagaaatgttttcaactcaaaccttcccatcaccacaactttccctttgctcttaagagtggcacaacatattccagtgatgccataaatgtgaaagaagggaatcaagcctagtgtggtgacctgaccctccattcctttggtcacaccaaaga

SEQ ID NO: 33212 - DNA, 463 bp, Glycine max
  Clone ID: PAT_MRT3847_129996C.1
acggctgcgagaagacgacagaagggatagccacagtgatagttatttgtactcaaatatgggaaaataacaaacacgagtattgatatttttagcaacaaatgttgctatcaaaaacactcacaacgactatgtggttctattcgtggaagcatacaaatctgttagttctggagcagcaggtcaccgatcgaataactaattaacagttatagagttggttttcggctttcttgtgtgattctataattgtttttaaaatggatcaagtcacatggagtctgcctctcgctgtctctcattttgtttccttctcctccttcccctttggttttctctgcactacttacttagaattaggcatggaattatgctgagctgaatcgaattaggcttaaatcaagcttaacgtgattaaagaactttatacttttaaaaatacaagagaagcttaaaattaaac

SEQ ID NO: 33213 - DNA, 442 bp, Glycine max
  unsure (1)..(442): unsure at all n locations
  Clone ID: PAT_MRT3847_129997C.1
ctantcgaaggagagactgagctatggcgagctcaatgcgcgggccaaccggctggcgcatcatttgatcgagctcggggtcaagccggaccagccggtggcgatctgcctcgaacgcagcctggcgatggtagttggtctcttggcgatcctgaaagcgggcggcgcgtatctgccgctagatccggcttatccgtcggcgcggctgcggcagattgttggcgatgcagaaccgaaactgctgctttgcgatgtcgccggtcgaaccgcattgggcgccgaagccgtggccgatgtgacggtggtcgatctggagacggcgaccccgacttggggcgagcggccgccttcgaacccggacccgggcgcgcttggcctttcatcgcgccatctcgcctatgtcatctatacctccggctcaaccggaatccccaagggcgcg

SEQ ID NO: 33214 - DNA, 406 bp, Glycine max
  Clone ID: PAT_MRT3847_129998C.1
atcgaacatgccctcgctagtgctttttaggggcaggatcgaaaccagctagcgggggctgaccagtgcaaagacaagatgaaggagcttgatagcatttgcaacccaatcattgatacaatgtaccaaggtgcacgggctgccctcctgtctgtatgcatggatgaagattggtctgacatcgggaggcggtggagctacaccccactatgcacgaaccagattagatctgttaattttttagatggcctgggcctgagtggtacctatctcgcttccacttcctactttagataagaacgaatatattgtgccattattgaggatactaacaccagatcatgcggtagattattctcatctgggggtttagaatcagtctttccacattcatctggatagagac

SEQ ID NO: 33215 - DNA, 510 bp, Glycine max
  Clone ID: PAT_MRT3847_129999C.1
caaaaaaaaaccgggcccaaaaaaggggacccaaaaggtcccaccaaaaattcaaaattttattaagggggaaaaatttatccccctttttcgtcccaattcccatccacccttttaaggaaacaaaagttttgcctccttgaccacaacccaaatttttggccaaaaacctttgttaaaaaaaaaccgggaaaaaaaccgggttctaagttttttcccccaccccaactgggggggcccctttcttcaagaaaaaaattaacaaaaaacccctgttaatcccaaaacccttaaccaaagggttccaaaccccatttttccccggagccgaaaaacccaccccatttttgggagggggcacccccaaaaaaccccccccccccttccttataattcccggcaaccccgcaaaaaacttggcccaaaaataaaacggccccccccccggggaaaaacccgggggccccgtctttttggggagcaaggggatattttccaccgcttggggct

SEQ ID NO: 33216 - DNA, 1675 bp, Glycine max
  Clone ID: PAT_MRT3847_12999C.1
cccgcgtccgtgccgaacttctttgcgagtttagcgcagagagagagagagagagagagagagacatcgctttataaaggcaaagagagtcaacagtgacagtttggcattgaaattctaagctttttcagatagggtcatactcgccaacagtaacacccacctacttgtcagcaacactcactcgtttactaaattccccaaatctaccttacccatccagatcataacccgaatagtccctatccccttccttaatttcccacattcctcattcaattgattccttccaccaccacaccaacaccaaaacactaacctttattttattttccccccaccaattgtctctatagtaaaggaaacaacatcgatgccttgtaaggccagagagcaggccccgttttgtgtttctgtttcctgacaagatatttatagatagcctttattatcattatcattatcataagaagaagaagaaaagcaagtaaaaaggtttcaagttttaacccatttgttttgctttatctttttcacttttcagatcctttttctctcaattctgagcagaaaacttatatccttgtctgaggttaacttttttcatcggtaatcccctccctccctacggatcgtgtcttttctttccctcattacattcctttaaagttcaaaccactcctccaaccgcaccctttttcttgtaggacacaacagacaacaaccagagcaagaagaaccagtttttgtttgtgtgtctatttcagctgccaaatatggataggagcgggcaaataccagcgtttgggaactgggattacgcgaacgagttgccaatcactcagtacttcgagagtgcgagacaagctggtttagttcgttacagttcctcctccggcgaaagtgacccttacgtgcgtgcagatcgagacctctacgccgttgattttaagaaaccaccgattcgcaacatgccaccttctactcttaaaaaggcgacgaggaacaggggaaggaggtgtgttgtggttaaggaaaaggaaaaggaaaaggagagtgtgaagatgaatatgagaaagcaggggaaagtgtgcgacgtgacggaacaggcaaggaagccagtgacagtgagcaaagagatgatgcgtctacacgacgccgttccgcgatctccgctgcctcgtggtgttagacttcccaaacctgttgatgaagatctctataagatcccaccagagctacttcgcacaactaagcggaagaaaatgctgggtttcatttccaagtgtctggttcctgctgcttgcgtttcatgatctccattaaggactgcgcatgtgcttttctgagtagctagctatcttgtgctggtttttgctgcaccccgatgctaatatgactcctttttcttatattaataaaaattatatagtatattttctgaagttaagaatgaatgtagtaattgtcttttaatttaatttaatggctttcgtcttggttcatttattatttatttaggtatggcttgcatttattattatcttcgaattgaatgagtgtttgttggtatcgaatggtggaccataatatatgcctctgaatctctgatgtattccctcacccgaaaatactacattctaggggggccccacactattgaattttgcaaaaa

SEQ ID NO: 33217 - DNA, 603 bp, Glycine max
  Clone ID: PAT_MRT3847_1299C.1
aatacattctatcttatctattgaaactttacttaaatttaaatcgtccttcacaatacttatccattttcatggcttgatggaccaacaattgtcgctcgcataacgcgcatccctttcaatatatagtgattttccgtacacaaaactcaaaattttttccccactataaataatggcataatctctaaagtccgaatcatctcattctcatcaagttattatcaaataattaattaaattcctcgtggaatcttgttgaagccatgtctacagctggtcaggtcatcaagtgcagagctgcggtggcatgggaagcagggaagccactatcgatagaaaccatagaagtggcaccaccccagaaaggtgaagtgcgtttgaagatcctcttcaactccctttgccgtacagatgtttactggtgggatgctaagggccagactccgctgtttcctcgtatcttaggccacgaagcttcggggattgtggagagcgtgggcaagggtgtgacacatctgaaaccaggtgaccatgctctcccaatattcactggggagtgtggtgaatgcacctattgcaagtctgaagagaacacctgtg

SEQ ID NO: 33218 - DNA, 421 bp, Glycine max
  Clone ID: PAT_MRT3847_129C.1
atgaagggtgtttatgaacacacaaagcatcaaaaagttctatttattaacagatcagacatggacctacacacgtattgatatttatcactcactaaacacgaatactaatgccccctacattcatacacaaattctaacgaccatataacagaactttctaaataacacaatgaatgccgagcgaaaaaaaaaacatttaaacctgggtgccaggaaaggcccaaatgttaatatggcagcccaatgctgtcgtaggggaaccccaaatggcgagcgcttcataggatccgagcctactgacaccgacactactggtaactaaagcattaacaaggaaaaccattatgacgaccaaaatggcgtagctcattaacgaccaataaaagatcgccgaagccagggtccatcccttaatttc

SEQ ID NO: 33219 - DNA, 263 bp, Glycine max
  Clone ID: PAT_MRT3847_12C.1
gagctacgacgatgcatgcacgcgtactttagctggtaatttggctcgagactttttgctctagggctcgaaaacacgtatcggaggcgccaatgctctcaaggatctaggattgacatatcttatagacgcctgaatgcaaactctgcgaaatgagagcggtattactgcatggaatccaatttcagatatacaaggtgtatatgtgcgacaatgtgcatgtgtgtattgtgagtacaggatgactgatcatagcctatact

SEQ ID NO: 33220 - DNA, 140 bp, Glycine max
  unsure (1)..(140): unsure at all n locations
  Clone ID: PAT_MRT3847_130000C.1
gtgcgggcaggtcgccggcacgtgattgcggcctgtgccatgggtgtaacactcatggcgacaaccatgcacatcatcgcantcacgtgcgggcangncgccggcgacgtgtctccgngnctcagtnacttcgaagnggc

SEQ ID NO: 33221 - DNA, 406 bp, Glycine max
  Clone ID: PAT_MRT3847_130001C.1
attcccggggcgacccacgcgtccggaccaaacaggctcctggtaagcgacggaaaccgtgcaacagcaacactagcgctgctgaataatggatctgatggcaaacgaggatttccagcacattctgcgtgtgctgaacaccaacgtggatgggaagcttaaaataatgatcgcaatgaccttcatcaatggtatagctaaggagattcgacaacatcgcttgcaagaaggctgatgttgacatgaacaaaagggctggcaagttgactgctgctgagagggatagtgtgatgactgttgtggcaaaccctaggcatttcaggatcccaagcctggttcttgaacagatggaaggattaccgggatggcgaatactctcaatgttgatgtctaatgcatcttgata

SEQ ID NO: 33222 - DNA, 321 bp, Glycine max
  Clone ID: PAT_MRT3847_130002C.1
ggctcgagagaaccctcaacacactacacatacagactgtgacagactatcatggtaaccattagccacagatctgtctgtgctgtccaagagctgatcgatatagacggtcatgatgaaataacacgttcagccgaagacgagacactggatgagcctaataccgaagaagcaagaaaggctgccgttaagaacgtgaacgaacatgagccaggcaaggcatgtgatcaggcgaccgatgctgaagactagattgctcaggctgatacggctctaggaatatgacaaccgatgctgaactgaagaccacaaacgaagcaa

SEQ ID NO: 33223 - DNA, 166 bp, Glycine max
  unsure (1)..(166): unsure at all n locations
  Clone ID: PAT_MRT3847_130003C.1
ggttgtgttaattggcgtgcccgggaatttgcccccccttaagccgtgggacaatggaaaacccgaaaaaaaaatacttttccttagggctggccctgcttgggttacctttcttctttaaaggggngggaactagaaaccccctgaaagggaaaaaaggtaatcc

SEQ ID NO: 33224 - DNA, 349 bp, Glycine max
  Clone ID: PAT_MRT3847_130004C.1
attcgttccaagtatgtggagaaaagatgggcttcaaaaggtggactacagccagcttcaaagtcagctgaaataatctttaactcgaatgaatcaccagctgctagggccaagagtgccactcagaggaataggagattgtctcttgaggaaagcattcttgtgaaacatgtggcacaaattcggcctccagtcacgagatatcatgagggctcctcagattttcaaaagaattcaccaccaccaccattaaggaagccatctgcatcatttgattttgactacactaggggaaagaacaatggtattgttgatcattttgacttgttttccatccatgatgataaac
